United States Patent Application Publication US 2006/0134663 A1 - sequence listing, part 136

SEQ ID NO: 454325 - DNA, 825 bp, Homo Sapiens
  misc_feature (391)..(423): n is a, c, g, or t
caggaaaggatgcagggagcattggactgtaggaaattctcctttatacaagttaattagttttgtctctggtggctgtctcttaaaacagaatcccctggagacccgggttttcattttgtaattcaacacccaaatatttgcaacactaaataacaactccctataagacttcagtcttgcatgggcataagcaactcacactggttagcttttgtcagatttcgtcgtttccgcagcaaaatttcttagtgttgatgttgatagcttctgggttggcaaactggcagttcactctagtcttactgggttgggcaagtccttgcccctagaaaattggggatagctttggccatgggaggagcaagaacactacgcagtcgtaagctcnnnnnnnnnnnnnnnnnnnnnnnnnnnnnnnnncggcaccattatgtacgatgaagacttacagccacagcataggggacactttgaggagccctagtatcattgtttgaaatcattgtacagggaactgcaggggtgaacaccattgtaccaatccccgggccagtgtctcatttcctaacagaatcatcccattcttgttcactcttcagtcatcccaagccaaaaggggaaaattcggaaacccactgtgacaccccaaccctaatttccaacctttggaggactcacctggggcagaagggagaaagggctttgctgaagtctcaggctgccgagagccatgtatgggcataggagcaagctgatggcatggctcttgacaaggttttctatagggcagcagctgctgctcccagggaaccctctcctgtg

SEQ ID NO: 454326 - DNA, 922 bp, Homo Sapiens
tctggaagcccggtcaggttccggtgtattgattgaattgggagatcctgatccagtgggaacctggctcctgattgtttgggtgtttggaggcctcattcacacttgtggcttctgatcattaggcactgaccttggtacaggcacttttgctccatagctgaaatttaaagggctgttcttgactgcaggcagagctgatttctgaacatggactgtggggttctttcttgattttcagtggcaggccatgaaaagccaaactttcagcctgatagtctggtacaaactgctcatcattgtcaggtacctgagcttctgcaagccatgtttcctgtaattgacttagatcttgaaagagttcttctgaatcatgagccagatctctgttaatgaattttcttttcctgacatttgttggtttctcgttacaatttctcccacgctgactattggtgaccatgtaaggcacttgctggtcataaaatccatccatgctgctgctcttcgcaaatctcagctcagtttttatattttgagcatttagctggagatttcctcaggatctggacttctatcaacctggatccaaagagagccaacagagttcacaatttacatattttcggtagtagcaaaaatccgaacaagaggcgatgtatttatttacactctcgatgtttccctgcgcggtcggtgtaccccgggcagctctgattcgcaaacgtgtgcaaaactagcaatggcgatcaacgagacttgctttgcacctaacgggatgtacttgacgctttcacttcctctccagcttttaaacagccagagcccagggttgggggcgagcggtgagatggctcgggtttccaggacaataactaggacgttaagcactgagggctgcatctctgaagccacttccgct

SEQ ID NO: 454327 - DNA, 495 bp, Homo Sapiens
gtgttttgttgttttttgttgctgttctcccaggggcggttcttggtggctggcgtgcccttggtgatgctggccgcacccaggccgttgggctggccccggcacgcttcaccagaccgtgttcgaggctaggcatggaggccttggggtcgccgtcgatgcccgggctcgacatcttcctgggcacgctctcggcccgggtctcctggctcatgccaacggctgtccgtccgtggtctgacctgcccgtcattggggagtcccggcatgggcgttcggcgtcgcggggtgccgccggggtgactggacatggccggcagggcccggccgcgccctgcgccccgcgtcccgtcctggccgggccccctcggcagcgcacggaaaggagctccccggtgggagaggatcggccgccccaagcctcccaccggggaggctgaggctgtgcccagataaataaggccgctttgcagggaaccaggcggccgccccgct

SEQ ID NO: 454328 - DNA, 790 bp, Homo Sapiens
atttttcagtacagattgtcctctgcactccacttgttcctttttcttctggccaatggaaagcccctttgcctggatgtggggctattttggtgtaagaattcagaatgggcaagtagttcctggagtcggactttttctcaccagtgtgacatggactgacaggagatggtacaggtggatgaaggaataagagctgtggctgtgctgagatcacttcaaaggagggctggacagtccacgactggagctgggatgagctgctgccctgtttgacaagcacattcttcatgacgaccatgggagacagggtagggaaggcattctttgcagttttggagttctgcctcggcctgtcttctctgctccagcctaaggcgctcagcatgtcctcggactccatctgctctgcagagctcagacattccgagctcccatctgaaaagccagagtccttgtctgactcagcagcagccatcccaagctgacgagccactttcttcatctctgtgcctttgcctactttggcagagagtcttctggggctctctctggatgggtttttcctctccatggtttattcagctggaggcagattcattggtactcttttcatctggactgccctagggccggggtcgcagctccacgaccggcctgtgggtcaggtggcgcatgcgcgagcacggccccgcggcaccatgacaacctcgtcgtcgctgggtgtctcgctatccccacagcctcccgcccatttctcctccccacgcctccgcgacggcattccgct

SEQ ID NO: 454329 - DNA, 771 bp, Homo Sapiens
agcgggcggccgagggaatgcgcgcagctcacaggccctgggagtgagctggtgcccggcgacctggcacccgcgcctggatatggggcgtctacatcgtcccagtgagcagcaccatgctacaggaacctgtccgcatctgtttctgtttttcctcttcgtgaggacccttcagctgcctcgggagttacagaccgggccaccgagcttctgtacagcctaaacagagggactacccgcgggggtgctcatcggcagcctggccgaggacctgcggctgctgcccaggtctgcagggaggccggaccggcagtcgcagctgccagagcgcaccggtgctgagtggaacccccctctctccttcagcctggcctcccggggactgagtggccagtacgtgaccctagacaaccgctctggggagctgcacacttcagctcaggagatcgacagggaggccctgtgtgttgaagggggtggagggactgtcgtggagcggcagcgtttccatctcctcctctccttctgactcttgtcttttgctgctggatgtgcattgtcctgcctcaggaatacttcaggtttgtgaaggtgaagatcgccatcagagacatcaatgagcaacgccccgcaggttccctgtttcccagatctcggtgtgggtcccggaaaatgcacctgtaaacacccgactggccataagagcatcctgctgtggaccccagatgtcggcattaatgggggtacagactatcgctttactggacttac

SEQ ID NO: 454330 - DNA, 454 bp, Homo Sapiens
atactgctttttgaaatactaacttgcaagttcagcaacagctaagaaaacaatcctagacttggaaattgaaagattggaagagaagtggagggattcctttggaaccctttacgtacgtatgtgtaaggaattgtaggcatccagtaccctgctgactctgacatgcccccagcctcccccagctctgcagggagccctggtgccagagaccttctcccatttctccctatgggtgcctgacctgagggcagagacatctgagtgtgtataagcacagcaggacaccaggacctggcctgaagacatttcctctcctcccctctggatttctcagagactgttctgcgatgaccacagcaaggtaccggcccacctgggacctggccctcgacccgctggtgtcttgctaagtttgttttggggagtacttatggactagtatcatcctatc

SEQ ID NO: 454331 - DNA, 912 bp, Homo Sapiens
agcggctctgctctgagctctgttggtcccagccaggagagcccgagtcatgaggtgggcacccagtgggcagggtgggcagcaggggccctcttggaggcagcagtgagttgggaagaggaggccgggccccacagcgggcatgatggacaagttccggatgatcttccagttcctgcagtccaaccaggagtccttcatgaatggcatctgtggcatcatggccctggccagtgcccagatgtactcggccttcgacttcaactgcccctgcctgccgggctacaatgcggcctacagcgcgggcatcctgctggcgccacccctggtgctctttctgcttggcctggtcatgaacaacaacgtgtccatgctggccgaagagtggaagcggccaccgggccgccgggccaaggaccccgctgtgttgcgctacatgttctgctccatggcccagcgcgccctcatcgcgcctgtcgtctgggtggccgtcacgctactcgacggcaaatgcttcctctgtgccttctgcactgccgtgcccgtgagcgcactgggcaacggcagcctgggcacccggccttcctgcccccgagctcgcccgcctgcttggccgggtggccctggcctgagatctacgatggcgaactggctgtttggcccgagaggtggccgtgctgttacctccgttgcatctcccaggcgctgggctggtccttcgtgctggtgaccactctgctggcatacgtggtgcgctctggtgcgggccctgcttcacgcaggccggccttcctcaagaagcaagtactggtcccaactatatcgaccatcgaagcgcaagctcttagaacgagaaggtgcacggggcaacgcccaaagcctatgacaaggtctggaatccagcaggcatga

SEQ ID NO: 454332 - DNA, 822 bp, Homo Sapiens
gggtccccttgaaaatgcaatgttccagccaaacgagtcaatctcggagtgtaaatcttgtgaagctgtattttaacagctcacttggtgatttatttgtgtacgctatttaaaactctgtgaaccaccggttctaggctatactttgcagtgtattaaggtggttcttcggcacctctcgcagacccccttcctcttgcctctagcgccaacctcttagcctctcgcataccaggggaggggctttgcaaaaccttccacgaaagtgaatcccagcacagccctgctgtagctggctctcaggcgcaagcgcagagctgcgaccgctgctgatacgtcgctcagtctcagtgtggtctctgttttgcaactggtcgtccgcgtcaggagacttaggtccaggcgactgcccagacaatgactggtcccgcataccgagcagagcatgatcagcagcagtctgagtggaagagtgcctgtgatcttagggaacctgatgggcgttggagcagcggttcgacgcatgggtttctctttaatccttccgacttccccaagcccagcgcactcaggttccgctccaagtgcgggacccgcccggggtgtgtcgggggtactcggccggaggccgccggtgagtgaggcttacagggccccgggaccaaggtgggtgctcttggaggttctggaaggcggaaacacgggttcttcgagggaaacgggcgaaagggtcgcgggtggtttggctgcaggtcgggtcaggaggcacctccacggttgggacgccgcgtggcgtggggtcatgaagcccctcagcccgct

SEQ ID NO: 454333 - DNA, 781 bp, Homo Sapiens
aggtctccttcaaccgcagcttgactgcatgttgaccagtgtccggtctctgtagtcccagtgcaaggaccaggatggcgcaaaaaggcattgtggatgttctggatacatggcactggtccactggatctccctgccagtccctgagggcatcttggatttggtcaatgatccctcgcagcctccgctctacctcccgacgcttcagccggtcttgccgcccgatgagcacaaggttgagaagcagtaacaggaacaaggccgaggcattcaccagcgcccaccccacaggctcccggctggctgtcccccgcagcagcccagcagcagcagcacggccagtagcatgagtgaggcaccaccaggccagtggaagcaggagcagcggttactgtggctggaggaagcatgcttctccacacctccttccacgtcagacacgttcttccgctccctgagatgtccttccatgcactgcctccagctgctccttcatgacgctgagggccttccgcgtggacaggcccagggctgagggaggctcagcccaggtgcttctccttcaggtccatgggccaagagtatctgcaggcatgcccagatgaatgtggtcacccctgaaaggaaggctcctccccagcatgtacaaacccacagtgagtctgtcacagtcacaacatcggggccccggggctggtcttcctcgcccgcgtcctctcccctcccaaccccctcctcacttcacgtcccctcctccggggtccgcagccatgtccccgct

SEQ ID NO: 454334 - DNA, 967 bp, Homo Sapiens
agcccacccagagcacctgggagcatgtgggctcccacagagacaggctctgtggccacaaggctcacctcacagctcaggctccggacacaggcctggcggacaatgctgaagagctgggggtggctggggtgctggtggctgacgtatttaatggaggtctctttatcatggctgatatatcccgggtgccctgcagcaagtgaccggcagcccttggcacatgtccgactttttgggccccgggctgcttggactcgacgctggccccctctgcggggctgttgcgcacgcatccgactgttcatctgaatgccaccttcctcttcttccgcctgctcaccctggccaggactgtcctcattcccatccccttgaggaagtggggcgtgcagcacctccgtgcagaagagagtgcgggggccgtggagctcgcagaagtggcagagagccacgatggcattcatggtgccttggagactgcaacaggcctgacgtttctgcagttggctgcttagctgcacgagctgctccggcacctgtcctcctgctgagatacggctgagcacgagtggtcacactgacactcagcagaatcacgcttccaccgtccacaccagaccaccacacacgaggctgctgccaaatgggtcaggcatggtggtggcagacacccttgaagacctggcgttttctgctccccaaatcgaggcccgcgggacacctggactcggcagccggggtcccgctctgggtcccagccccacccctgactgcgctgggtaggtggtcgctgcgggacccggaccggcggaatcacacccagagcccccaagcccacggcagggatgtcacccggggtggcgaggctctcaagcccgggttcaggctctcaggggagctggcagaaccaggagcgaccacactcactcgcggtcccgcagccccgccgagacccaccgccgct

SEQ ID NO: 454335 - DNA, 797 bp, Homo Sapiens
acagacgtttgtgatatgaagagtgtgggctgattccgcatgacctgttcatctcctgtggcagcattcgctgaaatatagaccttaggttgactacgggacatcagctcatccgtatttggggggctggcagctatgtaaacagtgggctgatttctgtttaaggtctggctattgactgaagaggaagtgctggaggttcgaggtccagaagaacgcagttttgaagaattatttctttgtgggggttcaagtttgatttcaatctggttttttcgaggtcctgttgaaatattctgaatgttatattggctatgggcagaagactgtgagctaccagatgaatgaatggttggtggttgtgaagtagtaggtgaactgattggcatgtagacatgagaggtctggtggccttgctgatttggctgttgagatgaggtatgtgacagaggattagatgcaggacaagtagtccagggaccaggctgtgaaggctgataaacttgctgagggttcatgggattaaactgagatacccagccagaatgctgttgtgtctgtcgagttgtaccaccaggagttgtaatgtaaggcctattatagagaggaattccctggcgaagacaggtggaggtacacatgaggcaagagttgggaaaaggaccggcccagtcatggagtaatacgactctaaaattagccatgaattgggagcataactctggcgagtgtcgttgagaaaaggcctagatagttccattatcgactggactatcgagtgtaatgcgatcatcgct

SEQ ID NO: 454336 - DNA, 703 bp, Homo Sapiens
taccatcctaatttttgtgactcagtttttttagtagtaagaggggaaaaaataatgctcattctactctacatccctgaggtttcaataatactctcttatcattgttcagcaatttactacttaaaaagcatttttgtgtacatcttctctactgaggctctgaatacatttttgaagtaggaaggaaagacttctccttttttggagacagctttctcaactataggggtgatttgctcccatgtgcagttggttaatggcaagaacattgactcaactattggtgtttattattcccagttcagtacttgcatcattaagggtccttttgcttgtaattggcagaaatcctacctcaaaatggcttgaactaaaacgaaatttgttgcttgatagacctaaaaagaacatgagtaggtctggctttagttgctgcgaaggctcaaatgaggtcactgagatccatgtctcagggccctttcctctgagtgtcggtttcatcatcaagctgcctctcttcatgtaaccaattagctgtagcagtcccaacctcctaaactcatcctacgcattccaaacagtgaaaagttttctttttcagaagctacaggagagctttcttttgatcttcttgttctgaatgtagtatttgccctattctggaccaatcattgttacctgtggaatggaccagtccgct

SEQ ID NO: 454337 - DNA, 838 bp, Homo Sapiens
agcgggtcctggaggcctctgggcgcgtgcgcgggcggtcgctacctgcggccgagccaggagcgagagggcgcagagggcagcgggcttgtggcagcatgaggcccggaggggagcggcccgtggaagggggcgcgtgcaatggccgctcctgagctggagctactgaagctgcgctcggcggagtgcatcgacgaggcggccgagcggctgggggccctgagccgcgcgatctggagccagcccgagctggcctacgaggagcaccatgcccaccgcgtgctgacgcacttcttcgagcgggatccgcctgcggcctccttgggcagtgcagccgcactaccagctgcccacggccttccgcgccgagtgggagcctgccggaggccagggcaccgagcgccactgccacgccctgctgctatcctggggcttcctcgtgcgatgtacgacggctgctgcgccggcatcggcacacgcctgacggccacaaccgtcatcgctgagggtcgtgggctgcgcggcatgcgcgtgggactgctgaggagggcccttacgcagggacctccccatggccgcactccagccaggtgaaccggtagcttagtcctttgagaaccccctggcagacgagacgactggtggtcgtggccatagctcgattttagcttgacgcaggggactctagacaccattctggatgtgcgttgggatggccagacccagtcacgaagacgaatgcttgctgattctaccaggattattggctgagagcagtgactgtgacttgtgagaactactagtgcaaaaggcgtctcgattctgccttctaatcgca

SEQ ID NO: 454338 - DNA, 779 bp, Homo Sapiens
agcgggcatttggggctgaagttccctgtgggaggctgttttctgagggagctgagtgtttacagccactcagccctgctctgctcagctgaagcagaaaacagagaccttttgcattactttggttcaagagcaagacaggaggcgactgcatgagaccatggctgagacacctagtcctccaggcactgaggaactccaggtcattctgtgggtctcatgggaagccagcacctctacctgttcctcagaagatcgtggccacctgggaagccatcagcctgggaaggcagctggtgcctgagtacttcaacttcgcccatgatgtgctggatgtgtggagtcggctggaagaggctggacaccgccccccaaatcctgccttctggtgggtcaatggcacaggagcagagatcaagtggagctttgaggagctggggaagcagtccaggaaggcagccaatgtgctggggggtgcatgcggcctgcagcctggggacagaatgatgctggtactcccacggctcccggagtggtggctggtcagtgtggcttgcatgcggacagggactgtgatgattccgggtgtgactcagctgacagagaaggacctcaagtaccggctgcaggcgtccagggccaagtcccattatcaccagtgactccctagctccaagggtggatgccatcagtgccgaaatgcccctccctccaggaccaaggctgcttggtgtcaggacagcaagtcggcaaggctggttgaacttcagggaactctc

SEQ ID NO: 454339 - DNA, 815 bp, Homo Sapiens
cggtcttccactatagcgtattgagcgattccctccaagggcccacatcaactggaaggataaccataaatgccaatccatagtacaagtgaaaccagaattgaatttttctggtcaactatccaagctggcaagggcaattccaaagcttgtggcttgaggcccatctggatttccaaattcttcccaatttttcccgggactcttcatccgttaaagcagcataagcttttgctatcctcatgaacataacctcatcacctcctttatctggatgatatttaagtgacagcaaacgatattgttttttaatttctgctactgtggctccaggatccaaatttaatacttcataaggattgtattcttggtattctcggtctgttttggaaactttatatgcaaggaataagaacaatgcccatcctgcaagcagaactattttctttactgtaggaataatatttggctggggttttaataaccgtaaacgataccacatacaccttccatatacttttctgatagttcgtttaatcgaatttgctcggcattctgatctcggggccagaggtagtatgtcgccgggatcacgatgagccccacgaaggaggtgaggaagtagaagaaggtgttcccactgtcatcgtactggaactgctgcccggccatggcaccccctcctccgcctcgctcttctctccgccgccgccacgaccacgctctgcactcccgctcccaacgccccatcccgagtggcgtagcttggacactgccgccgccgcctctcctccccgcccccacgcctctccgct

SEQ ID NO: 454340 - DNA, 783 bp, Homo Sapiens
gatctctctgaagactgcttaattccttgtgctttttgcatcacacaattcaaattcccccacaatttggatttcgcattcgtgcaaacccacattggataaactgcttttttgtcaaaattggtttataattagaattgatcacgaagaagcttagtagacagccatctataaagcgcaagtcatttttttgctatgagctctacattggattccatttataagttctgttacataaggtgagtatgaggtaaaagaatagctgatgatgggcaaagatgctgctgggtctcccttttatcaaaacctacacagtccacctcttcaggataatttaagcaaagcggagcacctgttcctaggttcccgtaagcttctttttaagtcacctgttgccattacttaacatcagattcagctccaattcttgaaatcgtctaattttttcacctagcagagcacagaccagccaatcccatctgcctaatatttaggaggaaaccaactgaagcaagataggttcacaaatcaggtacacttgatgcttcaccgcaagaccttcaaagctgggagcttctctgtgctccaggattcctcgctgccgattccacaccgcgttcaagactcctgtgaagagcgatccgctgagatcgtcctcgacggccagtccacttctaacttgcagctgagaagttctttctgatcttgatggtcagagtggctcgtgactacgatagtgagaacacaaggaatctatagcgaatcgtacaaccaccagccgct

SEQ ID NO: 454341 - DNA, 972 bp, Homo Sapiens
  misc_feature (575)..(575): n is a, c, g, or t
cagatggacacagatacgggtccactgaggaatcgagcacgaggtttgctactagacttataggtcactctctcagacgttgggtggtaagccgtccagcctgtgctggaggccacgaccttgagctgccgcaccaggggatttagcagcttgcctgccttcagcttgctcttgctggtttttctccggcggccagtggggggtgccgtgtggaagaagcccacgttggggggcagtggcttgcccaggcggcggtacagagcttcgatctcctgcttctgctggctctgcagctccgagatctccttcaggtgcttctcccgcagactctgcagctccttctttatgtcagcatcctcgagctccgaatcattgtcgctgctgatgtaggacggactgggaatggaaggaggtcacgctgatcgtggggaccttcatgcccaccctgctgggtgtctcggggcccagcgagccggcccgagaaggcctctgcaggaaggcggtggccttcttcacgaagtcgccagccacgctgccactcacgggcagggacgcctgcttctgcaccgggggtncttgcccgagggccctcgtccccagagtcgctggacacgggctcgcccacgccgacctcgatggaggaggccgtctgcgcccgccgcactgccagcttcacgtcggggctggagggggcctcgtccaggtagacgtcgggtggggcagagtatctcaggctgtggggggaggccagggtccactcgtcctgagtgctgaccaccgagaaacggcccacagtcttggctggtgagctgacatcctgctgctctggacgtttccgaggggaccccaaagctcgagcgccgagtgtctgggggtggctagcctggccccccactgtgcccatgtcactcggcgggggctctgccgagctttctccagcttctccaccatccctgtctgtggcctcccgct

SEQ ID NO: 454342 - DNA, 462 bp, Homo Sapiens
  misc_feature (25)..(25): n is a, c, g, or t
  misc_feature (434)..(434): n is a, c, g, or t
gaggccctccccgctaaggaccccntgcccaaggccagtgtggggctcactgcagacagcacgggcctgagcgggaaggcagtgcagacccagcagccctgctccgtccgggcctccctgtcttcggacatctgctccggcttagccagtgatggaggcggagcgcgtggccaaggctggacggtttaccacccaacgtctgagagagtgacctataagtctagtagcaaacctcgtgctcgattcctcagtggacccgtatctgtgtccatctgtctgtatttgttcttttgtattttatcacctcctggcccttggttttctccccccaccccctccctgtcttcattacctttcatacatttcataggatgcctcccccaccccatcgaagtcacctatttaatatcaaagtggaaccccatgagccggtncccctggagcggcggccgcaagggaatc

SEQ ID NO: 454343 - DNA, 1254 bp, Homo Sapiens
  misc_feature (1172)..(1208): n is a, c, g, or t
cttctctggggccccttattgcagattcccgggattctggaactggtatcgggaaagactgccggccgggttctttgggcctcaacgtcaaataggttccccgtgtcagtatttctcgcctctgatcccgctggaactgtcacacttgaaatcagtggttctgttctctggacttaatctttcccgtaacggggaattgagttcagcagactttttgccttcagataaattactcttgccatgacgtgtgttacttcctatctccaagcaatgagtttgttcctcctcagacaatacactggctgtgactggcgttttctcaccaatctgaagagatgcctttccatctatgttgtcagacttatttaagcactgtgtgtcattactagtttgtactacacagctgtctgtcacattactgctctggctgttctgtcggtgtgaatgtgggtcaggaattcaaaagttctttgtgggctggggagatttgtgctctgtactgaaatctctcatgcttaagatggctgacatttggcggcccataaagattgttgctggttgatacaatcctcttgacatggctgttcctgagttaatcccctcgtgcactgcaaccttttctctgtcttcatctgtcagttcctcttttagtcccaggctatcttttgagcatagcatcttcttaatttgagtctcatattcgagcttcagtttttgaagcttctctgtatttgtggtgaagtgtacaacatgagcttggacacgctcaaatcgctttaaatattcttggtttcgagtatgagccttcttttcagattcacatatttccttcagataattctttagttttacatatttcagcttaactctgcatgtatcagactgattatattcataaagtttcttttccaggtccaatctcttcttttcactgtcccgcagcccgtgctggagttggcccagcctctcgtagtagtcgggactcgacaggggcacggccgatgcgagggtccggctcatgctgctgccgctgcgccagctcagcacagcctctgggtggccgttcggccggggttgccgaaggagaccgccccaccatgcaccgcgggtaaacaccgcgccgggccgcctccgctctcgacgaattcgagctcggccgatttggcctgatnnnnnnnnnnnnnnnnnnnnnnnnnnnnnnnnnnnnncgccgccaccgcgataacacccggttccccatagtattgatcatta

SEQ ID NO: 454344 - DNA, 809 bp, Homo Sapiens
  misc_feature (767)..(767): n is a, c, g, or t
agcggatttagcttgctttttaaaaaaatcttttcaacttgttttacttaatcttgcctagtcacaaaataagatgtgcacccatggtttggagagttcctatattagctgagcagtgagatacactatttccaaacggtgcacacctacagtagctttggaaatgagccaatcactgttttacttaatggttcttatcagcatgcaaatattgcttgaaagttatttccttattcactgttttgttagtccattttgttaggaaacattaattcctaaaaatttgttcagaataattaaaagtgaacatttggtgctgatactcaaaaacctacaaatgtagccatttaaaaagtaacatgtttttctcccctgctcattgcctgggagaatggaattttatataactacctttctttgcaaaaataacggtcgtgtcgagttggtggtgattttggcattcaatcttgcactggtttctagtataggcttagaaataattggtcaggtaataatctttccagtcaagttgcaagggatgcttatttctcttcaaaaaaagacatcctgcgggcattgagtagaaaacttttaggtcagttttgggtgcttatttgtaactatttttcctactacattggcagtttagcagttctttttttctggatccagatacaagtgtcatgcgtttatcttacagtgggtgaaactgactttcttttggttgggtgggtgaggatttcttaaggcctgatagaatatatatnctgtgaagtttgttaatgtacatattagattgtattggattt

SEQ ID NO: 454345 - DNA, 1039 bp, Homo Sapiens
  misc_feature (256)..(265): n is a, c, g, or t
  misc_feature (304)..(304): n is a, c, g, or t
tgggggaaaggaaaagcaaccagttatggctgtcgacaaccccgcaaatagtacgcagaagtcggcggcaaacagtgtgcgaataataggaaccccaggaagaacttctaaaggaaaacaccagtggtccaagtaagcggaaataaccccccaaaacttcctccaagacaccggtggtttctcaccgaaaaattaaaggtcgtgctcagaagactgcctgtgggaagctccccaccgggtggccgcaagaaaccannnnnnnnnngcgtggggcccctggaaacccgccaagggaacttagaancggggagaacacccttgttgggaagaacacgcacggcgataaacagattagggtgcccctgatacgcgaaggctcctccaacgggcaaacatcacaccacaccccgtggagattctcgagagagatcccagagaggacacactctgggtctacactctatttctacatcgctgtgctgccacaatcacacctctccacaaagtgggagaagtgtagtatgccacagtttgggggctacaagctgtttggcccaacacccacagggagttgtgggataaaaagttgtgtataaaagaagaatgtatatataagttagagaccccatccccctcccaagaggtcacagttaaacacaacacaggtttaatagagcccagaaaatagcgctcacgtgaagttgaaggatgacctacacggggacttatctcagatttatttgtcgcttatagtttcatagtgcccccataagagtatagaatctcgaaatcgctgacaagagagtacctttggtaggccccattcccttttctccccccatctggagaggacgttacacccttgctatagagtgtcctgtgactgcccagtgatgtagattatgctcctaccccaggaggggcagcttgagaacagaaaagcaacagctggaagacatttatattacctctgtattcagctcattggactagcatctttcatggtgtgagactttctcatttactcatttgtcccgct

SEQ ID NO: 454346 - DNA, 949 bp, Homo Sapiens
  misc_feature (215)..(223): n is a, c, g, or t
gtgctaacacccttgacatcctctttgcctaccggccaccccagacccccttcttcccaaccaaattaaatcgcctggctgggcgcacgcatctggtagtcgcagctactccggatttgaggaaggaagatcgcttgaacgcaggaattcaaggttatagagactatggtcaacccctgcactccaccttgggccaagcgcagcctctctctctnnnnnnnnngtttcacaatgttcactggttttgatccggggttaaatcccctcccgccagtctcctcctcgttgatgctgtcactgctgaagatgcattttcttatcacttcactcatctgctcaaaaatcttcaggaagtcttgacttgcagcattaaaagttcaaatgccttggctgaacattccagtcttctcccactctgcccttttgcaatttcatccctgtctttggtagaggtcacaaagcgtgccaggtcagagtcagaagacagtgaattaaagtcagtgattcgtgtgaccaaccagcatacgtgatcttagcgctaactacgctcagttgcactgggccggggctccttcccgttcctaaggaggcgggaggcgtgtcgggcagacttggattgtcacaggtcactgccatctctaacaagcggacttcgtgagcccctttgcgcgccacaaagtaggacccatctcgtgcatcctccttaccctttctacttctagggaccacatggcctttctgtggccacttcttgctgcttcgctttcgccttcctaagtagactaggctttagaagagctcacaataccagctcctttaaggtcgacctccatcccggtcacaaggcacttgcctcccactcttcacttgggacagtcctcttcacagtcagaatccgccacgtagtaagtgccgcttccaaccaatcaagaggcagttagcgcccgct

SEQ ID NO: 454347 - DNA, 564 bp, Homo Sapiens
ggctggcctgggcgggtgtgggggctgcccatcactcagctgcttcactcgtttgcggtgggatttgcccgttgaatgcacctgagcctgggctgcagagttcagcttggatgttgcacacctcacagaaggagaaaagaattttcttgtttctctttgctcaactggtcctcaggcctgtcgttctttatcccctttttcttcaaagccccgtagaaaatttgccatattcatgattccatcttcaagatggttgtcagggcttaaggagtacctcatgcattgggttgtgttctaaaagtccctttataagtcagctgacaggaatttggacatattttcttattcttgtagtgaaacaaactgtttttcggtttccaggttagcccataaacatcaatttaatatttgatggagttgaaatgtagaacatctcggcgcgcgggccgcgggcgcgtggggcagtggctcctccagccgggaagctgttgctcacgctccggtggttgctgcggtcccgccagggctgcaccggggcttcgcgcagacgttctcccgcgatct

SEQ ID NO: 454348 - DNA, 706 bp, Homo Sapiens
agcgggctgagcgagcggcgccggcgtcatgtgactgcccggagttggtgccaggagccagaggggagccaggagcggagccgcgcggagccggggcccgagccggagcgcagcgagagcgcccgccgcacgcgcgcccgtccccgtcccctgcggccgccaacgccgcccggactggagccctgacattgctgcgctcggggggctccaggcagcccgtatcggggcctttatttctcgtcggcggcgccctgcaccgcgcctcgcaaagccaaacaccagagcaccctagaaggtttaactaaaagaatgctcatgtttgacccagttcctgtcaagcaagaggccatggaccctgtctcagtgtcatacccatctaattacatggaatccatgaagcctaacaagtatggggtcatctactccacaccattgcctgagaagttctttcagaccccagaaggtctgtcgcaacggaatacagatggagccagtggacctcacggtgaacaagcggagttcacccccttcggctgggaattcgccctcctctctgaagttccggtcctcacaccggagagcctcgccttgggttgagcatgccttcttccaggcccaccgattaaaaaatactcacccccttctccaggcgtgcagcccttcgggcgtgccgctgtccatgccaccagtgatggcagctgccctc

SEQ ID NO: 454349 - DNA, 768 bp, Homo Sapiens
agcgggtttgtttaaagtcctttttattttacaatacagagccccagtcaattccacaatctcaatttcatacatgggaattttatttaaaaatctgtggtttggggttttaatgaattggcctgtgaaaatgagctctaaatttcctcccacgtacactcaaaactcaagattgctccaaatctctaagttcttccagcaaaagatttcttggcatgtatattcacttatacttagaaatattcattcttttaatttatgccagaataacaaagtggaaatcttatttcaaaatgctctttgtttttttgtgtgtgtttctgtagttctgctttctggggtagactagtaaaatggtagcttccagcattttgtccctggggccttctttatagggccactcaaatttaaataaaagtagtaaataatttagctaagtggaataagtataataattatagtggtaagcatagcacatcagcattatgccaacattctagactctttagttgatgtcattaaatggaaaagaaacttggattaaatgagtgtgctgctcaccttcccaagttctgttatttcaaacctgtgaactaaccttgcagttcattataaatcaacagtaacaactgcattctaaattactccctgatattattttctagttgtgtatcagcctgtctcctagggggttttcatttccctggaaggacatacaagtgccccagagcgcatgtatatgtctaccatttctctatatgagaaggt

SEQ ID NO: 454350 - DNA, 701 bp, Homo Sapiens
taggatacatggatctgtcttcaaaattcttgtccaaaatgggataactcgattttgctcctcttaaaggagttgttgtgctttttaagagggcacgtcattcacgcccatgccagtcgccactcaggaaacgtgtgtgacctcccccttcggatgcacaagtttaggtcctgcgatatcctcttcgacatctgtacttcatcggattatttacaagcctcctcttcattcctatggggtagatcaggcaatgccactctgcagagaaagctgcaaggtgggttcttccattcctgcacctcaagtgagatggctcttacgtagtcttccgccccgaaagggagactggcgacatccgaggagttgtagaaggttcacttgatctccttcgacgcttctattccagaatctcttaaccttagcggtggaaaaaataagggtctcccacggacgtctgcaaacagggaggaaggtctcccacttcgctgggaagccgaagcagcggcgctgggcgaagtagcaggaaggagttctcggccgcccgcgcttcccggcgctgcctggcaggaacctggcgcccggctgagtcccgctgctgcccactcgacggctggcgcgaagggcaatagcgtccgaaacacctgagtccggccagccgccgcggccgccgccgctgttgctaccgcacgggtctcaccgct

SEQ ID NO: 454351 - DNA, 1745 bp, Homo Sapiens
  misc_feature (234)..(328): n is a, c, g, or t
  misc_feature (417)..(513): n is a, c, g, or t
  misc_feature (517)..(642): n is a, c, g, or t
tggaagctgaggcagaggatcactgacccaggaggtgagtttccagtgagcttgatcgcatacttgtactccagctgggcagcagaccaagactccatctgaactgtttcctctctgccttgatgaaattccagcgtacattacagcctggctgctattgcgaacgctgcccaggcgttaatatcatagctgcagtactgttctggggaggaggtgtgcttctcttcattcaannnnnnnnnnnnnnnnnnnnnnnnnnnnnnnnnnnnnnnnnnnnnnnnnnnnnnnnnnnnnnnnnnnnnnnnnnnnnnnnnnnnnnnnnnnnnnnaacggaatcctcaatgagatattttaagaagttaaaaaatatttgtaaagagcatctatttggtttacccagttggccgtagataactnnnnnnnnnnnnnnnnnnnnnnnnnnnnnnnnnnnnnnnnnnnnnnnnnnnnnnnnnnnnnnnnnnnnnnnnnnnnnnnnnnnnnnnnnnnnnnnnntgannnnnnnnnnnnnnnnnnnnnnnnnnnnnnnnnnnnnnnnnnnnnnnnnnnnnnnnnnnnnnnnnnnnnnnnnnnnnnnnnnnnnnnnnnnnnnnnnnnnnnnnnnnnnnnnnnnnnnnnnnnnnncattaaatgttggctagagacttcattccttgacatcacatggacccctcaaagggctgcttataacatgacagcttgcttgtctcctccgcggacggtcttgggtcgcctgctgcctggcttgcctggtcggcggcgggtgccccgcgcgcacgcgcaaagcccgccgcgttccccgaccccaggccgcgctctgtgggcctctgagggcggcatgcgggactacgacgaggtgaccgccttcctgggcgagtgggggcccttccagcgcctcatcttcttcctgctcagcgccagcatcatccccaatggcttcaccggcctgtcctccgtgttcctgatagcgaccccggagcaccgctgccgggtgccggacgccgcgaacctgagcagcgcctggcgcaaccacactgtcccactgcggctgcgggacggccgcgaggtgccccacagctgccgccgctaccggctcgccaccatcgccaacttctcggcgctcgggctggagccggggcgcgacgtggacctggggcagctggagcaggagagctgtctggatggctgggagttcagtcaggacgtctacctgtccaccattgtgaccgagtggaacctggtgtgtgaggaccgactggaaggccccactcacaatctccttgttcttcgtgggtgtgctgttgggctccttcatttcagggcagctgtcagacaggttttgccggaagaatgtgctgttcgtgaccatgggcatgcagacaggcttcagcttcctgcagatcttctcgaagaattttgagatgtttgtcgtgctgtttgtccttgtaggcattggccagatctccaactatgtggcagccattttgtcctgggcgacagcagcattccttgggcaggtcaggtccgagttataattctcctacggttagggagcggttggcgtacttttactgcccttttgggcaccactggttcgccgcccccggtttgtgctctccttccttcccgcaaacggtcggggtttcctcttggtgcgccgccaaattcccgggggccgtgcccgtgggcacgcgcgggggtccccgaggttgcccccccgggggctc

SEQ ID NO: 454352 - DNA, 309 bp, Homo Sapiens
  misc_feature (203)..(203): n is a, c, g, or t
aaagtcaaatatgagtatgaattttattaccaccaatgcagccaagacacctctggcagctttcaggatagcacgccggagcgtctttagaaaatgttaactcaggaggccgggtgcggtggctcacggtctggtttgaagctgcttctttagtaaaactatttgctttcccttctacttttgtggaagggttctctgtgctngccgggaaacctgatttttcgtcatttccccgacaccaccatgggaaacgagaccatctgtgaacacagacagccgggcggaggggccgtcggtgccaccagggca

SEQ ID NO: 454353 - DNA, 624 bp, Homo Sapiens
agcggaggattttaaagcaggcctgtaaaaacttcttttcaactaggacattggttatccagtgtggtcttggggccccagcgggcccctaaggtcctttccatgggttcagagggtcaaaactatgttcataataatgacattatttgcttttcactctcattctctcaagagtgtacagtggggttcttcagaggctacgatgtgatatgtgataacccaaccaattgaatgcagaagctagatatgagaacctagttgtcttctgttaagccagacatgaaacaggtttgcaaaaatatcaaacaatgccacttttctcttaattcttcttgttttggcaaacagttattttcacaaaaatgtgttattcatatgttaatgtataatgggttatttttaaaatgaagtaatgaacagatatatccaattcctaatacagtaaatattgatcagatataacttatataaagaaaaactctttggggtcctcaaatcttcaaggtatcaaagggtcctgagaccaaaaggtttgagaaccattaggattcggggttccacggttctccgttccactctcataatagtgtccacctttcgatatcctcaggatgtgaacagccc

SEQ ID NO: 454354 - DNA, 761 bp, Homo Sapiens
tgttcctcaggttgcttgtctgttaaccagatatctccatagggatcttcgttattccacagcgccaggtaatgactcttcccgcctcttaaaggcctcttctggtttctccttgtgcgctctatttctgaagggagtttctaaagaaatactgttctgaagtctccccacagtggacgttatctatgcacaggatcccctggcctatcctgtttctcattgtaaagacatgagaccctggaaattctcatttgaatgccaactttaagaatattttgatatacgagagagttcaagctggggtgcaggtagcacttctcctggtacaccccatctgagatcgtcacatcatagcaataaaggggaggcttgggcaccgtgtcgcgtggctcatcctctaacaggtacctctggacggccagcacagttacaggcaccacctccgagggggtgacacactggcgaggtgagtccataatctgctcaagaaccttttggatccaggacctgggcccttgggaaccagctcttcggatcacccctcccgggaccccagcccgattcctctcagggttcggccaatctagccctgcatgtgagggaccagcctcaggctgtcctgactcaccagacattgttggataactgcgtacccgcttcactcccaaaagctagtttgccccgtccaaagcggagagaaataaaaccgcgcgctttggcgacgatcgctactctgcccctgctgacaggcacgacccgct

SEQ ID NO: 454355 - DNA, 808 bp, Homo Sapiens
  misc_feature (49)..(49): n is a, c, g, or t
agagggaccagccgggtcaaactacagagataggtcatgaccaaagacntatggtagaactcttcactgggacaggtggcgctactaaacgggtcctgtcttacatccttgggcagtcaggtttcttcctcttgtagtcaccagcagcagttcataagggtagatcttgtactctcgcatgccccagttgactgcgttcatgctgtcgtagtggaagaggtctgcgctgggtgtcctgtgcagcccatttcttcggtaggcaggcagggaggcagatttggagatgagtggatcactgtcagccaggtagtgcgaccgaggggagccattgcagggacatctcatagccagctgtgtgcagggcttcccggctgctggtggagctccggggaggggtccagggatctgcataggagctcgaccgggccttcatttcttccttcagaatcagccggccaattccactttggagcttgtgcatgctgcggtcaaaatcatcctcctctcctccagacgagaaccttctggctcggggcactttgggggacccatggtaggtccagtactcagactccgaagcatagtaggggtctggcgagtagatgggactgtacttggaggtctggctgatgtcttcacttgttttgctcttggttgctgtagacaaatcaccagagcggtagtagtggtgaggtgagcgggagaaggtgggggacatgccctgccggctgtaggtgggggagtctatgtaccccgggctggaggcccgtctctgccggaggtccaggttctcgtagatgtcgccgct

SEQ ID NO: 454356 - DNA, 442 bp, Homo Sapiens
ctcaccccctggatccagcattgggtcaccctaccgagtcatctgcgctaaagtggataatgagatccttaattacaaagacctggcggctctccccaaggttaagtctatctacgaggtacaacgccccgacctcatttcctatgagcctcattccagatacatgtccgacgagatgctggagagatgtggctatggagagtcgctgggaacattatctccctactcgccaggacatctgacgagaacctggacctccgcgcagagacgggcctccagcaccggggtacatagactcccccacctcacagccaggcagggcatgtcccccaccttctcccgctcacctcaccactactaccgctctgggcccgagagtggcacggagctctccataccatagccagttagatgtgagtcctccgactccaaactggcgcca

SEQ ID NO: 454357 - DNA, 664 bp, Homo Sapiens
  misc_feature (584)..(607): n is a, c, g, or t
ttcttccccgggtctcgttcctttggtgtcctgggctctctccggggtagtctcggtgggtctgacctccccggtgctttctggactggcggtgtctgccccctttgcccctagtttccttggctagtattcttccgtttgggttggatgtttgtgtacatggtcccctgctagccggttgggttgtcttctcgccggttcctagccgctccttcgcccccaccacggttggatcgtctcggctgtcatgccgggccctcgtccgtgccgtctccctcgcctcggtgacgccggtcacatggtgtgtccaatggtgctgtgcccgccgtcagagtcgcgctcactccgtcggggcgactgcaggagcagggtcccgcagcatccccgaggcctctgcagccgcatcattgccttccgtggtccgtcagcgcccgctcatatcatgggtgatggatgtctccgggcgtggtcgtgccggtttcctctgggaacgcggtactgtggtggggcggtgagatgacagaagaggaaagggcagctacttgggtgtggttccggctcggactcccgcagcggatgcgggnnnnnnnnnnnnnnnnnnnnnnnngcgctaggattgccgcgaccggttctcttcgctccgcctaaggctccgccctccgct

SEQ ID NO: 454358 - DNA, 837 bp, Homo Sapiens
ctggttcccaccacgggccgtcgtaggccgtgacgggggacgcagatgccgcagagccctctcatcctggcacttcgcagtgccaaggagcgcgaccaatatacatggggggtaaacaactccagaccccccccatcgcagttaaggcaccagaaaagggagatggtgtcacccgggggagagcttcccgtggaaagtaccctacggagggacgcttcccccagggcgcgcaacgtgacccaggtggcggggtctgcccctccggtgccgggatctcaagggggaggtgggagacccgagaatataactccagatccgccccaggaggcggggatccgggcaggcaggccggggcccgaggggccgtgggggccggactcccgctgccgcgggtcaggagggcgcggcagctcggccgggccaggcccggggcccagcgtgttctgtgcggggaggagcggccgccgcaacgccgcgcccgaagcccaggccccaggccccgccgaccgcccaggctccgcgagaagagcggcgggcacggcggcggctccaggttcgctcgggccggctggcagggcggcgcctctcaggcgggcgggcactgcggcccggcccaggatggggcgtcgcggtctctgcagatggaatcggtctcggagggaaaaaaccaataataggccccgagactgctcctccaggcggctacccggctgcctcccggccactcagcgcccgtcccgctcggatgtgcagtgccggtcgcagcacccgtccccaacacccccgccacctccggagaccgcggccgtaccctccacaaccgtgtatcagcccgct

SEQ ID NO: 454359 - DNA, 767 bp, Homo Sapiens
gggtcatagccaatatgagccatgggacaatcttctcccccttgtggtacacccccctggaaaggtatagtgtgtccccattggtgcacctggttcccgcaatggagcccgcccagagcctgttgcaaaagagggacacatagcgcctattcatttcggtttactaggttaatagcactgccacgctggacaagtagccagtttcattcccttccaccaattacgtataaatgcttgtcccaccgacatgcatagaaactggctcattctttccatgcactgggtggaacgtctgaatccagctattaaatcgaggatcatatcggctgaccaaatcttgtactgtgtttttccagttcggattccactggtcctctccacccagcacgcacaagaagttttgccacctccacaacgcagtggctgggcactgcttgtatggcactaattgtgagctagttttccagtgtcttcttcttcatcgtcgtaatacgtgaaccaaattgcctggggagccggtccggtccaggaggcagccctccaaccaatcacagcattttcttgttagagcgaattctgctggccaggctcatgccatgcagtgctgcctgaagggcatcaggtggtagttcatggcgtccagcagcagcttctggcagaccgggtcggttcgcatgaaatccactgactggacccgctccaccagctccggggccgggatgagggcgaagcggaggcgcttcatgaggtcaggcgcatactccgct

SEQ ID NO: 454360 - DNA, 982 bp, Homo Sapiens
agcggggaggaggtggagagtgaggccgaggcgtggcggagcccgggaactccctcctcctgaagtaacgcgtcccgggccggctctgccgtcgttgctgccgccgggcgccccgggacgaggaggtggaggagggagagggcccgcgggcctcgcctccgccctccgccacctcgagctgcggtagcagcgactcatgagagcgcggccggaggacagatttgataatggggctgcattaaaagtaaagaaaacaaaagtccagccattaaatacagacctgaaaatactccagaagcctgtcagtacaagtgtgagccattatggagcagaacccactacagtggtcaccatgtccgtcatcttcagcaaagggaacagcagttaatttcagcagtctttccatgacaccatttggaggatcctcaggggtaacgccttttggaggtgcatcttcctcattttcagtggtgccaagttcatattcctgctggtttaccaggtggtgttactatatcttgtggccttatctgattcactgaaggctagaactaccagaagaacctttcatttaagacgcggtgacacgattgcacatacttaaccactaccggacaggagcattggctgcggacgcacgatcaatcgctaccaggacacgcatgcgtatttccccgagccagctgtattgtggcggcctgccagaattcccatttcagcgccagacgaacttggctacttgtgccaacatggcgcgacacactgatgcttgaaaggactttcctttggggactccttgcaacatccacgccagggtacttctccttcagtccgcagacaagttgcaaacaccgctagtagggtgttatttccccttcccattcgcggaatggcactgcctctctcctggctgtcccctcgggaacaccctcacgtagacttccgacgttctgcaaagtgcgcgccaccctctcctcgcggc

SEQ ID NO: 454361 - DNA, 809 bp, Homo Sapiens
agtctttccgggtttcttttaattcttcctaaagtaatccccactcctctggattcaaaggttcgtttttggacttgaatacgtgttccctcacagggtgcccaaggcatgatcttcacgtttgagaattcaatccggtgatcttctccttagctgctccagctataaaaaaatgaggaacagaataaacttgcttattactgccctcatctttcctgagatatctggccttggcaatcagattcgttgctttggtattctgtggagacattgttttaagagaaaacaacctctgctggttcctgatgccacagcggtctgccagaaacagcgacacataagagtgccctgggcctagcccaaggtatgggctcttccaaagcttcggaaagcttcgaataccaaacaaatagaaagtcattatgcagtgagatcagcaccagatagtgagagagatgttgaaaaaacccctcttctatggcaaaattaaagagattgggggtcggcggtgcagagtcgaagtggaactttttaaaaggtttgtgtttcttccttacagacaaatcaaggttctgcttttggggctacttaaaagcaagaaggcaggtgagttttctctattaaacaacaatccggggatgtccaacgtcgcaagccgcaaaccaggggacagagcaggaatcctctggtgcctcttacattccagttcatgaaccgaacgctgacaaatgaagttcacttcattcaacaactcaaagcggcactcagacttaacgcggccataaacgcggcggaaactacataccgct

SEQ ID NO: 454362 - DNA, 407 bp, Homo Sapiens
cttcacagtttgggcttgtcaggttgccatacctgtgcagcagtagttccagcacttctttagtggaggcaaagcctctgtacgttgaaagaaagatgctgatataggtaaagtcattgtccccaaaagctgtcagcaggttctccacaagcttgtccaaggtgccagcttttatggtcctgatcttacaggtttcatattgactgactgtgtgtcctggaggcagctggtccccttcgacccctagccatcttgctcctttattggcagcctgttgaatctggactcttttgagggtgacatggtaaacagctccttcctctacctcttcaccccagtcctgaatcgagctctcctctgtctttaaaacttcccatattcgaatatgggaagtataaagcgttgag

SEQ ID NO: 454363 - DNA, 1030 bp, Homo Sapiens
ggaatcgagctcggtcctacttttcacaggtgggggagaaggtaaagaggtcctccgggatccaggattctcccattttgggaaaggagttataaacaagcccagcatctagccctgccacaaaagcccctgagagggccgtaaggaacaccagacctgctgttccatgagcaaatcgtctcaactgtaggagttggtgggtttcaggcaacttgtgcggagggagtagcagtgacagtgaggtccacaagctggcacaataaagaaccagggctgatcccaggtgggcagcaaggcggtactgactgacccgagggatgtcatgggagtctgatttttcttctagtccacttttcaccatataccatcccaacagaccctggaagcagacgaggccacagagggcaagaacacgtcctttcatgccacggctgagccagccctttctccaaaagtaggcagcaggcaggatgtacacaaggcctacaaggcgaccccacattcggtgtgagtactccatgtaccagatgaacttgaattctgtcagtgtcatatcatgattcaagattttaaattctggaaattgctggtatctttggaattctgcttcccattcctcttggcttgtaggtggcttcatctcctttattaaatgccaatctaccatcgagaggccagactctgtcaacctagttactccaccaagaataactgctccagccactgttccactgcagaccaggagccatcggcccaccacccgctcagcagcctttgagggaagggacactgtaccccttccagattgcaaagctacttcagagatggtgctgtattgccctggcctcaaagggcgcctgatgcaatcacactgtgctctaggcgctgccctaggagccaggagcggcagatactgcctccccttcaaggccctcaacggcggaaagagcaatcgctgcatactgatgacagggaacagccacctcttccacaacccagggctctgtggtctccctcctccgcccacgct

SEQ ID NO: 454364 - DNA, 525 bp, Homo Sapiens
  misc_feature (340)..(455): n is a, c, g, or t
ggaatgaagaagtgtgaaaacatgtagtttgaaattccaacaaatggtttggataagagagccagtttttacaagtttggtgtttccttaaatgcactttttttggtttattattcatagatattaaatctaaatattttgttaatgttctcggcaccataaataaatatatccacttttagtggaagagaattttggaaattagaactatattagaccgtctaggaaaccaaatataaattgtaataataataagttctccaaactgaaaattccaaagttttaaactatgagctttgtttatgggtgtatacatatgtacagctatagatatatattnnnnnnnnnnnnnnnnnnnnnnnnnnnnnnnnnnnnnnnnnnnnnnnnnnnnnnnnnnnnnnnnnnnnnnnnnnnnnnnnnnnnnnnnnnnnnnnnnnnnnnnnnnnnnnnnnnnntgcatgcacgtatttcggtgaagtttcttttctaaagctgcctctctttttcccaacttataacagtaac

SEQ ID NO: 454365 - DNA, 1070 bp, Homo Sapiens
ggctgtcaaaccaatgaaaactagatttcagtgtctgtctccttttagtgactagttctatatattatgtttctctatatctggaaaaatgttcttaatataatacacgtgcagtctgaagtaatttcagttctcaagtttatgaaaggattgggtttaaaaaaatactacaaaaatatgcacttatatttccaaaattatgtatttctaacctctgcagtgatataaggtccaaattttcaccgttgaaccgccttcttgcatggtgttaaacagttatttctatagagcagatataatttgcataaatctttttttgggggatggagtctcactctgtcgcccggccatatctcagttttctaatctgtaaaatgagtaggttagaccagctaatcactctggtaccttccaacttgaaaaaagttttttccccattctttggtaaattttagatgtggcctgaacattctcctggaagtcagaggtcaaattatctttccattttcttttattttagtaagaatttcgcaaatgacaagtgataacaaaggcagcaggatttttcatttctctgtaaataatgtataaaatatgtgaacagaactatatctttcatctaaggccagttcaatttattaaaaataaaactaatgccttttaaaattgatcagacctttgatacttgaactaaattttgcattagagactttttaaaaattgttcgcttttgctgaataaattgcaaatagagaagcttcattgacagtcagtccctctctgcttaatgcagttatgggtcctttcgtttatggcaaatgacttacctgacaagagttaattttgcctcaatggtatcaagtttgaatattttccaagaaatctgatttatttggcagactctgagagagagaacagattaagtgccgttttaaaactctgtattttcatttatcataatacacatatttgccaaaatacagctgtttcgtacaattgtctgcaccctcatccaagctttatatttaatagccttaatcacattttatgaacgaatgttcaccgcaaaa

SEQ ID NO: 454366 - DNA, 919 bp, Homo Sapiens
agcggctctatggcggagctgcctggcggaagcgggaacgtcgcatcctgaggtaaaggtgcacggcatcctgggacatgtagtctggccggggctcggacgccccctcggatgaatgggaccgaagctgactgcgaactacagcttcttggcagcgtcggtgttggccgcgggagaaggggagaccgcggcggcccccagtgagagcggctttccaggacggtgcgatgtgctgcgcagcgaagaggcaggaggccggcttcctggggtagcggtacaggcgggcgcttactctgtgcgcttgcttccccaaccctgcaccggccatgcgcccggccttggcggtgggcctggtgttcgcaggctgctgcagtaacgtgatcttcctagagctcctggcccggaagcatccaggatgtgggaacattgtgacatttgcacaatttttatttattgctgtggaaggcttcctctttgaagctgatttgggaaggaagccaccagctatcccaataaggtactatgccataatggtgaccatgttcttcaccgtgagcgtggtgaacaactatgccctgaatctcaacattgccatgccccctgcatatgatatttagatccggttctctaattgccaacatgattctaggaattatcattttgaaagaagagatacagtatattcaaatatacctccattgccctggtgtctgtggggatattatctgcacttttatgtcagcaaaagcaagggacttcccagtccagcttgagtgagaatgatggattccaggcattgtgtggtggtcactaggtatgggggcatgactttggtcttctgatgtcgccaggatggcgatttccgaaagatctctagaagaattgggaacatccaggaggcttgtataatccgcctcac

SEQ ID NO: 454367 - DNA, 606 bp, Homo Sapiens
gctttcactcttttattaaagaaatattacagataaatataacaactcccaccaaacctttcccacatcccaaaaggcaaccaagtcatatatggatccatgaccaatacacagtactgttctttgcaagatcttattaaattatacaaatgttatactgtgttcctttgtgcattttaattttttctctcaatattatatattgtaatctatccatataactataggtagattttgtttctaaattctgtattttatcacagaaatgatcacatttattcatctattccacaattgataaaaatttgttatatccaattttgggcaatacaaaccatgattcaggaacacagtgatatatatctctttgtgtacatttgtgggtgcctgtgaggccaatacaccaaaattcaacagactattccatgtttacatgttttttaaagaaatcttgttaccctaaagtaacggattctactttcatcatagttttaaaattttgctttttatattctggtctttagttggattttatttttgtatatgatataaagtagaaagctaaaatttttctcctatgaaccttccatttattaaataagccat

SEQ ID NO: 454368 - DNA, 743 bp, Homo Sapiens
taaataaatgtcaatttgatatcaagtaaaactattgtcattattgatcagaaaccatacattctgaaaatgaatccagttttcccaagctggcagaagtcagagatcatttttcaccttgatctgtgttgcgtttgtacttagtgaatggcagtgtggttgattggaagagcttgacactgatgtttggaaaaattctttattctagtggtcattttcaaacttgtcttctgtagagaggggaaaaattatgtatttgcagctaaagcgaagagactggcacaataattattaattgtgttagttcatttctatattaaatgaagcatcttcacaaatcaggtttgaagccattaaaagcaaaattttccctagtttaattaatttaaaattctaaattgcctgactacttagaatcttagaaacgccctgctagactgattttattatagaaatgttaacatgttcctcaacattttctcaagaaaattttcagacatatatcaaagttgaaaaaactttgcagtataaccactgctagattctaccatcaacatttgactatacttgtattgccatgtatctgttcatattctctatccctcttttcatccatcgatccatcagatgttttttaaagaacattccaaagtaaattttaggccatacatgccctaaattcttagcatgggtgtctataattaaggttagtattcgttaaatatctatttgaaagtgggtat

SEQ ID NO: 454369 - DNA, 1000 bp, Homo Sapiens
  misc_feature (798)..(825): n is a, c, g, or t
  misc_feature (919)..(951): n is a, c, g, or t
taatgtataagtgctagtagaaatgagttgtgcagaattgctatttttttcaatttttatatttgggttaatggtaatatactaagcgtccagtctataaacttcagcattcgttgcgaaatccagaggagacttttaagtgctgttttgtagatgaaactatgaacagagaaacaagggcttaatggtaaagatgacatatgactatattaagaaactgaatggccctttgtccacaaacagtaacccacacagcattgctactgtggcatgcccactgctctgcactgacctcatggagcagagaacctccttcagacacctcacgcaccccctgaggagctaatgtttcttcccaacatggaaaatttggaagaggcctattcttcacagctgtcacttctcattttgaaagaatatgcccacccttattcccaggcaaggtgtgaggaggtctttggggctccagctgttgccagccagaggtggtgaaagtcaacaacagggcactggacacacatagaaatgtgacccacagctatggtttgcaaatacagtctttcaagaagtcctgccatgtcctaaatgcccaaatcccttgcctcccatgattcttctcctcaaaggaccttctgctggacgccgccccctccctctccagccccaccagggccctccccgccatcctcttaggccacagcagccaataaagagtgtttttattccatgatctgtacccccaatgaatccataatcatagtttcaaatgtatttaccaaaaatactaacattatctgnnnnnnnnnnnnnnnnnnnnnnnnnnnnaaatattatatatttatacattttcattcttccaaagtgaaccccactatgccagttttactccatactcagtgttctggaaagcccatattcnnnnnnnnnnnnnnnnnnnnnnnnnnnnnnnnngtactttaccaaaattatttacattggaataaactctcttccttctgaa

SEQ ID NO: 454370 - DNA, 443 bp, Homo Sapiens
  misc_feature (48)..(72): n is a, c, g, or t
  misc_feature (176)..(201): n is a, c, g, or t
  misc_feature (215)..(215): n is a, c, g, or t
  misc_feature (224)..(224): n is a, c, g, or t
  misc_feature (248)..(248): n is a, c, g, or t
  misc_feature (269)..(269): n is a, c, g, or t
  misc_feature (276)..(276): n is a, c, g, or t
  misc_feature (297)..(297): n is a, c, g, or t
  misc_feature (307)..(307): n is a, c, g, or t
  misc_feature (330)..(330): n is a, c, g, or t
  misc_feature (371)..(371): n is a, c, g, or t
  misc_feature (381)..(381): n is a, c, g, or t
  misc_feature (387)..(387): n is a, c, g, or t
  misc_feature (404)..(404): n is a, c, g, or t
cagaaggaagagagtttattccaatgtaaataattttggtaaagtacnnnnnnnnnnnnnnnnnnnnnnnnntttagaaagaatatgggctttccagaacactgagtatggagtaaaactggcatagtggggttcactttggaagaatgaaaatgtataaatatataatatttatnnnnnnnnnnnnnnnnnnnnnnnnnncagataatgttagnatttttggnaaatacatttgaaactatgattanggattcattgggggtacagancatggantaaaaacactctttattggcngctgtggccnaagaggatggcggggagggcccnggtggggctggagagggagggggcggcgtccagcagaaggncctttgaggngaagantcatgggaggcaagggntttgggcattaggccatggcaggcctcttgaaagcctgt

SEQ ID NO: 454371 - DNA, 833 bp, Homo Sapiens
gtgctttctgtctctttgtgttggttcttgtctggcgttgctctcgtcggtttttccctgttggttgttgcgtttctcctttgttttctgtcgtctctttgttttgtgtctttttctatatctgcttcgtctcacgttgtcatatgtgttcttctgtcttgtgtcagtcttatatctacgtttgactttgactgtagcttctcttgcatacgttatcttgctgtggaaagcgacgtgctctgtgccgctcacagcttacgccgagatacgatgccaggccttggcctgcttgtgggaggcatacacggtgcggatggttgaccaccccggcagatgatcttcaagcagccagtcacagcagctcacctggtgctgcctcaagggcacgtgcaacagctggttccagaagaaggagttccgcccattcagagctgtcatcccccttcttctgcgtgcgggcagtcaggtcacagcgagacccatcgtttggccatgagaaatagtacacccccgagctgaggattttcttcaaagctatgaggcgttcctcctccttggcctcttcctagaagagggtaaaagtcagtggcagtgattttgtagatttcagcatctggaattctgcccacagatgtgcagcctgtcaccaacaccaggaagctcagagacgtgccaccagatttcagcctcagctcccccaggcagccgtacgcgtccgtgagcttgccatactgtcctttaatgacttccttttcttctggagctggggaagaaacacatcacagaaggcatcagcgagcgtctccgtgctcattcctgttcattcacacccc

SEQ ID NO: 454372 - DNA, 766 bp, Homo Sapiens
  misc_feature (21)..(21): n is a, c, g, or t
  misc_feature (29)..(29): n is a, c, g, or t
  misc_feature (58)..(58): n is a, c, g, or t
  misc_feature (66)..(66): n is a, c, g, or t
  misc_feature (111)..(111): n is a, c, g, or t
  misc_feature (125)..(125): n is a, c, g, or t
  misc_feature (137)..(137): n is a, c, g, or t
caaactaaacccacctgcctnaaaaaaantaaaccctccggggaagccttgcctgggnccaaaagncccaacccttctgaccaaaaacacgaactgcaaaagggatggaanaccaacatgggggncccgttccgcanccatgtggcctgaaccttgtaatttgggaatgtgaccccacagcccctaattgggctcaagcaatgccgagaaaagcagggatggtgctccccaaggaaggactggtgggcaggacggagcagcgcatgtcccactagggttggaaacgtgctctgcacggcaccagttgccctggtacccatttcataaactgtggccacccatgattgcttcagctcaactaagctggtggttagtattaacaattacttttttcacttattagttgattacttatttacttgaggtgcttttgtactaaacacgattcaacgctttctgaaatcgaagttaacacacttttgtaaacatatcccacgccattgaacctttgtcagtcatgtcaataaatcacgcccttagatttaggttgagctccctctaccctattggcaacttctgcccacttgaacaccactccaaggtcatctgatggcacattagtcatggagcttatttatttttcctccagattatacaagtccttgagggcatatgctcttgactggcttaagagtactgcatgcctctgtttcccatgaaagctaaagctagggtaggcccatttgctaaaatgaagtatggctca

SEQ ID NO: 454373 - DNA, 824 bp, Homo Sapiens
gaccacggggctggccgaaccgccggcgcaggcggaatagaacagccggcaagtggcagcggcagcagcggcaagtagcggtgagcagccgcaagttgggcaggtcgcctagcgagggaaccggcagcaggtggtggcaggcggtaccctctgcccggcaggtccggaggaggccaagaggaagctgcggatcgtggcagcgcgagttgcagaacgtgcaggtgaaccagaaagtggggcatgtttgaggcgcacatgccaggcacaagagctccgccagtcgagcgcccccgcagcccgcgtttgggcagggctcgctcgccctccccgtgccccttccgcagcagcagtcagccccctggaagggtcctggttcagggcgcccggagcgaggaacggaggacaaagtcctggggggagcaatgtgccagagacgttcaggaaccgagctccgggaggaaaggagggcccagcctatgctcctcgcaggtgaagaaaggaatgccacctcttcccggccgggctgcccctacaggatcagaggctcagggtccatccgcttttgtaaggatggagaagggtatccctgccagtccccgctgtggctcacccacagctatggaaatttacaaaaggggctctcctaccccgggaactcggagctgcctagctccctcattggggctgttcggagctagcttaacgatggccacggaagtggcagcgagagttacatccactgggccacaccgtccacaggatcttgccctcactgagccgtctgggagagcccgtgagcttgaggacctgcagccccccccgct

SEQ ID NO: 454374 - DNA, 1398 bp, Homo Sapiens
agcgggcttttcaggctgtttgcttacagatgcatcataagccaaattgtgagccatgatagtggcactgaatttctaaatacaagaaattgcttagacaattggtttagtatctgtatatgggcaatactctgtcctgcagtagctgaatcgctgagaaaagagaccatgtttctacttttagaaggagaatgaaatcaacgcaaaggagagagaaacaaggcagcatgtcagctgaaacaccaatcacattgaatatcgatcctcaggatctgcaggtccaaacattcaccgtggagaagctactggagcctctcataatccaggttaccacacttgtaaactgtccccagaacccttccagcaggaaaaaaggacgttcgaaaagagccagtgtccttctagcttctgtggaggaagcaacttggaatttattagacaagggagagaagattgcccaggaagctacagttttaaaggatgagcttacggcttcacttgagaaagttcgcaaagaaagtgaagctctgaaagtatcagctgagagatttacagatgacccctgttttctcccaaaaagggaggctgtggttcaagctgcccgtgccttgctggctgcggtgacgagactccttatccttgcggacatgattgatgtcatgtgcctcttgcaacatgtgtcagcttttcaaaggacatttgagtctctcaaaaatgttgccaacaaatctgacctccagaaaacctaccagaagcttgggaaggagctggaaaatttggattatttagccttcaaacgtcagcaggacttaaaatctccaaatcagagagatgaaattgcaggagcccgagcttcactgaaggagaactctcccctcttgcattcaatttgttcagcttgtttggagcattctgatgttgcttccctcaaagcaagcaaggacacagtttgtgaagaaattcagaatgctctcaatgtaatttcaaatgcttcacaagggatccagaatatgacaaccccaccagaacctcaggcagcaaccctgggaagtgcccttgatgagctggagaatttaattgtcctgaatccactcacagtaactgaggaggaaatacgaccatcactagagaaacgccttgaagccattatcagtggggctgctctgctggcggattcttcatgtacgagggacttacaccgagagcggattatcgcagaatgcaacgccattcgccaggctcttcaggatctgctttcagagtacatgaacaacgctggaaaaaaagaaaggagtaataccctgaatattgctttagacaacatgtgtaagaagacaagagaccttcgcagacagctccgcaaggcaaaaaggggatcctcacagagtcgacttccaa

SEQ ID NO: 454375 - DNA, 428 bp, Homo Sapiens
ttgtagtcgttctgcaggtccccttttagccttgcggacatgattgatgtcatgtgccgtcttgcaatcatgtgtcagcttttcaagaggacatttgagtctctcccaaaatgttgccaaccaaatctgacctccagaacacctaccagaagcttgggaaggagctggaaaatttggattatctaggccttcataacgtcagcaggacttataatctccaaatcagagagcatgaaattgcaggagcccgagcttcactgaaggagaactctcccctcttgcattcactttgttccgcttgtttggagcattctgatgttgcttccctcaaagcctgcaaggactcagtgtgtgaagacattcagaatgctctcgatgtaatttcaaattgcttcacaagggatcccgaatatgacaatcccacacag

SEQ ID NO: 454376 - DNA, 898 bp, Homo Sapiens
  misc_feature (68)..(374): n is a, c, g, or t
ccaggggtgggagatacagggttgagccccaaggttgtggccccactggtggtaatgcgggggtaaannnnnnnnnnnnnnnnnnnnnnnnnnnnnnnnnnnnnnnnnnnnnnnnnnnnnnnnnnnnnnnnnnnnnnnnnnnnnnnnnnnnnnnnnnnnnnnnnnnnnnnnnnnnnnnnnnnnnnnnnnnnnnnnnnnnnnnnnnnnnnnnnnnnnnnnnnnnnnnnnnnnnnnnnnnnnnnnnnnnnnnnnnnnnnnnnnnnnnnnnnnnnnnnnnnnnnnnnnnnnnnnnnnnnnnnnnnnnnnnnnnnnnnnnnnnnnnnnnnnnnnnnnnnnnnnnnnnnnnnnnnnnnnnnnnnnnnnnnnnnnnnnnnaatgttattatgtatcaatcttttttgttccgggcacgtaggcgctgggtcattaggaagcctttccccacacgcaggtcctagtcaaccgtgctttttagcggcgggtaggacctgcggctctgcccctaacatgggcgcggggcacgcggccaggggcccgtgggagggggacagggcgcgcgaacccaggttctcaggccgcgtcgccgcgcgtgcgcactgacagccgggccgagccagcccgggtcccgcagggaagaacgccagcggcgcgcggaggccgcgctgccctgggccgcgaggtccctatggctgccccaccggaagccccgcccccttctggcagctggaggcggctttccggccgtcccggctgcagcccgcgaggcctcgactcaggagatcggctgttccctggcagaggcccgcggtggactgcctgaccctcgcccggccccagcacgtcccccggcgagcgcccacatcctgccccggcccgcagcgccccgacttactccgct

SEQ ID NO: 454377 - DNA, 1560 bp, Homo Sapiens
  misc_feature (1157)..(1157): n is a, c, g, or t
ccaactgttgacaggtgtcatttccacctgcagccaacttctgtgggaggtggacacggggaaagaagaccaccacggagggggatggctgtatgtgtgtagaggaagtattggtagtagaactaaagattctgccagcatttggtgtccaacacagttgctacatgtactataattatctcatttgtgtgaaaattcaaggatctgcattctgctattttcatcaggctgaactgcagatgctgaggaatatggcaagaagttggggttcaaagtctgatgccaaagctagcaacccgagaaataaaaccgctgatcaccagctccccactcaggcccagcccccttatagagcccccagactcccacgcaaggaacctagacagctagtcttccccggcgaatgccctgtaggcaattacacgccatcaggttctatcagagttgagactgtgaacactagtgatatattttcctccaccatgggcaacgaccggcatccccagctcctcgccgcaacacgctccccacccggccacggcgccctacactaacaccggccacaaccccgcagagcacgcagatctgaggcacacacccggccggcgcgcaaacggcacgagagcgacacgtcagcacgctcgcgacggcgcagggcgcccacgagcagataccacggcatggcgcgggcgcaccagagcacagcgggcagcgccatcgaggccgtccccgcgcacactacagggcggggcttaccacaacgcgtcggagcgtgcaaagcccgacgcgcccgctacctacaagacacggcacgcaccggcgcaccacacaacgacacccaagcggagaactcataccacacgagacaacaaacgcacaccacgacacaggtatcaccaacaacgccagcacccgactggcgtactccgcaaccaccgagaacagagcgcacaccacgcgagcgatcggtgactccaacacaacaggtgatggcggctaccgagccacccccgctgcggctaccagcctacaccgccgagtgagcagcgcccacccacccacgcgtgccacgcaagacacgccccagctacgaccccacgaacacgcggtgggggtggcacctagacacacaacactgagatgctcagaccaccacnccacacgccgtgcgggtcggcacccagcacagggccggaccgcgacgctcagcacagcgcaggaggccgctcggcagtcgactctataagcagcgtgaggacacagggcacggctgacaggagacgcgcggccgaacctatgtgctgaccaatgagacgaagaagacacacgagacggagacaggacagaaacgagcgatgctgagcgtaccgctgcgacgtgcccgagtgcaatgtgggcccaaccaacaaccacaggcacagcaaccgcaacgtcgcaccaccgtgccgcatagaggagctcagacacgagagactggtcgtagccagcgatgacgcgggctacgtgggcgcggccgcgccatgatgccgtgcaggcgataaagcacggccagctgcgaca

SEQ ID NO: 454378 - DNA, 282 bp, Homo Sapiens
agcgggtgggtgcgggccgcgctctcggcggcgcgcatgtgcgtgtgtgctggctgccgggctgccccgagccggcggggagccggtccgctccaggtggcgggcggctggagcgagggagcggacatggactacgactcgtaccagcacgtatttctacgactatgactgcggggaggatttctaccgctccacggcgcccagcgaggacatctggaagaaattcgagctggtgccatcgccccccacgtcgccgccctggggcttgggtcccggcgcagg

SEQ ID NO: 454379 - DNA, 820 bp, Homo Sapiens
agcgggggcagacagggagtggtaaagggaaaaggttaaaaatccacctgtggttgtatattcttctattctgtcactctgttacctagactgtgagagggtttgccttcagtcagattaaaaagagcagggcctaacattgagtgatagcacctgctttgataaataggttttctcactcttctttttttccttcttttatccctcactcgctcccctaaaccctgcttcagcacaatggactaattctagcattctgatcataaggccctccattttcctaatgtgtttcaaggaatctttttaggaaaaatatccagattattcatccacttttttttagtatctactaacaactcctttttttctctagagagttatgaaggaacaggttgtccttgtctggagtcaagctaaacacatgatttgttttatcagcagctggagcagaagttgaaaatgtctttctgtgagacagtaatttgctactgaagctttatggcttgtttgcactgattactccaggatccaaaaacttggtgaaagtcactgaaacactcaaggcaaattactttacagccctgagtgtctgtcaccatagtttgcataatgaatatgaatcccattggtgtgtggtgtaggaaatcctgtagttgtattttcttgaactgaaatatttgactcaaaataattaagactcattgtcatttttcatcttggcattattgtggacaagttgacatattaaatctctttgctttctggtaagcttagcttttaaatgcattttcccttgtcctgtctttaactagatattccg

SEQ ID NO: 454380 - DNA, 279 bp, Homo Sapiens
ctcggtacccggctcatttcagtttgaaaatgtgtgcacagaagagtagctgtgaacaacatctaagttagcacttgtcagtgtacgtttttcaaacgctattttaattatttgtatggtgacaagctgtttgctcaattatgggacttcggggactattctgtcaatcacgtctgtcaccatagtttgcataatgaatatgaatcccattggtgtgtgatgtaggaaatcctgtagttgtattttcttgaactaagatgagccggggatactctagag

SEQ ID NO: 454381 - DNA, 739 bp, Homo Sapiens
atcaggccaaatcggccgagctcgaattcgtcgagagcgggggtctgggctttccgaggacggcgagcagctgtgcccagagctctgggaaagtcccctctctttgcttcttataaattaagttcctttccaccagttagggcaagtccgccaagatagactgaagaggagcaagaacagaaacagggagccagttacagatctatcccaagaattctggggagagatgatggtgtctgcagcagagtgacagcagtggagattgagagaaaaggttgaaaatggttgcttgtgttcaactactgtgaagagttggaatcagacaactacggcttttattttccaagtggttcagaatgtaaatatgatctgacctttccctgatggacagttaaatcatggacacgctaaacaatttactttggactgtccttcctaaagatgctctggcttctctcttgaatgctcactaagctttcgtagctgacaaggaaaggaaggaaaactgtgaactggaaagttatcttacaatgaaaattactagcacatcttgcatctgtccagtcctagtgtgtctctgttttgtgcagaggtgttatggaactgctcaccacagctccatcaaggtgatgagaaaccaaaccaaacacattgaaggtgaaaccgaagtccatcatcgtcccaaaaggggatgggtatggaatcagttctttgttttagaagaacatatgggaccaga

SEQ ID NO: 454382 - DNA, 1307 bp, Homo Sapiens
cgagatgactccgtgaggagtgttcccagtgaacccggggatacctgggccttagctcccaaaaccaagggtgacaaaaaaaatccctcggccaactccacatgggctagggccctaaaataactcctaatacttatttggcctaaataggacccggataagaaagacaagccttgggcaataaaagagcaccagaaagtattctgtcaggattatccagaagattcacaataggttgtatcattggtattaaaatcaaagttaaacacaatgctttaaaagttatcacagatgatttgtaggacctcctaaatgcagaagcaagatgaaaacaaacaaaataattagtttaattaaagagtactttcttcaaaacctagtgaaatatccaacttatgctaaaaccccatggagtcaaagaagactgaccattttgaagtcaaactttgggttcttttaaaatcactatataggcaaaaccatgtttcaatcagttcataaaatacgtctcacggtactgcaagactctttcttgcatagtttgtgtgtgtcacctgtaacctcaaaaaagtctaatgttgaacttgaattataaaatagattctaaccttttgttttctctaactgctctgtctcctttcttccaagagatggttggttttggagagccttggggtttgcactctatgacaacttcttggtctttggtaacaattattgttttcttcagttgattcagtgcaaaagtgggagctgaagctagaatcttcagctcagcactagcgtaaatggctccatacttattttcagccaaacactgatacattccagcatctgattgattcacattgtggatcatcaatactccattaaccatctcaaccctactctgaggtgagaggggtactccattcttcagccaacgatacgtgggtctgggttttcccagtagccttacattcccatcggagagggctcccactgtcctaactgagtatcattcagtttttcctacccagtgtgggtaggtgtatacttgtaattgtccacgaaaggaattttttccacgtgagttttcagctctgcactcataaatgcctgcatcatccagctgtacattcggtatttccagcaccgcctgagatttccgcagacgtgccttactaggaatataaccattaaccttcatccatgtgattgttggaacggggttgccaagtgcaaagcattccatcttaacagttgttcctttagcagctgtaaccgtgaaaggaaaatggacctcaattttcggctcatattctccc

SEQ ID NO: 454383 - DNA, 522 bp, Homo Sapiens
  misc_feature (372)..(470): n is a, c, g, or t
acatctgaaatctcccaaatctgaaactttcggagcaccagcatgacattcaaaagaaaggtgctagggagtcagatcttcccattagggatgctcagacagtaaggggtaatgcaaatattccaaagtctgaacaagccggaaatccaaaacacttctggtcccaacgatttcagagaaggaatactcaagccgtatattaaatatgcacacacaggaaaaggtaggcacatatacaaagaaatttaaaccataatgggtcatctctggttagtgagctcttatttcaatctctttgtactttctaaaatgagtatgtatttcttcaaaaatcactgaaactggctgggcgtgttggttcatgcctgttgnnnnnnnnnnnnnnnnnnnnnnnnnnnnnnnnnnnnnnnnnnnnnnnnnnnnnnnnnnnnnnnnnnnnnnnnnnnnnnnnnnnnnnnnnnnnnnnnnnngcatggtggcatgtgcccgggaggctgaggtgggaggatcacctgagccgag

SEQ ID NO: 454384 - DNA, 880 bp, Homo Sapiens
agcggctgggactataagcctttcttttcacaggaaaccctcctaattggtctgataaactttctgggactcaaaatagaaccacagcacagccttgcatcccagggatgaagcagacttgatcatggtggatacgctttgtgatggactgcccaacagttttaaatgtaaattgaaagaccccagtactggtccaagccctgaagactgcacccaggaaagtggaggtatggacagaggcagccggtgcctgaggaagctccacggggcaggcaaggcccccacgtccagtctcagcccctcttttggccacatgccggagaaggaaattttgtgccttgaataatgaatccccctggagcccacggtacctgtacttctctttagtgtccactgagaataacgtgttcgacattcaagtgacaacactggaaagcatttcaaagccctggagccccagaacgctgtacaccccgacggctcttctgcctgccctctctttggcttccaaatgcagcaagctctttctttacttaaaatgtgttcatctttcacacgcatcctggatgtaccacagaaagacagtacagataggcaggctcttatttctgaagctgagctggtcccgcccagcacaaagctttaaagctgctaaggctccaggatattatccagtttttaaaaatggaaaaactgggaacagggaggctcaatatcttgtcccaggcccaaacaggcttttctggagtcagtatcattcaactggctcaggctggattttcataagaaaagataataaacatttactaatgtaataaatagacaccttttaagtcacaaggcagtatccaaacctttgggacatctatgggtgctgaac

SEQ ID NO: 454385 - DNA, 731 bp, Homo Sapiens
  misc_feature (45)..(150): n is a, c, g, or t
  misc_feature (175)..(189): n is a, c, g, or t
cgcttttcgtaaatccaattagctgggcgtctgggcacgtcccgnnnnnnnnnnnnnnnnnnnnnnnnnnnnnnnnnnnnnnnnnnnnnnnnnnnnnnnnnnnnnnnnnnnnnnnnnnnnnnnnnnnnnnnnnnnnnnnnnnnnnnnnnncgacagcgcaagactcggtctcttnnnnnnnnnnnnnnngtttgatatgaagaatttagagttttttgtttctaggagtttaagactcaaaagtcttaagattctaggatcctccccactgcccctccctctccctgctggctcccgtacctgggtccacaaagagccttgttatgttgccctcagcctcctccaactcaggaatctctacggccgcccagcacacgtacgccccgctgtggttgaggctcacagggtccagctgcagggtgagatggctgggtgcctgccaggagagccgtccctggggcccgcagacccccaggctgaggctgccgttggtgatgtacggttgacacaggatggccccatcctttgtccacttaacacggagccgttcccaggctgtggcctggtccacctggcagaccagggtcgcctgactgccctgcctcacctgcagcaagttgggcccctgctgcacgctcaggcttgaggcttcttgcagggctggaggacagaagaggtagagtcgacctttctgactgtgcgcatgtgaggctgtgtgactcacctccgct

SEQ ID NO: 454386 - DNA, 1226 bp, Homo Sapiens
  misc_feature (16)..(16): n is a, c, g, or t
  misc_feature (47)..(47): n is a, c, g, or t
  misc_feature (54)..(54): n is a, c, g, or t
  misc_feature (78)..(78): n is a, c, g, or t
  misc_feature (84)..(84): n is a, c, g, or t
ggacggtgggcaaaantgaaggccggtaaatcccccaaaaaggaaanggcctgnccccaccctcctcctttttccacnggccanggaagtcctggagcccagctttgacccagggaaagaacaataccccttgggtattaaagagaactaacaaggtagatggactccctatatccccttgaataccttgtgaaatgaagcccacttctggattgcctatgtgagaaaaaaataaattatcttacatgagccatcatattttggggtctccttgttacagcagtttagatcattttctgatttatacaaaaagagaatgaaaacattaagaaggtaagcttatttaccttttatgaccttaaaatgtcctctgcttgttcttttgggttttacctttaacaagtataaataaggtgcttcaaatttaattggctgtaagcaagtaagaccttaagactacatgtgaccttatgaattcagtgtgcttctccccttttccaaaaatcaacctacagaatacagttgcatatactttttcgggataaatggaagcgtttagtgtaaatgcatgaatatcaaactgataaatgaaaactaagattgatatatatcaacttccccttttttcaacacaaatgtatatccatgcactattctaatctactactctggtaatcaagttaatcatagacaactgaataaagataaaatggataaagcagacttcgtctcccataatgtgatgcagagatgattatttctcggactcccagtttcgtgttactctatgcttcagaatagttcactgtgttgctaagacaacaaggatgctgcaaccggaaactgggattgaagtcaaggcactggagctgcctcaaaagatgtcataaatagtgtgttcaaggcctttttcacagtgaaactgtaacttttgaattagaaaaaaaattattggagccaagcacggtggtgcacaccagtaaccccagatacttgggaggctgagggacggggatcgcttgagcccaggagcttgaggctgcagtgtgctatgatcatacctgtgaatagctactgcactccatcctgggcaacatagcaagatacccatctgttaataaatacaaaagcacaagaaataaacagaagaagattatactcaattcgacacctttccacagactatgattttcagttattcacattctaagattaagaaaacattg

SEQ ID NO: 454387 - DNA, 757 bp, Homo Sapiens
tagggggaattcattttagtcatagcaaagagatgggcagggtcgcagcagtcttccattgtgtttcctggacgctcatggccgcggtctggttcctcctcgcacgccgtgccctgttgcagcaccccctgcacgatctctttctcgttgggcagccggtagacggggaagatgtagagccaacagaggaccacgacacagagggcactggctcccatgggcagccgggtccgcgggaacttccacccagtacagccatggcccctctggacgtttgtcgccgggcccgcccgcaggggctcatcgcagccccggcgtcccaggggcgggggccggggcctcagcacaaagctaggcgaagtggcagcggagggtcccccaccgccagccccccatgcacacacacctttggttctcttacttgcaaacgcacgcacgcttcttcggccccgtcggccccaaaggtcagcgcaaggattttttcaaatgcaacttttccaaggatttctttctaggggaagtggctgggggtgaagtcacgatctatggccatggtcgcttcccctgcagaaggcgggcgctggggtctccgagtgcgcagagagcggcggcggcgagtcgctcccgccggttctgcagcatcacggtcgccctcggcgagggtccgggagaaggctcggctccctcctaaacatgtggcccgtggcgtccccttgtcccctccgagcgatgctcctgcgcccttcgccgccccgct

SEQ ID NO: 454388 - DNA, 932 bp, Homo Sapiens
cgggtgatgacgagcccggtcctgttggtgatcatgatgagaacgtcggtcgaaagtcagaaccggagtcacaacaggcatctgtgccgtcaaagatttgacaccactcctgccttcgtcttcgtttgcagagacatctgcaaacttcgttcgttcatttctgcccaatgcatgccatgctcatctgattgggaagttcatcagactttagtccaagtcctttgatcagcagctcgtagaaatggggttctattgctccaacagccatgaattccccatctgccgtcctgtaagtcgtatagaaaggtgctccaccatccaacatgttctgtcctcgaggtgcttcccacagactcgatttctgagttttccacagaaaagaacttaaatatgctgttccttccacctgacaaagccaaatagttgatatcgtggccagctaaccggcagaagcttcctgactggccaaatccactcagcctggcataaataagccttggattttcccgctgcagaatctctgggcccagctggagtttctccatgacaccgcggcggaagggctccagcagcacatccgaccgcttgcacagacgccgcagcacggcggctccccgcggctgcttcaggtccagcactagcgagcgcttgccccggcccaagcggctcacgtcgtagcgggagccgggccggtccacgcgtaccacacgcgccccgaagtcagccaggaccatagcacagaacgggcccggggccaggccggacagctccacgaccgagatgccctgcagtgccatggcgcttcccagtgccccgctgaaggaaactgagcagcccttagccccagcccagcagcctgcaagaagccctcccaatccccggcgccgcgccccaaaggcaccacccccgtccctcttttgcggacctccgct

SEQ ID NO: 454389 - DNA, 582 bp, Homo Sapiens
  misc_feature (267)..(267): n is a, c, g, or t
actgtactccagcctggtgacagtaagactccacctcaaacaaaccaaaaatgcacaaaaggaaaacaatgttctggataaagagcatatgaaaggtactttcttttagaacagtatgaatgtatatgaatttatctttatgtgagaaataatcttttttgtaagttaaaggttaaagaccctgcttgtttcctaaatcacgagggttagagctgttgaaattaaacctttatagtgcttaacctggaaacaagtgtactacagccnccactgaacgccgctctatgggttttttgcttacgatgttttagcaacaggcatttattttgtagaatggtatactttctgctttgtctcctcatctttctccactggtttcctgggtacattttttttaaagggagagaagtttgtgagtttaatgttgttaaaaagaactcccaagaacatggataagccggatttctctcatgcttatgattagggagttaggatttaaagatgccaagcagaaggactgaaaggaatagcagtgaatatgtctcagtgggtgaggtgtgaaacttgtctaatatagatgtg

SEQ ID NO: 454390 - DNA, 849 bp, Homo Sapiens
agcggagcttctgtaagagacggagaggcgcagagtgagggcgggtccgcgcgtctcagagcccgctggaggctcggagctgctacccgcagacttctcccgcacagggctcgcaaagagcgtgattccgagagcctgagactgacgcccgacctggaaaccagagaagacttccttagcctttcggatcgcacttgaggctggaggcatgagtcctgtgaggcgtcggggcagcccctgccttttccccttgcagctcttcagcctctgctgggtgctctcagtggcccagagcaaaacagtccgatacagcaccttcgaggaggatgcccccggcacggtcatcgggaccctggccgaggacctgcatatgaaagtatcgggtgacacaagcttccgcctgatgaagcaattcaacagctctctgctccgggtgcgcgaaggcgacgggcagctgaccgtcggggacgccggcctggaccgcgagcggctgtgtggccaggccccgcagtgcgtgctggccttcgatgtggtcagcttctcgcaggagcagttccggctggtgcacgtggaggtagaggtgagggacgtcaacgaccacgcgccgcgcttccccagggcccagatcccggtagaggtgtccgagggtgcggcagtgggcacgcgcatccccttggaggtgccggtggacgaggacggtgggcggcaacggggctgcagaccgtgcgcctggccgaagccgacagcccctttcgcgtggagctgcagaccccgacggaaccgggctcagtgcgcgacctggtgctgctgcaggaccggccgcagagccaggcgctacagcctgactgt

SEQ ID NO: 454391 - DNA, 820 bp, Homo Sapiens
ccaaacactggttgatattccctatagccagaagtgtgtgcttcccaattcactatgtgttaccacaatctacatttaagacccctattcggtggcaacgccgacttgtctgtaagtagcttctacgggctaaatttcaccccaagtagtctcttacatagattcttctcggtctccctaacgccatgtgtgtgaccctaccttgggagtccaagctcgatcggtgcaatgtatgtagtgcgttgcccacaaaattagactgagtcgatttgtgttcaccgtggcgtgtcaaggtggttagacatttcttgcatatactttaaactggcaattacatcttgaagatgtcgtggaaaggcatttgcttttcttagggcattcagactcctgtaggtcaatgttacgtatggtgtttgcaaagtgtatctggtactcagtcaataccttacgggtttcgctatgtgacaagtgctccttctcgacttgttcaaagagatttacgtagcagtcgtttctgctgtgactacgtgtgcaaggaagaataacttttgtactatctttatccagggaatccatcgccgaccactctatttgtccgctgaatgcaagttgtcactgaagccttaatgcatagaggtttccgtccggtgacagaattagtcggttgttacatatattgctagcgtcctgtggtcagtgaattgttgaagcgagacgacttgcgacgccgacgttactaccagtcagcactcgactgctcgtatgttagtgatggaaggggcgattttttccagcaatcgcaaggtatcttccgttagcg

SEQ ID NO: 454392 - DNA, 1048 bp, Homo Sapiens
  misc_feature (774)..(774): n is a, c, g, or t
  misc_feature (1014)..(1014): n is a, c, g, or t
agcgtggcgaactccaccccggggagctgttgtgcttgcattgctgggctgctgatagactgattgagtggtggcgtgtacttttgtcacaagaaccataaccacaatgacagccacacagcatggacctagcgtgtgctcagctctggacaagacatggatgtaggcagacatgcttcctgcctgctgggcttagtgcaccaatgctaaggacagacatgaagggcttgggaaaggcatgaagatgcagggagtctaggagagaggataagaaaaacaagcattttgtggtgggttgaattgcgttgtcgtttttagaggcatttcgtgatccatggttgcgctcccgtgaagagcgagtctagagaaggaatccgaaggtgggtgagagttgagggaatttgaattccataattacgactcgaatttctgcaatcagctcgcggctgtgttgcctgctcctgccacaaaaacgccatgcagcgccgagccaagtcggatggaagtgggttcagggtattatataagcccttgcgggacgggaagcatggtcttttatgtgtgtttcttttgcagcggcggcggcgagcgcggctccagttagatttagaatacgggtgacagtggcctggcgcgagcccactgctgacgaaagcggcttatccccgcgcggtttccatggcacgacgagccggagccggggcggcggcggggctgtcagcgaagcgcggcggagctggcgcgtccgtgggggtctgcaggaggaagggggangccggggccgggaccgggaccctcgcggcagacatggacttgcattgtgactgtgccgccgaaacgccggccgccgagccgccgtcggggaagattaataaagctgccttcaaattattcaagaagaggaaatcgggtggcaccatgcccagcatttttggggtcaaaaacaaaggggacgggaaaagctcgggtccgacggggctggtgaggagcaggacccacgacggacttgccgangtgctggtgctggaaaacggcaggaaggagaacc

SEQ ID NO: 454393 - DNA, 1782 bp, Homo Sapiens
  misc_feature (295)..(334): n is a, c, g, or t
  misc_feature (416)..(476): n is a, c, g, or t
  misc_feature (668)..(747): n is a, c, g, or t
  misc_feature (886)..(1009): n is a, c, g, or t
  misc_feature (1082)..(1137): n is a, c, g, or t
  misc_feature (1566)..(1566): n is a, c, g, or t
gatgaattaataaattaatggttggttaattttttgattgtagtgatttagggtttgtatttgttttattggaattgtttaatacttgtgagatatttctactgttttgtgttaagtattgtttttattgttattgtagtttggatgttaaggtgtgtgaggtgcagtagtcattttggtagttaaaatgtgttttgattactttatggtgtatttggtttttttgtggatatatgatgatgagttatgaaatgtaatgtattgtgttttttatgtgattagatgtgtgttcgannnnnnnnnnnnnnnnnnnnnnnnnnnnnnnnnnnnnnnnatatggtgttgtatataatgtagtgttatgtttatggttggtttgtagtgtctagtttgtagaattgatgtgttagtgttgnnnnnnnnnnnnnnnnnnnnnnnnnnnnnnnnnnnnnnnnnnnnnnnnnnnnnnnnnnnnnagtattaatatagtggattttatgttgttgtttttatgatattcggcgtagggtagtgtagtagttttgttttttaagtggtaaaattattttgtagtgggtgtagtgtgacatagtattgtaaagaagtaattgttttatgaatgatttgtgaatgttttattgttggtgtggataaatattaattgttcnnnnnnnnnnnnnnnnnnnnnnnnnnnnnnnnnnnnnnnnnnnnnnnnnnnnnnnnnnnnnnnnnnnnnnnnnnnnnnnnaatgtttggtgttggtattatttaatttgtgtattaggggttgggaaggatgattatttttgatatgtggtttttttatgagtgttaatgattatgttatttggttataatggtagtttatttttgagaatgattgtannnnnnnnnnnnnnnnnnnnnnnnnnnnnnnnnnnnnnnnnnnnnnnnnnnnnnnnnnnnnnnnnnnnnnnnnnnnnnnnnnnnnnnnnnnnnnnnnnnnnnnnnnnnnnnnnnnnnnnnnnnntgttgtgtgtcatatgtggagtgttttgtaggtttattgtataggttttttggtttgttgttctgtcagtgannnnnnnnnnnnnnnnnnnnnnnnnnnnnnnnnnnnnnnnnnnnnnnnnnnnnnnngtggatttagtgagtggtggaggtaacatgttttgtgttgtagttgtagagtgggtattgggggtggtgtgtgatgtgagtttttgttttatatgtggtgtggtttgatatgagtctggctgtcgtagtctttgtgcagtagtttgcctacgtatcgtgtgtgttggaactggttgtggaagtatgacggccttgtcagccgctcaaagatatcagccgtgtttcttaaaagcgccatgttttctaagtccagctagaagaaaatctgcccaaaagatttgtcgtcggtttcttcgtcggttgtcatgaagaatagcactactgatctcgtgtttccattaaggggtgcccttggcatcttccccctgggccgtaaccaggcgactatgcttgcccattgtgtgtgtgtgaacacggggggcgtccctnccgcacgcgcaggccggcgtgctttccagggacattcacaacgacgaggagctctgagtgtaatctcttatgataagagtgtcatatttgggagacgacgggatacagagggccgactcggacactggcgagttgggggttgtgctccccgagtccaccgagtctctgaagggggacggcggggtgagagccaccagctcctccaggtctggcttg

SEQ ID NO: 454394 - DNA, 1041 bp, Homo Sapiens
  misc_feature (133)..(133): n is a, c, g, or t
agcggctcttcggctgctgctcctggtgccgccaccgtccgccggtgcctgttgctgccgccgccgcgggacctgctgtggtcctcagcatgggtggagaagaggcgggcgccgagtccgaggggagcccccntccccggtgcccgacgccggtcgggaagagcgcagacagtgcggggactgcgagtggactccccgtgcacgcgccatgacagacactgcaggatgccaccacgagaagtgaaccttgccgcggttcctcggtcccggccaccagggcatcttgacgcgcgccgcggagctgcaaagttattgctgccatcgtgcaagggtgtggtacatactagattatgggtgtgcactcgcagacatcaggaaggaaggcaggtgactaatactggtgaacgccaggaggattttccacgaggaacgccgtgtgcccaaaaggaatcggaccgcaccattaccatcggtttcagcaggtgagaacggtaaaacgcatcttggccattttccctaaagcggaagggttgcatcggtggtggggaatttctagggggacgcgttggccaagtgaagcactcgtgccccttcactatgaccgctgacagccagttgccccctggaacccagacgtagttgccgcaattggtcttaggcaccctggcgcgtctcgcttgagactagactgggttggcggaacgcacgttccataccaaagggcttcgagtcccaatcaccatgcaccaaaggaacacccctaggtatagcactacagggcgaaagtctcgagggcattttcgcagatgcattgagggcggcatacgtgtgggaccatgcacgacatggttggataccctttgaaccgaccgagcaggaatagaaaggttccgacataggagagggagaatcgccaaccgatgaggtcgtaaataccccagggccaatacattctgaatcctggcgaacagcgctttcagaggacatgatggcacacagtcgtttgactttccacaagagcaaaggtccaatggacccccc

SEQ ID NO: 454395 - DNA, 790 bp, Homo Sapiens
  misc_feature (274)..(274): n is a, c, g, or t
tggcattagaagaaacatgttcgcaagaacagcacagcaaattaaagagataccaagcattgaagagcagccagaacggaaaggaatacactcatgcaaggctacccagaaatgtgagcgaaaggcaagtaaaagccgcagaggaggctgcattaagaaaactcagataagataaagaagatgaaaactttatctccattttacaggaacccgctgcttgattgctgtttcttctttttagcaaatgaagaaagtattcagagtctttgttccnataaccgtcgtcacctaatccggggatgtcccctttcgaatcaatcactccaggtttggcattaaacttcactgtcttcaatcgggcacgttcctttctttccaccctccttttgctggggatgacccccatctcctcactgtctccgtccagcatgactctcctggcttgccaccactcatcatcagaggcattgataacgtggagaatatctccatatttaaaactaagtccttgacttggcagcccactgtccttgctcttgtcgtagtcgaacatggctctgacgtagagggagcgtttctgattggttcgcagggatccggacccggagctcatgctgtggttcatcatctgctctcgtaggtcatggattttggcctcaaatcgagcgtaatcgagcacaaaattattggaacaaagcagggaggaggcaggaggcaccaaaggcagcttctccgtctccttggtgccaggttctcctgtctgctgtccggttcacacttgcctcccgct

SEQ ID NO: 454396 - DNA, 804 bp, Homo Sapiens
agtgagcaatttttcggcgctgccaacttattccggatcaggttggcaaactttcctggacttattgaaaacgaacacaggtggagtaagtgagaccccctggcatgcccgatttgctgctctccatgcaatggggggcagttcgagattttcacgtgggcatctttcaaagagcgatgtatatccttcaggtggtctttggaaatgtcctttgagcttcctagaggctccattctgctcgatctctctgagctttcgatgatactgctctaacttcttctgcagctgggcgatggagtgagctgatttctgattcgttcttctcaaagacttgcttgatacgtcccgcctgctgcttgtctgcgttgttcactagtttcagatactccgcaacattcccatcgcgcgatgtttgctcgatgttttatctgctcttgttacctttagaattttttgcttcaggctgtctgcagtgagtttgaccttgtggaagtccaggatgccatccgggacatcaaagttgaggttggtgtctgacccccctcggcgtatgttcaggggcaggcttaaggtattcatgtcatgacgttctacccggctcttgcagcggtggtgccggccggggtccgagtaggtccggtccacggtgagcgccgtgtcgctgcccggcatctccgcgctccggccgcgaactttcccgtcttctggggctgccgcgccgcgagccaccggctgtgctcgggatcaccctgggagccgcgggcgagggggcggcgcggctgctgcagctgttgccactccgct

SEQ ID NO: 454397 - DNA, 572 bp, Homo Sapiens
  misc_feature (24)..(24): n is a, c, g, or t
  misc_feature (37)..(37): n is a, c, g, or t
  misc_feature (47)..(47): n is a, c, g, or t
  misc_feature (71)..(270): n is a, c, g, or t
ctcgcgaacgtgttatccccccancagctttgggagnccgaggcggncggatcacctgaggctgaggccgnnnnnnnnnnnnnnnnnnnnnnnnnnnnnnnnnnnnnnnnnnnnnnnnnnnnnnnnnnnnnnnnnnnnnnnnnnnnnnnnnnnnnnnnnnnnnnnnnnnnnnnnnnnnnnnnnnnnnnnnnnnnnnnnnnnnnnnnnnnnnnnnnnnnnnnnnnnnnnnnnnnnnnnnnnnnnnnnnnnnnnnnnnnnnnnnnnnnnnnnactccgtctaaaaagaataagagggttacaagtagcctgaattttcctctcttctaatagggacttctccaagaaggtgaatctataatagtggtgtagattcagatataaggacacgtatttggcgtaaaggagaggcaaagttagaggaaccagaaagaatgctacacaaaagatggccggcttctcgcgtgaaggaagattcggatacgggggcctgatggatttagttgtaggcggtttgcctgcagcgagtaaattattcaaacgttcggacttcacaagactaaacttactgggga

SEQ ID NO: 454398 - DNA, 1031 bp, Homo Sapiens
tcagcacgatagtcataacaatctaaatgatccataatgcaatcattgccaaatatcgaatttttctactacattatccgcgttatcatgtactagcagcaatgtgttgcacgtccgtgtcgtagacggcgtagcagtcgcacgatgattagttaagatcaagaagggaatggtcattgagctccccttggagccgaacaacggataagattggattcccctatgacatcattcaggcaacctgtatacccaagatgctcctataagatgccaggagaaacagtgcttaaatactggtaccagtcctataggggatcttctccttgggtcaggctccgtgtcaggatcgatgggcgatcctccaccgttcagatgactcgcccctcagagctgctcaggttcctcttcaccagtgatcactgagtggagatcggcacagggcgacagaggatcaggacgggcgcctcatcagcacccgtagctagaagagggcacgccgagcaggatttctctttctggctgagatcttgggacgaccgtatagatttctcggagtcaggttccgaagcttagtgaatacggcgacttttaggtccggcaacatggacgacgcaggagctagaaattcaggcatataagatcaaaatgacaatggatgccattacgagatttccacgacgtgaaaggaatcatcggggtctaggattgaagggcggcagcctttttacgtgctaggcggacctctcacccgcgaggcccagttcgcccttagaggggttggggacttgctgggtcagctgggtccctggcgggggtgtccaggcactccagatagcacaggggccaggaggctcgcaccaggaaggggaccacttgcaggctcaggtgatcccaatctggatgatttcgcaaatttccactatgatccagggcacactgtgataacactggtttctgggacccggaacatcgaagagggagacgaagaggggacgaacagcgcgggggacatctcggggttccgacccgct

SEQ ID NO: 454399 - DNA, 938 bp, Homo Sapiens
agcgtggagtgtggcgctgaggaagcggcgggacggatgcgagcccgggaggagcgcgctggggggccgcaggcgggggatgtggcgcggtccaggcccgtcgcggcctcgtcctgacagggacacctgcgggatcgtccttccaggatcgcctgcgggcctcgcgggccgatgcctcgggtccccctccggcctcggtttctccgcgcagcggggcggggcgggggcagcgcgggtctcaaagctgcctgcagggggcgcccgtgagcggcgcggccggagccggagacccagcggccgccgagacagcgggagccggcgtgcgagcggcaggtgcctcaggaaccctgaagctgggctgagccatgatgctgctgccagaacccctgcagagggcctggtttcaggagactcagagtcctctgtgaaaaagcacttggagagcgccccagcagggctgcacttggctcctgtgaggaaggggctcaggggtctgggcccctccgcctgggccgggctgggagccaggcgggcggctgggctgcagcaatggaccgtgagctggcccagcccgcgtccgtgctgagcctgcctgtcgtctgtggccatgcccatcatgggctcctcggtgtacatcacggtggagctggccattgctgtgctggcccatcctgggcaatgtgctggtgttcttgggccgtgttgctcaacagcgaacctgcagaaacgtcaccaacgtactttggttggtgttcacctggcgggggccgacatcgcagtgggtggtgctcgccaatccccctttggccatcaccattcaggcaccgggttctgcggcaactggcacgggtgcctttcatggcctgtcagcctggtcctcccgggaggtccacttcggctccctggcctagcattgcgcgttcatgcatccgagtccg

SEQ ID NO: 454400 - DNA, 587 bp, Homo Sapiens
  misc_feature (507)..(545): n is a, c, g, or t
ttctctgggccttcttttgcgcttttagtagatctaggctcaccccagaaaaggttttttgaagctccttggcaaattccaaattatgtagcacttcttcatagtttctctacagcttccaactggtctggattaagatgctctccacttttcaggcgatccttataatcctccagtttgagcttctttttctcgatgtttctaattttgtgtttaaggcatatgagtccattttcaatataggtctcatacgcttgggaaggagatgcagcagaactcagagtagactgcagggggctcaaggcccgctggctttccccatgctgactgtggttcacttggggcttggctgacttcatattcccctctctttcctcctctgaatggcctgaaggtgactccccaggcagccgaggccgccgctgccgcagcccgggcccgccttccaaagccggggggaggcaggagcgctgcggaggtggaccggcgccaccccgcactcgcgtnnnnnnnnnnnnnnnnnnnnnnnnnnnnnnnnnnnnnnngcccgcggcctctgcggcgccagagacccagcctactccgct

SEQ ID NO: 454401 - DNA, 945 bp, Homo Sapiens
tgtggcgcgtgctgagtggctggacatcggtggtgtgagctgtcgacaggaggatgtcatttgcgtttgacagtgcaactgggagggtgctgtgaatgtaagccaaggaccagtccctcggatccatgttggttgataccttgggctctcaagcagtagggcaaatctgttaaagttcaaaagtctcctggcaagttgtcccggttacggtcaatcagcgttacacagccatacattattgacccagtggcgggacaagtattgctgttcccagggaagcgtatgctaggatagacccaagatttcgaagaaatgtctccttttcaggctataacctgcataaagtatgataggaggaagtaatatgttgaaaatacttctggatcaaaagtaacctgttctaagcatgttcattatcttgaacattattgagttcatgtgaactaatctctcctttcagcatatactcagtaaaattttccactaacatttaccagtaaggtagttggacttgactgcacttcacagctcagggtcacattatttacatcactcggaacatgaatgccataccgaagcacaaggcccaccaaaagaccataaatcatagccaggccggtttcgtgcaggaagcgggcccggcggtgcttgaagagccagattgtgagaatggtgagggtgagcagcaggatgaagatgagcaggttggcgctgtcctgccggtggctctcctcggcttgcttctcggacacgatctcctcgtccatggctctagcctctccgccgccgccgtccgaagcccctgcccagtcaaagacgcccactgcgaggagcaaccaaaggggccgcatgagcctgcgggctcggggactgctgccgacgccacggcggaggggtgcccgccgccagccgcagccgagccatgtctccccccgcctctccgct

SEQ ID NO: 454402 - DNA, 938 bp, Homo Sapiens
catcgagaattattacaccataacgctccaggaggggatcattcatagcttcacgaagtaacatcccatcagtcatatacttaagaatggtttttgcactactgcagtcttcaaatctgaatggagtaaccaacttcctggcccaacatcacatccatctcatcagcaactctctgagccacactcattgcagccactctcctgggttgggtacaggcaactcctctcttgggtcctggtaatgatcgcatgtactccacacaccactgtggaatctgtgttgttttaccagacccagtctcaccaaccagtacaaaggactgatgtctaaccagaatatctgtaaacctatccttgtattcccaaacagggagctgaagacgtttctttagaatatcatagtatcgaggagtatggggtaagttggtgaacggattaatgcactgtggaagtgacgtgtgacctgcatgtccggcatgcgttgaatgagcagaatgtgttgaatgcgttgaatgtgctgagtgggttgagtgagctgaatgggaagctttcaaaggtggtaatccagcactgataagcatagcatttgttgaagctcgcaactccttctccttttctttctccctctctcgctctctatctcctctatcacgttctcggtctcgatctttagaccgatcttcacgatcccggtctcgatctcgatccttcccatcggtccccgcacgcttcttgccagaggggtaatcctcccctaggtccaaccggtgccgcttggacatcctcgcactcttcgaggacgggcagttattaaggaagaaaactgactatctgtatgggcacagtcgaggacacccactcaactgctggaggatcgtcacccataccgaaatacagccaacacggtgcgcccaggcaccgacagtctaacatccgct

SEQ ID NO: 454403 - DNA, 941 bp, Homo Sapiens
gaagtcggcgtccaattcacggaatctcgcgtagattcatgcaagctttccatagacttgtcaagcgggccacccggatgcatccgcaatcttctaggagacggtaacctgcctgatttggccctgtcaggcttccccagtggggctttcctggtatttagacttcagtgccatcatcatttcttccatgggcctggaacattacagatcaactgttattaactcctgtacccgaagatctagctgtgactctggcttcaagggagaatttaagagattcctctttctttggtttcctgcttcagtcctgagtattggtggcatagtccatctgtagcatatcatatgtgttccaggcaccttctcaaacttttctcgatcttcccaattgtttttcgttttgtcaaggaatttcttctgaaagatttccttggccttgttgagattgcctggacaagccaccaggctgtgctgtcccattttccccaactcggccccatctcagtccaaacactgaagttcctctgggcatcatcttctaatagctgaatcagatagtacttgttgttgttgaactggagattggtctgatttagcatgacatcatagacatcatttccttcacaatacacatgagccttccccaccttggctgtacactctgggtccacaggagctttgccctttaacagcaaggccttcacagattcatcttgcttgtcttctgtcctgtccttattagcttttcctccagccacaggcatctttttcgactcctgtctctggcatctacgagttttcttggcaggggaagagtcttctggagccgtgttgccattattaactcttttgctttcatttaatgctctcgccctgccgccgccggtgctccgtcgccgccgcgccgccatggaattcgaacgctgacgtcatcccacgct

SEQ ID NO: 454404 - DNA, 867 bp, Homo Sapiens
tgggtagattaggaccattgtgggggattttcgtcctggtgtcgcagactgtccatttgttcgaccggccccagaaaggtccggtatcctgctgctgtcgaaatcgctgttgtgcttcgtgctgtcatgtgtcctaaattaacggaggcaaacttggaacaagtactcttccacgcaaaatgtaatggaacatatgcctctaggactatgaataataccaataggttatctgtagtagcgtgcgtggttgcccgcgattagtgtccgcatcctgtggatgtcgatatattcgtgtggaaataagatctcctgttggatggtccttgtacaagacaagcaacaccactgcacttctttggaccacatacagttccgatctgctgcatatagctgcaccactgctgaagacatagtcacacattttcttgccgaggaaagtgaagagggactcgttctcctgcgggtgtgagcaacagggaccccacgttggtgaccctccgcggcggcggcggctgctgctggacggagctcatggtttcgccggcggggtttgggagtccagggccgtctcctccggcgagtgggcgagagctcgttccccctctcggtgacaggggcggggagaagtggagtcagaggcgccacatctcgcagctcctccggagcggggaggaggacgaggtcgagggaagcaggcgctgacggcgagccaccttcgcgccgcgctgagaaagggaagctcccggcacccgcccggccaggctagggccggatggtcgttgtcctcgcactccggcgactgcgctaaactcccaactcctcccccaaccctcccgcagcggcggcggcggccgcacaatccccgct

SEQ ID NO: 454405 - DNA, 861 bp, Homo Sapiens
ttgtgagctttcaggaggcaagttaaattcagcaactggtgggctctgccccgtgagttcattgttaggaattgtccactatgtttctttccagcttctgtgactgcttggggaaaatctcgaacttactgatgtaattctcaggatgctcatcaggatcgtaatcaccaagctcagcttgaacaatacaggcacccaggtaggcagcatcagaaaaggagcacagcaggcggccatgaaaaatgtcccttttaatctgaaggtataaaaggtatcttgtgagctcttctttaatcttcaagggttcatgtgggtagaatttcactctaaagcacatggtgtatggtggatgagttttcatttgcttgaagatggacttgttaggttcaagccagtgcctttgcttctctgggtccacatagcgaatgccaaagtagtccttctccagcaggctgtagtagttgcagatgtggtcaatgagaaactgccctttggtttccctctggatgtggcaggagatctccgagtcgtccagcagccggatggtgcatctcatctcctggctgagcgatttgacgctggagctccgaaagtggatcattttcatggtcctcctgcctctcggcacacagtggcaggaggcgaacatgcaccgcggccgtggggagcgagcgggaggctcagggccggcgcggtgctcgcctgcgcggacacacacgctcgcacgcactgtccgggacacctgggcgcggctcagccccgggacatcggcagcgtcgggcgcctgcggacacacatgcccagcggccggggcgcggcgggcgggtccctccctctgttcgctcgcctccacctcccgct

SEQ ID NO: 454406 - DNA, 837 bp, Homo Sapiens
ggatttgaaccagctccgggtgggaccctggctcttctcccccaccttaagatgagcttcttcaaggaagcgatagtttgatggagttttaacgtgttctcattcagcttcttcttcgtctcttcttctttctttgttcaatctctgaagaaacaggtcctcttcttcaaccaggaagtttgtgcagctttgaaaactccgtgctgattctcattcgctgactctttatcttatccttccactgtgtggcgttcttcacttctacatcctgtaaatgcatgactttcttcatcttggccacgagattacgctgagacttaagaagtttctcccggtagctctcgaaggcctcgtcgatgggtgccatggcgtgagtctggtgctcctgggactccctgcacaccaggcacactggccgctggtcgtcctcgcagaagagccgcagcggctcccagtggcggccgcacaggcccgggggcacggggcccaggcgccggcgctgcgtcttctcagtcagcctggccagggcccagttgggtcgcagcgcggctggcgccgatgggtgccgacattcggggcaggggaacgggccgccgcccggcgcccagttgcggtgcaggcagccgcggcagaagttgtggccgcactcgatggacaccgggtcctggaaatagtccaggcagatggggcaggtcaactcctcctggatgtcctcagcttccatgctgctttcctgccgcggagacggagtccgacgtgaggcgcgggagaggccagcaagctgcgagcggccgcggggaggccagacgacttccgaaccgccgtcaccgccccgct

SEQ ID NO: 454407 - DNA, 907 bp, Homo Sapiens
gggtcaaccgggctcccatagggcccagcccagaactggggtgtccggggccccgggtgttcgaaagacaccaagcggacgccccatcgtgatgttggagaacacgtggggtgacgtgaaggcaaggcattgttgttcccctgcgggatgggatcaaggcacagcagagaatttatctagaacagtctggttggcgtctagaagttgggacgaaggagtcttgtacatacagccgctgtcgtgtcgggctccccaccagtcagagacacaagtctcaatcctgccactatccagcagttctggccacagaccctcctcctctaggtccaagacctgcttcttgcaacaccagctgaatgaagtcacgaagcacgtctgagaaggggccccaggcacggttgtcctgttttcctccaccacccagccgtccccaccgtgttgcaccatccactttcggaggccttcttggccgcaggggttgcgaataaggttgcgtccgatgggtctgcgcgcgcagaagcggcccagggggcaaggcctggcgttacgggcgggagactggcagctgcgggcgaggtgcagcagcgcgcggccggtggcgccgtggtcgcgggccaggatcagcagccacagggcctggccgtccaccagggctcgccagccccggcacacttggcggcagcgcccgagcagcgtgcgcggggggacgtggctcagcaccaccagaagcagctctgggggtagttggctcaggtccagcgcctcttcgggttccggctccggcgcggggacccgggcggcccggcccctggagaccgaggcgcccatggtccccccgccaggcccggctgtggcccggggcctggcggcgctcctcgccgggatgccctagctgtgccgccccgct

SEQ ID NO: 454408 - DNA, 565 bp, Homo Sapiens
tagccagctatgcgcaaggggaatggtaatgcccccttcctaataaggaaccggccagccgcagaacatggggcccttgcgggacggatgagcgaagcctggggaaaaaggccctggcgaagggtggccgaaggaggcgcagtgcccccggggagggaaaagggtggggattcggcgaggggaccctgcaggcgaggcggacgtcggaggagcccgcagcccggggctgcccggcactcctcccccgcccttcacacaaaggggcccagggaccccgcttcctgctcgcgcagcccagccggctcaggcctgagggctccgttccagttaccgctgcccgggcgggtttctgggccccggctcccgcgggggtcgtccggccccgccgtccgcacccgcccggccgccggggaggctctgtcacgccaaggccatggccacccgctggctcctctgtctctccgctgccccagcgctgctgctcgccgcggggaaagaggcgggggccgtccggcggcggccgcagggactccaggcgaacccacctcttttttttctcaccgct

SEQ ID NO: 454409 - DNA, 1134 bp, Homo Sapiens
ctgctccgccctctctgtgacaatagcccgacggatgccctggtccagatgccctcccctggcctgtcctgctgtgtcttggtgggtgctcttggaagctccccagaaactggtctccccaagccaggaagggagggaggacccggcactggggctgggagctggcatccagcgtcctgagggtcagggttggaattggtgagggtcaggtctgggtgacactcatggccctgatggattctgttgtcttgtgcaggggccaggactgggcagcagagaggaggagacccctcccgccctagtctgaggccttagtcaggggctaaggtctgctctaggctggatcccctggcgccccaggacttctcccatcccaggtctctgccattggcatgcacccttctggccagggtggacaatgtcggtggggtcctgagtattgctttggcacctgaaggctctgggttcaagttcagcagctgccattcccatattctgtgtgtcactcactcactcagcagacaccccctagctccaggtcccacccgatcctggtgtgggtgacagtgtggggttaggctaatccccattttgagagagctcctctgagggggagacagacacagacacggtgctagcctcgggtggactgtgctctaatggacgcagactcggggccgcacagcccagagaaggcagggaaggcttcctgggggagtgagtcctccaggaagctagaggaatgtgctagaacctaccacgaagaaagcaggaaaggcacttcagggagagggaagaacttgtacaatgccccagaggtgggaggcggccttgtgacatttcaaaagagcataactccagtcacagagcggccgacactttaagggctggtggagattaaagtctcagcagggggagaggcgggctgccgtgctgggactctgccaccacttgaagagtggtttgccccagccaagaaggttcaggcctggcctcagaggtcctcctgggccttcctgttcttctgcttctggtgccactgttgtatcttgctggggagcgtctctgaccagaactgcatccaggcctccctgaacttctgtccggcccgttgcactgggttgatcccccgct

SEQ ID NO: 454410 - DNA, 586 bp, Homo Sapiens
  misc_feature (81)..(133): n is a, c, g, or t
cccggtgtttggtgcctgtttgttttcttggtctctcattgttttggttcctcttttgtgttgtcgtgtgtgtcttggtannnnnnnnnnnnnnnnnnnnnnnnnnnnnnnnnnnnnnnnnnnnnnnnnnnnntacatcgcttttgctctttcccgtgtgttttttcttcgtcttgttctgttcttggtgacgctcttcccctggtgctctgtgtaccctttcttctcttgttgttggctgtgttgctgtggttgtgttggtctctcctgtgtgcgttccctattgcttcttctttctcggatcgttgtctctttttgttgttttcttgtttttgtttaagggagctatctacccaccacatttttacagttactaaggtggtatgtgttaacatcacatatagcagtatcattcaaacatttatgtgaaccacataaaaattttacattgcaacacagtatacacctacctatacataattgaaatagaagtttactcctattttataaataggaatactatttataaaataaatatggatttttccattgtgggttttgttttctttgtaacatgacccattaa

SEQ ID NO: 454411 - DNA, 1054 bp, Homo Sapiens
agcggcttaatttaagattcagcatttatatttcaggaagtgacttgaaccaatacaggatgtggaggtctgatttgacagtaatctacataaagaaaacctggggttagtgttgaccacacagttggcttgatgtgaaccaactgtgtggttcctctgctgatgaacattaatcctatataacaaatgccccaaacctaatgcaaagtgcaaacctgcattaacagaggattgtccagctcttaggaagttatagtccagctgctcttcactggtagaccacatcttattaagctaactattaattcttcagtagagggtccgcccagatggtcagatgggtctggaaatccatgtaacatttagaagcctggtgaaaaagaggcagtcggggaacatcctttctatccaagaacatttaaacgggatgtcactgtaggaaaagaacagtagttttcctggtgcttagagttggccgaaactaggttaaatagatgcacatgtgagctaaaatggacacgagattcttttatccgaactaccagtactattcagcatgttatgggtttcattaggatgtagttcaattccctggtttcagaagtgttccaacatacgaattcatttaaccagatcttaaatgagtactatgatgtgtcagacgctgtactaggtgctgaagatagactgagactcggtgaacgatcactaaaaagacacgagcatggagacaaacagagaagtacacactggaaacatcatccaaggcatatcccccgaaacgtcgcaaaacatcgagagcactggcccaaagccgaagaccaacacatcacacaggccgcaatgaaccaccgctcgcaacggcgaaacaaggaccccctgggcacatagcccgcctagcaaaggcacccactcgaaaccacgccacggcggtcacaaacgcacgcccacccaagcacggctacccgaccccaggtagctaaactagacacgacacccacccccgacgagcatgcaccaacccgcagcgaaccccaacaccacagcgcacaaa

SEQ ID NO: 454412 - DNA, 772 bp, Homo Sapiens
  misc_feature (569)..(629): n is a, c, g, or t
  misc_feature (679)..(724): n is a, c, g, or t
tctattacgtacgtatgcaagtaatttctgtgcttcaaggagcttcagagagattgccttgttcaaagccctatggttattcaaatggtagagccaaaaatttgatctatgttctgacttaactccatgggctttggaccttggcagaggaaatggtgtctttgaactgtagtctgtagtcctagaaattgaataaactatttcctaaatagaggtaagagactaggatcctagcaacttctctaagttaacaaaaggggaaaaatatccccataccatttttctcttcattctattaatgagggctagagtcgtttcatagattgaatagtttcaagagcatattgagcagtgcctggctaacagctgaaagtctgccatttcatgcaactttgttaggctttagaagtgaagcaggaatatagagaaaatacatcttctcccacccacaacgtgtattttaaaccatttcttctggcccagaagacaaacttttccaaatatcttgggaaaaccacagtttctactctttggagacaagagtctcactctcacacccaggctggagnnnnnnnnnnnnnnnnnnnnnnnnnnnnnnnnnnnnnnnnnnnnnnnnnnnnnnnnnnnnncgtgtgtagcactcgacaccacacctggctaatttaataagtgtaaatannnnnnnnnnnnnnnnnnnnnnnnnnnnnnnnnnnnnnnnnnnnnntggacaacctcagaccttccaaagtgctggaatcacaggtgtgagcca

SEQ ID NO: 454413 - DNA, 685 bp, Homo Sapiens
catctttcattagaatcaatccagcttctccagacttcgccatcatgccataccaagcagtcatatacagggccaggatcgctgtatttcttctcaaaagaatttagcaattccacttgactttgaagttcctccttgattagtttatttgcttgagaagagccgttgttggcaacatcaaattcttcctgttttctacaggcttctgcaagggccactctgtgaacagggtcccagattttttccttccgttctttctgtatcctttccttgagtgccttaggatagaagtcatagccattttttatgccaatatgatatttgcctgagggatttgtccagcttgcaggaattttaagcactcttcctgaaaggccaacaatctcaccatcctttggctctacttctgtagcagtattcacatcgccacttcctgttgtatcaatgatatcaacgatttttggttttccatcagttgtaacctgcatgcccggagcccccgggtcgacccccgtgtccaggactgcgatgagcaccccccgcccatcatactccgggtagcggcagaggaaggaggcggctccggtctccttcttcggcaggagaccgtgaaaagggaagggctcctcagtcgcagcggtggccatggacgcaggatggaggacgaggaagcggcaactccgct

SEQ ID NO: 454414 - DNA, 598 bp, Homo Sapiens
  misc_feature (200)..(245): n is a, c, g, or t
ttgttaccccttgttcccttatatgccaaggattagctgagcatgttgtgggtgcctgtaatcccagctactcggaagctgaggcaggagcatcatgtggacacggaaggtgaaggttacaaggaggccgaggttgcaatgagctgagattgcgtgcccttgcacttcagcctgggtgaccagagagaactccgtttccnnnnnnnnnnnnnnnnnnnnnnnnnnnnnnnnnnnnnnnnnnnnnntgaatctagacaaatactacttttcaaagtttccaaaatattatctgtcaattttctccatttgagctccctaatttgaatttagtttatattctctttatattttttctcttactagtgcctttgtatatttatggagcacaaattttagtagtaaactctagcttcacagagggccatggatatatacagtggtgcactggcaccagcttgtgccagctgacgagagtcaattgtgtgcttctcgttcccaattctgcatcaaatttgccaattaaaagacaaatggtaaactccagagaatcatgttcatagcttgaaatctgcatcatggtccgggcgtggtggctcat

SEQ ID NO: 454415 - DNA, 569 bp, Homo Sapiens
  misc_feature (320)..(328): n is a, c, g, or t
gggtgagggataccctggtactcgcccatcatagatctcgtcttcctcatcaatggcttcggtgacatcactctgtgcatcttcttctgggttggactcattgccgcggtaatagccatcactgggagcatagcccccataattgtcctgatacttgtagtcatccattccttggttctgcgactgcctggttgccccttgagctatatcccctcgctctgtggtagaggtttgggctatttcaataacccatcattcattatgtagttcaaatgtgaaatatgttcatgtgacttcttaggtgaaagtcacactggttnnnnnnnnntttatctctcaaatcaaccagatttgtgcaaagacaacctaaatatccttttgcactcgatgtctgttggaagtctggaaagtttcaagctctggtctccttcagagactcagaagtgttgcgttgggaagtgttgattagaaatggatccagcttgtttttcttgacagggagcgagcaggacttggcagactgcgtgctggccttgatttgtcctgccaccgaaggttatgctctgggt

SEQ ID NO: 454416 - DNA, 1026 bp, Homo Sapiens
gcggcagcctggtgcttgttcagcttcctgttagcctctgtgttggtgctgtccctgtggtctggtgtacctgtgtgtcgttgcgaggctgggtttcgtagcgctctagtgtgttgtgtcgcgtcgattgcccggtgcgcgttgattctgggaaccttgtgtgcgtgctctcgtgtaggtgctgccggtgctgcatacggggtctagccgttccgtgtggcggtgcggtgtggccgggggcccgcagctgcgagcgtgttgtcgccgatgtgtgcgtacagcatcggaggagggagctggttgagagcgtcaagaggttggttgagagattgcaccccgaggtctacatgagtcgtgaatcattttcttgctgccatggcgtaatattgaataccatgtgtctgtagtttgtgaatcgaaagtgtttgtatcattgagcttccccaatatactgtttttcacatatatggatactggctgagttttgttggactcagtggaaatccagtatatgcaggtgatgctgcaatgtaagaatgtggtgggaagattggtttgtactgagtctgatgaatgtttggggatggtaacagacggggatttaagcccactgggacttggtgaactatgccactgggattggagatattataagttggatgctgtaacataggtcttgaggtacacggagaggctaacaggtgggccactggtgcagcactactgagggtggctgatgatgggtatggaagtagagtaggctgtcctccgaggtgtgtatttccagccaggtgggcatgcactgctgtgtgattgggacttccatgagaaagagtgaatggattactggtaacactagtaggaatataagcttgctgtcttctgtgcccaaagtttccattccactcttgatgcccagatccaaagtgctgaacctgactgaagttcaaatgctgctgctggaatgctgatgtcaatttttgctgacgagtacccactgcagaaggctggtttaatctttccgct

SEQ ID NO: 454417 - DNA, 878 bp, Homo Sapiens
  misc_feature (798)..(834): n is a, c, g, or t
tgatggttctaggcaagtctggtcacttctctgtgtttctgtgtccttttccagtccttctgaagaagagtcacagttagtagaggcagtgttttcccaatcttccagggctagctttggtttcttagcagaagacactgcatcgttttcttcttgattgttacagagtttataaggttttaccataattacatccaattgtaaaggtttttggttctctagctggtcttcaggtacatacagaccatcacttaggaaataatgatctgtacttgtaaccctgattgttgtggtagaagtgtctttgcctactaaaaagtggtgtctgccctctctgatctgctgagcccatgtgggatgaaaccatattacatgtgaaaaatggccagcataaactgcaggcataatccaattttcaatacttaattctccaaagagtgtttccttatcaaacacggtgtctgctggcatattcacaggaataaggaggtctggatgtgagtcgaaatgtaaaaaacttacattactggcaggaagatgctttgagcctatggcccggtatataaagggtagaacctcctgatgatcctccaccacccacactgggagcttggggtaacgccggagaccagcgcgccctcccgcggagtcactcatgtttttgcgcccgtcagttttgcagtaaagcggtggcagctggagaagacccgggaaagccggcgcctcaacccggccagctctctccgggcggaaaccaccgctctcgacgaattcgagctcggccgatttggcctgatnnnnnnnnnnnnnnnnnnnnnnnnnnnnnnnnnnnnncggccgccaccgcatagagcggcattcccctatagtgatcgata

SEQ ID NO: 454418 - DNA, 906 bp, Homo Sapiens
  misc_feature (835)..(857): n is a, c, g, or t
gttcccgttacaaacttttgcctcagtaagtggccatccgtacccattgtgtcttcgaagtcgatttaggaatagcccagaccaacccaagtaggccatcatgctcgctgggccctgagctccaattgcactcgttaacttaaagatatacaacactatgtctaaaaatggcttactaagatttgaatacagatcgactacactgttacaaaattggtttctacatcttgtgtaagcagctggtctggattagctattctgttgtccagattccccattttataatatgtgaaagcttgaagatactcctcatagaggtatttagtgagccttactcggaagcacagtttaagctcatttaacccatacttcaagaagttattaaccagagagataagaggcatggcagcgatgaagttgagtaagtatctcttgaaatctttcctgctacgaccaatgataccactttcaattagtgtcccattttgaatcatccaaacatcacaatatgttcgagacaccagcataacagcaataagtaccaagtaacctgtctctttacaaaatgttctagggaccatgattttcagaatctgtatgagccttgagaaaaacaccttgtccaccacagctcgctcctttttcccctctttctcattgttctgtaatggtggttttccacttttcttaccgtgcaggccgagggcgcggcgccgcttgtggagcaggcagagcagcaggaacgcggcaccagccagcgaggagtttcgcgccgtcaagtacttgctgaaggccgccatggcactgccggtaccagcgagccggcgaggggacnnnnnnnnnnnnnnnnnnnnnnntaccatactccgctctcgacgaattcgagctcggccgatttggcctgat

SEQ ID NO: 454419 - DNA, 657 bp, Homo Sapiens
  misc_feature (211)..(211): n is a, c, g, or t
ttccaagtcactggtatccaacctggtttgagaaatcaggatgttatcaggcttaagatctcggtggatgatctggtttttatgcaagaaagccagggcactgctcagctgaagcatgaagctggtgttagttttacgattgggtttcctggacaacagatactcattcatatctcctccgtcacaaaaatccatcacaaaccacaaatanataggcgcttctgggatcaaaggcaatttctccttttaatgaagtttctacaagctgtaaataaagggaagaattagagccgtgggacatcttttgcaccatcccatccttttgtaggatgcattcctccaagtgaatcacatttggatgttggctcttgatactgcttagtgcccagaactcacgaagggctagtgtctacattttcaggtgcgtgacatcgaattttcttcactgccacccgtgcagaggtctttctgatgactgcttcatacacaacaccgtaactacctcggcctacctcccgtattagatcgtactttggctggctactcaccatcttcaaggtcgaggtttctcagggtagacgctgccgcttctccctctcatgggctctgcaggccgccattatcgggcagctcgcgcctccgctgccgccgcccgct

SEQ ID NO: 454420 - DNA, 167 bp, Homo Sapiens
gtaagacaaaaagatcgtttttattcacttttgattacaaaaaaaggttacatgaataaaataacaatttcctttaagagagggattcctgaatgattaaactgccaaggaaaaaagagtgaattcttccttttaataaaggtgacctaggtcctgaggaagttagg

SEQ ID NO: 454421 - DNA, 321 bp, Homo Sapiens
  misc_feature (114)..(126): n is a, c, g, or t
atgtttaaaacatggcctttattaatactgcccactgagctccatttttattttacattgagatacttctgctttgcaaagaaaagacagaaaagtgcattttacaagagtacnnnnnnnnnnnnnaattctctgagaaaatggaatctgaatcacaagttcacaatgtagtaaaatgaaattaagaaacaatgatttcagtaatgctatgccatcactagtgtttagctctgactttttcttgtaaatcagatcctgatatacagtctagagcatctaggttattattctacagcatattaaacacagaaaaggaggttt

SEQ ID NO: 454422 - DNA, 421 bp, Homo Sapiens
ggtagattacagaaagaaggttttatttttgtatgtgcagttaggcactgactgaggcatttagacaccattaattataaagtgcattgaatataagttttgatccctttcaaaggaataattcaataaacctcatatttcattcttggaatcagtcaactcaaaaacatgcatagatgaagacttactaagtgctaataacagtcttttattatttatattcctgcaatagtaatagcaacatactgtacttgcatatatcacattttatccaaggacctcaaagtcattctatcaagcagcacggtgttggaaactcaagattccacagcatgttaggtatacttacttatggaataggaaatagattcccaacaatagagccaaaataaaagaccaaagagacaagcctatatatttc

SEQ ID NO: 454423 - DNA, 427 bp, Homo Sapiens
caattttcagaacttaattttttgaactattgctaacacttaaaagcaaggatttttcataggtttaccactactggtaaagagttatgattacttccaaaatattaatatcgtgccaaagaaaacagagtttgttaccatttttatgtatatagcaatgtattttactagttatcttgataattttcagaaatgggacaaaaatagaagactcatgattctggcttttactatttcaaaccagatgttaagcatgttggaattcaaatttagaaaagggactctgtgggagtgccagctacaactttgggagtaggataaataatttcttcaacagttatatatgtacctaataagaagccaacaactccagtgaatgctatagaaatatttttcaggaccatccatatattataatgttccttcg

SEQ ID NO: 454424 - DNA, 447 bp, Homo Sapiens
tgcttgtgattatttttttcccttttgtcatgagaaaaggaattgcaccttttcgtacgtgtgctctgatctgcttccaacaaattccaggtgctctcaggtccccacagacattcatttggagcatagaaagactaggtatgatgcactgaatggttggtatcaaaattcaagctcagagcacatgccaaaatgtcaactccaacgctagttacacataaccagctcccacccaatcaggtccccttctgtgtgtgcacatattactacgactccactaaaaagacacacctgtttctttcaggaggctggtctaaggaatagctgcccttgtctacgtgtgtgcccaggtagcactgcccaggggtacagcactgccactgaaatgcccttaacatgtacggccagaaccggctacgtgcacggacactcttggtgtgtcctgcg

SEQ ID NO: 454425 - DNA, 491 bp, Homo Sapiens
  misc_feature (27)..(27): n is a, c, g, or t
  misc_feature (83)..(83): n is a, c, g, or t
gaaaaccatctttaaggggaggaaccngagtgctgaaggaatggaagtccatctgcgtgtgtgcagggagactgggtaggaangaggaagcaaatagaagagagaggttgaaaaacaaaatgggttacttgattggtgattaggtggtggtagagaagcaagtaaaaaggctaaatggaagggcaagtttccatcatctatagaaagctatataagacaagaactcccctttttttcccaaaggcattataaaaagaatgaagcctccttagaaaaaaaattatacctcaatgtccccaacaagattgcttaataaattgtgtttcctccaagctattcaattcttttaactgttgtagaagacaaaatgttcacaatatatttagttgtaaaccaagtgatcaaactacatattgtaaagcccatttttaaaatacattgtatatatgtgtatgcacagtaaaaatggaaactatattgacctaaaaaaa

SEQ ID NO: 454426 - DNA, 406 bp, Homo Sapiens
taatagtgcattaaatattttatttaaattaagaagtataacaaaatcacatacatttgttccacggtttgaataaaatttccaataactttcaaataatgcacacatagtatcgcatggatcaaattccgtacatttcaatatggtcatgagataggctgtattccaaaatttggtatataaatccatacataatatatactatatacattgactttaaataatctaactatgtcatttttaaaagtcaaagcaacttatttctaatgaaagttacaatatgcatgccatattgacacctattcaatagataaaatctaggaaaatcttttttgtgaatactatttatactggaatgcaaattcacataaaaatacttcctttaaagcatgttctatttcacaca

SEQ ID NO: 454427 - DNA, 1582 bp, Homo Sapiens
  misc_feature (568)..(617): n is a, c, g, or t
  misc_feature (782)..(843): n is a, c, g, or t
agtaccaattaatttatttttgtataggttatattccaaaacacagaacttatgactgggcggatcttgtttaaatcaatttattactcaagcatctttcagaaaaaaattcataaggaagtgaggacagcaggaaagggcaaaggaagaagctagataaaaatgtagtttcacacaatgtagcctcagcatgattatctctgggagatctaggagcttagattaatcacggaggtgatatcttcccagaaattagagggttgggtatgtttagtcttagaccaagatggatctgcccagaggaaggtggagcatagacctacacaagaacataactaaaacaaggtagctcaggtacagacaaggacaattactggagaagtagcaggtgtgaactagtaatacagtacaataactacgaaagactgggagtatagggtaacacctaccccaactacagtgacaaattataggattagaagacacaaataatactaactaacaatatctaatatactacacagactacatatgatacattataaaatgtaatatatacagactatcnnnnnnnnnnnnnnnnnnnnnnnnnnnnnnnnnnnnnnnnnnnnnnnnnngcttagatacggtggacatgacaagacaaataacatcgcaccaataggcactagagaccataccagataaatccaaaatcatgatccatggaataaagcaataagaaaccattacatgatggctacatgatagaggtagaaagacataccgcaaatgccgcaatnnnnnnnnnnnnnnnnnnnnnnnnnnnnnnnnnnnnnnnnnnnnnnnnnnnnnnnnnnnnnncagagaaaggctgtatactagtaaggaaaatcaagtgggaaaatacaacaggaagaaaggaacgagactagtagtaggactgaaaaagacagtagcaatgacatataataaaacccatgatgagaaaaccataataaaaaggagaaaaagacaaatcatgacacttgagaaactcaggacaatcaacgaatatcaacaagaattacaaaccacataatacatgcacacagacaattgaaacacaacaatataaaaacaacaaaggaaatataccaaatagaagaaaggagagaataagtccagactgataaggcgctaatatcaatttaatcccaataattcagatagaatacagttaataactatatatattcattatatataaggaacaacatagtgaatagcaacaaaagtatcggaagaggacgatcagagaacatatagacgacaagataaagaggcgacaagggaaaaaatgacaagaaatgaaagtggtaggagagcaaccaagaagaagatggtttaacacagtcaagtagtaaagaaaggtatcggggcgacttgacaaataataagaaggcggacatagcgagaagagactatagggtacgatatacaagcacagagagactcagaccagcaatacaagagaacagtatagaaaggaagagccgacggagtagtagtgtatgagacagtcgacacggaacgacggcataagtgtagtacaggcgagcga

SEQ ID NO: 454428 - DNA, 611 bp, Homo Sapiens
atgaacggaggggtgtgaaacccctagttgtcactggtccctgtcacagtctcttctgcccatggctccttaaagggcaggttggcctgtggggagaggtgggagctgggtcagaagggcaccaggtctcaccctcccttctacttgcagccagatgggcagtcacctgggctctgggatgatcctttctgtgcagcgtccgcctgcggtgccactggtgcagggaggcgcgggcctcgcagctgagcccccggggagcgcggtctgtttcgggctggtagtgggcaatgtggtgcagcgccccaaaccacgtggtcaggtagtacccagcctctccccgcagctcatctggatctaagagctccataagaaactctacgtccagctgcgtgtccccaatgtccgggctccagatgagttcctcggtcagcgccggcaggaaggcgtcggcccccaggggatcttggttctcgcctcgagccaggcccgcatagacatctctgcacacctccaagaggagcgccaccttgcggcgcggggcgcaggcagcgtggaggtgcgccaggcgctcgtggatgcggctccgcaaggcgggggcgaggctctccgct

SEQ ID NO: 454429 - DNA, 920 bp, Homo Sapiens
tttgccggttttcccagaggctagttaacatttcacaaaggatgacccgtgatttgcgtagtaatttccgatccagcacagcctgatgattccctaaagggacctaaggtggccaatcataagccaggatgtagacctggggaacggaggatggagagttattgtttaatgggtttcaatatagcagaatgataaagctctagaaacagatggtggtgatgtttgcataactatgcaaatatacttaatgccaatgaacttaatgcttaaaagtggctaaaatggcaaatttttatattgtgcatattttgccacaatttttaaaaatgaacatgaagttattaaattcaaaattatttcctatttaagtatatatgtgtctgctcttttaaaaaattattcatatgaagaggtagtttaacagcagcaaattactccctaaaaactagtctaatgagtaattttgtctaaacatatgaacacatgaatccttcattcagaaatcccttcagttcaattacttcaccttggtttccatgctattcattgaaataggaaaaataatgatgggcatgaaaacgttgttgtattttatcaactgatcttctagagtagaggtcagcaaactttttctgtaaattttttggtagaaaatttcaggctttgccagccgtaaggtctctgttgcaactactcaacctgttgcaaaagcagccatggatatgagaatgagtgaacatggccttgttccaataaaactttatttacaaaagcagggtgatgggccagatttggcttgcaggctgttgtttgccaactcccaaaagagcagggagtatttagtaaaataaaatattgacgaacctgataaccagcccacccgctctcgacgaattcgagctcggccgatttggcctgat

SEQ ID NO: 454430 - DNA, 1027 bp, Homo Sapiens
  misc_feature (41)..(77): n is a, c, g, or t
  misc_feature (427)..(441): n is a, c, g, or t
tgatacgtcataaggggacctggattcacgcggggcggcgnnnnnnnnnnnnnnnnnnnnnnnnnnnnnnnnnnnnnatcaggccaaatcggccgagctcgaattcgtcgagagcggcttgaccttccattttcctccctttcctggttgttctgcctgtgccctcctggcacatcagcagtcactgcaggcacatcgacaaaagacaccccaccgccacctgccttgattcacaaggagcacaacctcgtctgaaggactccaatccacagagttaggaaccctcatgggaccctgctcatcctgagcccccagctagcatgtgagttccctggggctctttatggcacttccctcaagtggttccatctacttaatgagcctcatgtcaccttatgaaccactgcctttaatataccctaccctnnnnnnnnnnnnnnnaactccatatcttccatctctccctacccctaccacaacccctttccttccttgcagaattctgctgataatttactagatgccatccttggggcttggctcaattcaatccacatgaagttcacaaacatgtattaagacaatctatttttgaggtatagaaggtaccccaggtgactaacacaaagttcttgtagccaaggagctcagagaacctgaagataccttcactgtccttcacagttatctcaaccttcagcattcccccagagaaatgctgccctctaggaagttctctccaaggaatcccacccctgtcctgagtatttctttaatctacaactttcctgaggctgtgtattgcacagggggcgtgccaatgggttctgcacttgtgtccaacacccttggtaaatcgacctttccagaggactttggagcccttcgaggattctcagcatctgcatctcccaggagctcccagcatggcagttggcacttgatgactgtttgtagctaaggtacttaggctgacttttattaatctttagtatcaggctgataattaaaggtccattatacgtat

SEQ ID NO: 454431 - DNA, 1363 bp, Homo Sapiens
  misc_feature (168)..(278): n is a, c, g, or t
tattatatttgtcctgacgatgtattggctctgtggcccaggctggagtgccagtggcatgatcatggctcactgaagccccgacctcctgggctcaagcgatcctcccatctcaggctcctgagtagctgggaccacaggcatgcactatgtcccacgaatgtattnnnnnnnnnnnnnnnnnnnnnnnnnnnnnnnnnnnnnnnnnnnnnnnnnnnnnnnnnnnnnnnnnnnnnnnnnnnnnnnnnnnnnnnnnnnnnnnnnnnnnnnnnnnnnnngtgtgagctaccgtgcccagcctggttctgctttttttaactccccttgttgattctcttcagagaccatcgctttccactccgtgacaggggctctgtggcttgctggatttgtctcttcgccgtcagggaagaaatgacattgtgttcccagatcaatgcagtgtagccaccgtcaatgactggacagaatgagagggcatgagccagccaggcagtttcagagaggcctgcaggagacacagcctagctgccaccacggctccccaggtccttggacgcctgctggtccccactgggctacaagcagctttgtgagagacatgggggcgggaggatccactggcttggtacctctgcagcctggaaatggaagatgttaatgttctgtgggttcttccccctgtgagatgcggcagttcacaggtcctttcagaaaatgaccggtgaaatgggagcttaaacacagtatgcatgtcctaccacgcagccgccagctctttgggggcacaattccggtcgctttccttgcttgtctgactcattctccttttctgtttctcctgcttccttggaactgcgttcttcaaaagatatagcatatatattttatctgagactctgctttctgaggaaccccatgtaagcaaaggtcaaagaggaaaatccagaccgctgttctgagagtccaaatatccctatgttttacctcttgaatagaaaaaacatctgaagaggaagtcaaatcatctctgaaaatgtagttgcatgtaaaggtaaaactcttggctccaatgggttatatgtataagatgccattccaggagagaggccatgctctacacactgtagggcaagtgcctctttcgttctcttaataatagagtcaggtcccttctccaagggaagaccctgccttgcagccccagcctggcctgccccttcttgcaggcccgctccgaaccctgggtaagactcgtgacgaggctccgggtggccgagcccttccgagagtgctgcggtcggcagggctgggctggctcccccgctctcgacgaattcgagctcggccgatttggcctgat

SEQ ID NO: 454432 - DNA, 914 bp, Homo Sapiens
gctgaagcacaaaaaaccccaaattcctattcatcctgatggcttgcaaagtccatcgtgaaccctgctgatccaaaagagcccagaacatgggcaatgggatataaaggaatagtaccctggtcagtgcctttacatccataatgagctgctttggatatttctcagctgcccagtctagccagtgctgtcgctttggaatgtctccagaacggttcttgaaacgattggaaatagcaaaccggatacatttgaaaacttgagccactatgtttccttcagggggtggtttattgtatattttgcttcccattgcaaacacaacaagtgcaattaccatgagcagtcctggaactccaaaagccaatgcatagcagtcttctccgaaacattgcacatctcctctcagcatgggtgtgataaatgtagaaatcaagctccctgcattgatggacaggtagaagactgagaagtatctagtccgttcctctgcatgtttttcttcaaactggtctccaccgaaagctgccacacagggtttgatgcctcctgtccccaaagctattagactcaggccgatcaatgataggactttgaattttcccaaccacgagtcagcaatggctgctcccaggatgggagtaaaataacagaggctgctgaaggcatggtatatagatgtggaggtatcttcattccagtgcaggaaatacaggaaatacaggatcagcacagctttcattccataataggaaaagcgctcgcagaattcattcaccacaatgaaggcaatgctcagtggatagttggagccacagattgtcggagatggcttctttggagggctaggtggtcgatgtggtacctcttcaacccgctctcgacgaattcgagctcggccgatttggcctgat

SEQ ID NO: 454433 - DNA, 1119 bp, Homo Sapiens
  misc_feature (1036)..(1072): n is a, c, g, or t
cgggccctgggtattgcaggtgtgtgacgctggtccggccttttactgtccctagtggcctccttcgtatatgtcctctgccgcgccctttcagcccgtgtctctccttttggaatgtctcccgtcccggtttcttgaaccgattggctactacctcccggtatgcatttggcgaacttgagtcccactatggttgtcctttcggggggtttgttttaattgtatatttggcctccccatggcaaacactaccagtgcaattacccaggagcagtccgtggaactccacaaagcccatggcatagcagttcttgctgccaaaacatggcacatctcctctcagcatgggtgtgataaatgtagaaatcaaagctcccctgcattgatggacaggtagaagactgagaagtatctagtccgttcctctgcatgtttttcttcaaactggtctccaccaaaaagctgccacacagggtttgatgcctcctgtccccaaagctattagactcaggccgatcaatgataggactgtgtgtaccacttgtcctcccagtattggtaaggcacccaaggacttgatcacatggccaagcacatacaccaaggagagatagatgattgtcttgaattttcccaaccacgagtcagcaatggctgctcccaggatgggagtaaaataacagaggctgctgaaggcatggtatatagatgtggaggtatcttcattccagtgcaggaaatacaggaaatacaggatcagcacagctttcattccataataggaaaagcgctcgcagaattcattcaccacaatgaaggcaatgctcagtggatagttggagccacagattgtcggagatggcttctttggagggctaggtggtcgaggtggtacctcttcaatggagacaggtgaaaaaagagtttccttggactcatttttctggaaaggattcatggctggctccttactctctctctctcctcaagcatttccgctctcgacgaattcgagctcggccgatttggcctgatnnnnnnnnnnnnnnnnnnnnnnnnnnnnnnnnnnnnncgccgccccgcgtaagctccagtcgccctatagtagtcgtatcattc

SEQ ID NO: 454434 - DNA, 996 bp, Homo Sapiens
  misc_feature (54)..(90): n is a, c, g, or t
gaacgttgtaacagatctatagggcgacctcgggctcaccgcggtggcggccgnnnnnnnnnnnnnnnnnnnnnnnnnnnnnnnnnnnnnatcaggccaaatcggccgagctcgaattcgtcgagagcggaggaaagaattaacaaagttaaaagaagagctcattgatgcaatcaggcaggaactgagcaagtcaaatactgcatagaggaacagactaaggagagataggactttaatctggaggaaaaatatcctacaaacaacaactgttcacaacagcaaacccctacatttatgagctgtaagaagaaaatggagacaaacagaaggagggaaaaaccaacctactctgaaagccttcagacattatgactctggtgataagctctttccctctccgtttgctgcttttttctggcctttacaacagaatggaagagaatcatttaagagttcctgtaacagttatgcagaaaatactaaaacccatcaggcaagatcaccacgcattgaaatattttcatatcaagataaagtcgcacattttccacaatacattgctaaaataaagaggagaaaggcttaggaagtttttttgcagagagtgctggtaaagaattgagcaagtttgctattgtattgtaatgtttctctcaggtttgttcttcctatcatgtttgatattccatggataattgagatcagccctatgtaagttaagatcataatatgtggaacaaatggaattgtaagtgctttcaaagggtactatttatcacgacagtgtccgaacaaatgtttcttcagcttgagaaattttagaatgataggaagtttctcgagttagccttcatggcagtttggtagaattagaaccttacaaattggtccaagaacttcaagcacttagaatgccttcctaaatggttaccactggtttaccgaatctatggatttctacattacactagacaggtggtccactgtctcacc

SEQ ID NO: 454435 - DNA, 467 bp, Homo Sapiens
  misc_feature (88)..(89): n is a, c, g, or t
  misc_feature (91)..(91): n is a, c, g, or t
  misc_feature (98)..(98): n is a, c, g, or t
  misc_feature (102)..(103): n is a, c, g, or t
  misc_feature (109)..(111): n is a, c, g, or t
  misc_feature (131)..(131): n is a, c, g, or t
  misc_feature (304)..(304): n is a, c, g, or t
  misc_feature (391)..(427): n is a, c, g, or t
ccgaaacaatcaacgtagattggttttccttctaacacctccacatccctgcttctggccacctcagcaaaattttcttgttgttcannangggttcnttanntccacnnntttagtcatcagtcatgcangaaacacctcaacctggcttcaatggggtcatgtgatttggcaaacactacaaatttggccatataaggtacgcagataatttctctgtatgcttgtgatgcaaaagtaacggattcctggatctgtcgacaatctatcagccagaacctggcagacacgtttgttgtaaagngaaacacattcattgacaaatgttaatggcgtagttcctgtaacatccgctctcgacgaattcgagctcggccgatttggcctgatnnnnnnnnnnnnnnnnnnnnnnnnnnnnnnnnnnnnncgccgccccgcgtgactccagttgcccataggatcgtatc

SEQ ID NO: 454436 - DNA, 965 bp, Homo Sapiens
ccctttcctcctgtatacgcgttgctccggaatcagtgctcgactgcttctgtcgataatgtcatcctgatattgtgcagggacatatcccgcaggtgtcaaggaccggagtcagactaccagtggtgtgacacgttgacgtttgtaacctttgaataaagagtctaaacattcccctgagtactgtacctctctgcacgctgggtgcaaaatatgggtggttctggcttaaagatctggtgcaaagtaggagaattcccctacagtgcactgtagaaacagaaggattaagactgttctcagaatttgggtcttctagactttggtgcagcatatctgttcgttattactaataacaccaatcagggtcttcaggcctggaagattgaagacattcagccaacaaaatgtccattgcgtggcagctaccacaatatgcctggttacagctggggaggtcatgttctctgtcacaggtcttgagttttcttattctcaggctccctctagcatgaaatctgtgctccaggcagcttggctattgacaattgcagttgggaatatcatcgtgcttgttgtggcacagttcagtggcctggtacagtgggccgaattcattttgttttcctgcctcctgctggtgatctgcctgatcttctccatcatgggctactactatgttcctgtaaagacagaggatatgcggggtccagcagataaggacattcctcacatccaggggaacatgatcaaactagagaccaagaagacaaaactctgatgactccctagattctgtcctgaccccaattcctggccctgtcttgaagcattttttttcttctactggattagacaagagagatagcagcatatcagagctgatctcctccacctttctccaatgacagaaagttccaggactggttttccagtacatcttaaaacaggccgcagagactcta

SEQ ID NO: 454437 - DNA, 413 bp, Homo Sapiens
  misc_feature (359)..(359): n is a, c, g, or t
catgtaggcacttatagctatcaatttgcctcttagtactgcttttgccgtatcccataggttttggtatgttgtgtttcctttatcatttgtttcaagaaattgttcaatttccttcttaatttcttcattgactcaatggtcattcaggagcatattgtttaattttcatgtatttgtagtttcaaaaattcctcttgttattagtttctagttgtattccactgtgggtcagaggaaggatgcttgatgggtattcaacttttttaatgttttaaggacttgtgacctaacatatgggtctatccttgaggaatggatacatggtgcctaaaaaaggaatgtggtatttctgcagnccatggggataaaatgttccggccaggtatgtattgggacccctttggatccta

SEQ ID NO: 454438 - DNA, 417 bp, Homo Sapiens
  misc_feature (347)..(369): n is a, c, g, or t
gaggctaaaatcatttaattatacacaggccacaattgcaggatggaaaggcagtgggcacttggaagtgactacacatggcaataagcagcctatcttctttaccaaccagaagtttcttggggcatgtgatggtaggccagaccctttccaagggaataatactacactaagcctacactgtactgtgagagtcatggtggaacaaggccacaggcagtgggaggaaatgtgatgactcactgtgtcagaattctaaggcccagcatgatcaggatgtaaggctccataattttctaaaccaggaaattatgaggaaggaacaaaattctggcaatcacttatgnnnnnnnnnnnnnnnnnnnnnnnggggacagagtttcactcttgttgcccgggctgggagtgcagtgggcc

SEQ ID NO: 454439 - DNA, 1022 bp, Homo Sapiens
atgctctattttgtcatcgtcttatttttcatggtcttacgtattttgattgtatcactgtgggattcctccttccctcgtcttttaattcgttggcttgtatcatcaaacttttggtgacatattatctatacctgtaattcactatatcgatcgtgttttctctattgcctgctgtctatctctgcctcagtatcctccttcttgcttccatattgtggatttcagtcattgtcttcacgctttgtccatcaggattcttaatatattctcaatataagattttttcaataatgggtcacaaatatcgtctttagctggagttaggttgttactctatgggtaacttttaatgaccggacatctttctgtttgaaatgtagctgaattatcaatactgggtcgtcaatagattcatgtttgtgtcttgctaagaaatactttctaccttaggtcataaggatgctttcttatattatcttttaaagactttatgtttttgcctttcatattgattgtcaatcaaccagtaactatttgtttctttttgatatatgcatggtgtgatgtaggaatcagataacagtttttgacaagggtaattaaaatgcctagtagctttggaatacctcatctttttcccagtgtatctgatagtttcctatgtattatatgtcattacaaaccatttttgcatgcatttgtttctgggctttctattccattcatgggtctatttatctgtgcatatatatagactacagttcttagttatatagctttatagtaaatcttaaaatccatttgcttaacattcctctccaacttggtggctatttgggggcttttgttcttacaaataaattataaaatcaactttaatttcaaaaataataataacaatggcacatcctgttgggattcaatttgaattctctaccagattaattttgggagaatatacatattcatgatagagtctactccaacacggggtatcgttattgttaacgtatacccca

SEQ ID NO: 454440 - DNA, 1082 bp, Homo Sapiens
  misc_feature (904)..(920): n is a, c, g, or t
ggtgctcttcgtcttggtgctcctggtagcggcacgcaggtcgtctgcattggtcttgtccggcctgcaatgcagttactgagcgcctcctcttgcctgattggcgcggctgccttgagctccaggatctcctgctgcagccgcaggcgctctccatcgaaggccctgcgcgcctcctcgcgcgcctcggtcagcagcgccgtcttgaccttgtcggccgcgccgtcgcgcagcacgttcagcgtggcctgtagccgctgcagctcgccctccttgatcttggcggtgcgcgccgcctcctgctcgtgctgccggatgagcccctcgcgcagcgcctgcagctccttggtcttctcctcatgcaggcttggccttgagctccgaaatgtaggccgtgtgccgtcgctgctcctgctcgcgctccagcttcgcctcctgcagccgctcgcgcagtttgcccaccttgcttttttcctgctggaactcgatctgaatgctggtcagcttggcccgcagctcctcgttggccatctgcaccgcgtccgtctccatctcgggcttctcgcccttgctccggcctttcttcgacatgcttccccttgggtcagagtgctgagatcctgcggtccacacctgttcacgcacgccagccagcaggcgtggctaccagctccaccgtgctaaccagtcgcgcagtactcagctcgccctccgaggaaaccaccatcacttgggatcctgctcggcgctcaggcccgagccgggcagcagcagcggacgtagcgagcgcagccccgcgccgcatcctccggccgccccgctccccgctgcgagcttacgccgctgtcgccgccgccaccgccttaaaaaggacaaaacggaacagaaaatgaatgcatgcacnnnnnnnnnnnnnnnnngcaattgaggaggatggcagtcgcgcgcgcggctcggcggggcgggagtcgagaggccgcggcactggtggccgcgatccgggcaggcggccggcgcgtgccgcacgcgcgtggctgcagctccgctctcgacgaattcgagctcggccgatttggcctgat

SEQ ID NO: 454441 - DNA, 588 bp, Homo Sapiens
  misc_feature (501)..(537): n is a, c, g, or t
aactggtaggaaatctgagtttctatagtccacaatggattggtgaacaaagatgaatttcagactatttttgttatatagtgagcctttgaattgcatgtgggagtcaaacagaagctaatattgaaacagccagctcattccatgcatagtgactttctacacatttttggtcttctcagttgtgttgctttgtttcagtacctcctttgtaaggaggcagttgatggatctcccttttcctatgagccctttcaaaggtaccagcagccccaggagctctgtctccaatgctacgggaaaggaagtgcgaatggagcttggctgagtcttcgttctctgctgtgagcactcccactgggtttttccccagccacctgcttttctcctgtccctagaatgtgctgagactcagtcaccactctcctggttcttatagcagatgatttggtcttttattccgctctcgacgaattcgagctcggccgatttggcctgatnnnnnnnnnnnnnnnnnnnnnnnnnnnnnnnnnnnnncggccgccaccgcgtaaagctccgttcgccctatagtgagtctatacatcc

SEQ ID NO: 454442 - DNA, 1111 bp, Homo Sapiens
  misc_feature (73)..(109): n is a, c, g, or t
  misc_feature (770)..(784): n is a, c, g, or t
  misc_feature (1024)..(1060): n is a, c, g, or t
ttggatgcaaagtgtctcacgagcaggaatactgtcattcccagttttctcccaggcagggcagtaatttcannnnnnnnnnnnnnnnnnnnnnnnnnnnnnnnnnnnnacaaacagaccactaaccactctggtcctcagcttgcctacctataaagggacaaggctagatccaagtagtggcaatgttccttctcacactagcattttgtgtttcaacaatcacagttccttccttccactgataagctccatcacctacaaatagatgatgtcttcccttcgaggggccaacctggagaccacccagtcagtgagctccaactttcaacaaactctcatgccaaatgcactactggcatgactgaaatcccactgagctacacgattcaatgcttagagcaccccagcaaggaggcagagctaacactgtgagaatgtggctttcagctgtccacgatggactctaagagctccccaaggaaagagagacaggcaggtttgctctaataggtaaccttgaagtgtttcctccgacactgcagcttcatcacagggagggactgaccacacccgaatcagaagcagtccaggcacatcatatatctgtgctgagcatcagaagcatggaattggacctggtcactgcccctgattaaattggaatatggtccaggactcagaaggtacagcacagggtgaaaggcctgggagtactaagggaaactgagatgtgttgctaacccccgtaggagagggtgagttgtttnnnnnnnnnnnnnnngagcacaaatcaaagaaatacctagagcaaataacagaacagaacatgtgggtaaaaggctaaagctggcttaccgacccttggttctggccggaaaacaatggcccctacttgccaggatccctttctctgaatagatcctcatctgcactcacctctcgacagaggaaacagcctggcctccgcacggccatactcaccgctctcgacgaattcgagctcggccgatttggcctgatnnnnnnnnnnnnnnnnnnnnnnnnnnnnnnnnnnnnncgccgccaccgcgtagagctccggttcccctatagtgagtctatacattcc

SEQ ID NO: 454443 - DNA, 832 bp, Homo Sapiens
  misc_feature (747)..(783): n is a, c, g, or t
gcacgcaggggcaccgggaaaggcagaggtagagacctccccggactctgcacacgttccggcccggctctgttcgacaccggaaatgcaaagtctgagcctctccgggctctgcacaccgttccggccctgcaccatgtccactggaaatgcaaagtccgagacctctccggactctgcacaccttccggcccggctccgtcggcaccggaaatgcaaagtctgagcctctccgggctctgcacaccttccggccctgcaccatgtccactggaaatgcaaagtccgagacttctccggactctgcacaccttccggcccggctccgtcggcaccggaaatgcaaagtctgagcctctccgggctctgcacaccttccggccctgcaccatgtccactggaaatgcaaagtccgagacctctccgggctctgcacaccttccggcccggctccgtcggcaccggaaatgcaaagtccgagacctctccgggctctgcacaccttccagccctgcgcctcctttttcgggctgagcttttctgttggtgtcacagcttcactggggtgcagttacacaccctgcgatgcacactgggcacgctaatcttcaagcgcacatggttctaagggttgccattcatttctacagctatgcaaccatcagcataatctcaatgggacactgtcatcgactcccagagctgcccgctctcgacgaattcgagctcggccgatttggcctgatnnnnnnnnnnnnnnnnnnnnnnnnnnnnnnnnnnnnncgccgccaccgcgataagctggcgattcccctataggatcgtatacatt

SEQ ID NO: 454444 - DNA, 887 bp, Homo Sapiens
  misc_feature (70)..(245): n is a, c, g, or t
  misc_feature (253)..(307): n is a, c, g, or t
  misc_feature (330)..(369): n is a, c, g, or t
  misc_feature (803)..(835): n is a, c, g, or t
cggattactaggaaactaaagttagccctttcgaaatgaattagaaagagccagtgcaagtagctcacgnnnnnnnnnnnnnnnnnnnnnnnnnnnnnnnnnnnnnnnnnnnnnnnnnnnnnnnnnnnnnnnnnnnnnnnnnnnnnnnnnnnnnnnnnnnnnnnnnnnnnnnnnnnnnnnnnnnnnnnnnnnnnnnnnnnnnnnnnnnnnnnnnnnnnnnnnnnnnnnnnnnnnnnnnnnnnnnncctgaacnnnnnnnnnnnnnnnnnnnnnnnnnnnnnnnnnnnnnnnnnnnnnnnnnnnnnnntgacagaataagaagttgtctcnnnnnnnnnnnnnnnnnnnnnnnnnnnnnnnnnnnnnnnngaattcttctcaaaaaactacctttctagttagatattttttatctccagacataaaaggtaaattttgaaataactaatagttaataagaaaaacatgtaaatagtatgaaactagaattgttaatttcttgaaacttaaggtttgtttttatgttatgttagcaggatatgtaaatctaatgacattcaaaaaacataaagtgagaaaagaagatgctggtattgaacatgtatatgtttactatattctaataatggtcgagttgtttaatttctgcatgaatgtctaggcttcactattagtcttcagctaaaattctgcccattttggtgaaggaactgtgtgtggcacataaggagagcttaatgttagtatttaccatagccttacccgctctcgacgaattcgagctcggccgatttggcctgatnnnnnnnnnnnnnnnnnnnnnnnnnnnnnnnnngatgcgccgccaccgcgtacatccaggtgccctatagtgagtgtatacatcc

SEQ ID NO: 454445 - DNA, 959 bp, Homo Sapiens
  misc_feature (875)..(911): n is a, c, g, or t
gaatggcctgttccccacaaagagcagcgcctgtaactcacttaactgctcaccaagcacatcgttgatactgcataacagaacgtatggcaatcagatggccaaggtaaacacccttcatgtctgcctccccagcatccgtcctccttcttcttaggggggaccccagtactcctcgaggcacccactagtgcttttgagagcaggtggttggttccagagatgtgcatgtgatccaggctggccaatcactgcacctcactgcaaccctggatcacggtgattggtccagattgggcatgaccctgctggccaatcagcattctccagtgtgcctggcaactgtgattggttcaggaattgacctggcaatcgctcccccttccaggctaagactcagctctgggaagtgtgctggagcctttgggaggaagaggctctcttatgcaggcaagctgcggggaggagaagggcacctgatagtgatggtcccctgcatggcgaaagcagagcaagaggtggacagagaggagatgggcctggctgacgtcgctaagcccggatgtcccaaaggtgtggtatggtagacaccttggccttggcttggtcttccttacacgaagccggaaggagatggttctgtccttgcaatttcaagagccctgacaccacccacaggccagttctggatccttgccatccgctccagacaccccaacttgggcagcatctaggcctggggctccagcccacatggtcccaggccctgcagttagctggcttctcattctggacatttctggacactggaggcgagcgggcggccctgaaacaccgctctcgacgaattcgagctcggccgatttggcctgatnnnnnnnnnnnnnnnnnnnnnnnnnnnnnnnnnnnnncgccgccaccgcgtagagctccaattcccctataggagtctatcatcg

SEQ ID NO: 454446 - DNA, 1430 bp, Homo Sapiens
  misc_feature (51)..(87): n is a, c, g, or t
aatgatacgactcactatagggcgaatcggagcttatcgcggtggcggcgnnnnnnnnnnnnnnnnnnnnnnnnnnnnnnnnnnnnnatcaggccaaatcggccgagctcgaattcgtcgagagcggggttggtgcaaagaagtataaacatatatcactaaggaaaaagaaagtttgtcttgcccttctgacacagtgtgtgcacttcaggcaatttttggaaaatataaaaaattccaaattctgcctttcagcagcatcaattgctaggaacatttcattcatttccctgtaatattaatgttctttaagcataatcactaattataagttgtatcctatttttttccagcttaatttctgtggtttattgaaaaccaagtataaatgtgactaaaagcattttgctttgtttttatagttaactttcttaaggttatggacattttataatgtaacatttgattggcctggcctcttgacaattcccttctagttatgcatatcctcctgttgccacatttcttgttttaaaactcagtttcttgttttccagttgttgctatgtataacacccatcttgaaagagagtatataggaagttattcagataacttttgtagtagtgatattcaactatagcagtaccttaactcatgatgagcttaggaacataaaagataattgttgcttgaatagcacccccagagatactgacctaattggtctggggtggagatctggcatggtagtttttttcaagctccaatcatcggccagacagttgctttatgtaggtttttaaatgccaaaggcagatatgaagtagatttaatttaagacttgacttcaggcaatacaggggaaatttataatacttatttttctttaaactggaggagtcactgttaggtattgcttaaaaaaaattgcataaaagctttgcttgtcaagttaggattgctggaataccactaaagatttttgacttgtgaataaatgagctgtcatcgcaaaaaggcgatttgagaaatgtgggcttcagtattaattgccattttgctgacacccagtgtacctacctacctgagaaatttattttgtccatcatgtatttctcaaagcaaaaggtggttttcaagtataatgtcgttttcaacatgcttattacttagttttacgtcagctcatttcatcatcattgataacttgtgaaatacttatctccatcctatggaataggggagacgggtttagacaggttcaattagctcaagtctacacagctgaagtagcagagaaagtgggatctagatggtctgatcctagtgatctaccatatgaaggacataagttgtgtcctggtcccagtcaaatattgactcctcacaaacagtaagtatggcattttgtgatgcctttgattcca

SEQ ID NO: 454447 - DNA, 1115 bp, Homo Sapiens
  misc_feature (1033)..(1065): n is a, c, g, or t
cctctactgtttccccagaatggaccgtgctggaactagaatcctccaaggaggcttgctgcttcagaaacagagtccttgctctgcagggcacctggggaaggtgcaagcacagctgccttcagaccctgggcctgggagccactgtcctggcccataggctggattcccggctctgaagggacagaatcctgctctgcagctccgtaggggggcaccagcagcttccgtgaaggagctatctgaatagctgtgattcgggtaaaaacagtcacattgagagctccgtagctcagccccatacccaccaaacacacgtactgcacacctgcacaccctggcctgcctaccttctagcgcatcttgaagggatcccacctgctccaccaggcgctgattatggcttttcagatgctgattctccatctcaagctttgccaacttgagtgtcacccattccttgatctttgcagctttttcttgaacagtttttgcttcctctgccctcatctgcttctgcttctccagctgagcctctagctggctgatgagctcatctttgccctttatggctttcagcaattcttggtatttccggtgcaggctcccctcagagtccacattcttcagattggatagttttaccttctcttccatgacacccacctgggtctcagcgttctctgctctctgctctgcctccagcagcctctgctccagctcctgcatcttgtcagccagcagctcccttatcttgctggcctgtaggcggaaccggaaaagctgagtttccagggtcaggcagcgtttctgccagtctacgctggccggcgcctccaccttgagttctgccatgatggaatcgacttctggattattctggggagccctccagcgagctcgcggccgtccccgccgcgcactgggcacacgggcgccctcgggccgccgccgcagccgaccttgcgtcgctctcgccggagtcccgggctccgctctcgacgaattcgagctcggccgatttggcctgatnnnnnnnnnnnnnnnnnnnnnnnnnnnnnnnnnatgcgccgccaccgcgtgagctccaggtcgccatagtgatctatatttca

SEQ ID NO: 454448 - DNA, 667 bp, Homo Sapiens
  misc_feature (269)..(296): n is a, c, g, or t
  misc_feature (590)..(626): n is a, c, g, or t
tgacagattccgtctcaaaaaactaaacacacataacgaaaagacttggcaaacaaaccattgtcattctttggataacaattttttaaccatttccaatttaaggtccaagtgtccagacccccacgtctgtaagagatcactgctagtcacaaacgttcaggaaaacaataatcctagcttgtacttcccaataattaattagaagtgtctcttctgcaatttgattgaatcatgctccaaggaaaaacactgctgtaaaacataannnnnnnnnnnnnnnnnnnnnnnnnnnngggtacaattttaaatacatttcattacgttgatgtactctcaaaaataaaaaacatgcaaactaaactcctgttgcttagacaatactatagatacatgtagtcaataacttttctcctgaactgttatctcaatgaaacagactgatctttaaccaaaagaaatgtgaagataatcagtatgggattacatttcctttataatggctttaatcaagtgtaactatattactgagtataactacaattgcatccgctctcgacgaattcgagctcggccgatttggcctgatnnnnnnnnnnnnnnnnnnnnnnnnnnnnnnnnnnnnncggccgccccgcgtagagctccattcccctatagtgatctc

SEQ ID NO: 454449 - DNA, 799 bp, Homo Sapiens
  misc_feature (49)..(131): n is a, c, g, or t
  misc_feature (720)..(756): n is a, c, g, or t
gtaggtgaaatcgactgtaggtgttcaccacattccagcagcacacgannnnnnnnnnnnnnnnnnnnnnnnnnnnnnnnnnnnnnnnnnnnnnnnnnnnnnnnnnnnnnnnnnnnnnnnnnnnnnnnnnncacggtaattctccagaaatatccaggccaagttcttccactttcctgtcataagcagctagtactgtcctttgtgaggctggcaagatgggctcaacaggtcacaaccaatgatcatgctggcaagccagcagtggcaggcgcacgtccccagccagagagggaccgtgatggtttggaggacagcatctgcacagataggggctggaaaccctacgtcggtccctgtggactgtcacgtcactttctggactgcccacgcagcttcacccagcagcactcgcacctgaagatgctgccacagttggctgcccagaatcagcaccagcaacttgctgaggcccagaagcaccacttggctcagatccacccagatgccaactctgtcgggcccctgtggcagcacccagatgtctgcagagcacaggagcatccccatgggattgggtgggctagacccagcgtgggggtctgctagcagccagtggcatctccatctgggtccgacccttttctgggcccatcgctctttgaccatttcccctcctccgctctcgacgaattcgagctcggccgatttggcctgatnnnnnnnnnnnnnnnnnnnnnnnnnnnnnnnnnnnnncgccgccaccgcgataacccgggtccccatttagtggagggtt

SEQ ID NO: 454450 - DNA, 779 bp, Homo Sapiens
  misc_feature (42)..(74): n is a, c, g, or t
  misc_feature (147)..(191): n is a, c, g, or t
gagacgactaatggggactgggcttacgcggggcggcgcatnnnnnnnnnnnnnnnnnnnnnnnnnnnnnnnnnatcaggccaaatcggccgagctcgaattcgtcgagagcgggctgtgtcttccttgcccttttctccacttcannnnnnnnnnnnnnnnnnnnnnnnnnnnnnnnnnnnnnnnnnnnnatactaatgtaaacagagcgaattaatcggaatcagtagcaaccaagacatcaatgagaatattctgctttttagaaatagcatttattcaataaatatttactttttaatttaagttgtaaataggtaatatatgttcatgattgacaattcaggaactgtaaaagggtatacaggaaaaaatctccctcccagcacacttcagctacctcattgccctcctcatagacaacccaggtttcagtttattgtgtctccacccagtgatagtttaggcctatacacttaactgattcacatgccttcccccttaaccctaatggtagagagctatatacactgtcatgtacctatttccatccaccaatagacattgcgcagtgaatgtgcttctccaccctatgatcttcattccatgtactaccttaattcctcattgccatatatggtaacgtaacacaggtttgagggattaggacatggacatctttgggaagacattcttcttcttatttcttaaacagagtcttgctctgttgccaggcttggagtgcagggccaatctcagtcattgcaactccgcttccc

SEQ ID NO: 454451 - DNA, 894 bp, Homo Sapiens
  misc_feature (813)..(849): n is a, c, g, or t
ccttccgttcccacattgttctttggggagatctctcagcctcgaagcctcttgttaagccctacagggcaggcatagctactgatcaaagaaccttataccaagaagaaattgttccacccttagactagtgactgctgattgaagtcttcatcttctccacctctcttgtgcctctacttctgtgatggcttgagggggccagatacaagagtatataaaggttgaacttgcctcaaggaaaggctagagggacaagggataaagatacatgggtgtggagaaggggagagaagggaccagcatgaaggtgaaggtgaagggcaaggctggccattcaggagctgggatcctttttccttttctgaaatcgccggaacttgccctgaatagcaagggcagccttctctgtttctggtgctgtcagatcaatgtcaatctcctcctcctcctccgccttcttgacattgccagcttttcctttttcctcttggccagctgcctggttggttgctggggatgttttggtattaagctcgctcatctccgcagccggacagggcgcgcgaggcgctgcacgcacaggtgaggcgagtggccctcggggctccgcgggcgacagctgaaagttgccgggctctgcggcaggggttacagctgaccaggagaggagagttagtgcggagagccgctgctctggtgctggcacccgggattctcggagcccagctccggccaggcgaccccctgcgacccgtcctgtcagagccgcccgctctcgacgaattcgagctcggccgatttggcctgatnnnnnnnnnnnnnnnnnnnnnnnnnnnnnnnnnnnnncgccgccaccgcgataagctgcgggttcgccctatagtgatcgtg

SEQ ID NO: 454452 - DNA, 831 bp, Homo Sapiens
  misc_feature (743)..(779): n is a, c, g, or t
taggaggtattagtcagcagttattcatatttttatctgcacatgcatggatattttaatgatgaatatcaaatttaccaggtatttatctatcttattatgttaaacagtcagtaaaagtgattttttaaaataaatttatctataacaaccataaattccctttacagtatttcacaagaattgcagggtcaaataaaatgtcaagttgacattcaatctaatttgagttttaaagcaatacccaatataaactataagtaataattaccatttaaaatattcattaaagtcactcactttagatgtagttatgaccaacctaggtatatttctgggacagaattacatggcttagataagccttaaaaaaaactagtaaatagcatttcctatacatattcactattatttgttttcagacccttcactttgtttagtaaatttttcatcttatgtgttcttcagagcataaaatctagttgggggcaaatgaccctctgaacattccatgaaattttttatgcctattgttatcactatccttgcacatctggttgtatttcaattgttacaaatacaatattcaaatgttctcctcatatgaacctttaaaagtaagcaaggcaatgaatgaagggcagaatagacatagattcccagtgaataaatgactggttatctaaatttgagagcagcaatccgctctcgacgaattcgagctcggccgatttggcctgatnnnnnnnnnnnnnnnnnnnnnnnnnnnnnnnnnnnnncgccgccaccgcgttgagcgtccgagttcgccctatagtgatttatcattcc

SEQ ID NO: 454453 - DNA, 1127 bp, Homo Sapiens
  misc_feature (1046)..(1082): n is a, c, g, or t
tatttccacagggtaaagcgttctggcttaaaatgtggtaaagaatgaactccaggccatgtgtcctcatttggtgttccaagaaccagaaatattcgttcaagttgatcctgaatgtctttcattcctggaaaagcagcaactccttggatcatttcaacaaagatgcaacctactccccacatgtcaaggcaggtggaatattctgttgagcctagaaggacatctggaggtctgtaccacaaggtaaccacttcgttggagtatgtgtggctagggacggattttgctcttgcaagaccgaaatctgccagctttaactcccccgtgtcactgatcagaaggttctgtggtttcaggtctctgtgcaaaatataacgctggtggatgtaagacagacctcgcagcaactgaaataaaaacaacttcacattatctggatgcagccccccagggtgcttgtccatgtactgacataaatcagtgtgcacatattcaaacacaagtgtcagcgtctccttggtatggatgatgtcatgaagtagcactatgttagcatgttttagtccttttaaaagagaagcttccctgatagctgtgaaaggtgtcccttcttcttcctgcagcctgatcaccttcagagctaccaacttcccatttacccgagctggggctggagtgccgcctaactttaggtgactctttgccagtggaggaggtcttaaagttaatgcaagcattgttctcagaatgcaccctctttacttgattagcttgtttctcaaatgggtcaaaagtgctctgtgtcctctgaactctgacttttttatcctcaggaattgtgtccaggggtttgatcactgagtccattccctggcagttccgtgtagacatctttgtgacacatatcgttttgctgttgtctccctcaggcttgattcacctggaactctttaacatgtctctagcaatgtgtttgcaccaggccaggctcatacagcaactccgctctcgacgaattcgagctcggccgatttggcctgatnnnnnnnnnnnnnnnnnnnnnnnnnnnnnnnnnnnnncgccgccaccgcgtgagctccgagtccccataggatctatacatc

SEQ ID NO: 454454 - DNA, 759 bp, Homo Sapiens
ggtgatgtaagcaggcctcgcagcaactggaaatgtacgacgttcacattatcctggatgcagccccccaggggtgcttgtccatgtactgacataaagtcagtgtgcacatattcaaacacaagtgtcagcgtctgccttggtatggatgatgtcatgaagtagcactatgttagcatgttttagtccttttaaaagagaagcttccctgatagctgtgaaaggtgtcccttcttcttcctgcagcctgatcaccttcagagctaccaacttcccatttaccttgcttttccctttgtatactgtagcataagatccttcccctagtttttccagcttttcatatgagtcagcttttccaaatttgggacttgttggcgagctggggctggagtgccgcctaactttaggtgactctttgccagtggaggaggtcttaaagttaatgcaggcattgttctcagaatgcaccctctttacttgattagctggtttctcaaatgggtcaaaagtgctctgtgtcctctgaactctgacttttttatcctcaggaattgtgtccaggggtttgatcactgagtccattccctggcagttccgtgtagacatctttgtgacacatatcgttttgctgttgtctccctcaggcttgattcacctggaactctttaacatgtctctagcaatgtgtttgcaccaggccaggctcatacagcacgccgctctcgacgaattcgagctcggccgatttggcctgat

SEQ ID NO: 454455 - DNA, 787 bp, Homo Sapiens
tggttggaagaagccagggcaaggcgtcacatgctcatcatttgtactcctgttcttttgccccagaaatataaataaagcatgagaaacaggccgacaaaatagatttgagtatattttaatagttatttctagtatttctgttgtttcttcttaacaatctaatttctctttaagccctataaatagaacaagccttattagaaggatatcattatttaagattggagtcactacaaaaatcatataattactaattccacaggcagtgaattaaaatggaatactcaaatcagctatagagaaatgagacagaatctttggcaagatgctagattattaacagatttcttttgcatggaaacaaaaaggcttaagggtcagaaaggagttcggttagaatttcttcacttcaaaggtccaaactatcaatggagaaataaaattaactctttgtagactacacaattaatattcatctcaggatcaatttttgtgaaaaatggcaccactacttcatgaattattttttgcccaggaaattctccctcctgatttgtaaaatggaaaagaataactaaagcatgatacaggctttaagtaagcagtctccatttcctcagtaaatctaaaacacagacagcaaggaaacagggtcaaagcactattttccagcttaaagcacaattttgtaacgtaagaatgcatttacattagtaaatacacagaattaaggttgattccatgccgctctcgacgaattcgagctcggccgatttggcctgat

SEQ ID NO: 454456 - DNA, 1015 bp, Homo Sapiens
  misc_feature (51)..(87): n is a, c, g, or t
  misc_feature (225)..(246): n is a, c, g, or t
taatgatacgactcactatagggcgaccggagctgcacgcggtggcggcgnnnnnnnnnnnnnnnnnnnnnnnnnnnnnnnnnnnnnatcaggccaaatcggccgagctcgaattcgtcgagagcggtggggaccgggccgcttcttgttcggcgtgggcggctcctggcagacccatcccgcggtgcagccgccggcccggtaggcgccaggaccccgagcctnnnnnnnnnnnnnnnnnnnnnnagcgctgccttcactcacctcgtcctcgctcccgtcctaccccgttccgcgctgggtggagtccaagtctgattgcgagagtccggaacgccgcctcgggggcttgactccagccccggggatcgagaacggcgcccaggggtccctacgtctgccttgggggctcgagtcccgccctgggcgtccgtgacgtcgcccaggggtctccacgtctgccctggaacctggagagccgccgtgggggccccggaagctgccccggagtccccacgtctgccctgggggctcgagtccagctctgagggtcctgaagtcagctttgggggttcgaacccatccatcccaggggtccctgagtctacattaggggctggagtccagccttgagggtctccactgctgccttgcgtggcctggatgggatccagcgggtctgagtccagcctcgggagcccctgcggtggagctctgagtggggcaggggcctgggagatgccaggaggatgagagcggcgcccccctggtccaggcgacagtaagaggcagccggtctcagagaagctaccacaaaactgttacccgtggtgtgcagagcgtcctgcaacccagccctcaccaggatttcttgcgtttttcaggaaatccggttgtgattggcatgttccttaagcgtctgcaggaacccgaggcctttttggtattcaggaggggatgctaaccccctctatgtaggaacggggaatccagtggttattccgtcctaacagcc

SEQ ID NO: 454457 - DNA, 929 bp, Homo Sapiens
  misc_feature (850)..(886): n is a, c, g, or t
cgatctcctgcaggtcttcccaggtgatgtcggtgatgaaatcaatgttctcgtagccattggtccaccaacaccttgtagtactgggccaggccgatcatggacagccaacacggccaggttagcgggtttgtgctcaggcagccagtcagggatgcttaggccgctgatctctgccgcgatcttcttccggtggcccggcttggtgacaccaatggccgtgaggtcctcgggagtcatgcggctgatggtgggcaggtcgtagccggcgctgatgaagttggggggcgtagagctgcagctggaacgcggtgagccactggctcacggcctcagagctcttgccctccgatgctggctccagcttcttgggcggctgctccccatagacctgcccggcgtgggccactggaggctgggacctggccacacctgcagagccttccggaggcttggcggggctgtcccccgtgccggactcagagacggacttctgggaaagcaccgttgccaggagcttgacgccttcagagcccgcgtgtagggcgtgacccccgctgccccggccgccagccatgccgctaatgctgccgcttcggtccccacctgcaaaatgcttcctcagcacccagatctcctctgggggtgcagagggtcccgatgagctgcttccctggggcaggcttggttcagtgcctgctcgggaacctgctcgcttgacaatggcctcgcccagggaggatctggaagtagcccacccggtcattgcccgtccggttgtcatggatgcagcccttccaccggccatccgctctcgacgaattcgagctcggccgatttggcagtgatnnnnnnnnnnnnnnnnnnnnnnnnnnnnnnnnnnnnncgccgccaccgcgtagagctcgagttccctatagtggtgatca

SEQ ID NO: 454458 - DNA, 927 bp, Homo Sapiens
tttctcagagctctgatattttcctaactcttacagtctctagaatgatctgtcagattttcactcaacaacactggatcagatctcttctatacatgacctcatccttctcatgtctcctctgtttgcagagagccggtcaaagtcttggaggtggaaacgaactgccaactgattaaccattttccttaaggtaagaaatgctgcaacaacttggaaagcaaggaagagagtgaagatgatatgtatcgctttttccaagggcagatttgttaggccttcattaaagagcaagaaaagaattaaaggtaactgcaatagaaggctcaaaagccaaaagccagccaactcaggaaccttctcctgtaggttacccacgtagcccagatacaaccggatggcttcaattaaggttattaggatgataacagtgatcacaatgaatttgtagtagtcaggcaagattgaatacttcatgtgaagcatcataatgctgctcacccaccacagtgggaaatagtaggtattaaaataaagtgacatctgcagtgccaaactggagaccatttcattttccggaccctcattggactctggactggtccgattggaatcactgaacacggcccggctgaagtttcccagccgctggcgcaccggatctggcagctccatgcctgggcctcagtatccctcaccccctcagacacgggctagtctgcgggcgctccgaggctccgtggttcccacggcaaccgggcggcgcgaggccggcgggacccgggagcgcgcggggctgcccggctgggctgggtctcgtccggagcccgcgcaacctggaagggaccggcgcgctcagagcgcgttccaggcccagggagccacgcccgctctcgacgaattcgagctcggccgatttggcctgat

SEQ ID NO: 454459 - DNA, 1048 bp, Homo Sapiens
  misc_feature (19)..(19): n is a, c, g, or t
  misc_feature (145)..(145): n is a, c, g, or t
taattcattgcaccgctgnaaggaaatgggcccaggcctctcgctggtctcttgaaggaaaatgggggttgggccccaaatcaagctgcagtcagggatgaggcctgcaccgtgcagcacacaagaaaaccttcaagaaggttgnccgtgcccagggcccagctcggggtctgcagcccagggactgccagcccccacctggacactttctcctggggtggccccggctgcacaggtggagtccggaacaggcaagtcctccagttggcagctccaagctcagggcaagtcccacccccaaaagaaaagctgcctgctgcactttccgggccgtgccaagcctgtccagctgccctgagggagacgtcacagggctgaaggcagctggagccctgccatgcaaacagcacacagcacatggggggcacaggatgacacagctgctgctccctcctccgggtgcctgccccacccagggttctgccaacgcagcagcagagaggccaagagtcacatgaagcacggggagggaggggcacgggctccagtcacggccgtccaccagcatgtcagctgcttccaggtaggtccttggtgtcccctcggccctgcaccaggagggcagctttagtctgtctggggccatggaggtggccctaatgctttgacctgtcccatgatgtcactaggtcctcctctgggaccgagcatcctggcccacagggaaaagcccatcccaggctctggatgctcagggcccagggtgtgtccgcctagagagcagtgacctgtgtgagctctgtgttgggcgtagatgggctctgcgggctgacaggcaccatgggcaggtccacgcctagtcatgcgggccgcggtaccgtctcagaggtcttgcaggccagggccacgtcccttggcaatgctgcgcacgcggtcagacacctgcacgtcccggcgcagggcagatgcacagcagaacttgcggaagcaggccttgaagttctcatcccgctctcgacgaattcgagctcggccgatttggcctgat

SEQ ID NO: 454460 - DNA, 386 bp, Homo Sapiens
  misc_feature (256)..(264): n is a, c, g, or t
tttttttcccgggtgagacgggtttattgtgcacatttacacagcgtcagcagcgtctgggctggcagcggccatgctcctgtggtcgggctgctctacaagggcgttcacttttcttcaccacactatgtacagtcagtgctccaaggtgatgggctacagtgctgcatcagtgagtctgtacacacatttttacataaattacacacgactcatacatgaaaaatagagcctaagggcctgtattttaatgagnnnnnnnnntttccaacatagttcgggtagctttgaatggtctagtcaaaaaatacttttggtatataaaaagcctgtacgtacattcaccccgctctcgacgaattcgagctcggccgatttggcctgat

SEQ ID NO: 454461 - DNA, 556 bp, Homo Sapiens
  misc_feature (287)..(401): n is a, c, g, or t
  misc_feature (470)..(506): n is a, c, g, or t
gtgttgttttccatagtttggttcatttttattgctgagtcaaattctgttgaatacaccattttctgtttattcaccatcaaatgttttgtatgtatttattcttttcttctctaagctaaacttcatgttcacttcaattctgcctcccgaagacttcatggtatcacaggagttttgttgtcagcccatcacatctggatccaaatcacagccatatctcttgtgagtgtgtgaacacggcctttgcaggtttcttctctgggttgcagtgtccttatctggtnnnnnnnnnnnnnnnnnnnnnnnnnnnnnnnnnnnnnnnnnnnnnnnnnnnnnnnnnnnnnnnnnnnnnnnnnnnnnnnnnnnnnnnnnnnnnnnnnnnnnnnnnnnnnnnnnnnttttccccagagcgccaagacaaatgtcccgctctcgacgaattcgagctcggccgatttggcctgatnnnnnnnnnnnnnnnnnnnnnnnnnnnnnnnnnnnnncggccgccaccgcgatgagctccggtcgcccatagtgagtcgtatcatcc

SEQ ID NO: 454462 - DNA, 983 bp, Homo Sapiens
  misc_feature (900)..(936): n is a, c, g, or t
ttgggaaggggagtgtagattcgccccagtaaacccttagcagagaacttactgccttggtgtgtggtgccctagggaatctggtggaagtttgaacttaggagtgatgacttagggtatttgttgaaggaagcttctaagcaacaaggcattcaagaagtgacatgcccgcatctacggcctaccatcagatgtgggagcaaaataaagacttaaagttgaacctaaaagggaggcagagtataaacatttggaaaatttgtagcctgggcctgtggtagggaaggaatccaagcagcctatggagcaactacttgctagagagattagcaggattggaagggagccaggtgttaatagccaagacaatgaggaaaaggccttgaaggcgtttgagaaatcttcaagtcagccgctctcatcacagccccagaggcctcggaggagagaataatttcaggatccaggcccagggctcttgctgccttgtacagccttgggatactgctccctttatctggctgctctagcccctgccacagctgaaagggccccagatactacttaggccactgctttggagagtcaaagccactgtaagcctcggtggcttccacatggtgttaattctggcatgcagaatgcaggagagaagtggggcttggcagcttccccctagatttcagaggatgtatgagaaagccctggtgcccaggcagaaacctgccacagtggtggaaccctcatagagaacttctactactagggcagtacagaaggaaagtgtgaggctggagcccccacacagagtcctcaacagggtactgcctggtggagctgtgggaaaaaggccaacgctccgctctcgacgaattcgagctcggccgatttggcctgatnnnnnnnnnnnnnnnnnnnnnnnnnnnnnnnnnnnnncgccgccaccgcggtgagctccattcgccctatagtgatcatacatt

SEQ ID NO: 454463 - DNA, 948 bp, Homo Sapiens
  misc_feature (860)..(896): n is a, c, g, or t
gttcacgtttttattgtaagccataagcaacatgtgatcttgactgatcttttgcttgggaacgaagccaggggaagccactgtaggtttgtactaggaggcccgccagcagttgctcacctcagatgatggtctgcaaagaggtgaaagtcaggacactttcacacactggaaggaaaggcatgcgtcttttcaagagctgctggccactgcagaccccaagctgagaccctctgaagggccggtttgcatgggaaagattgctggaacacggggatgccaatggtgctacaagctttgtcttcttggccggcttcaggatgggatcacgtgtgttggcggttgtagagataggatgggtgcaggccgtcatagtgccactggcgccactgctccacagcctcccggctcctctgcttcctgctcatcgttttgttcctccacgaagttctcaaattcattcctttgttcctcgtaatattctctccgcagctcatcaacccgaagcttctgcctgttttccacattgacctcatgctcgggacttgggggaccgcttgccgcgcctcttgaggaaattcgaggcatctgattcctgcatgaaaatcttctgttttgcatcttcactcgcctcttctcccgccatctgcatggtgcccacagatacactggttccctctctcagcatagacaggagcaccacggcggagaagcaagacagcaggacggcctgtctccaagtcatctttgcagaggtagagggctccgtccaggacccacaaggcagaccaggcgtcctgcaccctttgggtcccccctccgctctcgacgaattcgagctcggccgatttggcctgatnnnnnnnnnnnnnnnnnnnnnnnnnnnnnnnnnnnnncgccgccaccgcgatgagctccgattcgccctatagtgagtctatacattcc

SEQ ID NO: 454464 - DNA, 1006 bp, Homo Sapiens
  misc_feature (14)..(14): n is a, c, g, or t
  misc_feature (924)..(960): n is a, c, g, or t
tccacgggggctcncgtctccatctcagcgaagaggcaggttgtgcaggagcagaagaggctcagagggtgggagatgccaactgaggaacagcaggtgccccagggttcaaaaagagttttccctgagagctgagcagcctccctctcggctttagtgaagaggaaggcagtgaacgtggtagctgagtctgcccagcccagccaggagctgctcgcctcactcaagacatttcccaccttccctcacgttgaacttgcaggctctagctgtacaattaggcacatgttacatacccactggcctgatgggactccaggaactttctggccagacgtggagtctgatgctttgtggtaggtgctgtgccccaggacaaaggcttctgtttgctatttcccttgatggccagagaatcttgcactctggtgcgtaaatgcccctgggaggcccccacgtccctgctgcgggatctcatctctgaccttcatttcatgcttctctttctgtcaagctgcagggcgctggagacctaataatctggaccccaggaaagaagaaacttgcaaataagccttctggtcacacaggcagccaaagaaggatttaatccctgcaatgtcactttagccggcctttatttagatgaaccttcctctaagccgtgagctgtctcgaaaatttggctggttcaaccttcgtggcgaggccagctcttgggcttcgctgcacggcgccaggctaggcgcgctgggttgttgcctctggagcaggagcggtcggtgtgtggatgtcccgaggtgagggcgccgctgtcgcgcttgatgctcccggagctgtcaggggcggccgacctgaccggcagcggcccagggcaaaccccccgctctcgacgaattcgagctcggccgatttggcctgatnnnnnnnnnnnnnnnnnnnnnnnnnnnnnnnnnnnnncggccgccccgcgtgagcctccgttcgcctatagtgatctatactc

SEQ ID NO: 454465 - DNA, 901 bp, Homo Sapiens
  misc_feature (167)..(305): n is a, c, g, or t
  misc_feature (814)..(850): n is a, c, g, or t
cggatggcagtttcacgcgggggcggtctgccatgggtgcggcgagctgtggggtgttaccgtggcggtgaagggggcgtaagggtggtgacgcgggctccccgctggaggttaggcccctttgggcggattccgggcgtggagagggtgttttgtgtgttttgttnnnnnnnnnnnnnnnnnnnnnnnnnnnnnnnnnnnnnnnnnnnnnnnnnnnnnnnnnnnnnnnnnnnnnnnnnnnnnnnnnnnnnnnnnnnnnnnnnnnnnnnnnnnnnnnnnnnnnnnnnnnnnnnnnnnnnnnnnnnctctacctgcagcaactgggaatgtgccatctttactgcaacagatccacagagcctttgctgcttgctttatgctactgatatggctttcttctcagtactcatcgctgagagtaatattaatcaaacatggtttttacatgaaaaaggcaaaacattccactacaatagactgaatttaatattaattaatataaatttaaatcaatatgatgcgattcaaaatatcattcaaatgtgaatcaatatgaattaatcatgttgatatcccagaggaaatcttggtggtacactataaggatgacatcctgctgttgatatgttgaccaggaagtgacaagttctatgaataccttagaaagcttgtatggcaatggtgagccataaatcccattaagattcaggctccttgatattagtgaagattttagaaggccaaaggtctgggacatttagaataaactgaggccgctctcgacgaattcgagctcggccgatttggcctgatnnnnnnnnnnnnnnnnnnnnnnnnnnnnnnnnnnnnncgccgccaccgcgtgcagctccaggttcgccctatagtgatcgtatcatcc

SEQ ID NO: 454466 - DNA, 632 bp, Homo Sapiens
  misc_feature (543)..(579): n is a, c, g, or t
gcaaagatgactgttattaaaggtagatgactttccagcatgtcgaaagtggcgtggcaggggaggggcgaggagaagggtcggggctgagggaggggcccttgcaaaggtctgggcgcgcccaggtccccgagagcaagctttacggcaacgctgggcaggctgttggaggctcccgggctctgtcttgtcagagagaaatcaaacttcagggacaaatagtcgtacaagtggcacgtggggagactgtgtcacaattacaagtgagaccacctgccctggccacgctgtctcctcgcacgcagaagtttgggaacagataggctcccctcagcagggcggaattgcactggaaacatggaggggcggaggagaagatgaaattatcccctcagtgttggaactgtagtctcagagaagatgaaattttccccgtagtgttggaactgtagtctcagatccactcccagcctttctgtcgcggcagtcggactatgagcccccgctctcgacgaattcgagctcggccgatttggcctgatnnnnnnnnnnnnnnnnnnnnnnnnnnnnnnnnnnnnncggccgccaccgcggtgagcctccaattcgccctatagtgatctatacattcg

SEQ ID NO: 454467 - DNA, 777 bp, Homo Sapiens
  misc_feature (427)..(427): n is a, c, g, or t
ttcctgttgttcttctttgttgtcgttatctgtttttggtgtttttcctcgtcagttccctcttgtatgtctgtcgtctctctgtttgttctcggcctctttctgatttcctcatttgcttcttgtcttttctttggttagggttgcttgtccgcgtttccgctctctgcttcttctgctcttcttggctttcgtttgctttcagtctgtttctgcccgtccctgtctcccctttcttcttggactgcgctcgcggcttttcttgtctgtgctttactcggttgcttgtcggttctcctgtgtgtccgcttttcgttttgctctgccgttctgtttagtagctgttgtctctgctagtctcgttgcccgctgcgctgtctccgcctttgccgcggcgggtgcgcggccgcgtcttgcgtctgtatgnttgttgctggaacggtacagttctccattcctccttgagcccacggatggctggatccctatttccagctccgcggaatggaagcgctgcccgggtctaccgcgagcggcggcgactttccctgtctggaagcggtgccgggggcgcaaggcgcaaggcaggcgggcgggcgcccactcccggaccagcttccccgcggacagcccgaggacacgcgcggaactctccggcgccagcacgcaccgccgcaagaaccggatcagctgtaagacagccgctctcgacgattcgagctcgccgattgcctgatccataacttcggtataattgtatgtatacgaaggtatcgc

SEQ ID NO: 454468 - DNA, 1309 bp, Homo Sapiens
  misc_feature (1225)..(1261): n is a, c, g, or t
attctcagtaggctcttctgtcgatgtttttttcgccacgatcttgggtgttctaatagtgttggtccctactttcgtcccctacttgtgttcgttgaccccccatcttggtgttctcgaccacctgggtaccttcgtggtcccccaaccactcaggcgttgtgtaggcttttgtatggttgtcccccccctggtgtgtttttctcggggtcgccattcaagaatatgttgggacaccgtttagttgatctgctgtcctcccattgatgctttgccttctcctccgtatgtgttcaatataagggaagtaaatataacagcccttggtatacaaccgttgtctttcctaaccaggttaataattcctgggcaatttcaaggtacataacgttattgaaggcgcccgagacaccgtgtttaagagatcccaagccaataatacacagggggcttcaaataggttttttttctgggacagtgttgggagtttttccactaagctctaaaccagaaggctcccatgagatttagtatttaacaggcagcaacatcagttagaactctttccccatctgggtcatgaggtcacaagacgtacagtcaataaagtttcaaaggcaagattgatcagataagagccagttagttaactgataataattccatcttgctctctaccttaagcaaaaaaagtcatctctggttctccacaggcaccaaatgtgacattgaatttatttggtttcagagccaatgcccagctccaagtctcaccaccctcttaactctacttcatctttgtatctctctctctcttctatattctcatgtgactcaaaccaggatttggagctacagggtggtatgtggtggtgatggtggtgggacaggggcagagaaaggcaaaaccctaaactgaccattttggggggtattttcaactatacaatttaaatttgcaagagcttggaggaagatggcatataatctggctctataatatgcacttgattgattcttggaaaaatcatgagacttttgcactaccagcatggtaatttgaaaaataagccagtttcaaataacaaaacaagacaaacaaagaagcctgcctatgacttgaagctgtgcagaaaggtggctctgagtttttaagggaggaaagtaagggggagctactctctccgctctcgacgaattcgagctcggccgatttggcctgatnnnnnnnnnnnnnnnnnnnnnnnnnnnnnnnnnnnnncgccgccaccgcgataaaccgcgaagttccccatagtagtctatcatc

SEQ ID NO: 454469 - DNA, 754 bp, Homo Sapiens
  misc_feature (23)..(23): n is a, c, g, or t
  misc_feature (84)..(84): n is a, c, g, or t
  misc_feature (101)..(101): n is a, c, g, or t
  misc_feature (141)..(141): n is a, c, g, or t
  misc_feature (187)..(187): n is a, c, g, or t
  misc_feature (190)..(190): n is a, c, g, or t
aaatgtaatttttaataacaganggggttttcaccatgttgggcaagactggtctgtgaaactccctgaaccttgtgaatccgncccacctcggtctcccnaaagtgctgggaattacgaagcgtgaaccacggcgcccgnaccccctaaatcctgattttcgaagatatgacgcatgtatcctgcnccnccgcgagggccgtctcgccgtcgcgccacatacgtcacacgctcttcggaaagcgttgctgcgtaaatggcgggggcgtgtcttttggctcctccgcgtgtagttacctgagaaacgcgggaagttgggcccaggcagtgttgctgcggttgcctaagttgttttactatttctggagagagccgtgagcttgtccaggggccccaatcctgaggccgacccggtttctggcgcggtgcgatggaggtagtggaggccgccgtcgctcagctggaaactctgaaattcaatggcaccgactttggagttggggaaggtccggcggctccgtctccgggctctgcccttgtgccagggacacagccgccgctacagtcgtttgaggggtccccggacgctgggcagaccgtggaggttaagcctgccggggagcagcctctgcagcccgttcttgaacgccgtcgcggccgggaccccggcgccgcagccacagccaccggctgaatcgccggcctgcggagactccgctctcgacgaattcgagctcggccgatttggcctgat

SEQ ID NO: 454470 - DNA, 823 bp, Homo Sapiens
  misc_feature (745)..(781): n is a, c, g, or t
atcccgaggcctcatggcaactggacacaaacagaggctggtgggtgggttggggagggcctaggaccccacctcttctgttcttgtcaccagggctggacactacttgtgggccaggctgccaggactgggcagtcctgggcctggggcatgctggctgtgggtggcgactccactgttacaccaccgtatacctgccccagtgctgggctctgatggtggcagctgtgctggggagagggtactgtttccagccccacatcaagaggagacggaggcccagagaagtaggcaggagactttctcaagcctcataggcagcacccactgaagcagggcgggctctttggccctgcgcttgtccaacggctttggggccaaatgtggccaccgcgaagacatttaatttctgttctgtccatctgcagtgacttgagggaggcaaacccgggggacaggagtggtgttcttgtcctcttttacaaagcagagagctgaggctgagggcccagtaccattcaggaatgtacacggttttgaaggtctctgagacagtatcctctggacagccatggcgagagaggacagggctctgagtggggactcactggggacgctttcagacttcttgagctggctagggcctggcgcctttcccatccaggcccctcagcttctgagacctcctctactgctggcccctcccgctctcgacgaattcgagctcggccgatttggcctgatnnnnnnnnnnnnnnnnnnnnnnnnnnnnnnnnnnnnncgccgccaccgcgtcagctcgaggtcccatatactattccat

SEQ ID NO: 454471 - DNA, 634 bp, Homo Sapiens
  misc_feature (381)..(512): n is a, c, g, or t
  misc_feature (551)..(587): n is a, c, g, or t
gggatgtcacttctgagagtaggttacgaaaggaccctggcttccctcctgcttgcctcctctggcttgctggctctgacgaagcctcccaccactgtatgagctgccctatgaagacacccacatggccaggaacatgagagatgccttggccaacagctgtcgaggagctaagcccctcagcccaacaggccatgaggaacagaatcctgccagcattcaggtgagtgagcttggaagcaaatcctcccccatctgagccttgagatgggccccagcctctgctgataccttgatggagattttgtgcaagaccttgagccaaaggacccagctaaggtgcacctggattcctgacccacagaaactgggagacaaaannnnnnnnnnnnnnnnnnnnnnnnnnnnnnnnnnnnnnnnnnnnnnnnnnnnnnnnnnnnnnnnnnnnnnnnnnnnnnnnnnnnnnnnnnnnnnnnnnnnnnnnnnnnnnnnnnnnnnnnnnnnnnnnnnnngctctcgacgaattcgagctcggccgatttggcctgatnnnnnnnnnnnnnnnnnnnnnnnnnnnnnnnnnnnnncgccgccaccgcataaagcgcgcagttcccctatagtgatcaatcca

SEQ ID NO: 454472 - DNA, 1088 bp, Homo Sapiens
  misc_feature (980)..(1016): n is a, c, g, or t
tgggtccaggccgcttgttttctgtgttagcatcgcgttcgcgcagctccgcttttacggtcctttcttatccttgtctctcgttttctctcgcgaacaacgttcttgagcctctcccagccttcttcgtcctccctgctttgtcgaggagcttcgggttttctatatctagcctggctcgtttagtcggtatgggtcgcccccgagtttctgtcgtggtcccgcagtgctattttcctgtctggtgcctctcacttcaattcggttcacctggtcttcttcatgtttttcccttcgtattttcctctctattttacggttagcttctttttttcggtctcttctatttctcgtgctccgacagtttcgtgatcgtctccccatctattttcgggtttttttcgggcgtcgtgttcctttatattcatttcccccatttcaactttcgcttcttttcagcttgtcgttccattgcatttttttattcatgactggatctggtttctcgcgagcatggatacttgcttctttccatgcagttttatttggggctttatattgctatgttttccgactgtgggccgttttatctctcttctcggtgttatatttcctccttattgcctattctttttatttcttttgggatcctggcttctgtttattattttgtctctcgttctttgctttgtctgtattagtctggttacgctgtcagcgtggtccctccttgtatgtatttccaagcctcctggtatcctaatgacatttccctctttcattccttgtttggagtacacagggaaatggcctcagtcacagcatcaggatcctattaatttcattgtcacttcagtcagaccacaaaaccagcctggctccaagaggcccacagcagagagactctgaccagacaggtggccccaggctcttccagctccgctctcgacgaattcgagctcggccgatttggcctgatnnnnnnnnnnnnnnnnnnnnnnnnnnnnnnnnnnnnncgccgccacccgccagttaaaaaacctccgcgggggttcgcccctctaattagtgagttctatcaatttccc

SEQ ID NO: 454473 - DNA, 852 bp, Homo Sapiens
  misc_feature (560)..(799): n is a, c, g, or t
ggatcaatagctgaattcctaaatttttctttaagaagtcttaagaattccctagagggaaagtatttctaatacttttgctctgatagtcaagcacaccaataggccaataatgtatatgcactaatttttataggaaacttagatttgattgctttttgattgaatgtatctgtacataaataacttaaactagggatatatactatttagttaataaaccagaaataaaaacagaaaatcagggcaacaaagggagagtatagttaatatagttgctgtgactagtgtaaaatttgtttcagagcttgcttataggcaaggagaaaagaacaacacgttaattatctcagaaaatataaaatggaacagttcttcatgggtagcaaagtttatcctagctaagaataaaataattttgcaagtaggacagctaatatggtcagaatatccaggtgagtagatagatccatgatatattcataaagtagctctcctaagtatttctttctaagtattagattaaaaacatttggtagccaggtgcagtagctcgcacnnnnnnnnnnnnnnnnnnnnnnnnnnnnnnnnnnnnnnnnnnnnnnnnnnnnnnnnnnnnnnnnnnnnnnnnnnnnnnnnnnnnnnnnnnnnnnnnnnnnnnnnnnnnnnnnnnnnnnnnnnnnnnnnnnnnnnnnnnnnnnnnnnnnnnnnnnnnnnnnnnnnnnnnnnnnnnnnnnnnnnnnnnnnnnnnnnnnnnnnnnnnnnnnnnnnnnnnnnnnnnnnnnnnnnnnnnnnnnnnacagaacgatattccgctctcgacgaattcgagctcggccgatttggcctgat

SEQ ID NO: 454474 - DNA, 794 bp, Homo Sapiens
  misc_feature (191)..(191): n is a, c, g, or t
atggcctattataaattctttaacaatgatttcaccgtgggctttgaaacaaggtaatatctattaattgccttgccttaaatacaaattcgtcctttcccaatagaacgtccctttgaaaatgattactactaaaacggtgagattgttaatgtgcttctcactttattcttaatgaaaagtagacaaanatatatgaatctcagatcacaaaagataattttttgttaactggtgaaggcttggcttagtgttcacacattcagttccattcaatttcatcaatatttggagtattagatattatttatagtattacagtctctttgtgatccctgagtgcatggcttagtatttagtgaacaaatacctataagatgctaaacatcagatacaattgtgtataaggtttcatacaggagagaaagccattaggctcactttgaggggaggaaactatcaagctaaagagaaaaggtgatatttataagaattcaagcaaagaagtaaggcaacataacatacaatttcacatatattctggaaaccatgagaagtctagtgcagctaaaatgctggttgcatgggtcatgggaaacccctcgaacaatgccccaaatgcaacctgaggtccttagtcctacaacatctcagtgtttccttcccaggagaagcaaatgagattgagactgtgactatcatctattgttctttaacaggttattgctcccttaatgtgtctctcagggtccggccgctctcgacgaattcgagctcggccgatttggcctgat

SEQ ID NO: 454475 - DNA, 958 bp, Homo Sapiens
  misc_feature (873)..(909): n is a, c, g, or t
ttctgttttcctcttttgtagtacaaagatctacgcatgccagtaatcttgtgaatccgatgaagtaccaggcacaaatcatggccatctgcctggtatgaagctcccgcaattgaatgtagaaggcatgtccactgatataccgcctggtaagttggatctccatcatgaagcaatgaacatgctaaaagttgtgagttcagctgatttctaggagtcgaacttccaacggtatatgcattttgatattacggagagtcgaaaagcccaccagcaggcactttatttgattgctgggtactacaacctgctcatcctgaaggcactcagtaaggctacacgactcggaaaatatcagttcttcagaatctacatgacaagaacaagaatactgctgttttggcctaaacttggaatcccaattaaaagctcctcctaatgacttttccattgcttcattaagagtttttaaaatttcaccattgcaaaaaggagaacattttacctttggcagtttcgtttccctccaaaatatgccataagtgacactcaagattggaagctgttccttctgaaatagaactctgcccaggatgatatacaccatgttcttcagcccaactattaaagtatcctttggctactttatctttccatgaaagggcttctagcatcttcctttcattataagttttaaaatatttgttcctctgcccaaaccattttgtatttgtactacaaccaatactagatttttttactagccgattatttctggaaagatgtttcagttgaaatttttgcataaaatattgtatagcacgatccctttcgctctcgacgcattcgacgctcggccgatttggcctgatnnnnnnnnnnnnnnnnnnnnnnnnnnnnnnnnnnnnncgccgccccgcgtagagcccgaggtcgcccatagtgagtctatcattcc

SEQ ID NO: 454476 - DNA, 557 bp, Homo Sapiens
  misc_feature (48)..(84): n is a, c, g, or t
  misc_feature (130)..(138): n is a, c, g, or t
ggaatgatacatcactataggcgaatggagcttcacgcggggcggcgnnnnnnnnnnnnnnnnnnnnnnnnnnnnnnnnnnnnnatcaggccaaatcggccgagctcgaattcgtcgagagcggtctccnnnnnnnnncatttctcaaagtctgtatggaattcaagcattaaatctctctgcctctacccaatccagtccacacatagtcctccttattttaatctcttcctctttctccctgccatttcattctattcttgtatgtattctttccattatattacctaatccttacatgggaagcatttctatactgtctgctttacttcacagaatctcctcaatatgtttctatagccttagaagtaggaagatttttgtccttatatgtgagtacagactttttttcctccccagaaaaatcttaaaagctaaaatttatcaagtgaaaaagaaatagtaattttgaaactggaaaatgtttactacctaatgccatttaacttaagcctattcagtgatttcgtgtatgtgacttccataattattatttg

SEQ ID NO: 454477 - DNA, 849 bp, Homo Sapiens
  misc_feature (760)..(792): n is a, c, g, or t
  misc_feature (798)..(798): n is a, c, g, or t
taccccttctcacctgtgtttttaggagtcttcccgtgtccgttaaatcccgtcgccgcatcgctgcggtaagtgccgcagcgcttgctgccgcagccgcgccactggcgccgcggcagataccacctactactcaacgaagcagccgtactcccccgccgccacgatcgacagctacagcgcggcacccgccggcttccagcagatctacaccggtagcgtcaaccgccacggttcgcgcggcctgtccagcttcaagtacgacgacctggcggctcaaatgctcgccgaggcgaaaaagcgcggtcaactcactgagctcggcgagcgcctcatcccccaggtcgaagcgatgacccaagcaaaccgtgccctcactggtcccggtgagggcggctacggcaacctcaccgcgttcggacgcgaagagctgcgcggcatcggggtgcgaaacgccgagcgcaacgcgtccctgctcgacaccatcgagcacgacaacctctcagtatcgttcctgacgtccggcgaggaccgcgcaaccgaatccgggtggtccttcggtcgcggcctgctcgacgatcgcgacgagctcacagacaacctcgcctccggcaccaccgacggccacgtcaagctggagacccgccaggacctgctgtacgcccacaaggacaagaaggccgaaagctacaaggcgtacaacgagtggaaagacagcgacgtactcgacgaattcgagctcggccgatttggcctgatnnnnnnnnnnnnnnnnnnnnnnnnnnnnnnnnnatgcgnccgccccgcggtagaagcctccattcgccctatagtgagttatcatccccc

SEQ ID NO: 454478 - DNA, 691 bp, Homo Sapiens
  misc_feature (638)..(651): n is a, c, g, or t
ggggttaagtctcatgaaattgtgagcatgggaaaaggtctatgaaaggagtctaacatctctgtgtctggtattggtcttgaaatttctgttaaatccagtactgcttacccattaggccagaaaagctagagtgaacatgggcagggacacaactggagccccccaagagaatctggatcccatggggataaactagactgagcatctgtctcttatcacttacacctccaatgaggcaggtgcctgcagtagcctggtgcaggtgcttataggagccatgcgctgcacctgcgtctcaccccagacttgccaggaaccagaatattcagtagggaactgcaagagcttctagacttagctactcctcgcaccagggtgagcccagcagatgagcagccaatgtgcgtgagatgtgcctagtgtcctagactgaccttcagactgtaatggctgctgcttcacttctgcctttcctatcttcacagatttcccttgtggctaatcctaacccaggatcatacttgagagataaagtcaaaggttgttagaatttgagatgttaggacaattcaaagtgggactttgcccacagacgtgttaacttagagctagaggtcaaggatgcacttgtagannnnnnnnnnnnnnccgctctcgacgaattcgagctcggccgatttggcctgat

SEQ ID NO: 454479 - DNA, 633 bp, Homo Sapiens
  misc_feature (548)..(584): n is a, c, g, or t
caaagaggctacatgggacataaattttctgagtgcctgaccaacagagtggcactgttgtgtagtagttaagagtgtagagtctgcagccaaacttcctggattcaaaacccaactctgccttctacgagtggcatgatctttggcaggtttctcaacttctctatacttctggtttttcatttgtaaaaccagtgataataatagtaccgaactagctgggctgttctgagtataaaataaataagttaataattgcaacgagcatggagatacaactggctcatagtaagagttcattaaatattagccattactataaacctgaaaatgccatgattttccctcacctttaactaatagttaatctgagtataagattctagatttgaaatcattttctcttaagttttgtggaaactcatgtgttgctcttcagatgcttaattctatttcctttgtgggtagtctgcttttaaatgttttaaccattctgagatatttcagccgctctcgacgaattcgagctcggccgatttggcctgatnnnnnnnnnnnnnnnnnnnnnnnnnnnnnnnnnnnnncggccgccccgcgtgacgctccagtcgccctatagtgagtgtatcatct

SEQ ID NO: 454480 - DNA, 455 bp, Homo Sapiens
ggagtcataatttcagaaagagtaaagataaactttcttattaaaaactggttttaggtccaaataatgaagatgtagaaaaacaacctacagtcccattataacattttgaaattcatttataaaaaatttacagcagctgtaaagtttcagtatcgtaaggacaacgtgatcctacaaacagccaaaggatgtagacaagatgtttttctgtcttccaaataacacaaactgaaaagaaaagcctttgcttttccttggccacataaaactagtatttccacactactggttaataaccccaagaaacctttgcttctcttagtcaatttgctcattatggctacaagactacagctcaacatcacaagcccagaagaaatgctggtaagacatcaatctgagcatttcccgagcgctctcgacgaattcgagctcggccgatttggcctgat

SEQ ID NO: 454481 - DNA, 1091 bp, Homo Sapiens
atagaatcgagctcggtaccaacgtcagcactcctgttactaactgctctccaaaccaccccctactctgcctccagtattactctgctttgtgagatactaaggaatggtctgcctctgcagggcctaaatctcccatactggcggttgaatcctccgttctgttttgtatttgctttaaatatcttggaagtgtgacccacgctaacatgacttgccctgtccgggcaactcttggaattcacatctcccacgtttcttcctagctgatggctccctactacgcccaccacagtagggtgattccaaagaactgcatttaggagtgaagacaggagtctgtcttccttctatacccagtcagtccttgtctcgatcactttatctctttaacatgcacatctgcatgtacatagagctctggaaggatcatcttatctgaaggctatggaaacattttctgattcatggaattatccctttcattgagtgatgttcaaactgtagactggtctctgccttcccagatgtcttcccgttgcttggcttccaaccgctttctctctctggcttcttgcagtttcttgagctctgcttctcgttcggtttgctctgcttacttcgaaccccaagagcactgatgactaaccttctggctagggctgctgaagtctcaggacgctcctttgctggctggaggaactcagcataagctctagctttggccttggctgctcttgtggcctgtgacaagggacgaatcttcaccatggtgtgtttaatacccaacgcatcacgagctgtaattggactggagaatactcctagggcatgtgtatcatccacccatttaatatcaaatcctttcttttgataactgcagaaaacccgtagaaggtcttcagtacgaaattcttggggagagtcataaatttcaatgacatgttggaattcacaatcactgaggtcaatatcaggaacttcatgattgtagtaatcagatctaggttcctggatgctctctctgctctggtattccctgataactctgtagaagacgtggatccggccataaggcctgatcttcgagg

SEQ ID NO: 454482 - DNA, 882 bp, Homo Sapiens
  misc_feature (148)..(148): n is a, c, g, or t
tgtcaggaggaatgacatgtacagatcatctggcagcagagaatccttcatgtcacggcaaaaactccttgaggagtgcagccacatcatgcacattctgattgtcatccagcactacatccagaccttgatcaaattcttcacggantgacgcactcgctgcacggagtattcaagggtaaaaatcccccactgcgcttaagccatgtttttcaatgaattggcagcaagcctcaacaacctgggggatttgtttcgcaatcggattgagactcatcttccttttggatcccagaagtcgttggccaattggaaaggaaatttttgaaaactgcagggtctgcagcagcagggctccgtcttccagctcagccagactatccacagacactgcacctcgacgcccacggcgagtgaactcccggggcaaggtgggctcattccgcctgcgactgaaaaagcgccggatgcggccaaacacccttcgcaccacgtttccccgacgacggcccgcagcctgaccggtcgcttcttcaacctgcatcgtggctgtcagttcaagatgcttgcggcgtgtaaactcgttcaccaggacctcttccaggctaatgccaaatgtcttgtgtgatacagccctctgctgtcctctcaaaatcagaaaccacttatccaaggtgttcggacggtcaataggcagagctctgtcaggtttgaattcggagaggaaatgtctggccacgagttcgtggtaagcagtctcttgcagcttcagacgctccagctcagagaggctgtgtatcgataccatcttcgtcctgcggtcggggttgtgtcctggggctcctcccaagacactcactcttggcgagcctcttggtccgg

SEQ ID NO: 454483 - DNA, 658 bp, Homo Sapiens
tgtggtccggggtgcatccggaccagcacctctacctcctcgcagagcaggaaggagagtggacgcctgactgtgtgctagacaagcctcctgtcagccaccgttggctcctcgtgccatgttcaccctccatcctgcaacgggtgggctcccggtcctggccagcaggaggaccctccttcctcttgctggagggctcagggctgacggttagcttcacacggagggtcttgctgctgcccgaggagtggttgaccgaggcatccacgacctcatagatggtgtgcatgaggctggacatgtcctccctggtgaccttcccgcagttgtcaaagtcatagagcgtgaacgtccactcctggcggtcgtcctcctccaccgagacatcgcactggagtgcctgtggggggacgtgggggccgggacctcgcctcctacccacgccaacacgcccaactccacagggggaaggatcttctggggcctttcccacgggtccctcatgccaccatacgggcgcagggacccggggagcaccaggcggcagcgacgtcggcccggctccctctcacgctctctacgaattcgagctcgcccgtatttggcctgatccataacttcgctataatatatgatatacgaagtaatacgcctatca

SEQ ID NO: 454484 - DNA, 826 bp, Homo Sapiens
ggtctgggttggagtcagttggtaggcagaatgcaagggtccaaaaatatcttgcatccaatcttaggttttggcaataatgatgttattttataagctttaccccagctactcaggaagctgaggcagaaggatcatctgagtccgcaggaggattgcttgaatccaggagttcgagtccagccagcacaacatggcaagaaccatctccttctgatcttgcagttatccattggcatcaggtcctggggaggctgactgtagccagttatctctgcttgcaaaggaagtggaaggtccccgatgggctttctgaccctaagtcgactttgttgctttatcccatttaaatccacattctctgcttaaagttgcttcaagttgcgcgtccgcatcccggaggacgccgctgcgcgccgcttctctctcggcgcgcactcgacgcgcactccgcgcgcagcgtccgggtccggttggactcggcgcgaacctcggctcttgaggtcagccccgcagcgtcccgtgccgcccggtccgcgacgctcctggagcgtcctgcgggcggccgagctcggctgcggagtcccggcgcggatggtggcagcgacgtgttagggctccggagggcgctgctgtgggctccgcgtctccgctgagctaggtggctgcctccatgtcctccctcgaaccatctgatagttttaagcggtgacaggagcagaaaagacccctgtagcggcgcttcattaatgtgccacttcttagctatcatatgacaatcgccttccgctctcgacgaattcgagctcggccgatttggcctgat

SEQ ID NO: 454485 - DNA, 799 bp, Homo Sapiens
  misc_feature (45)..(45): n is a, c, g, or t
  misc_feature (674)..(695): n is a, c, g, or t
gggtgcggcgatacttcgagtacatacattatacgaagttatggnataggccaaatcggccgagctcgaatcgtcgagagcggttgagtaaccaagataattattttcccccttgctctctatattaatacgtagctataaagcaacagttggttttcttatcctttgataaaagcatcccataaaatataaagtagtaagttaacatagtattattgtcacacacaatgctttttttggttaaatgttgatacgaagcaatgttttggaattactttaattgatggagtagtggtggtagagagaaattaataacaaaaagagtgaaaatattttaattagcagtagatggtgctactggctttcatttgctgacttgattattccctttctcttaaaaaccatggcattagactgcactaaattaacaagcatgttagttgctggtagaggttttggaggttaatttaccttaaattggaagacttttaattgcagtctctttctaccttccctctgttagtcatttgtaaattctaaatggtcaccataaaatgtattaggtaggagaagatacgttttatgtataatatatctcagactgagttactacctgtcttatcaggatggataaaacactacagtctcttatcaggaaatagagatgatgtggnnnnnnnnnnnnnnnnnnnnnnaccaccagactccatttatatattagcattttccttgcttatgggaaatcgcaaaacaacattcattatactttgtaaccccctctgaacaggtttgataccac

SEQ ID NO: 454486 - DNA, 759 bp, Homo Sapiens
  misc_feature (389)..(389): n is a, c, g, or t
cattctctaagatgtccactgggatattgcacctgttttattgctgcccctgtttttcgggggaagttgaaacgccttctgtcttcgtgtgtcggtttgagatgactttttcgctaacgcgcctttgtttaggatattgcctgaatgcgaatctgtagatacttctgatttgctctcgattattataatctcgcagagtaagaagacaagtctgttgattcaagttcaatgtttccagtaatactagatatctctgtagaagaaggattagcaataaaagcaaaatctgtgcccatctttattttgcatttagtgaccacctcgttccactttgagatagtcagcagcctgatgaactttcgttgtaacatgtccaactgtccaagatnttaaagttcctgtgtatataaactccaacagtttctgaaatccatcagccttcacctgactctgatcaagaaagacattgttctcagaagtgcttctgtagatcgcaccaaaatactcactaaaggaggccagcacattcctatgagctttaaactggaattccccaatcactatggtacagtcacagagaaaacctgcttcccgctgtttgttcagtctctctaaaaggtgctcacagtggtgcgaatactgcattttgatatcagaatggaattttacccttgatcgatagcaaccccaaggggggaacacagtttcttcactctgtctccgccatcttgggaggacgtcaccgagccacgctccgct

SEQ ID NO: 454487 - DNA, 988 bp, Homo Sapiens
gtcagtcgcagactgtaattacttcctggcgtgataccatggtccagggatattacacggaaattcgcgcaccatattattgcacggaagattaagggttatacatgctccagaggagtattacccaatcctagatggccttaaaagaaattacaatgatccagaagatagagtcaaatttcgttccaagcaaaatgtagattatgcttttctgcttaatttttgtgccaatacttcagactattatgtaatgcttgaagatgatgttcgatgttcaaaaaatttcttaactgccatcaagaaagtcattgcatccctagaaggaacttactgggtaactcttgaattctctaagcttggctacattggtaaactctatcattctcatgatctcccacgtttggcccattttttattaatgttttatcaagaaatgccttgtgattggctattgactcatttccgtggtctgttggctcagaaaaatgtgatccgttttaaaccatctctctttcagcacatgggctattattcatcatacaaagggacggagaataagctgaaggatgatgattttgaagaggagtcatttgacattcctgataacccccctgcaagtctgtacaccaacatgaatgtgtttgaaaattatgaagcaagcaaggcttacagtagtgttgatgagtacttttgggggaaaccaccttcaacaggagatgtttttgtgattgtatttgaaaatccaattataactaaaaaaacattaaagtaaatactggaacagaagatcggcaaatgatattttgcatcatggagccctagatgttggggaaaacgttatgcctagcaaacaaaggagacatgttctacttacttaagactaggagaattccaaaatggaactttgaaatgtcccggtgtacatccaaaaattccatttgatataccttgtttgaggatatatgtcaccaaaacacaaaaggaatgg

SEQ ID NO: 454488 - DNA, 1038 bp, Homo Sapiens
  misc_feature (920)..(920): n is a, c, g, or t
  misc_feature (950)..(950): n is a, c, g, or t
  misc_feature (968)..(968): n is a, c, g, or t
  misc_feature (1001)..(1001): n is a, c, g, or t
  misc_feature (1015)..(1015): n is a, c, g, or t
  misc_feature (1028)..(1028): n is a, c, g, or t
agcgggtaactagtttgtaaatcagctgggatttcttcctttttatttcattcttttaaaaaatttattttaaggtagtacatgtagttggaagaactactataaaaacaatatatgtgggaaaacttccagccctctgttaattgtgtgtctcaaatttgttctggaaaagaaagggggaaagtctatgaacgacttttcaacctggcaattccatatacaatgttaaacttgattcttatgacatattcctatgaaaataataaatactggcacttttccttgcagaaagcactcagacctgaatcagagaaaatcatatgccaaagccaactgccagtgttagacctctttttccataaagagtaaatggaatgctaacactagtgggcttattgagaaaatttaaaggttgctgtagtgtttagaacttaggctggaaaaccatattttagtgcatcattttactacatgatcttccaattagatagcttgtaatctgttccttacagcacttgctgttgttacatgtgaagattttataaattttaggaaagtgtctatgatatatagtgaaaagtgtgggaaaagaatatagaaataatattcacttctaaaaccattatgataaaatatttgtgtatggattagaatagaaagggattatggatgtatctattcaatttctcagtttatgttgggccttcctttttggaatgtacgctgttatgctatgataaatgatataatgagtaaaaattattcaaagccaaaaatgaaatacaaaggatttccttctttgactatttaggaaagactaagcaaccaaatagcaaagatccctcaggataatgaggtttatgtttgggaataggcatgagcaggattactacttagggacacaggattcctagggaacnttcctcattggaaaataaaatggggttccnggggaaattggggtaacntaggaaattttttggcccagaaatggggtttcntattggagggaacntgaggattgcctngggggagttt

SEQ ID NO: 454489 - DNA, 834 bp, Homo Sapiens
  misc_feature (441)..(464): n is a, c, g, or t
agcggctttaaatatattatttaattgtaggaattggtttacacagaacttttttggaatacatctcttagtaaagtgaaatataataatataattgtatttagttactattgtagataacttaaacttgagtagtgatttactgttttataaaatgctttcatatatgttatctcatttgaacctcataaccagccctgaaatagtaaaaacaagctatattcccactttataaagaatttgaggttaagataacaaggactcatttaagctcacatggtcagtaggtggcagagctactagtagggaaagacagaaagctagcattaatgaatgcttactatgtgccaggtactacatcctgtcatttaatcttaagctaagtctgggagaatgcgtaagtataattctggtgaagtaatagtttcagtggatgattgnnnnnnnnnnnnnnnnnnnnnnnntgaaactaatctgctgcctctaatttccaaaaatgtaagaaattttacaattgtgaaaacctcatggatttgggcaaactgaatgtatataggcttttgaccaaaagttggcacaaaaagtataaaaggaggcctattcttttcagttgaccttttgtaatatttgatttagagtattttggacaaattgctctattaactcttaatccatttattttcgtaactggtaccttaaaaatttggaatccttgcaactaagtttagcatcattcagaattttcgatattgtgagcattaatttatcgtcgcacatctaatttttagcagatagcagttagcccttaatccgttaactcggatctattttcca

SEQ ID NO: 454490 - DNA, 794 bp, Homo Sapiens
agcggtaaaagccctgtaacacctgctacagataaatttcccatctctgataattgcaggccatttagcccttttgttgtgcttaggttttctttccttcccatttgggccccgcccacggtcttttttaactttttcaggtgcagactgttgggcattggtgctactgaagttatttgcaacattcacttgtgaaggaaaaactgcattttcaccattacccccctttagaaaggaggaattagtgtttccttcaatctgtgaggaataatgatttgtattattttccagttgggaaaaaacagaattagtcccactatctgctggtgaagggaagagagacattgaactactttctgcaggtaaaggaaggaaaggatctgagccactgtcaatattcaaaggcagaactgttttggttagatcttccatttgtgctggcaaggcagtactaggtaaattttccatttgggaacataacataccaccttgttcatttttatcctgagaagttatatttggatttatgacactttccattgaggacaacaatggagttgacacacttgctaaatgagctggaaaaatgggtggcgagacatgctgcaactgggccgaacaagcaggattcccattggctttgggtctgtgattgtagaacaatggaatttcgagctgttcaccggtgattggcaataaataaacaaaactttccattatctgggtgtatcgaaagtggtaccttttctgaacttattactttttgggctgcaatttaaacaggccagattatg

SEQ ID NO: 454491 - DNA, 992 bp, Homo Sapiens
  misc_feature (184)..(241): n is a, c, g, or t
gggacagcaggaccgaaggactttggctgattaaaggatcactgccctgggaaagttcaaacacctgtgaaccacaattggaaagtaatccaacagcctgtagctcaggcttcccagttaggactgccttgtcccaagtaatcttgcttagttttttggggggccacaatacctaagaaggagnnnnnnnnnnnnnnnnnnnnnnnnnnnnnnnnnnnnnnnnnnnnnnnnnnnnnnnnnntgtggtccctgtcggagaagagtctggtctgtggacacccagacacctaagcaagttttcttggaagggaggctttggcaaccctcgcatttcgcattcacaggagacatgccctattttccacaacagcagcctcgccaccagccccaggagggaggaagctctcttctcagtgtctgcaggtttatccctaaatgctacggaagcagcagctgccaggggaaggggatactgctcagtcttttaaaactctcgtgtaagcttgatattacagtcatgacctaaaaaggcaaagaccagatatgcggagctcgctgctgatgtagcctgcacacggccgcaggatttgtcaccactcatccatgtttaaaaaagccagtccaggcaagacagccacaggctcccgcccacaagtgatcacgaacacacttcacactgccttatggcagagcaagtgcatatagcccggtcttgtgtgaccttcacagccaatattcattataatcccctctcaccaatattgaaaatggatgctcaggggatcagtgactcgcctggtgtcaaagtgccaggtccaaatcaagacctgcagatcaagtcttctgtggatgcttccaatcccaggctgctttcatttctgatggacacgtccttcatgtcccacagatccatggatcgccggcatcttccctcctgttcacataagtgagaaggaaggagctggcagggaaatgccttccacgtggggtac

SEQ ID NO: 454492 - DNA, 664 bp, Homo Sapiens
  misc_feature (35)..(35): n is a, c, g, or t
  misc_feature (39)..(39): n is a, c, g, or t
  misc_feature (52)..(52): n is a, c, g, or t
  misc_feature (72)..(72): n is a, c, g, or t
  misc_feature (93)..(93): n is a, c, g, or t
  misc_feature (103)..(103): n is a, c, g, or t
  misc_feature (136)..(136): n is a, c, g, or t
  misc_feature (154)..(214): n is a, c, g, or t
tgattataaggattcagctggccttgggaaaagtntaancatctttgaagcncaattggaaagtaatccaancagcctgtgagctcaggcttnccagttaganctgcctgtcccaagttaatcttgcttagttttntggggggcatcatacctnnnnnnnnnnnnnnnnnnnnnnnnnnnnnnnnnnnnnnnnnnnnnnnnnnnnnnnnnnnnncaggcaagaatttttgtccctgtcgggagaagagtctggtctgtggacaccagacacctaagcaagtttcttggaagggaggctttggcaaccctcgcaattcgcattcacaggagacatgccctattttccacaacaggcagcctcgccaccagccccaggagggaggaagctctcttctcagtgtctgcaggtttatccctaaatgctacggaagcagcagctgccaggggaaggggatactgctcagtcttttaaaactctcgtgtaagcttgatattacagtcatgacctaaaaaggcaaagaccagatatgcggagctcgctgcggatgtagcctgcacacggccgcaggatttgtcaccactcatccatgtttaaaaaagccagtccaggcaagacagccacaggctcccgcccacaagtgatcacgaacacacttcacactgc

SEQ ID NO: 454493 - DNA, 296 bp, Homo Sapiens
gacgttggacgctatttttattttaacatctcatattgccccaggttctctgagtcaacaccctcaaaggggacagacagaaacagaaaggaacttttgggctgattataaggattcagctggccttgggaaaagtctaaacatctttgaaacacaattggaaagtaatccaaacagcctgtgagctcaggcttcccagttagaactgcctgtcccaagttaatcttgcttagttttttggggggcatcatacctaaagaagaagaagaagaaaaaaggcaagaataagtaaaagg

SEQ ID NO: 454494 - DNA, 845 bp, Homo Sapiens
caccacactggaaccggaagggtggaaagtaaaccttcgggatgcctggttcccttaacacataggttcacaggctttagtcaacaagtcgattcatgacaaataagtgttactgagtactactctgaccttaccctctaacaggagctatctgggtaccaaaggcacagagcagttacttgcatcacagaacgtacagtcttcacagaagatgacattaaaactcgtgctattaaataggcactctcatccttcaaaagcaaactgctcacctgtcccctggcaaattccctctgtgcaaatgcaagcttgtgagatgatttattatctaacaggtaacggggggcaaagatgaccatgcaggtatcaatgtatcgacctcggcctttcttgacatcaatacctacaaataacaagaaccacttttatgagttaaccatgaagagagaaaactcttggtctgacaaaaataaataaccttcacagttacttagtttctctgagaaaataactgtatcacccagaggatattgaaccttctaggaatgtaatgaaaacagcaattgtactcaaagtattattactccttattcccatttaggccttaaaaaggttcagaggcaagatcaacatccccttaattcctagtttcttcacacagtgtgtaccatttaacagcaactaaaatacacaggtgtccagtcacatatatgttaggtttccatttatgaagctgaatacttacaacagtttcacatgatactttttggcttacacctgggacacaaaatttccttctagagaacctgccacttttacagatacagtggaaatttcagaccgct

SEQ ID NO: 454495 - DNA, 852 bp, Homo Sapiens
tggatgaaggaaacagaccttggtgaaggtagtggcagaaggcaagcttagattggacaacatgaatggagatccttccaactgccaacctgagcctgtcgtccctcagccagctgtttcagcagcagctcctggtgctggctcaactggtactgcagcaacttcaattccttctgcataatctctgactccgtcccacagcactgcaggagtgacagcagtgctattctgcggtggagaccccaagaagatacagccactgctacagaagaaacagatgcacaggccaatgagctctgtggagaccccaagaggatacagccactgcttattccggaccacatgttccatcagtagcgttgagaagcacatccagctgctcaaaccagctgaggctcgtattcatatcctgtggcaggggatcggcaggggtctggctccctggtgtcttgtgcttgctctcctagcgggggatacccaaggtatccccaggaaaggccaccacgttagatggaaagagggaagtggggatgcaacactggggtaggtggatgcactatcagaccaaaactgcgatcctgtgactatggaaaggaaggacgctcttggggaactgggggaaaagcgggataccgtgatgatacgcagatatcaggtggggattgaaggtgccagaacctggttgagacctccccagaagtagtacactggcgccaccacgccaaacctgtgccagtgacaactgccgccgccgggttcaaaacttcgggttggttttgaaagtccgactattggatctggctgccgcagcgccacctgggaaactgagttcgcctcttgcgaacacccgct

SEQ ID NO: 454496 - DNA, 699 bp, Homo Sapiens
cggaatccgatctacacggaacaccaaactggttgcacagcccgtaacagtcttgccaatcagagggacttgtgcattcgtcatgttcgagatactatagaaggtaacccagctacaacacaggcaattccatcaaagaatgttgaatgaggggcagcaacaaatactggtgcttccaaaggacttgcaatctttccttttacagcaactataaatcccattgaaaagaacatagcacgacccagaaatttcaaagctgtttgagtaattttcctcctccaaccagttattgggtgggtcagcttttcaggacagcatactgttgaaattgcagcaaatggccatgcaagtaataaaattaacgcaaccagtaagacacgaattggaagcaagataatcccaagaaggacaatctggacccgcctcgcggagccgatctgcgtctgctgcacgaaggggttcggcaccggcggcgggaagaaggacgcctgacggggcaccatgggcggccgcagccccacgttcccgacgccggcacctggcactgtggccgccacttccgccgcctgggcgcaccggctcatagttgagccgggcgtagaacccggccgaagcgatctacgcgggcgctgcagccaaaactgagccgaagacctactagagtcccagcctagggcgacgctggggagcccccccgct

SEQ ID NO: 454497 - DNA, 713 bp, Homo Sapiens
ttcttagtgatgtgagcattcatctcacatagtttaacctttcctttgcttgaacagtttggaaagactcttttagtagaatctgcaagaggacatttttgtgttctctgcggactatggtagacaaggaaatattgtcacataaaatctagacagaagcaatctgagaaacttctttgtgacgtgagcattcacctcacagagttaaacctttgatttgattgagcacttttgaaactctctttttgtagagtctgcaagtggacatttggagtgctttgaggacaatggtggaaaaggaaatatcttcacataaaaactagatagaagaactctgagaaacatctttgtgatgtgtgcgttcatctcacagaggtgaatgtttcttttgattgagcagtttggaaacactctttttgtagaatctgcaagtggacatttggaggactttgcagcctaagttagaaaaggaaatattttcacataaaatctagaaagaaacaatctgagatacttctttatgatgtgtgcattcatctcacagagttaaaacattcttttgattgagtagttttgaaaccctcctttagtagaagttgcaagtggacatttggagcactttgatgcctatggtggaaaaggaaatatcttcacataaatactagataggaacattctgaaaaacatctttgcaatgtgttttttcatccgct

SEQ ID NO: 454498 - DNA, 525 bp, Homo Sapiens
agtgctgggtttttacaggcgtgagcctcctcgcgtctggcctccagtctcttactctctatactcagatgacacttaaggaatttttccagaaacattttctgtatagccagacacacaatagttacaaatgatgactgcctactccttgatctctaactcatatctctcccaccgaagaccagttcaccttgcccatggccaatcctggcttactatttcttattgtaataaacctaagaatgcagtttaagaataattactgaacaaaaaattttcaatcaactcctctgaaatttcttttacattttataattattttaatattggtaaattgaattgcttttaaattagccatatgaaccattgctttgttcactaatttgatcttgaatacattttgtgtaaattttaggctaactagctatattcatatttaagagaacaagaccacaaacgttatgtcattcttttctatgtatcatttaaggtgcttatattggtgcttaagaagaccttcccgct

SEQ ID NO: 454499 - DNA, 893 bp, Homo Sapiens
gccatttctcaagtttaattttaaaggtggtaatatccggagatagtttacacaatgatgttgccctaaaccaagcttcttttcgggtcgtcaacgaacttttcagaatgttgacaggggtccttgaggccaggccttgaggaacggctggaggaagtgtcccgccccaccacagctgattggatgaagggcgggacctgactagtgggcaacccaatctcagaggcaaaacggtggtgtgggaatcggcagggattgaggggagcaacagggcttatgcacggtgaactggggcagggcagccgagggagagggcctgtaaggaggccctggagggaagccagggaggagttagggccgcagagcagccacgtctataaggagcaggggctgaggtccaggccagatacacaggaagaaatgaatgcaggagacggcgtgcaacaggaagaagcagagaagcagcggagacggaggtacctggggatgatgccaggactgcagcttcagggacttgtggcagatgcacagggtgcctctggctccctggagctccacactgcagtcccagctctgtctgcaacccactgctttgattcacccaggttcccacaatgatgctcgtttcactcaaccctcccgtacttgaggtcagctgaacacctcttttcttcccaaccaaaatagccttgagttctgtcctggctctgggatccagcggtccctcgcagtcaacgtggagatgctgagtgcagctcatcacgaggactgacatcatcacatatgtaagggcctggcgtgtgccgggccctcaacaggtgtggctaatattagcatgcttgctcctccctcgactgctactgtcattattagcggtggtattaatatccgct

SEQ ID NO: 454500 - DNA, 778 bp, Homo Sapiens
cgtgggttccaatcggttccaatgaattagttatcaccatagcaatcatattcacggcgaaatgttctttgttgatggggcacatatgaatcataaagcgaggctgcccatggtacaaagctgtttggtcttaaaacattctaaaagccatgcaggcttgacaacatcatgtttatttgacaaaattatgtttttcactctgatgttctcagaccctgcaattacacagtacgtgtctgggcctggattttgtactatataaccaccaaattctgcaattctgttctccaggtcaggctttggctggctatctgttccactcataacacaaaactctacatcttcaaatatattagaaattttgttaacgttagtaaggttaggtgcttttaagtgctcaataattccaataactttcttcatctttggggcagctttccgctttttttcttgtggttcatcatcaccacctatataaaggtgtttagatgcgagcttaccagatgccttccccctaagttgttctaggtcgtccagggtcatgcactcatgccactccttgtcatctcttatcttttcaattcgtggaaaacgcaaggtgcagccagttttatacatatcactgggtacgatctctgctgctttaatctgaacaatgacagaattacaaggttcaatgtatacttctggcttctctgttccacataaaatgctgcttggtggagcttttctatgaaaaggcttccaatacttggccaatttcaaacccagatccgct

SEQ ID NO: 454501 - DNA, 946 bp, Homo Sapiens
gcacagctggaagcgcgcgtcctgatgatgtcgaccaacaacatcctgtcgcccgccaacggcaagccgatcatcgtgccgtcgcaggacatggtgctgggcctctattatctgtcgatgatgaaggaaggcgagccgggcgaaggcatgctgctcggcgacatggccgaggtgcatcaggcgctcaacgcgggtgcggtgacgctgcacaccaagatcatcagccgcgttccgcagaccgatgagaacggcaagcagtacctcaagcgctacgagacgacgccgggccgcatgctgcttgggttgaaaccctgccgcacagccacaaggtgccgttcgagaccgtcaaccgccttctcaccaagaaggacgtcggcgacgtgatcgacgaggtctatcgtcacaccggccagaaggagaccgtgctgttcgccgacgcgatcatggcgctgggcttccgtcacgcgttccgcgccggcatctcgttcggcaaggacgacatgatcatcgcgccggacaaggacaagctggtcgacgagacgcgcgatcaggtgaaggacttcgagcagcagtatcaggacggcctgatcacgcagcaggagaaatacaacaaggtgatcgacgcctggagccgttgcggcgaccaggtcgcgaactcgatgatgaacgagatcgaggccgtccgtcactatgaggacggggccgatgaagggccgcgagaaggacatcaactcgatctacatggatggcccactcgggtgcccgcggttcgcaggcgcagatcaagcagctcgccggcatgcgcggctgatgggcaagccgtcgggcgaaatcatcgagacgccgatcatctcgaacttcaaggaagcgtgacggcctgatatttcaatcgaccagggccccgaggcccgcggacaccgcgtgagacggggaaaccgggaataac

SEQ ID NO: 454502 - DNA, 741 bp, Homo Sapiens
  misc_feature (458)..(458): n is a, c, g, or t
gaaccaaaaataacccagttaatttactggaaaaagttatgcattacaccatattcaagttggtaacataaaccgagatataagaatcgatatattggcttctggttattttcttagcactggagtgccttttccaaccattgagtgcatgatcagattacacaaatacaagcacatatcatgtgttctcccatgagacattattcacttaggattgtctacaataaaaaaagttaaagtacaagcaataataaattcataagaattttttgaatttaaaataaatgcatgtgtctttgagaacatttcttttgaaattcatatttttaaaaataacaagtttcttaaatcagtcttttagtcgtgttttcatatggtatttatcagtaggtggaaacacttcacatcatttaaccccaaaagggcataataattaaactgcaattaaatgtagggancagttgaatcattacaacattaatacgggtgtacaaatcagagttgggccacacaatacacatggttaatactggaaagaaatacaatatcagaatcatggatggttcatcacataagcataatcatgcaaataaaaacagagtagattataaaaatgtcataagagattttcaaatagtaattgtttgactctcatagtcaaccattgagctttaacattttgtgggaataatgttaaaatgatgtatttcctctaagactggctgcacaaatcatccgctc

SEQ ID NO: 454503 - DNA, 981 bp, Homo Sapiens
ggcccggatttccaagatttggcgcgaacgaccgggaggttcgtcaagcacccaggcgaatcagcggatcggggtcggccgcccaggacgatccccctgcgccttgccgcaatcagcgtttacaagcccagaccgctgccagatcgctcgcgtagagcggccggcaatggagcgtgtagaaatggcaggcccggcgcccgcctgcagcagcggtcgcacatggccgtcaccacgtccagccgaacgcgcggatcgattcacggtcgtcgccaaagccttcaaggcgcttggcgatccagcgcggcacttccgcaccgcacatctcggaaaagcgcatcagctgcgacgaattcgtgatcggcatgatgccgggcacgatgggcacgtccacgccgagcttgcgtgcgtcgtcgacaaactggaaatacgcgtcggcgttgaagaagtattgcgtgatggcggagtccgcaccggccttcaccttgcgggcgaagttttcgagatcgtgccgggcggagcgcgactgcgggtggtattccggatacgccgccacctcgatgtggaatgcctcgccggtttcctggcggatgaactcgaccagctcgttggcgaagcggaattcaccgatctcgcccatgccagagggcatgtcgccgcgcagcgcgacgatgcggcggatgccgtgttcgcgatacgtattgagaatgccgcggatgctctcgcgcgacgaccccacgcacgacaggtgcggcgccgcctcgatgccttcgcgctggatttccaccacggcgtcgagcgtgccctgttgcgtggtgccgcccgcgccgaacgtcacggagatgaagcgcggcttgagcggcgaaagctgcgcgcgcgtgttgcgcagcttctcggcgccttccgccgtcttgggcgggaagaattcgaaactgaattgacgatcttgcatgacagaaaccttaagcctcgcgcagcaacagg

SEQ ID NO: 454504 - DNA, 760 bp, Homo Sapiens
  misc_feature (667)..(675): n is a, c, g, or t
atggtgagcgctgtcctaccttttgtcactgctgcctccgggagagcacagagagcagacttgagcctctggatctctccatcacgtaccttcaccgtccttgacatttcctgctcgtgctgcttgataaggttctccctcacagcctgcagctccttcatcttctcctcatggagcttggctttgagttctgtcaccagcaccgtgtgcttgcgctgctccagctcacgaatcctcttcgcttcttgagtcttctctctttcaagctttgataccttggacttctcttgatgcagctctatctgaatgtctgtgagcttggtcctgaggtcttcattggcagcttgaagggcaacaatgagtgcctcgggcttctcgcccttatttcgccctttcttggacattgttcctttctaaatggagtctgttggtttttaatttctttcaagcaggtgctgccatgttactgtttcttatcctggagtacgatgtctcagcatctactgtgtggtgctccttggtaaggtctcctcaatcgctgccctggaagcccatgctgagacccggagaagctgtttaaaggagggagagatgcaaactgaatccattttccttgtgaccgagtcggatgcagcctccgaacccaacatcagcagtggctgccggnnnnnnnnnccctctgtctctggttggcgatggtgcgaataggaaccacccttccagccccactagagtatcagcaatagaggcggcggcggcg

SEQ ID NO: 454505 - DNA, 468 bp, Homo Sapiens
aggagtcgtccgacagcgagcccgaggcggagcccggctccccacagaagctcatccacaaggtggtccacgttcgggtcagatccgacagaaggtcataactccatgcaggaagctcatcttgtgtgctgataacagaaaagaaatggaagattggattgcagcattaaagactgtgcagaacagggagcactttgagcccacccagtacagcatggaccacttctcagggatgcacaattggtacgcctgttcccacgcgaggccgaccgtactgcaatgtgtgccgtgaggctctgtctggggtcacgtcgcacgggctgtcctgcgaggtgtgcaaatttaaggcccacaagcgcctgtgctgtgcgttgcaaccaaataacctgcaagtggaaccacactggccctcgatcgggaaggaccatcattgaaagaatgccagatgggactgccatgccccaccag

SEQ ID NO: 454506 - DNA, 393 bp, Homo Sapiens
caagtgggcactgacagcaaggcattctttacacgatgtttgaaccatggccttgcaccagaggcagcgccagtcctgcaggcgcagcacaccgccacaggtcttgtcgcacacagtgcacttggcgtctcacaggtaggtttccttccaaccactggtggggcattgcaatcccatctgcatcttcaatgatgtccttcccgatcgaggccagtgtggtccacttgcagttattggttgcacgcacagcacagcgcttgtgggccttaaatttgcacacctcgcaggacagcccgtgcgacgtgaccccagacagagcctcacggcacaaattgcagtaggtcggcctcgcgtgggaacaggcgtaccaatcgtgcgggtatcctgctatga

SEQ ID NO: 454507 - DNA, 770 bp, Homo Sapiens
ttggcttctttcgaatgagctgggacaatctggtggcaagcttcttgtcgggaaggaagaaccagggctggattgcaattggtgttgtctaggtataaagtatggatctgttttcccccagtgtcagggctggctcctttagcatggatggtgtgtatcgaaaatcacctgtgtagaggatggttccaaaatatccttcaaagagaaacatgacagaaccaggacagtgattggcatcgaggagggttacggtcatggtctcttgtccaatttcatctaggtgtaatacatggctctcaccaacctccatggcttggatccattgcttagatacctgtaggtgacgatgcaagaggtgggctgtaattggggagcagtagaggggccgggcccaggtgctagacaggcccacggtgtggtccgagtgcatgtgagacaagaagaagagacgtgcggtgccagcccggcgcaggctccagaagtccactgcgatgggcgtatgggggatcaggaccccattcatggtggtagggttggagtcaccagtgggatcttctccacgggggcagggctcctgcgtgaggcttccacaacggcgtcccgataaaagtcatgctggggcaagaacagggccagagaccctaagggaaagagcccagcagagcaataagttaccagagtgggcagaaaagggaagtcaccctgcccgctggagcccaaatcgcggagggcgctggacactcccaaccgcgcgggagcggagcgccgct

SEQ ID NO: 454508 - DNA, 1042 bp, Homo Sapiens
  misc_feature (480)..(643): n is a, c, g, or t
  misc_feature (856)..(876): n is a, c, g, or t
gacattgtttggcttgtcttgtcgctttgtggtgtttcttttgctctttcctctgttcttctcctatgtgcctcgtttacgcgttttcatgtttgtctgtacatgccagtttgagatttgtgtctcgtcccgagtcggtgggttgtttttattgaccgtcattaattatttctgggtgatgatcctccgttcttgttgttctatcgtattatttcgatatatttgtcttacatctatatcatttcttattttctctaaatttttcttaatcttttattccttgtttcctttctctcactatttaacagcaattcttatgaaacacagggttacagattcttcccagtgagaattattacactcccactttaaggcttacctaaagtattttggcatttaccgtatacaagggatctaccttacacttctgcctgatatacttttaaaaagtatgtttcctggtttcacacatgtatactnnnnnnnnnnnnnnnnnnnnnnnnnnnnnnnnnnnnnnnnnnnnnnnnnnnnnnnnnnnnnnnnnnnnnnnnnnnnnnnnnnnnnnnnnnnnnnnnnnnnnnnnnnnnnnnnnnnnnnnnnnnnnnnnnnnnnnnnnnnnnnnnnnnnnnnnnnnnnnnnnnnnctgtgccactccagacagcctgtactcttcaaccactacatatgctgcttatatgcattacacatcacattgaaaaactgaagatgtcaatggtaacatgaaaatgtgtacagcagtcacacccaaagggactgaggaaaaaaaatacactctgcagattacctaataattacagcattttagatttatgaaggaccacatatatatatgtannnnnnnnnnnnnnnnnnnnnactctcatccaagatcatgtagctatttagccctttccatttttaaattcaaaacctagcattggttcttgacacatgataggtatttaataagactgacaaatgattgaataaatgtctaaaacaaatgtgttatgactacctacctaatatatatttatccgct

SEQ ID NO: 454509 - DNA, 807 bp, Homo Sapiens
agcggtgtcggtcgatacctagcatttatttttccctgacaatgaacgacctttccctcacccaccctaagctcaaagagtttagcaaaattctcttttaaataaacagaatgccagtaagaggttgacccctaccatggaacttctgggatgctaaatacttcctcatgaacaaaataagttccttattataagttccttatactagcagcttcacctaaagaattttctctccagcaatattgacttcactggggaaaagccaagagtgtgtggtgagtgatttgttctcactcgacctggctaggactggctaggagctgttttttgtacatgagggaatttgggctttcctcagttatctgaatgttttacccaagtgccttcctgctattgtagcaaagtagctcagcttccttgtccacagggtgaaaaaggactaatgcattttccatcagttttctaactatgttagcaaaaacggcctcctggtagctcaacctcctgtacgcgtgtgtgtgtgtaatacacacacaaataaacccctctgttttttctaagacatcttagctggatattataggaagcactttcataaaacaactgtaacaaatcgcaaaggaaaagagaaacaaaagcattagatttgagacataaacaggcaagagaaagtgtattaggaactgacagctatcaaggaaaggtttgtcagttacaaatgctaggaggaaatttttgccagaaggatgggtcatgaaatattccagtacgggaagaggcaaataggatcctctaagagaatgagaa

SEQ ID NO: 454510 - DNA, 853 bp, Homo Sapiens
ttgtgtgctgttacatctgaacaaagttctgtcatttttaaaaattaagtaggcccacagctttattagccatgtttttgcatccttttccccacaattattaacacaggatcaaactgcaagttttggaagagagccctttggacggggggaaactactgaacagtgatgaatggccatacctaattcattgtttggaaattgatgtggaggactgtgtttcaccgagggagaaagggacctcccagaggctccgaggctgcaggtcttcagccaggtgacagcactgcacctgcttgtgtgcaccctgatggcaacagcagggaagtccacagtcacgatgatagagacagccacagctgccaatcagaagactcgctctttctggttttcatggactgcgttttgcacatcgagctcactgtttagagctgtcctagcactcttctttttttgagacttttgactcattttctttgcgtaactttctctgttgatagatgcgtatggctatggcagtgatgcaaagcaaaataaatatcaccactgctatcacacctccgatgacagcagagtctcttctgtctgcattaaccaagggctctccctcatccgctggtccagaacgacctgcgccccccgcgagtcggggagccagttcccgcgccggggagccggacgccgcccccgctgcgcagcgggccataggggccacgtaggccgcggacggtgacccgggaggggccgctggggcgcagcgccgccttcaggggagcagcgcggccgaagcgcaccgccgagaggcagccagtgaagccactagtcgccgcccgccttgtgtccgggtccgctc

SEQ ID NO: 454511 - DNA, 649 bp, Homo Sapiens
atcaagttttctgggaactcccacacaatttctctgtgtttccactcatgccccacagggtagcccagggtaagctccagtagtgaagcaagttgctcaaggttaaaaaaatggcccaatgccaggatgatgatgtagtaccacattccagatgggcctcaatcacctgtgttgcatagccaatgccttcaaataaagggcaaactttcctccaacacgtaatgccaccttcacttgtgaactgccccagagctgtctccacgggaaaaaacaggaattccacagcaaatataaaacaccacgtagggaatcaggaatgcccctcctccgttcttgtagcacaggtaggggaagcgccacacgttgcccagcccaatgatctccccggccacgctcagcacgaactccaccttgttgttccagtggccgcgctcgtggacccgccttgtcgcgcttgacgcgcgggtggcgcgcgggcgccgcgcccccgctgctgcagccgccacccggcgcctcggactcccgcgcctcctcagcagccttcccattgcccaggggcagcgccttctccgccgtcatggccgcgctggctgcctcgtgcgccggcccggctctgcgccgccgccccgggcgagctggcttttccgct

SEQ ID NO: 454512 - DNA, 722 bp, Homo Sapiens
aagtcatgatgtcaaagagagaggggagacctgattcctgctccaggacacctcagagacaggacaactaaatgaaaacccagctacagcagatcagcaagagaatcaggctgtctggtttggaaaataaattttgacactgctctgtcctccctgtcctgtaacaggccaacctcccgaagatgcataaagacacctttgccgttgaccaggcagaccctgcatccacaggacatagagagaaaggtgctccctgaacactgatctggataagcattgctgggtcagtgcagaggcgtccatttccccagtctgccgagctggcctaaagctgaggacctcttagtgggagctgaggacatgtgcctgaagaggcaagcccttgactgatggaaattggagtctgagttccatgtgggggactgggaagcacagcaaggtctgaaatgggagacccagggaagggcagagaggaccaaaggaggaagggggtctacagtgtgggaaacagcctggacgcaacagccgggggagggggcctgctctggccccagtggccccttgtaagcaggaaaggcagctggctagacctcttctgtgttattcactctgattttatcctttatcttcccctcccaagctcagctcctttctaaccccaaaggccatgcagctaatatgactaagattgctgggccgttgcttgggaatgccaatgagat

SEQ ID NO: 454513 - DNA, 905 bp, Homo Sapiens
  misc_feature (407)..(415): n is a, c, g, or t
  misc_feature (511)..(520): n is a, c, g, or t
gaaatggaatttaaattgcaccggattaaaagtacaattaaagagtttagggccaaagccgggtgatacttccaataccaccgaagccttgaaaataggtattaatttggaccacggcatccccccgccaggtaataaatgggtcaagttttacgggaaaaaacacccttaggttttaaataaaagtgggttattatcaaatcagtgtaattaaagttgagcaataaagtataagatttccctcggagggggactgttttgctgaggctcagggattgagcacttagattttgggtaagcaactttttccttgtcagatttatgatctattcttcttcttagaaaatataacttggaaaatatgactctttcacatatacaattaaaatacaactatgaagcattcnnnnnnnnngagagaagtcatgtcgatgatatcgtagtcaaggtaaatttgtgggcaagccattcattaccttattttaagagaaaacataataccagttactgnnnnnnnnnntccaagttttttacaagaaccaaacaaactaattccaaaggaataaaaacaaatataatcaatatattaacacagtatacagttctttggcagtatcacactaaccgttgattgaagtcagaactttagagttttctaatccttagacctggttgccagtcttttaaaactaaacaaataaaattccacatctgtaactaattcagtaatcccaggaaatgaaattcagaataagtcttgcagacagcttttgactgttacatttaagcataggtattatctgcttagagtcccaatccaaatatactgaaacagacacacacaaataatctgtgaaattttgtattggttcagacaggctagaatccttagaatccataccgct

SEQ ID NO: 454514 - DNA, 716 bp, Homo Sapiens
agaaagagaagcaaaattaacgtttgaaatagaagaacttaaagggcaactggggaaatgctgtcaaatcctcccagcccaatagtatgcccctcttgctccaacttcccagggttgtgggtagggatagagaaattatagccaactttcagaaagcccaagtcatggctaacattctctgcaaaccgctgtgtgggttacattacaggtgtcccattcatgggcactgtcttggaattgagcaaactctgggcaaatagaaggtggtcagacaagtccacaaaagagataaatgcataagcaggtggatggcagcttctctcgattttgccataaaggaatccaatcacattgttggggaaagtcttatatctgaagaaatgattgcactttaacattcccataggaggctttccctcaggatgggctggtggtttagactttgaaactatctcccagctgtgccactacgaggccctctcctaggcgatcagttgcgcattttccctgatttacaggggcttgggggaaatgggatgaaaacaaaatcatgcatctcattgtggattggaagcacagaaatttctcagtcacaaaacttgcatacatgactgttctctgatgactaactagaactaaaggaaattatgcttatgtgtatagatcatggattgcttgtgagtgatttttgttcccctccaaatatgcagagactt

SEQ ID NO: 454515 - DNA, 898 bp, Homo Sapiens
  misc_feature (842)..(842): n is a, c, g, or t
  misc_feature (845)..(845): n is a, c, g, or t
  misc_feature (859)..(859): n is a, c, g, or t
gaagttctttcatggagccaactcaaggttttgaattgcaaaacttgttgccaataaaaaggttttgtctgctcctggccgtgtttaaattaaattaccttctggagatttctgttgtgttggtctccccgtgttcaagctctctgccaattctgtctgtttctttgtcaattaacgcggtaatggaatccttgggttttcatgtgggaatttatccccttgttttgcctattcccaaagggtgacctgcactcaatcagaagttagtgttccctccattcttcggggcgttctagcagggaaccagcgctggccgcagaacgcaaccgcccttggcgccgctgacgcccttcgggggccgccctttgttagcttgcttgttgctcccgccgcttggcgatcgagtctgcgggccttggaaggcgcgctctcgggaggcgggggtgtacggaggttcgtccgcggacgacatgatgttcctgtctgcgtcacccgctgctgccagaggcccgagtccggcggggatggacggggaggcctaggcctggatgctacgtcagcaataaactggtggaggagcgagactcccacccgagcgctcccctgcgccgcgcctccgcgacgggcctgagccgggcccaggagctgcacactcccaaacgttctgctcttccgcggggctctaggttccaccggcgcttactcaccggcgggaatcacgtcgacgagggtggcggggccagacgggtcactgaggtcaaggaaggccggctgatttagagaagggcggagggttgggggaagggaaaaggaaaacgaaagagagactgaggctgggaaanacntcgccgcctcctcnctcttcctctggaagataacatctatctcgccagcatcc

SEQ ID NO: 454516 - DNA, 708 bp, Homo Sapiens
agcggaattatttgtgaaaatgttcccataattacaccagcaggagaagtggtggcttccaggctaaacttcaaagtagaagaaggaatgcatcttttgataactggtcccaatggttgtgggaaaagttctctcttcagaattctaagtgggctctggcctgtgtatgaaggagtcctctataaaccacctcctcaacatatgttttatattccacaaaggccatatatgtctcttggaagtcttcgggatcaagtcatttaccctgattcagtggatgatatgcatgataaaggttatacagaccaagatctggaacgtatcctacacaatgtccatctctatcacatagttcaaagagaaggaggatgggatgctgttatggactggaaagatgtcctgtcaggaggggaaaagcaaagaatgggcatggctcgtatgttttatcataagccccacctaccttttatacctttgacttgctgaaggaattggcgttcacttgtcccgtagaatgttgcctattctggatttacctcattgctaccttatcaggccaaaatatgccttgctggactgaatgtaccagtgctgtcagcattgatgtcgaacggaaagcatatttcaggctgcaaaaggggctggcaatttccttactgtctattacacacagaccttctatctggaaatacacaccacatttattac

SEQ ID NO: 454517 - DNA, 480 bp, Homo Sapiens
tacctacaggatccaagggtataataaaattgaccttttgtgccacagtaaatgcgtgttttggatagtttttcatgcagcaatagtaactagaacaaacctctctgataggaaaagcatagcaccctcagaaaccatcccagctgacttctgtttacatcttatctgcagaacagtgtcacagtgccacctctactgcaatgaagcctgggaaaacatgcatttagctcttctagcctctttagtcaggaagaaaagggaatgaggatggggcatgggaaacgggtgagctggcaacagtgtctgccacaattggttatatatataaaatcacattctattttagtaagcagagctgcataataacatatgcaacccatgctttaaatgtatttaaagtactctaataacatttgctctcagagtactttatataaatgttctttgtacttagaatgtcatgaacaccgtatcaccgct

SEQ ID NO: 454518 - DNA, 711 bp, Homo Sapiens
cagatttaagttacggaagagttcttaatctgcctgtagtagctaggacgattcgtaaaatactaaatcataactttttttagggtatgtcttctacatttccgaggaatattatatttcctatcagagtatctactaaaactattgttagaattaaaagtatatcttgcctattttcttttacataaaccaattaaaagcttgtaccattttttaaaaaagaaaaatagcctagttttcactgccacctctgtcaaaaacacatttaagcacaacagctcggcacacagttgtaaactgtcattatttctctttctctagacctcagatacagaaggttaaattaaaccccttagttcacagcacataaggttcttccccttaatgtttaattttctatttatagaggagggaaaaaggcttatattctcatctagaccaatattttcccagtgatttgaaaataaattacattttttgattgggacaaagtcatgttcacaggaactgaaagaggaagcaatgaaatgcaattctctttgagcatgagtgatcaccaatgtcacttctagagaaatagttacttgcttgtatcctctaagtatactctggatttaccttcaaagtcactaaaaacagtacagagaacaagcaggtcataaggtgtattctcaaatatatgaacgatcttgcaagcacgatttttccgct

SEQ ID NO: 454519 - DNA, 731 bp, Homo Sapiens
agcggagatagctgagcgagagcgaacgtgagtgtgaaacctctttaagacaccgttgggctgcttggttctgacattctggactgcaaaacagttctactaggatcctggggatacatgaagcttctgtgaaccaacttttcaagaaaaagcaatggagattggatggatgcacaatcggagacaaaggcaagtccttgttttctttgttttgctgagcttgtctggggcgggcgccgagttggggtcctattccgtagtggaagaaacggagagaggctcttttgtggcaaatctaggaaaagacctggggttggggttgacagagatgtccacccgcaaggtccaggatcatttcccaggggaacaaacagcatttgcagctcaaggctcaaactggggatttgctcataaatgagaagctagatcgagaggagctatgcggtcccactgagccttgcatactacatttccaagtgttaatggaaaaccctttagaaatatttcaggctgaactgagggtgatagatataaatgaccattctcccatgttcactgaaaaggaaatgattctaaaaatacccggaaaacagtcctctaggaactgagttccctctgaatcatgctttggacttggacgtaggaagcaataatgttcaaaactataaaatccagcccaagctctcattttccgggttctaatccatgaattcagagatggcaggaatacc

SEQ ID NO: 454520 - DNA, 814 bp, Homo Sapiens
  misc_feature (337)..(378): n is a, c, g, or t
gtgatagatggaagactcaggtaacaagaactgcccctctctattgtgcggttgaagtctctgccacacaagagacccagtttttaaagttgtgctttccctcacacagttttttcctaataggaatggaagatactgagactgaaaatttctgtggggcaactgacttgtcaatttctgaagtaacatttttatttaacaaggagtaaaacaaatttgcccaactaaattattcagaggaattacgaaacttgtcacttagagtggatgttgggatattcaggtcatttaggaggctgtggttaaaaataaaatgacctaaatataaagctctacnnnnnnnnnnnnnnnnnnnnnnnnnnnnnnnnnnnnnnnnnnacattgttcctaattctgtttctgtggggggatgtaggaggctactctttcggtgttccaaataaagaaaaattcttctcttcttgttggtagttttgcatggtatttatgtagctctattttttagccagggtatataaattctgtattctttttgatatattagggggatgtatgtgtgtgatggagaaattggagaaggtcataaacaaatgactctcttccaagaaaaattgaagacaattcattaattgttctggtcattctttttgtacttttaagcaaggagtatttgaaatatgaacttgccccatctgcttttgggcaataattggagcataaaatgttgaaaatcaattatgtatttagggaggatgaaacaggctgacatattgaaggcatattgtattatgtttggtgcactaaccagaccgct

SEQ ID NO: 454521 - DNA, 771 bp, Homo Sapiens
  misc_feature (446)..(546): n is a, c, g, or t
  misc_feature (662)..(662): n is a, c, g, or t
tgggttgttttgttgctagtgctttattccaagaagaacagatggttcaaatcttctaagacagggaggcagttttgcagcttggggcaagattcccccttgaagttagacttcctaccccttcccacaaaagtaaggagttagggaaaactaatcgtcccttgaagattttaatttcaaaagaggtagctgccaaggtccttgagaaaacattcctggctgtatatacagtatagccaagtttaaagaagtgcagctactataccaggcaacaagtcatctgaaatcttgtagtacacactagccaaacatcttttgcaaatttcttccctctaatctccctcaacccaatgagccagtaccaaggtggtttggaccaattaaccaaccacttgcaactattcccattgccaaataatatttcccatccaatttttaaaaatggnnnnnnnnnnnnnnnnnnnnnnnnnnnnnnnnnnnnnnnnnnnnnnnnnnnnnnnnnnnnnnnnnnnnnnnnnnnnnnnnnnnnnnnnnnnnnnnnnnnnncaatacatgcacttccccaacccagctcccagaattttgttatcattccccaaactgagaacttctgtgacttcttgaagccaataactcgccgctgagcaggctcctccaacccncttggccttctgataaccacctggttctactttctggtcttctggtgaaatttaactatttctaagtacgctcatataaggtgggatcaataccaattgtcacaatgaa

SEQ ID NO: 454522 - DNA, 1023 bp, Homo Sapiens
  misc_feature (862)..(877): n is a, c, g, or t
  misc_feature (890)..(951): n is a, c, g, or t
tacctgctgcagacacagcatgggtttctttagaaacaggctcctgtgcaaaggcagtacttttaccatgaacatctctagactgtgattattaaatatagtgataatatacatgggtttactgggatattgaaaaataaaagataatgaacccaatttagtaaatcaacataaatacaaaacagagcgaattagccctctacaactgagctcgtcctgcgtcttgagcttgggttctttctggaactgtctcaaaccttagtgggggaagtgaccttatccacagattgcttttcccagaggttccgcttgctggatacgtctcctggtctcaagtcagaaggtttgggagcaggtgacttgtttccatctggggttttagttagccattcattgatgcggctagaaacccctaccttcaagccagcagtttccttatttggtgtgcctgctgcagtgggggatgaaaacacattccctttctcccacatactcttgatgttgcgtacaccttcagcaggaacaggaagatccgaggctgccggctttgtaggttttgcgctttttgttccctgaaatttgtgagttatttttaggattggtgctgggaagtttgttctcataaaattatagtgagtttgtcttcctcaacattatcatcttaaaaattcattgtgtaaacacctccaccaaaaatgagagtgataatttctgttgtaaaactgtatgctgatgacatatgtccatcaaaataaaccatcacagctagatcagaggatctttcaaaaatgaaatatgctttttcgttgggacaccatttgttgtgaaattgatattctacttcgtttcttcaacagatacnnnnnnnnnnnnnnnngagacagggtctnnnnnnnnnnnnnnnnnnnnnnnnnnnnnnnnnnnnnnnnnnnnnnnnnnnnnnnnnnnnnnagggctcaagtgatcctcccacttcagcttcccgagtagctggaaccataggcctctctctattttgtagag

SEQ ID NO: 454523 - DNA, 886 bp, Homo Sapiens
  misc_feature (433)..(517): n is a, c, g, or t
  misc_feature (520)..(554): n is a, c, g, or t
  misc_feature (571)..(696): n is a, c, g, or t
gttaccagtctttcctagaatgtggataccatggaaaacaggggctctgccttgtttccctataacctagaatggcatctaggcacacagcagatgctacatctattgtaaatgaatgaagtgaaagaagtgtccttgcagccacactggcagccgtaacatagtggttataaatctagactctggagtctcaagtgcaaatgtcattggcctctcctccagcctcctcaaggggcactcaatgactggaagcgccctgatatgactgtggttggactgacatgactgccagatggtgggacttggtctggagcagagactacttggaatggctagaggcaaaactcaacagcccctggagctgcgcttgtggtggagctggaccctgattttagctggaccttgtttttagagacagggtttccttctgcannnnnnnnnnnnnnnnnnnnnnnnnnnnnnnnnnnnnnnnnnnnnnnnnnnnnnnnnnnnnnnnnnnnnnnnnnnnnnnnnnnnnaannnnnnnnnnnnnnnnnnnnnnnnnnnnnnnnnnnggatggagtcttgtccnnnnnnnnnnnnnnnnnnnnnnnnnnnnnnnnnnnnnnnnnnnnnnnnnnnnnnnnnnnnnnnnnnnnnnnnnnnnnnnnnnnnnnnnnnnnnnnnnnnnnnnnnnnnnnnnnnnnnnnnnnnnnngctaatttggtgatttccaggggggatgagacttcgcctatgttggcccgggctgggtctcgacctccgtgacctcccggtgatccccccgccttggcctcccagtgcttgggctcccggcccatgcccccctctggctctctccctgattcctcccctggtctcctctttgtccggctgtccccgaccc

SEQ ID NO: 454524 - DNA, 795 bp, Homo Sapiens
agcgggggtggttcattactcaagttactgctgctgctattgtctttcctttgttgtcgatctgttattgttgtattattattgttgatgttgtcatggttaatctattttttaaaattgaaatgaagcagaagtaggccttgtgagaactgaaaggtctctttcatttttctcttcctgggattcattttttcaaaacacaatgctggaaaaaaaagatttgtttctgaaagacttcttatggtgctattccataaactttttttcaaacaagtttttgacctttgagccaacccacccgtagactacgaatgtctccctatggctggtagcatttgaagactaaagacttgtcaaatatatcaagagtatatcattgcaagggcagcacttgtcctgtggaacaactacttataatgccttagaattcctgcacatgatcaaacaaatcctcctaaaacacaccttttgaaatgttgaacataatagtgtatgttaattaacagctctatgaagcaaaatccatttccatgactgaagcattggatataaatatggtgtcctgcttttttggtagaaaatgtcatttgaggatgaattttctgctttaaaggcatgtgtgtttttaaaattaatgaatgtagatgtgtgattgtctgagtgagtgaactacaagaggtaaaacataatgggtggtgacaggttaacacgtatgtgcaagtctactagaattcctttgaatagcacctccttaggttcatgggacaataatgggacttctaatttgatcaatcc

SEQ ID NO: 454525 - DNA, 998 bp, Homo Sapiens
gggctcttgcctcccagcagcctctacttttcatcctcatccccctcgctcatgctgctgatagaggctgaggctgctttgggtgaggaagggggtgaggttttgagtggaagccatgagaaggtgggcgatggggagcggtaaggggaccggctccgggttgggttgctcacagggctctgcttcggggataaggcctgcagcatccggctgcttcctctccgtggaacatctgcttccatgctccatcaggtccaaacaagttctaggaagttgcccaatgaattcccttgactttctcttccccacttttgaattagatcatggctcttttcttccactctgttcacaaattcctttgatctttcctccacattcttgactttttccttcattttgtccacttggttctggaaacggtacctcttctcatttataaagctgacattcagttccttggctgtataccctctctggaggttacgtcgggcataaacatcatagtcacgaacaattctggtaatgatgtccgatgttgagatgccttctgttctctgcgttggaacgaacatcccttgtgtttttccagaaactctggcgtgagtgtccagggagcatctctgataacttcgtctacgtagcgacagtgtctgagagcttcgtatctctcggcttcattcatcacggtgaaacctttgaatttgtgggtgagatcatcactgcaaactcctaccaacaagtagctgttgggaaacagtgtttttgcttgcataagggctcttgcatgacctgagtggaagaggtcaaatattccattggcgtatactctgacaggcctgtcagctggtgttcctaagcgggcctgagcaatggtcagtttttcatggggtgcttgacactggcagttggtttcatcagcaaatggggcaggtgcagtcagggtcagtcgaggctgtgggcatgtgtgctctatttcctccatggtttcttaggccgct

SEQ ID NO: 454526 - DNA, 713 bp, Homo Sapiens
aaagagatataaacagctatgaaaatacttcagtgcaaaggcaattttaagatttctaaaaaaatacattacaaataatttgttaactgaacatacagagaatctgcccccgctacaggtgttacatttatgcccatattgggttcctaaaaagggctgtaaaaacgcacacaccattgtttgcgggggcagcgtgggcagggctgccaagccagggcggccacacaaggacctcagggcagggtggccctgggcgaactgcggctggcccctcgggacagagtggagtcttccccgttctgtctgctcaagccacgttgctcgctaccctcatctttggtgtcgatgtttgtcaccttattcttatccccaccactgtgttcactgttcttaccgctgatttaccctctacttcaaataaatattttataggtaaaagattatacaaatcaaatggtgaaatctgagcttccaaaaatacctactgtcgagcacctctggaaacaccctctgggtttcacttgccggagccccgttccacagcgtggcgcggggcgggcgtgagggccggctcctcctccagcgttggtggtgctttcctgaaaggcagcagtttcagcgtctgaagtctgaatctcacactgaaatgtcttctttaaggaccattaaggctatgtcaatattatttctagaaatagaaatgccgtaccgct

SEQ ID NO: 454527 - DNA, 864 bp, Homo Sapiens
gggccttatcagtcttcccgtgttgatcgctgacgtgatgctagattgcttcgttccaagttaggtatatctttaaactcctgtgttctggacccgtctttgggacgttgctgactgggtgacccttccggtttctgggaaaggtcagtttccctatttgtagctaggacacctgtgttctggacctgtctctctgactttgctcactgggtgacccttcccctttctgggcctcagtttccctatttgtaaagggaaagagttgtactagatcagtagttcacatggaccacagacttctccactccatggtcaggctgcatctcaatcgactgggaagctttttgaaagacagattccacactggtcaggagtcagaaaaagttcctcaggtgactgggatgtgcagaaagttcctcaggtgactgggatgtgcagtcaggtttcagacccaagaaccagacttgtagactacaactccatatggatgaggactgtttttaccttgtcctcgtctgcttccctgtgctccacagcagtaggttctcaagagatattgcttgaataacaaaaatataaattaataaaatccctcccagcaattatgcaggtatgctagtagctcctagcagttgctctaaactaacagcagatggtgctgttgtaccaacaatggctctctaactgacaggtttaataaaatttgttgagttccaaagctgcctcaccttcctttcctccatgctcagcaggaacacgcattccctgagagatggcctcttttttcccctaaccatctggtggcattgcccacaccctgctgaggaagcgagctgcgttccaggcactcaggcaaactccgct

SEQ ID NO: 454528 - DNA, 703 bp, Homo Sapiens
  misc_feature (85)..(85): n is a, c, g, or t
agcggggccgtagccagcgcccccgtaaagaaataaggaggcgcccggcttcccgcccaggcccagggccccagtgcagcctggnacacagtattcaaagttttggcgtctgagcattgttatgcgttattttcaagctttgctaacggtttttaaacttttgagatgtttccattaattggaaaaacaatcatctttgataactttcctgatccttctgatacatgggaaatcactgagacaattggcaaaggaacttatgggaaagtttttaaagtattgaataagaaaaatggccaaaaagcagcagtcaaaattcttgatccaattcacgatattgacgaagagattgaagccggatataacatcttaaaagcactttctgaccaccctaatgtggtcagattctatgggatatactttaagaaggataaagtaaatggagacaagctgtggttggttcttgagctctgcagtggaggatcagtgactgaccttgtgaaaggatttctgaagaggggtgaaagaatgagtgagcctctaattgcctatattttacatgaagcactaatgggacttcaacatttgcatatacaacaaaactatccacagagatgtgaacaggcaataacattctattgaccacggaaggtggagtgaaactagtagatcttggtgtgtctgcacagctcaccagtacccg

SEQ ID NO: 454529 - DNA, 799 bp, Homo Sapiens
ggagggataaaggaagaagacgggaacaagcgagatgcacagtttctaaaacatgatgtcaaaacggtgaacacacagattcaaaccagatctggaaagtcaaaggggaaaactgtcaagctggtagaagacagtaagcgatatcaatgaaggtgcaaatgtgtctaaagttttgatgatggattcttgtatcagaaatttttagcctttagcaaagttcacttaagtaaatgtagaaaccaggattgttacaggccttgctctggatttgatcttttgtgaatttcatatagtgaacacggtttttggagattttggacttttcctcaaggctaaaagatttcttttccttcttgtccgaggaatctgtggtttcctgcccatggcaagtgttcagttcggccagaagctggttaaaatcatcctgatgggcaatccagttgtcttcattattgatggtagctccgagtcccaggtggttatttttcacttgaactttaatatgatctgtggctccttgctcctgagcccctaaaccctttcctttagaccaccccatcttctctagcatccgctggccaaacttggaatcgtcattactccaggcagtgttctgaggatccacagcccacttctgcttccgccgacgttcagccagcatagacatgtcggagagcctgtgataccgccgcctctggacctgggtgactgcggccactgggcgggctggagactccaggagaatcaggacgtgcgtaactccctcgccggcggactgcagcggacgcctgtgccgaat

SEQ ID NO: 454530 - DNA, 667 bp, Homo Sapiens
agcggagatttatttgctgttggatcgtttcatactttacgcttgtgtgataaaactgggtggtcatatgcattagaaaaacccaacactggcagcatatttaatattgcatggtctatcgatggcactcagattgctggagcctgtggaaatggacatgtcgtttttgcacatgtggtggaacaacattgggagtggcaaaaattttcaagtaacattaacgaaaagaagagccatgcaggttcgtaatgttcttaatgatgcagtggatttactggaattccgtgatagagtcattaaagcatctttgaactatgcacacttagttgtttcaacgtctcttcaatgttacgtgttctccacgaagaactggaacacaccaattatatttgatctcaaagaaggaactgttagtttgattctgcaggcagaaagacattttcttcttgtagatggtagtagtatctatttatattcatatgaagggcgctttatttcatctccaaaatttcctggaatgagaacagatattctgaatgcacagactgtgtctttgagtaatgataccatagcaataagagacaaagctgatgaaaaaataatcttcctctttgaggcatcaaccggaaagccgttaggtgatggaaagttctttctcataagaatg

SEQ ID NO: 454531 - DNA, 769 bp, Homo Sapiens
gagacatgactggaaatattcgtgatcaagttgtgtctgaagcacgagctccaagacacgaggtcacggatacaatgtgttataattgcttcaggtacatatgcacaacaaggctatagaatgttgacagtttatgaaactttctggatatccaagacaatgtatctaatgatcttgtttctttaccaatgttacctggatgacttacaaaagaattttataaggatttcctgtactagaaaatccaattcaagatttccttgaaacaaaagaaatgcttaccaaatattcaatcaaagacaaaaagtagcactgtgattcacattttctccctaatatcacgctgcatatgaacaagctaaatttgaagctcctaaaatgggaaaaacttgtgacctggctagacaggtaaaagaatttatttacaatagaaacatttcataatacaaataaaacagaataactcacatttttcaaatgagacaatatgcacaaaattttaaatgtaataaatggctgcaaaaaataagcaaaatctgaagaatgatatattgtattgataaactgttttgtttccatttatgcactgcttcatcaaatttgatgctaataaactgaattgatatgttactgaatttacttaaaaagttttgaaagtgatataattttgcctagatattaaatgaatttttctaataaaagttttgttaatgtggatgcaaattttaaacaaaaattggggttgtgtgtggcggttcacacctccgct

SEQ ID NO: 454532 - DNA, 568 bp, Homo Sapiens
gcatgaactttaggaaatcattttggtcggttttatacaatgtgtaagttaatgtctggaaagatgttttgaacaggatgcaggaattagaaggcacagaaatgataatataaaaatttagatcatatatgaattttttctaaatgttcaagctaattgctttcattagtcatcctgtaactgctgcaggtttcatttcccaccagggacagctgtgccttttaaagtaaaaataggtcatttgtattaactataagggaaaaagtgggcttcagctgggaagaacttaccaaccgaaacactcttgaggcttataggaaattaactttgggtaggtggcctctcttaaaaaggctgctgaaagctctaaaatataaggataaaacatacggtttcagactgtacactttgctgctacaaactacatcttgatgggattaagaggctacattgattcttgggtttattgcaccaacaatccatctctgacctacccatggctgcatctgaaacaaggtaaactccaagaagaaatgaaaacagtgggtccctaaagcacccttccgct

SEQ ID NO: 454533 - DNA, 497 bp, Homo Sapiens
agcgggcgtgcctgcgttttccggccagaggacatgatgcagggggaggcacaccctagtgcttcccttattgacagaaccatcaagatgagaaaagaaacagaggctaggaaagtggtcttagcctggggactcctaaatgtatctatggctggaatgatatatactgaaatgactggcaaaattgattagttcatactacaatgtgacatactggcccgtcgtggtatattgagcttgcccttgcatctctcttcagccttaatgccttatttgatttttggagatatttcaaatatactgtggcaccaacaagtctggttgttagtcctggacagcaaacacttttagggttgaaaacagctgttgtacagactacgcctccacatgatctggcagcaacccaaatccctcccgctccaccttccccttcaattcagggtcagagtgtgttgagttatagcccttctcgttcgcccagtaccagtcccaagttc

SEQ ID NO: 454534 - DNA, 659 bp, Homo Sapiens
atggatgtcatgagaaatatagtagtgttaagaatacaattacaaggatatatttgaaaatatgacctaaaagataaaagaaaggacaaagatggctgaaattatttcagcaacatagaagtgatattttttgaactatatgatggaatctcatgaattgtctataattcaatcatttgttgaccttcaaagacggcaacttcacatggttcaacttaatataaaatacatccttagggagaattctgccagacacactacagcttgattatatatgatggaagagacacaaaactcatagagacaaccacatattttgaggaggttaacaaaatacgtattatcagatatttcataacacaaaagctcttttgtaatttcttaaatgtattagcatgattacttgtttaaaaccattttttaagaaaattctatcttttcataattcttgtgtttttgagaatgtatttcttatattttactcttaaaacatgaagaatatcattttcctcaaaaatacgtagataacgtcttttttaaatttcctgtcaggctaattttacagacaagatgacattttataggattttttaaatccctatacatcagtattttgttagaatatattttaatcaatatactctgtaattttttccgct

SEQ ID NO: 454535 - DNA, 374 bp, Homo Sapiens
  misc_feature (169)..(180): n is a, c, g, or t
aacaaagtgcttttctaagatatacatacatatataaataggtaccaaataaagtgtccaaccattaaaaagctcaactatttaaaagcttttaactatttaacttaagtagtacatataaaaccctgaaactccaagatatggaatctactaaacagattcaaagtcnnnnnnnnnnnngaaatgcaagaccaaaaaatcaaattctggtttgcagacaggaaaaaagtatcaaaaaccagaattcctaacagagcagctagaaaggggcaattttataaaccttatcagctgaatatcatgaggtgattttcacctgattgcaaaactgccatagtttgaaacacttttcaatttaccagacaccctccgct

SEQ ID NO: 454536 - DNA, 619 bp, Homo Sapiens
  misc_feature (29)..(29): n is a, c, g, or t
  misc_feature (39)..(39): n is a, c, g, or t
  misc_feature (55)..(55): n is a, c, g, or t
  misc_feature (95)..(95): n is a, c, g, or t
ttaataacatacaccctttaaatactaangcctttaaangagtttaaccaaaaanggccaatttacactttttaaaaccccatcggttgtataangagaggcactacttttatccacgaaaagcatcaaaattttttaacagttcaaaaataggggccccaaacaactgatttatcagaaacaaaccaatacaatggctattcacagtgtaagaaattaaatctattttttaaagcatgtttttcagtctcaatttataacacactttgacttccatttctgcttttccttaaatcaatctggactgtgtggaagaatgccgtaacatgaagctattagcaatctgggttaatgttctacaaaaaaaatatgctgcctatatacacagaaagtaaatgaagaaaaaagttagcactgaagtacaatgcatactccttaggttcttaaactctaccagtctaacagaaagcaccaagatacagatgccaaagtcagaaaaaatacaaagcagctcagaatcaatatcatatatcttattcaaggtaaattttatgttagattctttgtctggcatttgggaggctaaattaacttaggaggctagagatcccatctctac

SEQ ID NO: 454537 - DNA, 608 bp, Homo Sapiens
  misc_feature (72)..(72): n is a, c, g, or t
ttttatactataatttttcacaagctgataaaggcaaagaagaattcctagccaacaagcactgttatcggnactgaagataaaagccaattttgtccacaatggcagtccagcggcttggataatcatgtttgatgatgtgatgaatgcatgtagtaagcctgtaccctgatgagctcaggagaatggataatggcttctacaatattttctcgaatacaatggcgatcttcttctggaatagtataaggggatatatcccctggtgctgtttctcgatcaggccaatactgtgttatcatatttttcagatagataacacctgcctgtctcacaggtaaatccagctgttccgacatagtaatctggagcagtgttgagacaaaattcagagacttgtgtgcttcattgagctggcgctccgcggcctcacgcagggctgggtccatggtgccccgcagggcctcgataatggtgttggggtccatcgcagcgcggactcggtcaaacccggggctcgggtgctactgggccaggaatagcgccactcactgcgcacatggacccgccgcgctccgcagcggcaaccggcgcgaaaggaaagagcg

SEQ ID NO: 454538 - DNA, 865 bp, Homo Sapiens
  misc_feature (81)..(81): n is a, c, g, or t
  misc_feature (127)..(127): n is a, c, g, or t
  misc_feature (211)..(211): n is a, c, g, or t
gttttttaaacaccaacactgatgatttatctttaatggcaactatctatatatgtatatgcacacacgcatgtgggtgantttaaaattgagagtgcaaaacacaagcctcattgaaagacaaaanagatgtgcaaattttcttcataaaccaacacaaaagagcgagaagaatattctaccattataaagaataagttgaacacagcanaggagaccatcttcattccaaatctacaaggcactaagggtaggaaatgacaggtaacacagaagtgactggataaaactcctcagtcaggtcggaatatgggatattttggtaagaattctattagtattacatactccatcatattgctagtttcacatttcctcttagtcaacttccagtgcaaagcaagcttgtgatataatctgttattttcccattctattaacttctgaattgatcttctggttcttttgttgagacaaataacaggccataggctgcaacccagtgtgcaacagcagcagagacaaccacacagcagccatttcacattgaccgggagagcctttttcaaacatgcattcacacggccaatgctggttttaaattcttctggggccacccttgcctctatccatcacattcctcttctcccatcaaaggtaataacttttattagtttcatgtgtatctctctagaatttcttccctgttagaacggagggaaattcagtaccaaacttgttgctcaagccaaacacagtgatgtggccggcaccccgcactaatacagggtcgggagcatatctccgcagatgctcctcgctcactacccgaggcgggggcggcgcttcctcctcctcttcctcc

SEQ ID NO: 454539 - DNA, 710 bp, Homo Sapiens
ggaatccaagtccttgaaggatcattttgagaatgcagaccaatacttgagtcactaatcctccaagcttgctcccaggctgaagctcagaagcagcctagttctctaaggggaatggctagaagcctgtttgccttgaacctgcaaccataaccatctgccaaagagtccagaaagaatcacacacactagtgccttggcagaaaggcttctctgtccattggtagcagtcacaggaaaaaacttgaaagttgccttgtgactcagctccagtgtgccctcagctgagctccctgctcatagctacctgcacaagcatccaaagggagtctcacctatatcttgcagcccgggaatctgagccaccctgataggctcaccaatctccatcccacagcagattccaagaggcaccagtcccagctctggcctcccctgttgcaatcaagaatctacctatccagcttttgcaggaacctgctgggtggtacctaacaatctgggccaataaaacagttccaccaacctcatttccacagcatattctgaggggtctcagtctcaaccccaacccgtctcattgcagtcaggaatctatccgacccatgcagatacctgctgggaggtatgccagtatgagccactgaggcagtcttctggactcaggtatttgtccagtgtttgctcacagaccttggatctttcccgct

SEQ ID NO: 454540 - DNA, 748 bp, Homo Sapiens
agcggggtcggcgacggtggcggagagtcagccgccgcaggagcagcagcagctcaacggattgattagccccgaactgcggcacctccgggcggccgcctccctcaagagcaaggtcctgagcgtagcagaggtggccgcgaccacagccacccctgacggaggccccagagcgacgtgcaacaaaaggatgccggggtacactcgggcgagaggccccctcactccctctctagtaagtgcaagaactgcggtccccagcccggtggaggcagcggcggcgagcgatcccgcggcggcccgctaatggactggccgagggcaccgagcaggaggaggaggaggaagacgagcaggtgcggctgctgtcttcgtccctgaccgccgactgcagcttaagaagcccttcaggcagggaggttgagcctggggaggatcggacgatacgatatgtccgatatgaatccgagctacaaatgcccgatatcatgagactgatcaccaaagatctgtccgaaccctactccatttatacctatagatattttatccacaactggccacagctgtgcttcttggccatggtaggggaggagtgtgtaggtgccatcgtttgcaagttggatatgcacaaaaagatgttccgcagaggttatatagccatgttagccgtggattccaaatacaggagaaatggcatcggtactaacttggttaagaaagctatatatgccatggttgagggaga

SEQ ID NO: 454541 - DNA, 752 bp, Homo Sapiens
  misc_feature (49)..(160): n is a, c, g, or t
  misc_feature (232)..(330): n is a, c, g, or t
ggattgggtaagcaagacaataaagaggccaggcgtggtggctcacgcnnnnnnnnnnnnnnnnnnnnnnnnnnnnnnnnnnnnnnnnnnnnnnnnnnnnnnnnnnnnnnnnnnnnnnnnnnnnnnnnnnnnnnnnnnnnnnnnnnnnnnnnnnnnnnnntgggtgtggtggcgtgtgcccgttagtccccgactcgctcgggaggctagaaggaggagaatagcttaaacnnnnnnnnnnnnnnnnnnnnnnnnnnnnnnnnnnnnnnnnnnnnnnnnnnnnnnnnnnnnnnnnnnnnnnnnnnnnnnnnnnnnnnnnnnnnnnnnnnngaaagaaagaaagaaaattaattcgtgctccatgactgcaaatttaattttaatttagctaaattccttccatgtaattgggataaatcacaatgggagagtaaaaaccaaaaaccagtcaggggaaaaagagaaaaacgagtcacatcacaagtgtgtgatatcaacgctgacacagaatagggacagagactgctggctgagccaccaacttctgagttcaagcaggcccttaaagggttcccagagtcctgagcaagagcctgtatcatcccagaccctactctgggtgcctccaatctggctggaagaggtctcggttgttccgaggtccatgtgagattctggacagagtactttgtaaagtgcgtgggaagtgcacgacgtgcatgcagtgttgagactattacatacaaaccgct

SEQ ID NO: 454542 - DNA, 742 bp, Homo Sapiens
agcggatttcctgagaagcactctcccttgtcgtggagatgggcaaatctttatcagccactgccttctgctgccaggaagccagctagagtggtctttaaagaaaactgggcatctcctgctacttaaaatcaaaaactacctaaaataaagattataaaaaagtaaggatgaatggacggtctttgattggcggcgctggtgacgcccgtcatggtcctgtttggaaggacccttttggaactaaagctggtgacgcagcgcgcagaggcatcgcccggctaagcttggccctggcagatgggtcgcaggaacaggagccagaggaagagatagccatggaggacagcccactatggttagagtggacagccccactatggttaggggtgaaaaccaggtttcgccatgtcaagggagaaggtgcttccccaaagctcttggctatgtcaccggtgacatgaaaaaacttgccaaccagcttaaagacaaacccgtggtgctccagttcattgactggattctccggggcatatcccaagtggtgttcgtcaacaaccccgtcagtggaatcctgattctggtaggacttcttgttcagaacccctggtgggctctcactggctggctgggaacagtggtctccactctgatggccctcttgctcagccaggacaggtcattaatagcatctggggctctatggctacaatgccaccctggttgggagtactcatgggtg

SEQ ID NO: 454543 - DNA, 258 bp, Homo Sapiens
  misc_feature (66)..(178): n is a, c, g, or t
tctctccttcttattggataccagtcctctcagagtaggggggccccacccttaagatctcatttnnnnnnnnnnnnnnnnnnnnnnnnnnnnnnnnnnnnnnnnnnnnnnnnnnnnnnnnnnnnnnnnnnnnnnnnnnnnnnnnnnnnnnnnnnnnnnnnnnnnnnnnnnnnnnnnnctcatccatcccatccctgctctatacttttacttgaccactcctagagttccttgtatttgtatgtttatttatttatg

SEQ ID NO: 454544 - DNA, 746 bp, Homo Sapiens
ctacaatgcttcgaaaacggagatcacaagctggtccaatcccatggactacaaaaccaagtgatctatttgtaaaggttctccacaatgaatgtcaacagagatgttctcaactcctctcttcacagttcttggtcgaccctgctccgtgggtgttgaaccccaatcatcagaccctgcaactggctggtaatgcaccataagctttggattgtgtaaaataataatttctctgttgggagattccagtttctttttccattcatccaaagttacagcaagcatgtaagtttcctctaaaacttggctgaagctctccgagtagggaacatacttattgtctttgtcccccttgtaaaaccacgtacatcgtctcacttccgatgccagttcatcccagtatacagcataccgcatcctctcccccaaatgaacatcatatctgcccccatcagtaggaacaactctcccattacaaccttttccagagctatatgcctcttccagctgctgtgaatcctcagagttgaaaggaatccatgtctccttagaatctattatcttacaataaaaccaatggggagaaactggttcatacaagctgccagcatccatgtctattagctcaaaggaactacatgagtttggtgacggagatggatctgactgggacaactgctcctgttgtgactgcactgatgacatttcgctctctggcggcggggagcgcggcgcgcgaccccgct

SEQ ID NO: 454545 - DNA, 904 bp, Homo Sapiens
gaatctcaggccttcactgagggcttcctgctccacgtgccaggccgatccggtctcagcctccaaccagtctccctgcagggctcgaagctttcgcacacactctccagagagaagtaggtggtctgactgatacagcctgcgcccttcaccagggaagtcacaccgcccatcaacactcggggccgcagtctgagggactcccatggtttctgctgtcgtcttccccacttatcagagacagcttctagcctgattgctttcagtccattggacactttatgtttcgttccacaactgcaatcacttcctgtccaacattcagaagcactctgctagtcacagcatcactggagaagtagatcaaatcatcaatcatgccaataatcgctgcagtaccttgtcacgacaccccgtacagttttcagcttagtgtcaccaccgccaatgacgctgcggacaggaaggaacgacatggagagacgacttggcagctgctcggcgtaaacacacaaagtgagggcgggaagaggggctggtgtcaccggagagacctcacagaggacgggcgcccagagcggcgggatgctgtggggtcggaagcctcctgaggcgaacggggatccccgccagcggagatgaggaaaggccgggcccagcgttgcctgccggcccgcactgcactcaaagacctatgggcgcggctccctcgtggccgacacgcgagggcccgggacccgcctcccagccgcctcccgcgagccaccttccgcgagctcgggctccagctgcccggcttcctccctaggggagtccgccgtcctccagaagaaggccaccagcttggctgcgaggctcagcatggccctcgcccggcctaggccgccgtcaccgccgccccgct

SEQ ID NO: 454546 - DNA, 870 bp, Homo Sapiens
  misc_feature (813)..(829): n is a, c, g, or t
gggtaaccagccaattccaggctctaagattttacctggatccacccatgtgtttactccaccaggaacttcttctgaacccgggaatttttgtttgcttctgttaagcattgtccctaattcttagtgtccttccaccctggtgtaactggaaatattttttctaagattaaaactattgggttttaattgtcactaggccattatttaataactctaaggaacagaaagtaaagaaattaaaaggttgaatagtggaagtattttactgatgaaacaagaagccaaaaaagcaagaccccatgttttcagttatttcttctcttctgccattattatcatccttttcccccaaatatccccaaacatactttggatgttctaaaacaagacttaccaaatataaaccattaccttgcacaacatgctccaatcttttgtacatgtttgtcgaaagccagaagtgaaagcaccaaggtaagctattactcctgctgatactaggacatcgccagttaaattttcatatgttatctgaaggtcatctgcagcttgggcccatctgtgccatcaacccaaggccaaacagatttaccacagagaatgatgggagacagtaatataaagggcaagggtttccagtccaattctgtaaccaaaagctataaaatttggacacctgcttatctgtaaaatgaggttggaacccttctagctcttatacgctataacatgtatctatattatgtgaatgaccatcttcctttcattattagaatattagacatttcttgcaggacttggcccttcagnnnnnnnnnnnnnnnnncaaacccaacaccaacattttggctaataatttcctccgct

SEQ ID NO: 454547 - DNA, 763 bp, Homo Sapiens
tggacggagttctgtttaaaaaaggggggttccgtttttctctaaggataggcattcacagttagtttattgtatatgccacttattaggcatatacaagatcgataatgttgtgcatctttattattattgcccaaggggctaatattcactttttcaaaacttattactcatctagttcagcagctccagattttgaagcaaatctgttttacatacatgtcttaaccttcaatcccatttaaaaaaaatagtaaattagatggttaaccttttagatttgcatcctctttaaaataaagctttacagcaaatgcatttttcctacaaatgtcttcgaaaatgagattgaagaggatgtatcatctaaatttttctgtaaagagcttgcccccgaaataattggaacatgaactgaaacctctagataggaattcctggacacagctgtccattatcttttgggactttggtgcacctcaccctttactgaacacaactttgtgtcaaacactgggctaggagtgctagttgtgatgtttgaggcaacagcggaatttttcttaggacttagtagaaccagttcttttttttaatatgcatagtcagattttgatgatattcagtctgctcatatctataatagtgatattaacgtctatttcactaggatggctcttgtgaagattaaattaaatactgtatgaagaagtgccttatacacagttatataaccaggataatatccagatggaattctcat

SEQ ID NO: 454548 - DNA, 1379 bp, Homo Sapiens
  misc_feature (541)..(557): n is a, c, g, or t
  misc_feature (1351)..(1351): n is a, c, g, or t
tctgcttgtgtttgatacccgtccatgccagtcatgatgactctctgtcttgtatattctccaatatcgttctgcgtgtggtgtgttattctcaacactcccactgttcttgggtgctggtcctcgtgtctctttgccctggggtagccgtggttcctcgggtggtcctgttgtcacccgcctgatacttcgccctggcgtactcaggtgttgggtatcatatttaggactccgctgttcctaatgtcccagactgtttcccacatattgaaccccttcagaatttctaacgtggttaaaggtagcttaggttattagtctatacttgatttgaagacccaatatggcgttgagatgggatttttttcttaacaagtccctacagtaaggctggtctacttgccttctaatgaggaaaaaggttgacaaaaattcaagtgtcaatgtccccttcctgggaagaggtttagaaaaacaacagctcaccttctgaactctaccagttccttttgaagttaacgaagcattaaaatcagatgtnnnnnnnnnnnnnnnnnggcagggaaatatttacaaaactggacattctttacagatatacaatcttgctaatactgggagaaccatacaaggatgtataaagagagacagtcaccttagtaatgcaaggatagagaaaaccaggatataatatgtgttttttattgccagaacatggtgaaactaggaggagcagagatgacctgatccctgaagtgaactgctcagctattctgtgtacctcaggaggtctgcaagtgtgtggttaggtaaaaactgagctgtgcaaactcactgtatccaagctcttctcatgagagagcggaacaacctggcaagcttaaaggcaagtgttttcgttcttttaattaaataggctgtgacaaaattaacaataaaactagcccagaaccaaccagcccggtaagtgtcgtgcaaatcttgcagtaacaaaagaccatctgagagactacacgttggtctccagtcctagcaagcgtcccattctctccacattcttatcaattgtagcttgacatgttatctccttggcacattccataggaaaccagcctctttctccatctcgtagtcgttccccctcataccagccatcgctgacacgttgatagatgaggacgacgtcagccacaggttcggtctgcaggcggcttcccgctgctgtgtcccagggcagttatccagcgggctcgcttgctctgcgtctcagctcctagtagcatctccactttctcattcgcgtggttactaaggactgtcagagtaaagaggtgactggcagagctctgtncttgaatagagtcattgtggagctgttc

SEQ ID NO: 454549 - DNA, 840 bp, Homo Sapiens
gggaccccaggtcttccccaatgttgctcccaacaccggagccatggtcacctggcagttgcaggtccaccttgtgttttccggaaggattctcaggcttgaggcgtgggagtgaggaatcccagccaggctggccaccagcagaaacctttttcccaacgtccacgtcagtgctggcaggcgatggggcttctctgtggctggtccctctctggctctctccaggttctgcatgtgtcctgctctctcctgagcacctgtcacgcccctgaggcttgctcactcctctgtctcggggcttgcagaagaatgcttgggcaggtctctctagcaccaaggccctgcttctccccagcccatggtttccggtgtggacctgccagccttcccggtgagcacaggatggtgagaacctgcagcagccatgtaggtggggcttcgtggaaggctgcgtgggtacccaggctctctagggtagcctatcctgcacacggcttggtgtgcacagagctgacttggaggtgaaatggatgcattttgtagattcaataccctggatgccccaccccagggatagatgcgccacagagggcctggctggaactttccccagaccacagcagggacagctctgttgcaggtgctgacagcaaggcctggggagtagagggagcagtcagaggcagagagacggaggtgaggcacagttcttccagatcctagaataaaggagaggaaaatatctgttagaaaatccgctgcagcacccccaagaggcgcagtttggtgcccgtgcactcccgctctccctgcagctcgggagctgctgtgcagtccgct

SEQ ID NO: 454550 - DNA, 683 bp, Homo Sapiens
  misc_feature (163)..(165): n is a, c, g, or t
  misc_feature (384)..(384): n is a, c, g, or t
  misc_feature (479)..(498): n is a, c, g, or t
ttcattttcccaaatctttggctgtattgcaatggttgtttcaatttgtaatctccaactaaacatttcctaaccatggattaacaatatagttactgactggtttcttttaacagtatttatccaacataacaaaataaactgcaatttcgttatagttttnnntattttacaaaacattttataaatatttttacaaaatgtatacaaagcaatttcaagtgagacgtactatacaaatgaaggtatttaagcaaataaagcccacaccacactgacagcgagtgacgcgtcctctttaagtaaagtcagtctgtaaggcctccctaatctaacaggatttactaaatccttcagagctaaaatatttctttttcataattngccagattaaaattttgcttcatcttcaggagagtacttaaggagcacaggaaatcaaatgcttaataacaaattcacgcttttccacaacaggnnnnnnnnnnnnnnnnnnnntgatttttgttactgagtacaaatagttctaaaacttaactttgacgaatgaacctgaacaactgaatgttggccatccgaggctgagctctcctacccttcactagagggggctcgacatgcgagttatgacccatgtgcgtagaacctaatcacaggagtgaaatacatgtcataaccccgct

SEQ ID NO: 454551 - DNA, 356 bp, Homo Sapiens
agcggacaagctcatcttagacacagtaaacagcacatcaaatctagtacttcttcataacaaaaccgttcagcaaaggcaggactagaaggtggtacctgtgacctgatgaagccccacagcaggaatcatacctgatggtaccggcctaaatgcttctacacgaagagaaggaacaagacaaggctgtctgctcgcaccgattttattcaacagtatttggacgttctagctgggacaactaagcaagaaaattaaataaaacgcatccagactgaaaaaaaagaagtaaaactatagttgtagatgacacaatccttatagaaatcctaagaaatccaataaaaactattaaa

SEQ ID NO: 454552 - DNA, 1186 bp, Homo Sapiens
  misc_feature (867)..(917): n is a, c, g, or t
ctccgggtgtgaatatatatgctttgctcacgaatattctgtccggcataggtctaatccttcttagcgggattcgtcgatttatgagagggttcgtttatattttgctcgggttagcacgcatggttccccgggactcattatctgtattatagagacgctttctttctcccgggcctccgcgatgatatatggtatggtccccaaaggtgataaaacaaagatattttgcgcccagatacccgcttgtgtaacaagcaaggggtaacccacacctaaggaccgttggtatctctacaatgttgcccctaaacgccctgtaaccaggattctccgtttaacatgggtgaatccatttagatctgctgtgtgcgtgtttccctaattctttaagaagggcccttctccctggccagtaatcatggtgaatattctctttgtgttaattctcgttttgggtcatttcttcccgtcatccctatcttcatagtggccgtggaagccttgggcactgactgcatagtcgctgattgaggcgcagagagagggtggtggctgcactaaccaatggtggctggcagctgaaagcctgtgagcctcgtacgcagattctctggctggggtggaccatcagacaccgacaggacatcgaagtcctcgttccagggcaaaggactggaacacaagctggattctgtgctgctcttccgcggtgatggtccacgtgcagttggcgtaattggggtagccatatgggaagcctgggctctcaactgtcccattgggaccgtgcagttggaacgtgcagttctggcccgcggcggccgagacgctgagcaacccacaggcccagcaacagcagcagannnnnnnnnnnnnnnnnnnnnnnnnnnnnnnnnnnnnnnnnnnnnnnnnnnacaagcgccgaaatcccggtttcgccgcgagccctccccgcggggcagccgcagcgccccagctcccgtccccgcgagcgcggcatggcgcggccggcagcgccgagggagaggctccagctcgccgccgaggagaaaggaggtcaggagagctctggagcttttttctgctcggaaaaaatcccggtacgcgggagccctgagcttctgcggctggaatgaaccaagtgtccgcccggccggggagaggcgcgctgcgctctcccgct

SEQ ID NO: 454553 - DNA, 714 bp, Homo Sapiens
tctttttccttccatttgcatctgaaccttcactaggtcagttggattggctaaaaactggccaataacaccagccatcatccctccaatgactgatttccaaaggggataatgctcatcttcacttttgccaaacacaacctctcggagatgttcatatgtgaccattcgacctccagaatacactacgtgtctgtaaatggcgggtgtcactccttgccaaagctttagaaagccttcctcttcaatgatccctagggctgtgcgcaccattcccctatagggggcagattctcttgcaccgtctcccaaccgagcaagagctgcttctccttgcatttggagtcgagtttttgtgagatccaggggaaaggttgctagctcggccacggtagccgcgcagccggacagtaggaatttgctcgctcggggccatctctgggtcagcggcaaaagcctctcctcctcctccgggacggacattcagcagtagcgcaagacgataacgcactccttctcgccgctgcgctgcaccgcgccgcggcggccgcttccctgccagggcggccccttttcaaccggcgagtggccgggtgaggaccatttccctcgttcggctcggccgggtggacccgcaaccttcctagcagtcccagctggagtggtccagctgccccttacaccccagaatagaaaaacacagcggagcccgct

SEQ ID NO: 454554 - DNA, 1244 bp, Homo Sapiens
agcggggcttttgtctttaacgctcagggcgctgacccactgctcttcctcttaagaaagtgctccattccttccggcgcccggagctgctggcccaaagggatccggagcgagctagggcagacaccatgaccacccttgatgataagttgctgggggagaaactgcagtactactatagcagcagtgaggatgaggacagtgaccacgaggacaaggaccgaggcagatgtgccccagccagcagttctgtgcctgcagaggctgagctggcaggcgaaggcatctcagttaacacaggcccaaaaggtgtgatcaatgactggcgccgcttcaagcagttggagacagagcagagggaggagcagtgccgggagatggaaaggctgatcaagaagctgtcaatgacttgcaggtcccatctggatgaagaggaggagcaacagaaacagaaagacctccaggagaagatcagtgggaagatgactctgaaggagtttgccataatgaatgaggaccaagatgatgaagagtttctgcagcagtaccggaagcagcgaatggaagagatgcggcagcagcttcacaaggggccccaattcaagcaggtttttgagatctccagtggagaagggtttttagacatgattgataaagaacagaaaagcattgtcatcatggttcatatttatgaggatggcatttccagggaccgaagccatgaatggttgcatgatctgccttgccgcagagtacccagctgtcaagttctgcaaggtgaagagctcagttattggcgccagcagtcagttcaccaggaatgcccttcctgccctgctgatctataaggggggtgaattgatcggccattttgttcgtgttactgaccagctgggggatgatttctttgctgtggaccttgaagcttttctccaggaatttggattactcccagaaaaggaagtcttggtgctgacatctgtgcgtaactctgccacgtgtcacagtgaggatagcgacctggaaatagattgaactgatagtctagttgcatagatttctcattgtttgggttggaatacacgtcattgtttatttttgttcctttgtcttctggcttttcagctgttctttgtagtcccttttattatgcataaaataaagaaattcttagattaaatcagaatgctgaataaccttgtagctagcaccaaggtgactacagtttgtataaacaggaagcc

SEQ ID NO: 454555 - DNA, 759 bp, Homo Sapiens
cgaactgcaccagctgagcctgtgtgagatatttcttccaccaaagatacttgtgcatagatggatacacagaaagtccatagtaggagtacataagaatgtggataaaactgttcagtgttggtccaaagaaactttgtccacaaggtatccagttcaagacacaccaccagatgttaaacatagaagcatgatgatatacatgaagaaaagtaatctgactcgtttttttccgcaaaacgaagaaaattgtgtccaggaactctactgatttggagaaatagtaccaccaaagcaccttggctacccggatgtcagcttcccctgcgctggtaagatcttgacactgtaagttgtagcctccttcccaagtggagagaatgagctctgccagcatgtacgcggagagaagtgtgattccaagattatacaaggtgaggatacccctgagagaaagagcaggtctgttcttcatatacttgttacccagccatattgagagcagatacatgacagtaagaaaaaaggtaggaaggtaagagtccaacatgaaccaccctctgactcgagaatctcgcggtccaaacatattgtccaaaaaagcattgatttcatcatcaaaggcctttagatgttccatgatccgcagcggctgtggcgcggcgacccgggcgggcggcgatgcgctgtccagggtagccgggtccctctgcccggcgctatctcggcgcccgcgccggttacccccacgcacccgct

SEQ ID NO: 454556 - DNA, 1049 bp, Homo Sapiens
  misc_feature (478)..(478): n is a, c, g, or t
ggaactcctcatcctcgctcatacgtctgactccgagatgtacagatgtgtgctgtctacctagtgaagaactcgtcccaacaatctccatatatttgtaggctccaatctgaatgccagtactattgtatatggtatattttatagattcatctgtcggtggcaaggagctgaatggcatggtgggtgtatttcctagatagttggtctcaggcactgggatattatgcagactaggcatatgacttggaattggcctgtaccagactctgggacctgctgttcctggatccagtggtcttgttccaaagtcatgtgagctatataatccattgttctgatacagtacttgaggttggctggtgagccctgagggcttggtgcacttgcattaccatggactggctgcactggaataagcagtgccgttttccctctgtattctgaaaattctccgtcaggtctttgctgtgcaaanagggtcatgggagaccctgcgtctcgctttcctcctctctgttgtaagccacattctgtctgggctgctgtttcgtctgcctgtccatgcggctgccataaagatggtagttggcttcgtcttggagtttactctgcaggctgggctcattctcttcttgtgggtgctccagggaaggagcaaaccaggactcctccacaggacccatcccaagtccctgggaactgtgcagtgaaccaggctgttctgtggctgaatttgaccggcttgaaggtactgccacacaatcaagttgaagagactgcattctgaagctcaagaacgcccaaaatggtaccactttttccccccccggcagagctgtaccctgccacctagtctccgtgtcgcgctccgagcctggacgccgacccccgaggcgcaggaccgggccctgctgctgcgctcgccgcggactcccactcggccccggcgggcaccgccttttatatagtagcttgtgacgccacggagcttttcccacacttgacgagcagtctaactggggctccgcctgccgggaccacccgct

SEQ ID NO: 454557 - DNA, 898 bp, Homo Sapiens
cgggcctcttaacccccttgtgatcgcccacccacttccaggcacgtacacgagggtgccttttgcaggcagcgaatccagcaggaacaccgcctggggcagcattcgtactcgggccttcggtgctcaaattctggtgttggcatcccagatggtaggccaagccttctttcccctatataggtttaatcataagtgtctggagtcatgggctctgggtagcggttacagcctgaggaattctgtacaatatcccattcagtcttgaaattcattacagctgtaatccccaattcatgcttcagtttgatggttacatgttccacctgacgagggcagctaccccagtccagatatttggtagaattcttgaataatgcatggcttggtggcctgcaatattaaaatagaagtcttgttgtgtgcttcaatttcattggtgtgtccagtggccctcaatccagtgtcctattgggagacaatacacaccattccaccaaagttgtttttcattgtaagtacagcaacggttcatgatgaggtccattgccttcccaggagagctctcctcccggctcccgcttcaggaacttgtaccagaacgtgtccacgcggcccggctccgccccgtcctgcgccgcctcctcggccgccagctccacctccccgagccacaggcccggctcctgcagcgccagggccccgtcgcccgccgcggtgccggccggcctcaggcggacggcaccgcgcggctcccaacgccccagctcgggccgcgaccccaccaccagcagctccggcctggcgccggccacggcgggtggcaccaccaccccaaagcggaagcgcatggctggcggcggcggcgcgaatacccgggccacggagtccccccgct

SEQ ID NO: 454558 - DNA, 773 bp, Homo Sapiens
  misc_feature (614)..(677): n is a, c, g, or t
tttgcggcataaaaaggccgtagagctagaataagccaagaaaaggagaaagaacttgtaatttgaagatcctacacaattgttcacccatggacaatgatgatccatctttcaagatacatttatcacagacggagcagtgatggcagcgatctggttttataagttggcatctgtcacagtatcggatggctccagacatggtcctggtatagatgggaagatccttggctgctcgcctaagaacttcctgatgggcttctcctcttggctctctctccaacgaatcttgtctctgcataagagagatggaattcttttgaaggattcattggtaatgtaaagatagttttccagtatgaccagacaaacattgcaaaaagtagatgataggccatcaggcacacaacttgttcgccagtgttttccatggacactatgcacagctggatggcgtaggcgtagtaggaccagccgagcaggagggtgatgaacaccaccgggatccagtacagcacccgccggcaccgccgcctggcgctgctgcccgggcccgagggcgccatcttccagccgcatccacctgcccagctccgccgccgcccgcgggcctnnnnnnnnnnnnnnnnnnnnnnnnnnnnnnnnnnnnnnnnnnnnnnnnnnnnnnnnnnnnnnnngtgcgctgcggccactgccgccgccgtggcgctaactccccatcccgcagccccgagccggcgcggcggactcccggctcctcagcccggcccgct

SEQ ID NO: 454559 - DNA, 271 bp, Homo Sapiens
ctcttgtttcatttgtccttatttcacttaaagccatcactatctgcccagtcacctcagctgaaggctttggactcatcctacattcctccttttgtctcaccctctacaaatttctgcagattgctcctctatttattttttaaattgttcaaccttacaatctgtactttgactatttttcttcagaccaccaagcaagccatttcattgtgcattttatcatgagctcaatttaatatgtgactccatggtaatgcaagatatctac

SEQ ID NO: 454560 - DNA, 941 bp, Homo Sapiens
  misc_feature (672)..(684): n is a, c, g, or t
  misc_feature (811)..(887): n is a, c, g, or t
ttctcaatgtaacagtccagcccatttagaaaaggttagaaaaattaaaatttttccttaaaaaatttgttgtgaatgtgggcttagacccgagggggtaaaatccacaatgccacattggcccagttctacctgtgaaccattataattccccactattccttcaatgagaaaatggacgtatttttaggaagggaggggcaacaggcacattaaagatttcgaacagcttcagtggacttttcccgaagagattccgggctagctatcccttcttctccacccctccttccactttccagatctagactccgaagctcccacgccagagtctccttggccaaggtgtagattcccccagccagctggcgtggctcggtgtgcatgagtagcccgagctcagccacgggtactctacaaagcacagtggagtgccatttcacaaactaacgttccaagaactgtagtatcccaactaccaagagacccctcgtgtggctcaccagatcttcccagagaatgaggcaaaagccagagcccttcaccatcagctcttcactaaagtaggtcaggccactctcagtgctgccgtgattttacttttccattctacccaaaaccatcgggatatctaaaattgatccatgagtctgccttttggagactgctttnnnnnnnnnnnnnggaaagagaagttacaaagatagctcagaaagtctcctgcatacctcaccaattagttttccctgatgttaacaccatatattactaataaggcacttgtcactaacactggtatactactattttnnnnnnnnnnnnnnnnnnnnnnnnnnnnnnnnnnnnnnnnnnnnnnnnnnnnnnnnnnnnnnnnnnnnnnnnnnnnngttacggagcacattgtcaccccatagtatagtctatttatcctcaaccccgct

SEQ ID NO: 454561 - DNA, 806 bp, Homo Sapiens
cctgtgacaaagatcttcttatcacttcaaccttggaataacagatgtctccatttttatgtaagataaaaataattatgaataattctaaactcacaaacgcatttacgttctgaattacttcactttcccaacttaaacatgtcacggcaacacctgacaagtaactgtgttaactactactgatggatgtggacatggcctgtccagaaggctggaacataggtgttcaaccatagtacaggtcagtttaaatagcatccctttgaaaagtgtcatacaagaaagagtgagagctactgaaaaattctggcttgtctgttctggcctcccttgactttccttcaaagggacaccaggaagaagtcctcccagatttccacttggtttgcacattgtgctcgttgtgcttgggtaaggctggaacctatgtgctctccttgggtggctgggtgaccggtgctgcgctgcaatggctgggtgcccgtgtccgttttgatagagttcagggttttgctaaaccaagagtttttcgcagcttggatttcattcataagggctcctctctgatgttcaagttcctgaattttacacttggcctccaccaacggcaatttggtttgtgccagttccagttccatctctctcagctgcttcgtaagtgagtccttctcatcatctgtttcaattcctggtcctctctgcctgtggctgctagtttcaaagcaccctccttgctgaaaatgtcactgcagtgtttgcatgccatcatcttaccctttagcacttccagctcctcctccgct

SEQ ID NO: 454562 - DNA, 942 bp, Homo Sapiens
atgggagagaccagccttcagggccctctcgcagctcagcagcccgtgcctgtgccttctcgctctgcccctccagggcttccagcccttccttaaatctagccagtccatgcagcttgtctacacatctggagtctatcacattgcaggccctggtccccagcagctttgcatcagcctggagccagccctcctcctcaaaggcgatgtcatggtaacatgttatcacaagggtggccggggcacagaccggaccctcgtgttccgagtccagttccacacctgcaccatccacggaccacagctcactttccccaaggaccagcttgacgaggcctggactgatgagaggttccccttccaagcctccgtggagtttgtcttctcctccagccccgagaagatcaaaggcagcactccacggaacgacccctcggtctctgtcgactacaacaccactgagccagccgtgcgctgggactcctatgagaacttcaacccagcaccacgaggacagtgtggatggctccttgacccacacccggggtcccctggatggcagtccttatgcccaggtgcagcggcctccccggctagacccccccggcaacctctccagagcctccaacaacccccacaatgctctctgtcaagacagcgaactcaagccaattagctccacgctgaccacatgagccggactgcttgagtcccctggaccaggcccgcgccccctaccacgactgacttgacagccggcacgagacgactagagcatccgaacctccctaacgaagggacttgctagaagttgggcacagtcggcggaggccagcggacgcatagtgcgacgacgcaccggccactacctagcatgaccgaaagagcaaccccaccatgccgaagctggcaaggcccccaaacatcccactgcactccaac

SEQ ID NO: 454563 - DNA, 655 bp, Homo Sapiens
ctccattgttctgagagtttcccctaaattatcggaagacactcacattgaattggtaggacctatagtatagaggagaatggtatgtatgtcagcagtagagttccaatccaaattgcgctatcgcattagaaatacattaccctcccactccccaagttaagcaaattagaagagaatctgaagtttgtaggaagggaataaagctgctataaacatttatgtgcaggtttttgtgtagactcgttttcagctcctttgggtaaataccaaggaaccaggttgctggattgtaagttaagagtatgtttagttttggaagaaactgccaaactgttccaacatgactattttgaattcccattgacaatgaataagagttcctgtagctcctcaccctcattagtatttggtgatgtcactcttgcattttagctaatgggtgaatagtggtctcatcgttttaattcccaatcccatagtgatgtggagcaccttttcatatacttaatctgcaatccttatatcatcattggtgaggtgtctggattttctgtccagaattttagttctagtggttttcttatttttagaaaggaagtataggaaggaaggtttaatctgtcttagcctgattatatgacaatcagaatag

SEQ ID NO: 454564 - DNA, 695 bp, Homo Sapiens
agcgggagtgcagtggtataaacatggctcactgcagccgaactcccaggctcgggtgatccttcctcctcggctcccaagtagctgggaccgcaggtatttgccaccatgcctggctaatctttattttttgtggagacgaggtcttgctatgttgcaagagggagatcacttaagtgatcttccctcattggcttcccaaagtgttgggattccaggcgtgagccactgcaccccgcctgacctaactattttaaacactactcatattgccatcatctaaattcaacaacaatttgccatatttgctttatgtatatgtataattatatatttataaaattttttgaaccatgtgaagttgcaaacatcattgaacttcaccactaaatatatcagcatgcatctcctaaaaatcaggtattttcttacaaaaccataattctgctatctattatgatttaacattctgtcattttcaaatttcttcaggtgttttttgttacatcttaaagaacagacgttcttggatctcaaagattccgaggaaggaaagaacatggtggataatccataattaagaagtttgaatcttttcctagtcttaaaaacaaagtgagaactaaaggggtttaccttccatcaaagttgaacaaattaattcttttgtgtgtcatactttctgtctctctccc

SEQ ID NO: 454565 - DNA, 588 bp, Homo Sapiens
  misc_feature (420)..(430): n is a, c, g, or t
agcgggagtttctcttttcccctcccttcttcttcaccttcttccttctatttatccttctgtttcatctacaaatatttgagtgtcactgtgttctaggcagtgtgccagacattgggattcgttggtaagcaagagagagaggcatggcctctgtccttatgagcttgcagtttatcatagtgttacttatctagtctgtcctgccttcaaggttcagtggaagcccgatcttcatgtagtcctttgacttctttggcccttgcaaacctatccctttgacctatgctactttaaatctgattcatacaatttagcatttattgatataatttcttatactgtgggataattgtttaaatatcttgttttactggctagagtatagttccttaaggacagagactgtcatgttattannnnnnnnnnnggcaatactgagcccaaaggttttgatttcagtctgccctgctgaatgttgaagttactagtagctctgtgggacttagaagtagtgatgagataatgccttgcttttaagtttatttcctatttggttattttatgtttcttttttgaaatggtatg

SEQ ID NO: 454566 - DNA, 832 bp, Homo Sapiens
agcggtggatcatgagcatattatgttctttgcatttaacctacccctaaatatttgagaaaatacatcttgggtaatataaagagttgatttagtctatgcttaatatttatttagtaatgaatattgttgctatgaaaaagttgtactacttgaactttatgtctgtaatttacatgtttaatatttttaaaactccttgcctttattcatgtatccataaattcattcaaacattcttttatttatatttactgagtaactactatgtgcaagcattggtttgtatattagaaatatggtgataagtgaaacagaatgattctttcttttgtatagattatattttgcttttctttcagggtgtgcagcttcagaaaacataaaaaattttaaaaaccagtagtctttgtcagttgccatggttcttctcttagactttgttatcgtactgaataataaaatcatgcattcagatttttatgtcagtaactgctatggtagtagagatataagtattttctgatatataatctttatagttcaatgacaggtttctgagagtatggttttaaaaatattaactttgtgatccagcaggcagaaaaatccaaatgaacaaattgttctttgtgatctctgtcttataaataccttttatcgggtttttaaagctatataattgtcccttgcaagctggtttgaaccttactggccaaaatagcctggtacatcgactcttaccccttggaagaatcattgcctcaacctttttagctaaggaacacactcggaccggtctccaacttgacctttgacatgcttaagtccc

SEQ ID NO: 454567 - DNA, 584 bp, Homo Sapiens
agcggcctgcttttttaaagccatcatcttatcttctagctgtacctatttttttaaatatatgttttatttcaacagcttttgggatacaagtggtttttggttacatggatgaattgtctagtggtgaagtctgagattttgctacactcttcacccgagtgaccccagtagtgtacattgtatctaatatgtagtttttttatcctttatcccctcccaccctgtatctatttttaattgctttgtgaactaaggcaaatgtgataaagaggcatctgatgtacctgcttctagcatacaagaaaacatatttcttgagcatgctgttacatgcttgacactttatatacactatttcatttaacatcccaacaatcctaaaacctgggttttgttattgaagaacccaaggctctgagagttaactaacttgcccaaggtcacacagttagcaagttgtgtgggcaggatataagcccagtctggctgcaaagctatgttctttacactgtaacttactcctgaaggaaggaggcttaaaaataatccatgcagaatttgtatcagcttgatatgtgtgc

SEQ ID NO: 454568 - DNA, 785 bp, Homo Sapiens
  misc_feature (343)..(343): n is a, c, g, or t
aggtagttcctattgtctggattactctgatttttaacgtgcaatgagagttcggatttcttgcgctagctgtctgtacagcccttgattcccgacatctgagagtcctttgcacgtgtcaagcaatgtacacagcaccgtacaggactgttctctgggatttctaagagcatttcttgttccaagaagacgggagagtgatcatcttatatccctgacctggagctcaactttgtaaaaactgcgtggggtttctcattaacacttgggaaatacagcacacaagggtcattggagccacagagctcctccctgtctagcatttctctcaggagcaaatccnccagtgtttgtgtccagctgcagacactctttgttatcattagaaaccaccacgagccccccgcgaagacagctcactcacctcgagtcccagggtctttgccaaagtttcctacaaagctcccgctctgcaattcctccatcaccagaaagttcccagtttcagagcccgcctgagacattcccagcagaacaaagaaaagcaggacttgccttatctgcagagtgcctgcccctccgttttccatagcttcttttccaaaaccccaaaatcttcttgcagaattgcctcagcgcctcttcgcagttgtgggaaacgtgcctctgatctgtctaccaaatcctcggaagcctgaagattttaaccttgttgaatggcttctaggttctcccttaaaggattgttctttctgtcttcccagttctccgcgtgtactccgctc

SEQ ID NO: 454569 - DNA, 695 bp, Homo Sapiens
attctctcaccaatgacctgtttcgctggcctgggatttgagaaagttttagtaaatcctgagtaaagcgcttcacctgggccctgtgggtaagggtcagcagacgtttggagcccattccaagaatctgcaatacatgaggcactgcttctaataactcaatcagcttggagtatccgtagtctgacactcggcactgctttgcaaaatgatggtgataggatgggatgaaatgactgatgggtatgacacaagatggctggcttttcagcaagtcaatcacttctctactgaactggatcagctgggggttacctacaggactcttcgaacgcagaagccaagggtcagtgttgggacacgggggcttgttgtgaatccatttaaccactttgatgccattctgagcagtggcaactgtttacacctggaacacaggtaatgaagtgcttctaagggacacctccttggttttcttgcactacttctagatcgccaaactctgcaatgtggacgatctggaaagctcaataaaggcacggtgccctcgtggctctggagaagactgtgaacctggggcgcaaatgtcttcaaagaaagaatcacgaaaggaatcttgtaagagtctggatcaaattcatgttcgctgaaatccttattggcacaatgctgtctgcagacaggctcgtcccgct

SEQ ID NO: 454570 - DNA, 1097 bp, Homo Sapiens
  misc_feature (606)..(606): n is a, c, g, or t
  misc_feature (621)..(621): n is a, c, g, or t
agcggaggcaaccgccactgtctggagcgggctcgcctctgcggcagccctcaccgcccgggctttactgaagcggagtctagcatgtgcggctgctccacagcggtgtgggtggcggcggctcctctgcagcagcctcggcagtaggggtcaggggtggcctaagcccaccgtggagctacatacagagtattataggaatggtatcggtatgtatcgctcgagtctatggggagacgcccgctgtcgtatgtgaacagacctcggaacaccaattgcatgaactcggaagctggcctcgagggcctcatgactcgctggaggcctacacatcggcgatcaaagcccatatcatggcgggactcaagatgagcaggccgctacatgactcacgactgatgagcaacctgcattccctataacggaccacctcgaggaacaaagaacgagagacagccgaaacagtacctggaactaatatgagaactcaacaagatattctggcgctgctgacccaagatcaacagggctgacaatcaaagactacgatgaagagcgattttacatgcagagatgaatgaccaaccatgacgtaattgacaaaanaggaattgggaacanaatgcagaaagcttcaaaaatggaagcagccatcgcacctacgactcatacattaattagatatcaattctcgatacttaaaaactaggcattgctttgaatgcaggggatcccaaagatggttaaaaacttacgatttaaaaatctcaatgctaatctcaatttgacttaaatctgcgattaagcaaattgccccctggcgcagatggcgcgggtgttccaattaatcatcggtaaaacattatgggcccccattgccgaaaacatgctctaagatgctgcgaaattaaatcttcaactttgactgatttgtggtgtattgcatttttagttaattttgatggaggtttactttcagaaatttaacgcgttcctttttcatttaaattaacccaaaaaatcacagaaaaattcctcagaaagaatggatcttaagggccacatccgggggcatgtgacacctttgagaggagggg

SEQ ID NO: 454571 - DNA, 1025 bp, Homo Sapiens
gcccccctgcgatcgaatcggccgtacccgctcatccacccgcatggccagaatatgagattagaatgcgtcttatttgggtccttacttcagtcaccattctagatagtcttccagttatgacaaagtctaaagaattttatttttaaataaattattatcatatttttctgttaccattttttggttggttttccatgcagtttgtgcctacttccaggaggaagacacccacacacatttactcttctctgctttctttacgaatttgaatatgaaaaagagagccaggaattgccaaaagctggttactccaagaccctaggcattctgtcaaaattctaacttggatgatcagtgtaaaatacttatcattttgttaatatcagtatgttcattcaaatggttacaagattttcacttgatttctaaatcactgatcttaagtgaaaaatatcaaaatagaggacttcacaaatattatcatttagaacatcctcactttaaacaacctaaagttatttttaatgttgaatcaatcatactctgaccttctccatagggaaaggaaaatgtaaatatcccagagagcagagagcaaactgtcataaaaataaaactgtactttcaaatagctgtagtccacagcacagctctaacccaaattgtcatttcaactgcttcacattattagaaaatatttaccttctagctttgaacatgaaagaaaagtactcttagtctatcagtttccctaactaggagattcatatatttgttggggtcatataaagaaactgatagtgcaatttaataagcataatgcagagaggatttggagactctttgcaaagctgttgaagggatgagaaagaacacaagagactgcagtaacctttggttagagtgatttttatcacccctagtttgaaagggccagtggcaaagcaagtttactaactttaggataaagtagactcatcaggaaaagagcaaccacctaagcttaagggacaaagcccgct

SEQ ID NO: 454572 - DNA, 948 bp, Homo Sapiens
tggggctcgtggcctgttttgcccctggccttcgagctcaacttccggtaggtcttgtccgctgtctttggcaatcaaaagtgtcgggaaagatggctatattttccggagtccttaccggatgtttcctcgtccgtccggaatgagagtgcccattaaggcttcaaagtaaaaccaggtgctcttgggtattctgccgtgtgccggatgggtctttcctggcagtactctttctgccagaggccccgcccgcagcatgtctctcccccactggaccaggcggctttccttgtgccggcgtccgactacctacagggccgtgcacagggggccccaggaagcctgtgggatggttgtgggtcatccggcccgcactccacgctgacctcgattgagggttctccagccgctcaggccttccagttaccgcaggcccgatgcacattggccttggtggccgctccaaaccctgagccttttctcattgaaacggtgtgtgccaggcgagaaggtagttattgggctttagctgagcacagccttcaatggtagctgggtctggccggcgttcctggaagcttctcaacgatttccacatagcatctcaccatctcccggtacagatcatccaggcaccagtagtctgtggtgagggcctcggcggttgcgatgtgcatgatggtgttgtcactcacgggccattctcctggcgagagtacgaggtggtccaggcccccggaacgttgcagctcctcctggatcttcatgcctacagtgctgttctccttgcagacatttctgtagccaagagcatcgccgacgctccccagcaacatcgcagccttaaatttctccatcccaggaggcagctcctcttccccaacagctgcggagcgtcctggcctttgtctcctcctcagcccgcctgacttttatagtagacccgct

SEQ ID NO: 454573 - DNA, 965 bp, Homo Sapiens
  misc_feature (137)..(379): n is a, c, g, or t
  misc_feature (382)..(407): n is a, c, g, or t
agcggagtccactttaaaggggaggaaggcacaaagagaatcgggaaaatagcaataaaccaatggaaacctaatgggggggacttggaagttactatagaaaatagggcatgtgtctgggccctattacacataannnnnnnnnnnnnnnnnnnnnnnnnnnnnnnnnnnnnnnnnnnnnnnnnnnnnnnnnnnnnnnnnnnnnnnnnnnnnnnnnnnnnnnnnnnnnnnnnnnnnnnnnnnnnnnnnnnnnnnnnnnnnnnnnnnnnnnnnnnnnnnnnnnnnnnnnnnnnnnnnnnnnnnnnnnnnnnnnnnnnnnnnnnnnnnnnnnnnnnnnnnnnnnnnnnnnnnnnnnnnnnnnnnnnnnnnnnnnnnnnnnatnnnnnnnnnnnnnnnnnnnnnnnnnntagggcaagtccatcaagccttttctgccaccagatgtccaccaggacatgttttatggccctatagagtgagaggcaaacagaagcaggttttttgtgcttacaatagaagaacgaggatttggaatgatgtatataggattgttttatagtttaatgagcctctctttcagctttgaggaaataatgacattgtgtagcgatagtggagaaaagattttttcatgcataagagcaagatgtgacaaaagatactaactatgctacttctctggctttgctctctgaaacccatatctccaggcaaaaaccctctcctgaatccatacgcacagaaaccaggcatgacccagaagacttccccctgggaaggtcccaccagccgctgattagaaatcccctttattcatctcactattttcctatgcttcaccccttatgggtcctttccggtgtttcctccccgaaaattccccggatttccctcgttgtggtaggctcggaaccttaaaacccttgctgtgctggcctggtgcatcgtcacaggccgttcaaatc

SEQ ID NO: 454574 - DNA, 753 bp, Homo Sapiens
  misc_feature (492)..(546): n is a, c, g, or t
  misc_feature (597)..(597): n is a, c, g, or t
  misc_feature (602)..(641): n is a, c, g, or t
ggggcttctgggcgtgatctatgaagaccacgccctgcagagaccagcgagaggcactcagatgtgggcagggcttaggctgtgctgaagagagagtcagagaggaaacctccaacccttgtcaggcccagaggtgcccctgcaagaggagcaagtcctcccaccagccacctagagctgagccccagctcccttctaccccaaaccaggaggttgcacaattttggtttgagaggaggaccaggaggctgatgggagtcacggttgttgactcagtggctgatgggaattgtgttctacactcctccaaggactgatgggagttatagttctcaccttttgggggctgatgggaattgcagtttctgcccaagggactccagttatcagacctagagatggggagacccattctcccctcacaaagccctcccctctcattcccatgggccctatttagcaggtgcttccctcccagatggctgtgtatgnnnnnnnnnnnnnnnnnnnnnnnnnnnnnnnnnnnnnnnnnnnnnnnnnnnnnnnaactataataagagggccagaggcagtcaagccctggccaggtcctggcgngccannnnnnnnnnnnnnnnnnnnnnnnnnnnnnnnnnnnnnnntcagaggtggagggtgaagaatgagaaacgtggggagttaggcttagctcaggaaccatgtgtcctggccatcccctccttccttgccctcctactccctgctctacatggc

SEQ ID NO: 454575 - DNA, 927 bp, Homo Sapiens
  misc_feature (150)..(150): n is a, c, g, or t
cttccccggactttaaggccatgttttctcttgtgtaggcctttccctttcgctgccccccacagctagtaattctacatccggtgtgtacaccctgtctctggggtgtttaacccggaggtaagaagccaaaatcctgcccataggatnaaggtttgtccccaaaattcctgcttcaaccttgaagaaagctatttcaagggaattaaaagaccgcagaaaataagctagagctttggaaatattgcttttcagtcagcactgatttggaataattactttaatggttttatcagctccagtatcaattcatagcatcatataatatagcattttgtatttttaatagataactgcatttttactcaatatcccttcgaaacactttttaaagatttaaagctaagagtgagttacatggagttttgttttgctttcactgagagttttaggtgaagttctttatggaatgaaattctctttctattctttttcagctgattaatgacttaaagcaaatgaaaaacatttccatttttattggtgctagaaaaaatggctatattcctgtttctttttcaaatgttgtttcttgttgcttgttagattataaaatggaagctgtagactttctattttgactggccaaaaagccccacatacaaaaatacagaatataaatgaggtaaaaggtccaggttccaaggtcaaaaattgacatactcttggttatatttaatttcaatacaaaatcataccacctctaagaacatagcttgcaaaccaatgccccatggattgaatgcagctcacaggcatgtttcatttgattagcacggtgtttgtaagtttttgagttagttgtcaatatgtaaaaatttggagagagcttatatcaatcctaggtatctaggacccccatccgct

SEQ ID NO: 454576 - DNA, 764 bp, Homo Sapiens
  misc_feature (655)..(683): n is a, c, g, or t
ccaggagggtgagggctgtggtcatgctgagatgggctggggggaatgccattttctgacaaaaactcctccaggtccgtgtattccaactggaaagtatctccgtcatagggaagggttttgtcccataaggtaggccccaggaatgccgactgggggaccgtcgggctgttactctcatcatccagcttcttttccttgtctgttatctttactaaatgcgtcttcgtggtgaagcggggagcttcagcgggttctccacgcagggacctgagcacgccgtagggaggcgggataaaggtgggattcagggggagcggtcgggacattttctccatcgcgatgcactcaaattttttccccttaaaaaaagaaataagaaagaaagaaacacaccgccccctaaaatgttgctgagcttttcctccgtcctttgccacaaagtactcgctctcaaggcggtggagaaaagggaagaaaaaaattacttatatctttataaatacatctgcataaaaatactatattaaacaacaaactttcgggtttccacgtgcagacggtcccaggagagcgcgccaagtgcccgcgggctccccggcgacgtgcaggatgctctcacctgcctcgaacccctcgttttgccaaatgttcnnnnnnnnnnnnnnnnnnnnnnnnnnnnntgtcgacggctgcagaagggcagaagacaccgcgccgaccccagcccctagtgccagcaccggaggcggtgcgccgtccca

SEQ ID NO: 454577 - DNA, 666 bp, Homo Sapiens
tgttgttctgtgtttttggtcttttgcttgtggtttcgctgttggttctttttgctgtgtgcttgggttgtctccttcttgttttctttggtgtgttgtggtgtgtgtcctcctgtgtcgtcgtgagctggtgtttccgtggggtgtctttgttccttggtcgtgtgccctccgttgcggtgtgggggcctccgtggctaggctcggttcatggcttccatcgcttgttcctcaggctcttccatggcgatctcctatgcttttctttctggtgttgcatctgttggtttgttcacacttcatcagtttccattcagttctttccttcagcgcggccgtgtcctttcgttcggtagccagtttggcgacggcccacgagatgggctgcaggaagctgaccccagcctccgggggtgtgcccggactcagccaggtccgctggcgggaatggatggggacacgtcgcgagccccaacccctcccggccagtggcctccctaaccccgcaggggccaggttctctcctccccgccccgtggcctccctgctccctgccacgcctcttcctctcggtttggggctgtctctcctcgtcccccacccctcaaggatctggcccctccagggacagctccccactctgccgtctcccaagctaagccgctc

SEQ ID NO: 454578 - DNA, 970 bp, Homo Sapiens
  misc_feature (11)..(11): n is a, c, g, or t
  misc_feature (22)..(22): n is a, c, g, or t
  misc_feature (31)..(31): n is a, c, g, or t
  misc_feature (56)..(56): n is a, c, g, or t
  misc_feature (97)..(97): n is a, c, g, or t
  misc_feature (648)..(658): n is a, c, g, or t
aggattgttgncttggaagttnatttttccngggccagtcccagatgaacccggtnaccagtacccattcatgctccatcctgattttctttgcatnccagtgagatgcatatttcatgattgtccaaggtcatggttgtccaaagacatggaacagaatgattcactgggtaagactaaaggacttgtattatcactctccaattcagtttcacattgcttaattttataaaatttttttctgtattgtacataataaacatttagaaacagatgtccctaccaaccagaaggttgtcattaaatatcctgttagttaaaactgcacatttattgtttaaatacccattagacatatccagcttgaaatttataccattgcactgcccaacggagctgcactttgagccatgctgatgtctctggaatctaaaggtcgtaccacaaacttccaaatgtttctcatttgtcacacaaggttcttcgcagaggcatcacatcgaccccaatacaggtccttcatacccttagttctggttattctgaaaacttccaactccctgatccaaacttgggaatgttttacatttaaaaattcttcctccctcccacccctccaacaaatgtcctttgtcccataataatttnnnnnnnnnnntccctgaaagatccaaattgaataacaataaagatctgattggaaccttcataagcttgacaatgtagaattgtatttcttaaaaagtgtgtaaccacatttgtctgggctgcaaaagacaccacagaataagatcagaatagaatttcaactgactccctaatttccttagaatggcttgtatttcgagcctttcctgtttttctctgatagagtaggtgtacattactaactataagtgataagaaagtctaaaaacagccactgccttaaaagtacagttggaattaattagagtttaagttcaccgct

SEQ ID NO: 454579 - DNA, 633 bp, Homo Sapiens
  misc_feature (357)..(365): n is a, c, g, or t
  misc_feature (547)..(584): n is a, c, g, or t
atgggataggtttcagttagtggcataataatgcttcattgaatgcacaatagtattaacatgttaaaaatgtataatgaaacaagttcacacatcatctgaaaatttaaaaatgtactgcattttattacataaaagtacaaatagtaaaataacgtactactaattttttaattttaacaaaacttaaatgttcttactataatgcaaaagaatattactctaaacacctacctcatgcaccactcaatatcataattaaccacaaatatcatctccacttagattttcatcatgcatgttacattttaatgtccttactcttccaaagaaaaggtcataaataatgcccacctnnnnnnnnngaaactctcctatctttgatgccgtgacaactgatcacatgctttcacatgtgaatacaatagaaatgaagaaatagcatcaagtaacttgagagttgaatcacagcaatattagctttttaaaaaatctgtacttcttttcaaggaaaaaagaacactttgggtcgggcgctgtggcttannnnnnnnnnnnnnnnnnnnnnnnnnnnnnnnnnnnnnagagcatgaggtcaggagttcaagactaccctgaccaacatggtgaaac

SEQ ID NO: 454580 - DNA, 895 bp, Homo Sapiens
  misc_feature (187)..(216): n is a, c, g, or t
agcggctggccctcggcgccgccaccctagctggcgcagtcttgacactgcatccttccctcctagtgccttaccgagcgacagacgcggcgtgagggtttacttccactggtactccaagaaactgaggctagtcagacacaatctcagctcttctgttgtgctgttgtaacagtttacgctggcnnnnnnnnnnnnnnnnnnnnnnnnnnnnnnaaaatgttaatgcccgttgtctttcctgggctgtttgctagcggaaggatgccagggaagccagcaggagctaggagagagtccgtggatctcgaaagaaatatgggagacagatgcccggcgggtgcgtctggcagatggggacggcgggagttgagttgtggcagtagcttgagcttgtaatttgtgggcggaggcccagaggggactccccgcccttcacccctgcccccactctgtccccagttccgcacagttagtcgacggccagaggcttcgccgcgactgctcggccctcgcccaggcagcgcgtctcccgccccagcgcggcatcccccagatcccctcaccgccctcccaccgaagagccctggagctcctccacgccctcgccccgcgggcgctccaagctactacctacccttcccggaggaccttccccccatggagcagcccgggcgtcaccgtacggcgccctatcccgcagtaaacacgcccgggaacactcaccctggaggcgcccgcccgcacacggccaaacgcgtccgcacacgccgctgccccgcaccccgccctcccgcctagggcgcccctacagcgccgaaaagccccgcaatactaccgccgcccagcagaacgccccgccgagcaagcgcacaccgctccgccgccagcgccc

SEQ ID NO: 454581 - DNA, 1056 bp, Homo Sapiens
ttggcagcgccctttgggcgtgtttcaccgcgtagagatgtgttgtttttttgctgttgttgttctgtgtgtaatgtacgagcaacacgcggtgtgttcccactagaattgccctgggtacagagtgcccagtgttttctcacaaaattctccaaggggaatatggttttgggattaatccccgggggagagacatttctcacgggcccattattcgttcacgcgtggcaaagattcttgtgtgtgttctcccttgtcgtcccttttgtgaggagcccctggaaccccgtccattcgggttcgtccagccgaatggccactgggcggggagactctgcgtggggactcttgtgacccgggcttgctttcttccctgccggttcctattcagatggccttgaacagagccatgagggtgtccacagatgttggaacaggtagtatcctgtccccagctcaaggggggacaattgattgataccctatcccagccctgcctgcaatattatttttagtccttccctccccaactggcataacttggtataaattatgtcttcaacaatgtcgaattccccctcctgccttctattctgtgttaaaaaaaattgtcactgttgtgttctacaaaatcgtcagccctccccaaactttgctttctgcggaggaaagtcacccatggaatttctcttccttgctctcttggattgcagcaggctgggcaaagccacatggccacgccagggcagctggggctgaggcggggcagcccgggtgggcgggcatcatgtgtaggagtagtctatgtcggggatgccgccgtcccggtagccccgcgtggtgccgtagccaatggtgtgtgtggccttgcagaggctgctgccgttggaggggaagatagtgtggaccacgtactcctctttggcgcggtacgggttgatgggcagcatctgcagcccagggccgcggatttccaggatggagttatccttcttggtccctgactccatatagtcatcctttttcctgctgccccggttgtaggccctctcgctc

SEQ ID NO: 454582 - DNA, 545 bp, Homo Sapiens
agcggataaaagatgaaggcccaatgtaagtgagaaactttagtggtacttatgttgcctcataatcagtcaaaactcctcttaacccacatcatgggttaaagagaacattgccaggtggccttcactcttctagatggacatcatttgttaggtcctttttccatggtttagactaaaagaggcaataattagaaatgtctccctcataataggctctacagcaaattctactttaaaggcctacgttacacaacagactttaaattctcttgtgaaagttatgctaaataatagaattggctaaacagaaaagtacctgtgcagctgctgacacttgtggcctatggagaaatacatcaaatgtagattataaaaattcagttgtaggggattaatgaaaagaccacttagtcaagcgagtagactcttcatctagctcattctttaatctatttaattttaggtggtttggtttatggggaccctgggtaaggagcatactccaaactcttggtattttcctcccgatagtcataataata

SEQ ID NO: 454583 - DNA, 1220 bp, Homo Sapiens
  misc_feature (337)..(337): n is a, c, g, or t
aatggggcgcgaacgagcactggcgaaaccggacaggccccaagggtcctggacaaggggtgaaagatagacgggtcccttccgagcaaaggtgcagaagttcaagaggcaaattcccacaagagttccgtgatagtctaccggtttcatcccttccagcttctagtgctgaagaccctcttctggtctggcactgctgaggtggttctggatctcccgagggaaaccaaccttaagacagcccgaaccacctcctgtcgggctctgctccacgtcacggatctgagctgccatctgtgggagagaggctgcttagacaggtacaggatcatggggnccagtttcttcagaggcctttcctttaacttgggccctccacccccaggcgtggaccagtactggtctgtggcctgtcaggaagcaggctgcaacagcactgccgcctgagctcctgtcagatcagtggtggtgttacattctcataggagcacaaacactattgtgaactgggcatgcaaggtatctaggttgcgtgctccttatgagaatctagtgcctgatgatctgaggtggagcagtctcattctgaaaccatcccctgcctgggtccatctgtggaaaaaccgtcttccacgaaaccagcccctggtgcaaaaagggtgagggactgctactttaacttacctccttgatcactttatcctccttttcttcataggaatccaaacctttcaccatggatttcttgaatctaaaaagaaaaggggcaaaaccacccagaacccattccccaccagttaaaacgaaaagctcctcagtagatatttttttaattttgagaaattccaaattcagaaacaaaacagtatagtaagcacctatgtacctctcacccagagtccttgtaaacattttgccatactggctccacttcttttgtacagacacacgtcctttttgccaaaacaaaataggtttagacgtcaaaccctattttcaacacacatctcccaagaggaggaacattctatacaaccatgataccattaccacattaagaaaattcttccttttagtgttcaaatatttggctggttagtatagacatggtttacatgtcttcagacttgagtgtaggcatacaggctatattcacatttccctcgtctcaaaaacgtgcattatgccttctctactctcacctccaatcccaaagtcca

SEQ ID NO: 454584 - DNA, 891 bp, Homo Sapiens
  misc_feature (88)..(88): n is a, c, g, or t
  misc_feature (117)..(117): n is a, c, g, or t
  misc_feature (343)..(343): n is a, c, g, or t
gggaacgctgattggaccgtttgaatgagacgccgccacggccggcatacgcgcgggcacctgacgctgaggaagtcgcgcacgaaancggtcttcctgggggccggagcgtggcanggggaggcgggactcggggttttaaacgcgtgatggaaggcgctcgggccaatagggatgcgctttagtgactggtgggtcacgagactcgcatgggccaatgactgatagagaccggtcagagggcgacccagtttcgtgcagatcaaaccgctgccagccaacgaaatccgttgatttttgtatatgcaaatgaagtgtgcgctgccgcccgcgccccctcctnttgagccgtggtggaggtgggcgctggaactccgactacatttttcatatgaggcgccattttgtgctggaaatgctcttggacccacgtcctgtattgctaaggctcaaagatcagtcagaatgaccttgaaggcttggacagccttgcactccgtgtgtgacccccactcctgccaggcttcatcgaagacgccagcctcagtttccttatgtgacaaatgggcactgggatccgttgtattgccagggaaagaagtcagagagtgccaagacggttattcacggcatggttatgcctatgactgacccatggcctccagccacacccgccttctctgggactcagtttccctctctaggaaatggacacatagctgcctggaaaagggaccatctccagccctcagtgtcagtaaaaacgtcaggcaattgcttgagaacggtggccgagctccctgagcaggccttttggaggggcttagagaggaggagggaatgctgaagttggccttcctttgctcatctgtgcagtgcggtcgcagtgcc

SEQ ID NO: 454585 - DNA, 981 bp, Homo Sapiens
tacttgtccacagggagtgccattttcttagaagaaccagaagaattatacttttgggaaaactcaagctcattaacatgtatgtttatctcagtaaagtgaagaagaattcactagagagatgacttgttcttactcccttatttctgtagctattgacataattcttcccactgctcttgccactccagagaaagttcctaggcattagtatactctcaggttcctccctagacctcctgtactagaatgttcattttggagaaccataggtgatctgtcaacactaaggagcacgaccccgtattacattagtgactctgaagtgaatacattatgtacctatcaaacatttcctacatgccattcaaaagtatgcatgaatactgttggagtttatctagtgaaaggtggtgttcttatctgaataaatgtgtgagcccataggcttgaaatggaacgccaactgctatccttcatccattcctgtctgttcattcccatcaggtgctacttgtgatacatcaaggattcctatatgaagttttttctacaattatggaagccaggatatttgttttacctgtatcataagcaatctaaattatgttcattagggtaaaaagacacctaattctgaagaatagtacttacatagcatctctcaccaaaagatcactggaacaaaatggcttcataaaaattagggctattactaaaggcctaaattctagctgaagctagagctttctatattttaaaagagccaaatcctttgatcttctgagcctaacagaatacaggcgttggcacttataagaacatgtatggtagactcaagtgtacaataatgtttctacctttttacatcttggtacttacctaatcaccctggactcaaagtcctcttgaagcaatcccgttttcaatgagcatatgttgattacatgtaaactcaagagttacatgagcaatctcgct

SEQ ID NO: 454586 - DNA, 608 bp, Homo Sapiens
  misc_feature (143)..(248): n is a, c, g, or t
  misc_feature (297)..(385): n is a, c, g, or t
aatttggaactccctgattcttagaataccctggtttcttcttaaaacaacaaaaaagtacgattattaacactgattaataacacatgaaccaaacccacttaatatcattattaaaaacaggctgggcacagtggcttatnnnnnnnnnnnnnnnnnnnnnnnnnnnnnnnnnnnnnnnnnnnnnnnnnnnnnnnnnnnnnnnnnnnnnnnnnnnnnnnnnnnnnnnnnnnnnnnnnnnnnnnnnntacaaaaatcagccaggtgtggtggtgagcacctgcagaccagctaccnnnnnnnnnnnnnnnnnnnnnnnnnnnnnnnnnnnnnnnnnnnnnnnnnnnnnnnnnnnnnnnnnnnnnnnnnnnnnnnnnnnnnnnnnaaaacaaccccaaaaaacaaaccaaacatcaatagaactacatagggacaacagcaaatacaaatctttaaacacttcatgatgtggccggaatgagtacaagtatgcaattcaatgattccaacatttgatggtgactgtgaattattacatatttattacacataaatgagtttaaattttatttccaaactgcatgcagggactttattattactatgaa

SEQ ID NO: 454587 - DNA, 547 bp, Homo Sapiens
agcggtataaaagcttttgagggggacttatctgttgccccagaaatggtaatcaagactcaccaatgccaaaaatggatgctcagtttcccctccttataaagaaagttaatgataccctaataggacacagacaagacccttttataattatccattacctaacaccctctgcctgttctagatgaagagaggacaggggagaaaatcaactgttatcagtgtcctttgggctttcaaggagttccgtggttggtggccactccctcttctactaggggtgggactgttctagggcaatgtcttggagagattgagaagtcctgcaagaagagaagactgacacctgattcctcaaatgaatacttctttaattgcaggtgcattttggcattgtcccttgagaaagaattcttgaagatgaggggtttaactaaatctagagatgatggctacatttctggagctttctggagatggaagtcttgctaatagaaagtcttgctaaagatctatggaattgtgtgtcttaaacaaataatggtag

SEQ ID NO: 454588 - DNA, 606 bp, Homo Sapiens
agtgcgcctgtgcggccggcgcatcccgatggagcgcggcggcggcggctccgggacgggatcccggcctgaggggactgcgcggggaacctctctcccagggaagatcgcagaaccgggcgcggtgcggacctctcagcccaactaccggcctcaaggcatggagggatttttgaaatcagatgagaggcagagattggccaaagaaagacgagaagaaagagaaaaatgtctggctgctcgggagcaacagatcctggagaaacagaaaagagccaggctgcagtacgaaaagcaaatggaggagcgatggcgaaaactggaagagcagcggcagcgggaggaccaaaagagagctgctgtggaagagaaaaggaaacagaagctccgggaggaggaggaacggctggaggcgatgatgcgccggtccctggagcgcacacagcagctggagctgaaaaagaagtattcgtggggagcaccactggccattggacccggaggacatgatggtgaatcagaaaataccccaccccctcctctaggtttagcagccagcaccctccctccggatgcagggaccactgccgcagctgccgagtccac

SEQ ID NO: 454589 - DNA, 1292 bp, Homo Sapiens
ctcaacccgtttcctcgttgtggtcccaaacacttgtgatttgcttgcggatactcctcaaatttctttctcaccccctctctttgccactgcccttctgtgttgtgtactcatttcttactccgctagcccacctaagcgggtcccggtgataagacgggggaattgggtagcgatgatccccaaccttcctggtccctaagacggggattaaattgtgtgggatgtaatccccggggtaaagttgtgcacgtatgaatattgtgtgttgttcccaccctggttttgcctcacaatgggccgtctgagttttctcgactcaatcacttctatgcgttcccttgctgcgcgttcccctttgtggcgtttttcttcctgccccagaagggtacatggatatgtttcctccacaactgggtggggggccccctgcacgtgtgcggatatccgcgcttccgggataaaactgtgtgtgggtctcccgcccttgttgtttgctgtctttatacccgcgtattttctgtggtgacggctcctctttgcgcccccctctgctgttgcacacgccagtttgcgccacctgtgtttagcttcggtgtcccccctcttgggggctggtcctttgccgccttggcggattcgtttctcgtcgtcccgcccccaattgtggtcctgttcctctgttgctcggtagccccgtccccactgtgacgtgccactggtcggcccgctctcttattcaggggggtacaacggaacggtttgggggagttgtttaaccacacgggcaataaatatggctttacaaagtgctaattgtatgaccccttggcacctccccttcggaccatggttctatcgccacccggcccctaggtgtcagggtacaaatggaacaaaatgtccctctcatcccctgcatagccccccaaggggcccgccacaagttaagtcctggctacgtcgagcaaaggtgttactacttccggggggttcccctagcactatcgtagtgaagtgtttcttttccaatatggcacttgtctgcctgcccctacagggacaacttaccaatagggattgctccggtcgtgtgcaagccaggtatacgcaaggactgcgtgtagggataacctcacgcaagtcgcctcaggcgtccccaggctgccagcgtcacgtaccacagcgacctcctgcggcccgagcgtcccctggcaggcaacgccggctcgttagagcgagcgacagatggtgtagtccaaaggccaagcggcgtttctgtagatccagct

SEQ ID NO: 454590 - DNA, 724 bp, Homo Sapiens
  misc_feature (361)..(361): n is a, c, g, or t
agcgggtcgctcgcgccgctgcgtgcggtgtggtgcgaggcgggtgcgccgggcggccgcggcgcggcgggaccatggagctcagagcgcagccccggcgccggcggcgggaccgcggaccgttttagttttgattgctgttaactactactgataactgagccaaagtggtgatgctacttgaggggaatttctgcaacccatagtcaacgattacatgattgtgaaccatgcctttagtgaagaggaacattgagccccggcacttgtgccagtggtgctctgccttgaaggggattaccagcgaacttgaatgtgtaaccaatagtactcttgccgctatcatacgccagctgagcangtctgagcaaaccatgctgaagacatatttggtgagttgtttaatgaggctaacaacttctacatcagagcaaattctcttcaagacagaattgatccgccttgctggtcaaagtcacccagctggattcaacagttggagaggtctcactagcaggatatcaacattgaaaacaagctttcaaaagttccacagtccaagaccagcaagtggtttcaaagaacagcattccttagtcctgttgctgatatttacaaccagagtgataagccacccgcctctgaacattcctgagacaatacagagattgacagaaggatgggctggaagtactatactgatccttcctatttcttgaccgtg

SEQ ID NO: 454591 - DNA, 597 bp, Homo Sapiens
ggaggctgcagtgacccgtgactgtaccacctgcactccagcttgggagacagaggtgacagagtgagaccctgtttcccaaaaaaaagaaacaaagcttttccagttgcaatcaaccaaaaaggagcgtctttaatacacaagaaatattcttcagtctacttaacttaaaaatgtaactgtaaatagatgcttttctcttgacagcggccccggcagggttggaacttttcctagtcaaacccccctactcactctgcagacccttcctgaaggtcttcgccccatactgagcccatcttcagtcccttcacttgttccaaattagcccaatccatgacccttctctgggagctcagccaatagatcccaaagtaccacagcagcacctggctgcagaaggacccctgggaaatgcagtcaggggtgagaagatgggtgggctgaatgaggtcggccctctctgggccttagtgctggcatctatgagatgaggataagcctgaagtcagcctggaattttgagcccaggttatacctggtaaatagaactcccaggtctccggatactcaccactaaaacaatagcacctcatt

SEQ ID NO: 454592 - DNA, 808 bp, Homo Sapiens
  misc_feature (20)..(20): n is a, c, g, or t
  misc_feature (48)..(48): n is a, c, g, or t
tgtttaaaaatttcaaaccnggtccttccctgaaggttcaaaaataangggtgctctttgtagacataggaagcattcagtggagactctggctcaagaatcaagccttctgtggattgctgaagttttgatttctgcgttccgttttccttaacttgtagaagatgtttcgctttacactccagactacacacatcttcatctgtcttatcacagatatactctccataacgaccacagacaacacagatgggttcccctggttctgcccagcgctgtgttttggaaaatgacttaacgggctcttcagaaggatggctgtccttcgcaccctgctcgggacttactgaatgaacctcttccaactggccacctgggctggggaaagggcatgattcgctgatgtgcctgtctattgtggctgcttctgtagctacagcatcaacgggaacatctctgcttttgtccaactgaaggtcttctgggtctggtttaattatcttagccacacaacttttgccatcatcattagcattcctcttgatttttagagatcttggaacaaacatccttcaatattccgcgcaggactgaggccgcgtccgctcccgctcccgctcgggccgtctcccccttccaggctccaggccaggcttccgcccgacaagccctgacccgctcgtcaggactgcggcccggggttggtggtgcggagcggagcggagcgtagaatccacttccccgggttttgggagggggccgcagcccgctttccgggcggcggggaggcggggccaccgcgcccgct

SEQ ID NO: 454593 - DNA, 855 bp, Homo Sapiens
  misc_feature (112)..(112): n is a, c, g, or t
gcttcccaaaagtgtgtaaagttatctgccaatagctctgttttcggaatgtggagaggattgtaaggaatcatgaagattgccctcattggatggatattcagcataaagngggcttttcctttcaccatttctatggcagttatttcccaggggaccagatgtctgctaacacagttgtatccaatttcctgaatcacttctggagccatcaaaaatggtgttcctatcactgtattccgcttggccatggtatctgtaagttgacctgctaccccaaaatctgcaagttttgcatgtccttctgtatttagcaaaatatttcctgccttgatatctcggtgtatttttctcataaaatgaaggtattcaagtcccttaagagttgattgtaatattgtagctatttcatcttctgttaacgttttatttcgtaatcgaatgatatcagatacagaaccagccccacagtactccataacgatccataagtctgtgttcttaaaataactgccataatatttgactacatgagggctgtcacattgctgcattatagagatttctttgattatctcctggaggtctgattccacaggaacttgcttaatagcaacaatctggccggtctctttatgaatagctttgtatacgctgccataggacccttctccaagtttctctaagacatcaaatacttcttctggttgtttggttaaactatcttcatccaactttttcagctgccggcgcggcgggttcctcagctgtaccgtctccattgcgctgccagcagccgcccagacccgctcactgctccatcctcccgcggacctcctgagcccaccccccgct

SEQ ID NO: 454594 - DNA, 756 bp, Homo Sapiens
cttgtggaggaattaaaaaccagctttgttaggccacgtgatccggactaattctggaaaaaacctggttgttttcggtgaagcaatgcatgaattcacaaaatttgcacacccgtcaattaccccctgtacccgacaatttcgtaaccatactcttcattagctatataagaataatctatgtcttagattcgtgcttgacttcaaattcttagaagtaactaaaggactttacattctcttctttgatttaggttctgtataattttagatcactcagcttagtcgagtttgaaccaaataataaaatggtttggccaaattttataggcacacaactcaaagtgcaaaaagcagtgaagaatgtaaccatctccaccttcaatacggggcaatgctgttccctgctccccttaactgtactgccggtactcaccaaacagcactatggatatgaaaaccttagactttaccacaatgcttccaaatctgctgacttggaataaaaataataaatcagtacacttccacgagaagaattaatattgtagtgttaggaaaactagcaatttaactaaacagcatcaagttacaaaccaggaaagtgatttaaaactaaatgctggcttatctttctgaaacaaagcatctaaatttgacagtccaaaatggcacttattgagtgtccgtgacaatacatgctgacaagcagcacacctctttgttgtttttttaagacggcatctcgtgctgtca

SEQ ID NO: 454595 - DNA, 1071 bp, Homo Sapiens
  misc_feature (60)..(60): n is a, c, g, or t
  misc_feature (324)..(535): n is a, c, g, or t
gggaaactccagatgtttatggagccttattgttagaccagttttcaagtgcccctcagntgtttaaatgccgttgagaccctcccattccaacagggctaggctttcaaccaccaactggagtgaccttaaccaccagacaagttattggtttacacagaatcctggtagacctaggaaattcaggatattacaaggtgttgcgaaggtcccgtgctccccctctgaaggaatctgggaaggattctgttccgggacttctttcctagcgttcggccaattcctggcctatggcaggtggaattcacatcttcatatggcgannnnnnnnnnnnnnnnnnnnnnnnnnnnnnnnnnnnnnnnnnnnnnnnnnnnnnnnnnnnnnnnnnnnnnnnnnnnnnnnnnnnnnnnnnnnnnnnnnnnnnnnnnnnnnnnnnnnnnnnnnnnnnnnnnnnnnnnnnnnnnnnnnnnnnnnnnnnnnnnnnnnnnnnnnnnnnnnnnnnnnnnnnnnnnnnnnnnnnnnnnnnnnnnnnnncctatgatactattattctgattttatgtatgaggaacagagaggcacagcaggcaagtgatttgcctatggtgaaaaaaaatgaaaatgaattgttagtttccatttttcaaattcactttatcactctcactttacttttaggaagcaaatattagactccccatgcagacatccaacatttgtgacacaagcatgtctgttggtactgttggtggccagggaatcaaaacacagcaaagttttgagatggtcaaaggaggctacactttggattccaacaaaggaggtggacatcagaccttggagtccgtcaagggagtggggcagggagatactggcagatatgcgtacaccgactggcagagtttcacccaacctcggcttggcgaagtaagttccactgtctttgaggtcatattacatggaagttaaatgctagttataaatcagaatttcccaaaagttttactcctcatatacctggaattcaacatcttttacctgttggattatcatagatgtggatgtccgct

SEQ ID NO: 454596 - DNA, 737 bp, Homo Sapiens
gagggtgttgccagaggagattgacatttgagtcagtagactgggagaaatagacccaccctcagtgtgagtggtaccatccagtttgctgccagcatgactagaacaaagtaggcaaaggaaggtgggattcgtttgcttgcttagtcttctgaatctttcttcttcccatgccagatgctcgcttcctttcctgctgcccttggacatcagactccaggctcttcagcctttggactctgggacttgcactggtggccactcagtgggtcttaagcctttggcctcagactcagggctgcgttgtcagcttccctggttttaatggttttggacttggactgagacacacaactggcttctctcctccagcttgcagacagtcatcatgggacttcaccttctaattgtgtgagccaattcttaataaactctggtttatatatacatatatcctattgtttctgtctctgtggagaaccctaatacacatgtcttatgtggatctttactctggtacatgttagtcttttcagaggttttaataatggtgtgatggccatggaaatatattcagttgaatggtttttaatagtagatatatagatcatgcccttctctgcaaactcagttttaatattttttattgccaaatggttctctcaattttatcctatactgtttgaaatctaaaatcagattgcgcacagtggctcatgcccgtaatccccgccgct

SEQ ID NO: 454597 - DNA, 2065 bp, Homo Sapiens
  misc_feature (14)..(14): n is a, c, g, or t
  misc_feature (47)..(47): n is a, c, g, or t
  misc_feature (189)..(189): n is a, c, g, or t
ggtgggtttgggangctgtctccaggggcacccaagtttccacccanctgaaagaagaagggcttttctgccacaacttgggtgccacagtgcaccctcccccatgccagcatgtggtatgaagtgaagtcatcaatgaagggtgcagtggagccccagcggctccagcagggaccgcaccttctcctncaggcagcagcagccattgatgatggggcccaaagggctgggggatgcccaggtgcttccccagcaccagcatgttcaccaagtcagggaagaaggccgttgcttttttcctctcggtcttgaagagctgtgggatgtcaatgatgtcacactctgccaggcccagctcccgcttcagcacctcacggttccagtcgatgcagctctgcacaaacttattgtagttgatgaggtctttattggagagcacctggttgatggagatggtcttgacctgctcatcatcaacaaccccctggaacaggagggccctcccgtggccacacttctgcttttcctggaagagcttgaagcaggccccagggctggccaggagcatccggaagcccttcccatcgggggcagggacaaagctcagaaactcatccacatggcccacggccaaccagtccacaaagagctccacggggggctgcaccttctgggcatggaggaagtcccgcaccacctgggtgaccctgcggccacttgacccaggcaggttgcccccaatgaggatcctccccagggggtactctttcccattggccaccactggagggctgacctccaggttcccaaaggagtccaggccactcacagacctgtcgcgtggttcccgagtcacgtaaccaaaatctggacccaggattcttttgtaagggaaatcctgcagttccccattccttggggagtcaaagaccaccgggagggtcttgtgcggcgcctgaacgtagcccagctccatctcatcctggatccagcggtcgttgcggttctcggcctgtgggcagatggtcagcttgcagccggccttcctggccagctctgccaccgcatccacaaaacacgtgttgttcctcacacggcacacatacacctctaggggtggcagagtgctgggcgtcatgatccagggtgccactcggaacaccacagtgtcagtgaagataggggatgccgagaaatcctcgttggagtcgtccagcagagtgacatggaaggagatgagtcctgtgaagccggcatcagggaaggacaggccttccacgaagaagcgctcctcatccccatgcaagcggggtacctcataggacaccttatcttggcccagcacatgcctataggcctcacacacatcctcaggaccgcagatgtggaagacctgtgcccgtttggcatcatagctggaggtatggaggacaagtttgtggtcatcaaagagggctgcagggccctgcgtccgcaggaccatgacagacatgtcttccaggtcttgcaggcagtgcacgtgctggtcacaattgtcctggacatcacagctcggatcatcacggtcacagttcaccagcaagatgccgccatacccactgggcccccagacccactgccgcttgtctacaaagttcctgtcctgccttccctcacagttcaggtcgcaatccagagagatgtcaacacaggtgaggtagagcaccgcataggccaggggcagaggctcatggctggagtggtaggaaatctgaacatggctgtcgttgaggtcattgctgggggagttcatgaccacgatgatctccaaagtcgcgtcaaagcgccaccgcctggtgtctgcacgctcccggcccctctccatgttgggagagatgtagatgtccacgccaggcgtcccatagacctcaaacatttctgtgccctcaggcactgacccataaatgtccacgagggtctccacgccagccacacacaccgcgctggtgggatgctccagggacacacgcacgattctctgcagcgacatgctggtgttggacttagctgtggccgcctcgtccga

SEQ ID NO: 454598 - DNA, 1045 bp, Homo Sapiens
  misc_feature (66)..(115): n is a, c, g, or t
gaggggtgcgcggccaagagagagatgtgggcgaggatagacgagtctcggagagaggttgtgtgnnnnnnnnnnnnnnnnnnnnnnnnnnnnnnnnnnnnnnnnnnnnnnnnnngggaggggaagaggaattgcgcgcgattgggaaaatgccccgggggcaaggtgggggtgggcaagcttccccaagtagctgtgatttgttcaggccccggggagggggccccccttctttgggggggagaacgtgctttgtggtcatcccccgtattgagtgtagtctggtcagctactaaatccatccttttggattttgtgtttaagggaatccaattgactggcatctgaaaattgcttggtgcgtttttttgacatactctgacgtccaaatccttctcgttgaaaagcaagaactggatcaacatctggactcaaagagcagtcggctgaatcactgattgcagccttggcccaagtaccagcatctgccgtcacaaaccccacatcatcatgggagctggaagaggactggtcagagagatgtggaggaagcactggcaacctgtcatcttctataatgacagtgtcatcttggggcatattcactgtaggggacagctggtatttacctgactcacccattatcctactgagggcagcatttctgctgggcgattcatcaagcccctcaatcccactgtagagggaatgggaaattcttcgttctctatcatccaacgctgtttcaatgggcagctcaggtccaggggggctcccaggtgacttcagctcattgcacttgcttattctccttgcaacaataagctggatcattcctcgtttattgccttcagtagacatagaccttcttagggtttccatggcatcttggtttgtcttgcccaacagggattctccatttactgctatcagttgatcattcacccgaagccttccatctttagatgctgctcctccattaataatggacttgacaaagattcccaaatctgcgtgttctccctcgtgccgaattcgccaccca

SEQ ID NO: 454599 - DNA, 961 bp, Homo Sapiens
  misc_feature (56)..(56): n is a, c, g, or t
  misc_feature (323)..(323): n is a, c, g, or t
cccgccccccggaccaaagaatgcctgagaagtttgattgtgggttgttggtgtgncggggggttggcataaaagcatttatttttcaggcagttactggccaacaaagttgaggtgctatataagtagtgagccatttttatttaccattaacaaaagcttttttacattggttggacttgacaaaacttctggcaaactttttttctctttggaaatcattcagcagggcactgtttacatcctttcgctgccatatctctagctttcactaaatgtgccacacattcctgccttctctgttgacctcgcttggattctcntacatgcttccagttagccagccagaggattttcctgtctctgggaatcttgtggaaaatcttgcattttggggcaccttctccttcagttataatgatataccttaaaagttttacatttacaaatgtctatttcacactctcattctaaagtagaatcgatgatgaccttttctccccgttcagccccataaaaactcattttcccctcttttcttttcctcccagctcctagacttcctttggaggagtggcctaggtggtggggcccagggctgagtaactgatatttccaggagttccccgaagaaggcagggccagagggagagctgggaaggtggtgacattacaaagacaaatgcatgttatagatgaggcaacagcattatccaaggctgaggtggagagcccagcaggccagggccacatcgtggtggggtagggtctgattcacattgaggcagaggtgagtctccttccttctccttctgatgggttggtggagttacaagccagggaaggaaggaaagggtcccagatccagacttgctctttctgaaatccagggcttcccccagggactgggtcagccacctggggaatgagagtgcctcgtgccgaattcgccacccaggcc

SEQ ID NO: 454600 - DNA, 1019 bp, Homo Sapiens
  misc_feature (421)..(580): n is a, c, g, or t
  misc_feature (839)..(839): n is a, c, g, or t
  misc_feature (878)..(878): n is a, c, g, or t
ggcctgggtggcgattctcagcacgaggcccagtcggggttttggggacttcagctcctggtagcagtaggttggccgctgtggaccttggtggggttgcagggctgggggcccatgtccacatctccatttccagcctttctagcctgccctctgctgccagccaataaattgcttgcctgctgcctgcatcccctttcctggcccctgggagcccacagccttcccatcccttaacctgttgccaagggccttggccctgtttccaggacctggcccagccagagcccactgctgggaccttcaagcacaaggcctgccctacacccaggctggtgcctcaggcctctcctctagtaggcaggccaggttagtgaggaaggactgtgtctccagattgtggtttcctctttaagacagnnnnnnnnnnnnnnnnnnnnnnnnnnnnnnnnnnnnnnnnnnnnnnnnnnnnnnnnnnnnnnnnnnnnnnnnnnnnnnnnnnnnnnnnnnnnnnnnnnnnnnnnnnnnnnnnnnnnnnnnnnnnnnnnnnnnnnnnnnnnnnnnnnnnnnnnnnnnnnnncccctacttctgtcatcttctcagggacagcctatttatacaaccagtgtggtcccctgaccaacgccattacctgggacaagttttcagaccccagacttactgagcctaagcctctgcagggtgggcttctcggtctgttttgacaaaacttcaggggcttctgaaagctggtgttggacggcagcattgagtttcctgccgtgccctgcctgagctctcagggccctgctcacctgctctggctgtgaacacctgngcttcatctcagcctgcctggcgtctctgtgcccctgtnaagaaatcttgagggacccccactgggttggaagccagtgtctcctgctgggaaaaacaatgggaatgtccttttcccggccttccttgttggaaatgggccctggctggttctcaaggcccgggccactggggctcccaa

SEQ ID NO: 454601 - DNA, 1128 bp, Homo Sapiens
  misc_feature (177)..(177): n is a, c, g, or t
  misc_feature (282)..(282): n is a, c, g, or t
  misc_feature (561)..(603): n is a, c, g, or t
acacaaccctatgggggccccttggccattcaggggaccctttggagaaagggattgatttcccagggggattccctgggttccctttaccttccaagccatttttcctgcaaaccaaagccccaggggccccaggggccgtcccctgagcccaagggccccagggcatgctgtganccagggaagggggagtaaaagagactgggtggcttttaccctcccattcttaggggtgaaggggctggaaaggaacaggagtctgtggggagtcactcccagagngctggaaagggacaggagggattcctgttgttctcaagtgacctatttgacttccccctcccttgaggagtcagcacacaggctgaaagatgcagtgagacacaagtttattggtggagctgcagcggagtcctccctctttcagggatagccaagggcacagcaccaacagagggatggagagatagacccccaaacagacacatggatggagcagactcatagaaaccatagcacagccacataggcacagagacacacaggccacagcaccaagannnnnnnnnnnnnnnnnnnnnnnnnnnnnnnnnnnnnnnnnnngacaaaaccacagggctaagacacacggacaaagtgcgggctttggggcccctgcatagacagagcgagggccatgtggggagggggcccctactgacctcccccaggcataggcacaccaacagcacatagacaggcagatgcccccagccagccagcctgccacacagacaaatggactgcagggaaaggatgttcgtggctccacatgaaccatggggagatggcaccacaggccttcaacacaccctgccacactgaggcctgggagtccccgcccctgaactagtcacatctattcccctgactcccaccccactccccgccacactttggtcttgcccactggggctggggctggggctgaggctggggaaactggcaggtggtaggagggagagaggaaggggtatggacctggctcggtcccgtctctgtgatcagggcagcagatgctgagagtctggggctgagcctcggcctggcagtcctcgtgccgaattcgccacccaggcctcgctcctt

SEQ ID NO: 454602 - DNA, 1256 bp, Homo Sapiens
  misc_feature (44)..(44): n is a, c, g, or t
  misc_feature (394)..(422): n is a, c, g, or t
aagatattggagagcagattcgctgtgttttagacggcgcggancgtcttgttgatcgtgaggggacatggttgtgtagtctggtcggtggggtggtcgtgtcatctctaccggttgagattgactgtggtaaagtacgtattgcgcgtgtggtgcgcgacgtgcgagcgaggtggggcggcggcgacggggtaggtgggggtcactctcgtgcgctagtggggtcggattagatcgttggtggagtggcagcgcgggtgtcggatgggtaggtgggcaagcgtcgatatgtggggcgtgggggtgttgggagtgtttggccccggagggtggtgacggtgcgtgagggtgtgggtcggtgtggcggggcggcgtgggagctctataggttgtnnnnnnnnnnnnnnnnnnnnnnnnnnnnntctgagtggtaggcggatggcggtgagtggcgtgggtcggagtgtgtctgcgctggcaggggggcgaagtgttggtcagcgggagaagggtggggtttatcgatgaactcgatggactggtccagccagggcaggcagtttttcccagtagttgtcgttgatggggacccgcatgaagcggctctcgcagatgaagtcaggcttggggcaggagttgctgggcgttgaggacgtagcttattccattttgcgtcatcagatccttgtttaggacgtccttctgcgagcccaggtagaggtgaggcaggatgcgggtgaggcccacgctgggcacaggcaggcagggctgggagaggctcatgggtagcagggcagcaggcttgccctcgcagaggccggggaagcaggaggagaaggtggcgaagcccccagtgaggatggccacgctgtcgaagcagccgtccagcttgctcagcaggatggagaggaagctgtctgcggccagcacgctggcgtcccgcgtgctctggtcatagaccaccacgtcctgtggctccgtagcctccacctggctgcgtgcagccggctggatgagctccgcaatggtcaccttgccctgctgcagccgccgcttcaccagcttggagcagcagatgttgacggagctgagcacatgccagctgttgtactccacgaaggagcggctgtcgatgaccagcggccccccaggcccgccccgcagcaggctggccagcttcttggcatccatcaccttcctcgggagccggtccccagccatgcctcgtgccgaattcgccacccaggcctcgctac

SEQ ID NO: 454603 - DNA, 959 bp, Homo Sapiens
  misc_feature (730)..(791): n is a, c, g, or t
ttggtagagtattaggatattaaaaaatttaaaaaccctaccagcccaggaggccccctgaaaggaatctgcaaacagtcataatatcccccaaaccaggcaatgggtgtaggataaggtttcctgtcccagggattctttgctgtcacagtccccggcatgatgtaagcaatgttgtctaatgtgtttgacaagacctgttgggacagccattcaattcaggtagttgtgtggtgagacatgccaaggggccaagggcacagataatggaatccagaagcactgacaaactgccagacacagccaccataccctcagtttcctgcagacggtgtccaatgaggcttagggactctcccaacagctgaagatgagcagcaacatcaatgggctctgtctcaggggctttggctggtgaggctggtaacagcatggtggtgggtggggacttcttctggggtgacagtactcctacagaagaggctttgactttcatggaaccttctgagctggatgctttccttttcacagttgtggcttctgctttgttctgtttgtgctgcagatactgagctttttgcttccaaatcagtttgtctttttctggtaattgcttccacacctcagccagttttttactaagttccccaaaatctatacctggatggtcagccacaatggtcacgcgatactctttacagaacacctggtaggccgacatgttcttctnnnnnnnnnnnnnnnnnnnnnnnnnnnnnnnnnnnnnnnnnnnnnnnnnnnnnnnnnnnnnnactatgcccatctgtgtggaggccaggaagtggcaggggaggtgctgctgctccagcgtatgggatgctgggaggagggccagatgtcactgtgacctctcccactggcacggcagaaagtcctaaacttctcttggacttggagtgtcgcttctctttatgcttctc

SEQ ID NO: 454604 - DNA, 1288 bp, Homo Sapiens
  misc_feature (117)..(117): n is a, c, g, or t
  misc_feature (143)..(143): n is a, c, g, or t
  misc_feature (148)..(148): n is a, c, g, or t
  misc_feature (238)..(238): n is a, c, g, or t
  misc_feature (245)..(245): n is a, c, g, or t
  misc_feature (256)..(256): n is a, c, g, or t
  misc_feature (258)..(451): n is a, c, g, or t
  misc_feature (453)..(453): n is a, c, g, or t
  misc_feature (456)..(686): n is a, c, g, or t
  misc_feature (688)..(690): n is a, c, g, or t
  misc_feature (692)..(707): n is a, c, g, or t
  misc_feature (709)..(821): n is a, c, g, or t
accggggtccaccgcagatcgtggataaaacgcggatacgccgtcctaaagacagcttcggctttacagtgaccagaccggctgcctctgagaatagccggcgagggtcgcgcgganccggggtgtcgagcagatctatctgnctggngaggatgggagcttatttgcgctgttcgtggcgaatatcaataacttgtacggggtgaaacgtgatgagaaacacaggcggcgaggaaanacacaanagcgcggagcncnnnnnnnnnnnnnnnnnnnnnnnnnnnnnnnnnnnnnnnnnnnnnnnnnnnnnnnnnnnnnnnnnnnnnnnnnnnnnnnnnnnnnnnnnnnnnnnnnnnnnnnnnnnnnnnnnnnnnnnnnnnnnnnnnnnnnnnnnnnnnnnnnnnnnnnnnnnnnnnnnnnnnnnnnnnnnnnnnnnnnnnnnnnnnnnnnncnccnnnnnnnnnnnnnnnnnnnnnnnnnnnnnnnnnnnnnnnnnnnnnnnnnnnnnnnnnnnnnnnnnnnnnnnnnnnnnnnnnnnnnnnnnnnnnnnnnnnnnnnnnnnnnnnnnnnnnnnnnnnnnnnnnnnnnnnnnnnnnnnnnnnnnnnnnnnnnnnnnnnnnnnnnnnnnnnnnnnnnnnnnnnnnnnnnnnnnnnnnnnnnnnnnnnnnnnnnnnnnnnnnnnnnnncnnncnnnnnnnnnnnnnnnncnnnnnnnnnnnnnnnnnnnnnnnnnnnnnnnnnnnnnnnnnnnnnnnnnnnnnnnnnnnnnnnnnnnnnnnnnnnnnnnnnnnnnnnnnnnnnnnnnnnnnnnnnnnnnnnnncctcccgccccatgtggtgacgttaaaaagcccttgtcgggtttaaaaaaaagtccggtgggctccaaggcccccgccccctcgttctcaggctgggtgatagttgagggaccaaatcctctccggcttgcggttcctccagaaccagggggcgcaggacgctgctccaggcggggtccggccagttccactgctttccttcccaacccacgcgggtcctgtccactgcgggcgccccctcgggccgtggcctgcgctgaccaagggggcggtggggcccccggggccgcgtcatacctcggactcgaggctagagaagtgcgccgagcccctgcgggtgcccaggtccccgccccggtgtctccggtgggaagctgtgggcagcggcggcccccagtgcgcggcgtgcggacacctgcgagcgtggcgcctcgtgccgaattcgccacccaggcctcgctacctta

SEQ ID NO: 454605 - DNA, 1065 bp, Homo Sapiens
  misc_feature (519)..(519): n is a, c, g, or t
tccttaaaacccccaggttattttgaggaattgggtccccattccaccggaacctttccatgggtgggggctggcatgttcccctgggcggggacccctctggggcattgtggtaaaaggggggcatctgacaaggggtctgggctgttgcttcctggtggctggacaggggtttgctgggagaaagcagctcccaggttgaacggagttctggtgtcctggggtccgctggggtggagaagaccctggttctgggcagccgttgatcagcacaatgggtatgtccaccatggagttggtgatggatggggggcagctgctggcatgttctttggccagtggtggagagtggggtgttctgggttggcccatggttagggtggggtttctgggagcctggaagtcactgggtcttgtacacagggacactgagccaaggctgtggaggctggaggaagagttggctggactttccaaggatctggaagatgactgatggctggagttgctggagtgcanggagggactggctgcttccaaacatatagcctgacatcagacactgggctggctgacagcacagagatcctgctgccccgctgtggggccaggcctcccagccgcttctccagtcttggagaagccaccagcggggagcccaaaccatgggggctcgaggccttgctccccatgcaagggattgagatgctgggggaatttgggggtcgaggggagagaccctctgaggggggcagagggcgctggtgccccctgccctggttcccagagaagatgaggctctcactgctgcttcgtgtctctcgggggacgtctctggaaaggaggaggccaccactgcgaagggagccgaagggcggggtgacagaggggctggagcagtgctgggggccatcgtggcaccttgatctggcggaggtcacctcgatgtactttatgtccaaggcttcagattcctccttctttctcattgacatggtgctctgggccctcgtgccgaattcgccacccaggcctcgctaccttatcaccgttaggagttactgc

SEQ ID NO: 454606 - DNA, 1100 bp, Homo Sapiens
  misc_feature (289)..(289): n is a, c, g, or t
  misc_feature (298)..(298): n is a, c, g, or t
aggggaactgggtttttgtttccccaaaacattaaaaaggggaccattcagaccactggggggttggcttgacaagcacaagagatttcctgcttgccccggcttggggggccaggccttccaagccgggtttttcccagttttggagaaggcacccagcgggggaagcccaaaccatgggggggtctgaggcttgcttccccatgcaaagggattgagatgctggggggattttgggggtcgagggggagagacccttctgagggggggcagaggagcgttggtgccnccctgcccntgggttcccagagaagatgaggctctcactgctgcttcgtgtctctcgggggacgtctctggaaaggaggaggccaccactgcgaagggagccgaagggcggggtgacagaggggctggagcagtgctgggggccatcgtggcaccttgatctggcggaggtcacctcgatgtactttatgtccaaggcttcagattcctccttctttctcattgacatggtgctctgggccagctcagcctgggagcccccagtccctgggggaagcagctggaaggtggggtccagttccaggatcatctgattgaggctctccagtgagaagtcaatgtaggagtcaaggtcctctggggtccccaaggccttctcaccaggggacggcaggaagcaggtggctttggcctccacctgtggggcttgctggagtcggccagggggccccatgcagggcacgggggccatcagggcctgggctccccagccttccgtggtgtagtaagaacactggggtggcaggctggggctgggtgctgggtgcagggtcctcctgggctcatcacaaggcgccaagctgacagcatggcctcctgccagcagtgggctggacatcacctgggacatggtgggggtggtgacctctgcagtttacctctggtcttcaaccagcctcactgacatcccagagatctcacttgctaaccaggagctcccaggatctggtgtccacaggtgggcagactgttgccttcactactggctcctgggaccaagacgaccctcgtgccgaattcgccacccaggc

SEQ ID NO: 454607 - DNA, 1189 bp, Homo Sapiens
  misc_feature (293)..(336): n is a, c, g, or t
  misc_feature (558)..(580): n is a, c, g, or t
cacggaatcgggcggcgtcgggctatacacgcgggccgcgcgcacctgtgaggggtgcgacactatcgaggtcccgcccgcaatcacaggtgggcgggaggccggtggataacgcgtcgggggagtgctcgatgcctagtggggggcgggagtaaacacgggtcggcggcccaccataatccataaggttgtaaggcaacgagaagaagtcggtcgaggaaaataacgggggatcacaagggtggggctatcggaggacccctcgggccggctcacaactttaagcgttaccnnnnnnnnnnnnnnnnnnnnnnnnnnnnnnnnnnnnnnnnnnnncggtcggtgttcacggcacggcggttttggccctggcccgggggatatccttgaggaaggggcatacggtgcgttggcgcccccgctgcccggccaggttccggggaagatgtgaaatggggggcgggtccccacggaggagtgccccggggtcgggaacggcggccgggtttcggggtccggcattctgatgcccctgcaactgcaggcccccccggcaannnnnnnnnnnnnnnnnnnnnnntcgacgcggctgggccacgcgtcgtctgcagctgctgcagcacccacggcggccttatctgggggcgccgcagggcccaggccggccgccaggcccccacggtggtggttcagcacctgctcgatggcctgcaccaggtcgccgccgcagccctgcaacaccagctccaggacgcttcgccggtggcctgggaacacgcgtgtcaagatatccagcggcgtccgctgccgtggacccgagcctccgcccagccctggcgccggcgcggcctcaccctcttctttgtcagcctctgaaccggattcagagcccagagggctagcggagcccgggctgtcctcctcgccgccgccgccagggccagcgctgcctgggcagctgccacctgcctctttggaggcccgagctaggggcgaaccagaaaaggactcgccatcgccgttctccgagcctgagccgggccgcacctctggggacgacgtcccgggccccgagtctgcgccgtcgggtgataagggcttcaccggcggcggcagcgggctgcccgggcggcctgcctgcagcagcgtctcctcgtgcggaattcgccacccaggcctcgctacctta

SEQ ID NO: 454608 - DNA, 2790 bp, Homo Sapiens
  misc_feature (1553)..(1553): n is a, c, g, or t
  misc_feature (1994)..(2002): n is a, c, g, or t
  misc_feature (2110)..(2124): n is a, c, g, or t
  misc_feature (2363)..(2373): n is a, c, g, or t
  misc_feature (2453)..(2453): n is a, c, g, or t
actcttgtgtatccccaatgcagcggaatcggtgcaacggtgtggcagtgagaaccaggacaaccctgaggacctgggaacagtccctgctctatcagggagagcgtgcttgagactgtggccaatgctccaaggggccatgcgaagagcctgctgccatcagcttctttggggcgctccggatcccagtgcgtggtcgagttctctctgtgtctgctgtttgccaagctggtcagttacaccttcctctactggctgccctctacatcgccaatgtggctcactttagtgccaaggaggctggggacctgtctacactcttcgatgttggtggcatcataggcggcatcgtggcagggctcgtctctgactacaccaatggcagggccaccacttgctgtgtcatgctcatcttggcttgccccatgatgttcctgtacaactacatttggcaggacggggattgccagctccatagtgatgctgatcatctgtgggggcctggtccatgggccatacgcgctcatcatcactgggtgtctctgctgacctgtggactcacaagagcctgaagggcaacgccaaagccctgtccacggtcacggccatcattgacggcaccggtccataggtgcggctctggggcctctgctggctgggctcatctcccccacgggctggaacaatgtcttctacatgctcatctctgccgacgtcctagcctgcttgctcctttgccggttagtatacaaagagatcttggcctggaaggtgtccctgagcagaggcagcgggtataaagaaatatgaggccccaattggaaccagcaagcatggagggtcccagttgggtccccaagtgctccccatgggcacagacacatggaaacttccacaagcaggggaggcaaaccctctttattgaacattagccagtccagactcagacccagggctgcctaaggacacagagattctccatgggaaggggactgccaagccatgaggaaatagaagattccggggcctgagctctggaagctgcaagcaaaagggatgggactagggcttgagttgtgtctccaattttgatacggaaagggtatgctcacactcttgcttgttcagattccaagacagaaggcttcacaaggccaacgcctggaaaatgggcatctctccctcccatgttaagctttaacctctgtaatctgcctgtatctataggtgggcatctcactccatcaaaggagcccagcctctctttgtccctctaccatgcaacagtcttctctgtgcatttccccaagctgggccctcttctactctccatttaggcctgttgataactccattacccacccatcactgctgttcctccagggccagcactcgggcgaggcaggggagctgccttcggtacataatttgaaggggcactccctcttgggcacatgccggccctgagtgcctcccttgcctcactctgatcccggccccataatgtcctcagtggaaggtgactgggggccggtgctgtggggagagtaaanagaggggttggcatgactaaaaataccagtatgtgtattaagtattttgagaatgaaatgccaaggagtgcctactgtatgccagctctgctctaggaatggagtagacagtggacacaagaaggacttacgccctgagcacaggtgccaacggtgacaagactggcaagacgtgagggcatgaatggttcattcaggcagctgctgcaggtgtggtcacctggtgccatctgctgctcccttttccacttttctatgtcctccttccaccccaagtcccggatcactcgctgttttctggctagctcttggcatctccatctgagcctaaagttgcccactggcaccaatagattctgtttgacctgctgtgcccatgcttatctttgtcggggcttggcttgacagctagtgacgctgctatggcgtgctcaaatgcgnnnnnnnnnacaagttataactattctgtcaacactaagagaacctagacgaaaacggaacccccctttgccgcgcactcaacagtcgggggaacaagatcactacattcataagtnnnnnnnnnnnnnnntgttttacgcgaaaaatatgtttccaaccctccccgccaccatgcgctactcgaccaatcacccacgcccaataaaaccctccacccccacgcacccttcataccccacgtcctaacctcctcgccacgatgtcatctttacgcacgaagaccacactttctcacttatcccttttttctccaacctatattcagtcccgaaactgcagtctggctgaatatatccaaacatgcaaccnnnnnnnnnnngtttccccccctttatacttctcttgtttccccccacgtcctatcgtcacagttctatttatattcccgcctccccccgnttaatttattctaccccaccctttaccacccacccactaacgtacacacgaccttatgaagactctcacactatgattcccaccccccctatttatgatcgaatgtcacggatagaataccggcacccacgaaggtccggccttgggtggctactcccccatccccacgatttattctattgtgtcacacaggcccacactaaatgtttcgcgcgtgcaatggtagctccggtagagactccctaggcactgctacctcaacccactgtggcttccctcacgacatctcataccgcgaacgtcccgcatacgtatatctctccaacacacccccacc

SEQ ID NO: 454609 - DNA, 841 bp, Homo Sapiens
  misc_feature (147)..(168): n is a, c, g, or t
  misc_feature (711)..(797): n is a, c, g, or t
ggggcacatggggagaggggggatttttaaggggaaaaaattcccccggttttttcccaagggggtttctttttatcccgggggggaagggcctttttcaaatccctttggggtccccttagttcccccctattatttcaggggagnnnnnnnnnnnnnnnnnnnnnntgtgccttgggggggaggtgggagggcaccgttcagcccccagcctcgccctccggggagcttacagtctatcccctctgggcacagggaggtggggaagtatgggcacggccttgtctgggagcctcaccctgttggctgaaccatgatctttttcaagtaatgcctacagcttccttcatatcctgccagcccaaaccagtgccaaggtcatcatgggcttgtgtggcacagtcagatttagtgaccatccccactcccacattggttctgtcttcttgcccccggtgctctggtccctagcacaggctgctgatttggggactcgggggagaatcctccaccttctgcaaatgcttagccatgaaatgacgggtgtttgcctgactatgatttcatgaatcccccatgaaatgatgggtgtttgcctgattatgggccaacagtgccccccactcctcgtgggcactcctgggatcagcagccccttcctagccttcacagggactctaggcctccatggaaaagaaagaaataaaaaannnnnnnnnnnnnnnnnnnnnnnnnnnnnnnnnnnnnnnnnnnnnnnnnnnnnnnnnnnnnnnnnnnnnnnnnnnnnnnnnnnnnnngccacccaggcctcgctaccttaacaccgttagtgagttactgc

SEQ ID NO: 454610 - DNA, 1306 bp, Homo Sapiens
ggggttgtgcggctttcggtgtgcgggggtaacacgcagtgccgtgcagcggtatgtattggggtgtgaagaatggtgcgagagactaataagagcgtgaccgcgttggagcgggcgggctgattgcgggttggctgcgcacagtcgtgtgtctcgcactcgcgcgcgcgtggtacgcgttataatggtgagggttaatgaatatatatgagcggagcaaagggaagagaataggaaggcggtgagccagaggcgtaaaaacacgtagagcgcgtctggcgagggcgccttataggttatcgcgtgtggggggggtcgctctaacaacgggtagtagccactcgacttatattccgtgggggcgggttcgatgggagcgagaaattgttgggacagcgggtcggtcgaggtgagggtgtatatcgggtatactcgttattcggagcgcaatagctgggcgaggggtggtgtatagcgcctcggtctcggtgcttggtggtttttaaggtaggctgggcgtgttggctcgagttacccgttaaacgttgtgtgggtcaacatcgtgcggtgggcgtggtgagtggggtaatagcgtacgaggggtacgccagggggtggatgttccatagggtctcggggggggtcgtggtataggtatgacgctgcgtgggatcgctcttgatgtggggtcttctgggcggcggtaggggacgtttcttagggtgatggtataggaaggggggatcgacgaaaggggtgagggggtcccaatttggggaaatgatatacgtggccggaggtggtattccgggaggctaggtacgcaagcggtcgacgacggtgcgcatggaaagggtggtgattcggccatcaaggttaacgggagcccttccacccggtagaaaggcgcatggccgatggagtggtgggggaaccccccttctccagctgctctactgccacgggctcagtgggcgccggcgggtcctccacgcggctcagcagcgcctccacaaggccgggccggttgggcgggcagacacctatgtggtcccccggctggtactgcagcccctcctggcctccggtgtccaggcgcaccaggatggtggccctcgtggacttgctgctttgcaggttttccactgagcggattgtagcctggaacatcttccgcctgtgcacgtggatcagacctggcagcaactgcaggccctcggcctgggcgctcaaccggtacctctggcgcttccagctccgttggggctgaagatgtctcggcctcggtctgatttcgccacccagg

SEQ ID NO: 454611 - DNA, 1148 bp, Homo Sapiens
  misc_feature (128)..(128): n is a, c, g, or t
gaaagggggggcttcctttttcaaatttccaaaggggggtccaaaatcattaagcctttcctaaaaaaaagtcccatcccttgtctggggtcttcatcaaaggagcctcaatcctttaattttttgtnccaggatgttcatacactaaagcctccatagactccatttccacttttggactgaggttctccttgatgactctgcttgggaagatttggtgcccacctctaatgatttccataggggtttggactttcccttgccaagtcccttaaggtaagtgtctttccccctgaagattcctgagcttcaataaaatgtatccttagaacaccctttggtacaggaaaccgcaactgagctatttgaacttcactgacaagtggaacggtgattcgattgggaagcaccagatagtttgatattatatccaaaatgatagtatctgataaaccattcaatccagggacatccagaagattcgtcagtcctgtccagttaatttctaaaagtggtttcctaaggaagaagatagacaaagctccaactaagggcatatctccaatcaacggttccaggatcacccgcatggtaccatgaatctggatacttttcacaccagctctacaaaaatatcgtttgatctccaaatcaatctcacaatttcctacaaaactaatctgaaggtccaaaataatttgccttttgtctacattttcagtgtataccttaacaccattgatcctgaggggctgctggcccacgtcgaccttcgtgaaactaaaggtgctaaggtgggtgtttgctccccgcacggctggttctatagtttctcgaaacaacttctctataaattggcaaatgaaaggccacatgtgttttacagtcttatttagccattctgctctttcagtgtctggaaaatgaacctgcaagcggagcactggtcacagctgggcatctctgggcctgtgactcagacggctgacccgaggacatgcctccctgcccgcccatgtccagtgtgttcactggcctctccgcattccagcctcacaaccacagcacagagtcaggctcaaccctcgtgccgaattcgccacccaggcctcgctacctttaaccgttgagagttattgcccgggtca

SEQ ID NO: 454612 - DNA, 1031 bp, Homo Sapiens
gaggcctcagaactgcaaactcctgcgtcggtctatactactcggccatggccacatcagcagtcaaccctgcactctttcccagcgatcttggatgtgtccccaggatccgtcacagtgttccaggcaacctggacttgtcaaagtcagcacctgaaggagaggccacctgccattccccctgggagttttctgttgtcagcaggacttatggttctgggtctcagagcttcaggcctcactgtccttctgccacggacgctcaaggttcctgggcagaccagcacctctggaggacaatggacaaaatgtctcttagacctgttctggctgaagggctatctctggcacctctgagatccctaggtcctgccctcctggtccgtgggccaggatgtgcagaacaaccactcaagcctttctggcccacctggacagtgcatttacctgtgtgctgcgggaggcagactgcacagctgtcctagggtaactcactctgcagcccttgaacgatggcactgccctcctctggcactcatgctggcctgtgcccactgctgcctctccatccctctctcattggcctatacacctcttaggacctttgtaatggtgtccatgcacctttagaaggacttcagaggccctgccaagtctagcatgttcctgtctccaacaccgctcctgcacatgcagagcagacagaaatacccgaacattccccagcctctctgcccagtatgctcatccacaggttttctcactgctatgaaccaggcccaaagcccaggccctgtcacctgcgtatgccaactcatcccaccgtctcgtgctgttgcttcccgtagatggtaagcacctttgcagggcagccattcttgatcagaactcgcatctcctaaggcctgggcacaactgcagatagccttggtaatggtcaagtcagcgaattggcaaaataccagtaaggaagaccactggatcttttctaatacatcccccttcacctattatagaggaattatcttcag

SEQ ID NO: 454613 - DNA, 738 bp, Homo Sapiens
ttacaataaaaagtcatcaaaaatcagcttgccagataactggaaaataacgacttacatctcatatatatggacaaaggaccaattacctccaaacataaacagctcctagaaattactgcaaagatcaacaacccagtagaaaaatgaatgaagttcccagaacagaataacacgaagtggcccttcaaaaaaatgaagagaggctcagcctcttatggtaagacaaagagacaggattttaaagaacctaggcctcttcctatgagttcccttaaatatctaaggccagatcattctttacttcctggcttagaccctgccaagggcatgcccagcatactcaggtgttatgtgtccttgtggactcaagtcataattgtcctgatcttgttggactgagttacggttagacgtccgtccagtcaaagagcaagtcttggaggatgtacaaagcatgcaagcagctacattgcctggagccccacgatatacgtgcgtatcgcacaagatggtgtgcacaatcagtgccaggccagtggaagaagccacaggcgtggacgtgattccgacatgaggcagcttcacaattgtgtggagtatgcgttgtacctgccgaagtgtgcagatgatgtcgctatggggtaactacagagccctgtagcaatgagtattcaaaagtagatgcgcgttatcaagaattgacgctgtgacagccattcttcgagaagaatccag

SEQ ID NO: 454614 - DNA, 998 bp, Homo Sapiens
tgggtggcgaattcggcacgaggctaagattgctgccgcatttgcttgttaaactgaaagcatgtttcttgcaaaggctctattggaaggagcagatcgaggtcttggagaagctcttggaggcctctttggaggaggtggtcagagaagagaaggaggaggaagaaatattggagggatagttggaggaattgtgaattttatcagtgaggctgcagcagctcagtatactccagaaccgcctcccactcagcagcatttcaccagtgtggaggcctcagaaagtgaggaagttaggcgatttcggcaacaatttacacagctggctggaccagacatggaggtgggtgccactgatctgatgaatattctcaacaaagtcctttctaagcacaaagatcttaagactgacggttttagtcttgacacctgccggagcattgtgtctgtcatggacagtgacacgactggtaagctgggctttgaagaatttaagtatctgtggaacaacatcaagaaatggcagtgtgtttataagcagtatgacagggaccattcttgggtctctgggaagttctcagctgcggggagctctgcaggccgcaggcttccagctaaatgaacaactttaccaaatgattgtccgccggtatgctaatgaagatggagatatggattttaacaatttcatcagctgcttggtccgcctggatgccatgtttcgtgccttcaagtctctggatagagatagagatggcctgattcagagtgtctatcaaagaatggctgcagttgaccatgtattcctgaagtggggactgagaagtcagatcctcccctggaggacaggactgaaaaccttggccaagctgtaccacgttgctgaataccttgggccacagcttcccttttccgggaggcctctttccaacccctaacttatttctgaacagtgggctgccctttttctggcggaaaataaaacggatattttccgc

SEQ ID NO: 454615 - DNA, 632 bp, Homo Sapiens
ggtctgtttccattccttcattttacagattagaccagcgaggcacagagaggtttagcaccttgctccagtcacacagccaggccccggtagcagttctggaggaaaggcccgcttgggcttgggcatggtcggattgaactggggtcagaggccaggctggagtttcctggaggaaggagaaggagtgatcaggggcatgcaggctcctggtgatgtctgtgaagccaagaccttggtcggaccacggacccttgcccccatttaactgatgagaaaagtgactttcacgaggagggcatgagctctacctgagatcagtagtagaccccgttcagaatgcctcccagagctccaggcagacccccaggacccctgcttctcccacctgcatccctagtagtatcatggccaggatgcatgggggcccgggaggccttgggtactcagggccagaccttgccacttacccgtgcttacgccccttaaaagtctctggtgcctcaggtttccccatactggcatgacgaagagggcatgcacgccttcagccgtcccgcccttgcccagatcatgaggaccaagctgcagtgagctggtggttagagaataccaggctcccgggaatctca

SEQ ID NO: 454616 - DNA, 799 bp, Homo Sapiens
aatatttttgtggctttatttctaggctttttttcttaagatatacaaatacctatgcttacatattacagatatttttacaaaattgggatcacactgtactatatatgtttctttgtgatgtgctttttctactttagtttcccatcactgaactctacaagactccattttcaacaataaaaagttggttctataattccttcttcagaggttgccgtgagctgcccatgactgcaacagatgctgggagcacctgggaggcggctgtcatgctgttgggagaggacactccaacagccacagcactgatcctggggcctgccatccctgggtttcagcctttgtaaccgtttcaggtccagcatgtggggactcagatggggctcaactctgaatgagttaggggggaaatgaatcagcaaaaggaagccctgtgcccagctcctggtgctggtccagcaatgggaatgtcggaatggggaggccagttggagacgagagccacacaggtgctcatgggaaagccgcatttgctctccaggctgcagggaataggacgcctgatcagagtcactggctccatttcccgagagaggtcagagttgtgcccgaggctagccaggtgcagcttgcctgcatggtgcgtagctcgaaatgcaggtggccttgctgtgggggcattcgacagccacaggtctaggggctcccgtccccttctggcctgggagatgcagggatctggtacttcgtgttggtttctgcccacagtgtgctggccgtctcatggggaccctga

SEQ ID NO: 454617 - DNA, 588 bp, Homo Sapiens
  misc_feature (126)..(295): n is a, c, g, or t
gtgtgcgccactaggcccagcttgaaaaattttttaatgcatgtggtaatccacaggagatcacatttagtatatgaccaagttaattaagaagtcaaaaaacacgttaaatttaagcagaataannnnnnnnnnnnnnnnnnnnnnnnnnnnnnnnnnnnnnnnnnnnnnnnnnnnnnnnnnnnnnnnnnnnnnnnnnnnnnnnnnnnnnnnnnnnnnnnnnnnnnnnnnnnnnnnnnnnnnnnnnnnnnnnnnnnnnnnnnnnnnnnnnnnnnnnnnnnnnnnnnnnnnnnnntaggtacatcagcgaggcgattagagcacagtgagcagcagagaacaccgagggagataggaagcacgagaggtaagcaagagagatagaagaacagagagaaaacacagaacgatgaaaggcctagaggagggaagagaaacgaagtagagaaagacaagaaagacaggagcaagaagaagggacaggaagaggagatacgatgaggaaaacgagaggcggagaaaggaagatcaggagcaggggaaaggcgaagagagcgagagaaagagccaagggaagggaggcgacgg

SEQ ID NO: 454618 - DNA, 873 bp, Homo Sapiens
  misc_feature (89)..(107): n is a, c, g, or t
  misc_feature (742)..(742): n is a, c, g, or t
  misc_feature (751)..(751): n is a, c, g, or t
gtgtttctgttgatttattagcgagtgatggaaacgcagctggacccatacagaacacacgtgtagctggcacacacctcgagaaccgnnnnnnnnnnnnnnnnnnntgaattcagtggttcagtcccagagttttcccgctgtgagctgccttggtggatccagcccgttagccccctctcctgcagcagagcaggatgtggaaacgctgaccaaaggccaacagagagcctgagaccaatccagaggagaggcagcgttctctcctcctgcagagagaagtcccagggccaatgaagcaaccttctccagacacctaatattaaccatcacaaggtggatcaccatagtcaaccatgtgtattatgggaactacttttcacccttgtacccagtctccctagtacccaacaatcccccagatactttcgtctccaagaaattccaggaggattctggacaaggctggatttctgcatgtcagatcatggggagtttataaggctaagggacaactctcattgcttccacatgcatctagaagctcctactatgtgacagctcacgctgggtgagggtcaacatctgggcaggagcttggccgggtgaaagatggttccgccctgatctaagtggatccacagctccctttttatgggggaggctttaggaagaatctctcctgcctgtcctgcgtggagtggtctggttttagggttgttcctctgcagagaggaagcanttggaccanagcagaatcatggatccttcctctgttaggatgcacaggacaagatggctgatgagatacgtggatgtttctagaccccaatgtggatttgtccccaaatggatgatttcagagtgagaagc

SEQ ID NO: 454619 - DNA, 1034 bp, Homo Sapiens
atctgttgcatgtgccttgctcgctgcagattcgccttggtctttttggccacttttcggtgtccatgccgtgtggttccctcatgttgggccagccccgttgttgtgccatcaggtttatgggtccggaggcccgttgggacacgcgtccagtttccctcggggtgacgtggtcaccagtatgttggaagttcttggaacccggtgtgccgtgcgtggtgaccgaattctgcctgcccgacccgtctcccttataactttggcatatctcgggcataaaaaaggatcactttggaggaggagcactgcgtaagttcctctttgttcaagtccagagagttcgtgatttttcaggactttgaagttctcttctgagagaacctcatgagaatatttggcataaattccgctcggactgcgaatagttgcaccggcccagcaagttgagtttgcagagatgcaggttatcgcagggtctctggcagtacttgcggacggcagacccgggctcgagtggtgctcaccaccgatcgggtgatcccggcctcgccgccggtctcctacaccacaaagcggtcgggcccggccacctgcagcacctcacagagctgcggctcagacagcgcgatctcctggagcagcgcgtccagggccatgcggcccccgtgggcgcacaggattttggtgatgaagcagcacacctccgggtccgccatggcgcgctggctgtgctggctctgccgcggcgcgggactcggttccgcggaaatcggaaatcgaaacttacaagtgtccaggggcgggcgcgggcggtgctactgctgggcgcgcccggagtcagcgagggcgcgctctccgtcgccgttagcccagcccagcgatccactctcggctctcaggtcaagaggctagatctcaccgaccgggtcctagtggcaggtttacagccggccgcaagggcaactgggtggaaagaaagagaacgcgcgggcaaatctgctggtgaccgcctggggtggccccctctcggttcc

SEQ ID NO: 454620 - DNA, 1051 bp, Homo Sapiens
  misc_feature (42)..(79): n is a, c, g, or t
tagtgtttttgggcgcccaccgcgtggggggggttttcagannnnnnnnnnnnnnnnnnnnnnnnnnnnnnnnnnnnnntttttcttttccctccaggtttaaggggcccccgagggccagttgggaaaaacgaccggttcccctcgggggaaaagggtccaccgaatggggaagtctggaaccccgggtgggtgccgggttacaaaattggctggccgaccctcctccctttataacttttgcatatctcggggcataaaaaaagggatcaccttggagggaggagcactgctagttcctctttgtttcagtcccagaagagttcgtgatttttcaggactgttgaagtttctcttctgagagaaccttcatgagaatatgttgcataaattccgctcggactgcgaatagttgcaccggcccagcaagttgagtttgcagagatgcaggttatcgcagggttctctggcagtactgtgcgaccggcagacccgggctcgagtggtggccacccccgattcgggtgatcccggcctcgccgccggtctccaacaccacaaagcggtcgggcccggccacctgcagcacctcacagagctgcggctcagacagcgcgatctcctggagcagcgcgtccagggccatgcggcccccgtgggcgcacaggattttggtgatgaagcagcacacctccgggtccgccatggcgcgctggctgtgctggctctgccgcggcgcgggactcggttccgcggaaatcggaaatcgaaacttacaagtgtccaggggcgggcgcgggcggtgctactgctgggcgcgcccggagtcagcgagggcgcgctctccgtcgccgttagcccagcccagcgatccactctcggctctcaggtcaagaggctagatctcaccgaaccgggtcctagtggcaggtttacagccggccgcaagggcaactgggtggaaagaaagagaacgcgcgggcaaatctgctggtgaccgcctggggtggccccctctcggttccctcgtgccgaattcgccacccaggcc

SEQ ID NO: 454621 - DNA, 896 bp, Homo Sapiens
gctgggtggcgaattcggcacgaggcccagcctcgccccgctttcctaatgtccgtgatgatttcgttattggcagggaagagccaggctccctgcgctcccaagacggggcgattgggagggggttctggagctcacgcctggggtcggcccagcgggggtgaccccgcgccctcgccggtgcaaggagaacaggtggttcccgccggggcagggaagcgtggacggtgtgggctcaggcgcccggcaggcacgcggggcctctaaagcttggtcgctgtcacagatcgtgtggttgtttcttccgtccccgccacgccttcctcctgggatggggattcattccctagcaggtgtcggagaactggcgcccttgcagggtaggcgccccggagcctgaggcgggaactttaaaatcagacgcttgggggccgggctgggaaaaactggcggaaaatattataactgaactctcaatgccagctgttgtagaacctcctgggacaagcggtggaagtcccctcaggaggcttccgcgatgtcctaggtggctgctccgcccgccacggtcatttccattgactcacacgcgccgcctggaggacggaaggctgggctggacaacgccggtggcgcctttgcctgggggagcgcagcctggagctctggcggcagcgctgggaagcggggctcggaggctgggcctggggacccaaggttgggcgaggcgcaggagatgggctcagggttctccagagaattcccatgagctgaccggagggcggcgggcagtaggcaccgggcccccgcggtgacctgcggacccgaagctggagccagcactgcaaatgctgggctgacccaaatgctgtgtccttaaatgtttattaccgata

SEQ ID NO: 454622 - DNA, 959 bp, Homo Sapiens
  misc_feature (21)..(21): n is a, c, g, or t
cctgatcacctgaagggtgtngattttagcagagtgagagtggctggtggtgatgtgggcccaccccctgaggcacagagaagagggagacaggtccagagagggatggggcctccacgcaatgaccatatagaccatctggcgggctcaaggccgggggctttgttcctctccgagtccagaatcgatcctctagctgttcctgtcgtacctcggggtcagggcccggcagtggccaaggccctggcccatcttgtgtctgtgtcactcccgctcccttccagagtgggcgctggctgctgggatccctctcatgcggtgggtcccggggacacttaggagcccctgggtctgagagggagaagcctgggatgtagggaaaacccgtttacacccaggtcctactccctagacttttccaagttgggacatggacagaggcaggctgctgactgggatgctggtctccccagcatcactgttcccagtggagcgtcaggtcaggctcatgtattcagaccgagggttcggtgaggctcagagcaacatgaaccaagtgccatgcagagggttagaaaagtgtcgagcacaggggtccccagtgtctggagtctggccagagtcttcagagatttcgtacatgctctgaggggatcgtcctggctctgttagcatacttgcagggacggtagagctcgacgctctctcggggcaggcgtgtgagtttcctatctgttccagaactagtaatcggcaatctctcccaggatcttcttctttactccgcttggctttggtcctggcacggagggtagcatcacttcttggcatttagtaacatgctttaaagcacttgtaaggagctgacaagggaagttttaagggctcctggatggtgttgcttcaacacccggctaagggccaactcaacatcaagagcagagcaatgcgggtgtgga

SEQ ID NO: 454623 - DNA, 1001 bp, Homo Sapiens
attttctgttcaccatttgggatttaatctgttccattctgagcctctctcagatgtctttttggatctatcttcacactcgcattccattagtctggtcccaagcataatgaatgccaaaaaccattcccattctccacttgacttaaaatcgctcacattgacagactcattggttgcgcattgttcctgagcccccaaaagaaggcctttcttgcagacatttgccatcttgcttgcactttagagcatttcttagctggaggacttgaggcaggagatgagtcaaccacactcacatcatccagggaaggctgattgtaattgcaagaaagagtctgggcaagcttctcaatatgaaagtgcaggataattgtccaaattaggccaaggataatggatgggtttccatcaatgatatcagtaacatgaatatttattagcttaattgatcggtttcttaggaatgtcaaggcatgttctatattgattctacactggaaggtattagatcctttatcccgaggcaactgttgcccagaaagtacttctagcagatccaggaggacatgcccctttttaatgtctgtgaataggtcggatataactgagggagaagtgtgcctggccaactgtgagtttatccagcacgtgaaggctttcttctgggtgtcttcctgttcagcttgcaatgaaatatggagatcgtcgatgccccaggaaccctgttcatcttcggtgggaagctcaggactagatgccattctttgactcaatggagattatatcatgtccatctcagttgaagaagtgaacgtccgcccggccgaggggcaagggcgcgggccggggccgcccgaggtcggcgccccgcttgcctggctctctggatcgcgccttttgctcgctctccctctcgctttttcaggtccggccgaaggctctgggcgcagctgagcgcgctccgcctcgtgccgaattcgccacccaggcctcgctac

SEQ ID NO: 454624 - DNA, 1464 bp, Homo Sapiens
  misc_feature (35)..(35): n is a, c, g, or t
  misc_feature (154)..(154): n is a, c, g, or t
  misc_feature (176)..(176): n is a, c, g, or t
  misc_feature (251)..(251): n is a, c, g, or t
cgcatagcatggagcacaataaaagatagataganatgatagagtaagcaaaagaccaatagaatgggatgaggaacgcgagatgagaaacgacgatagagagtctgtagaagctgaacgatacgtacgagcggcggcggtagcgatcgtgtgncgaacagtgctgcagtcggaantagaggtatgtatgacgcgagggactaagagattagcattgagcaagacgtctaggacagcagcgatgtggtganatcgcgtaccgatgtctgaataaatgaagtggcaaacagataacgataacaggaagaatgagtcgagaatatgatatggtcgatcaggaagaaggtgaagaagcaacgcgagagaacacgagtagggaagcgatatacgtgcgtctggggtgaagaagtgagtggagagatgatgtatcgggatcgagataagaatgaggatatcgtgtaagtaacattcagatataagacatattagggaggacgagatacacttataatagaggaaatggacgagttgaaaaggaatgcacgaagaggtagaacaggagagacaggggacatcagcagacgtcgggagcgataggagagtaatcaacaatcagaggtcgagagaggagggaagacatgaaatgagagatgaaggagggagagggtcaaagataaaataggagaaggaggaagatgaggagcaagagaagaaaaagtgatgcaagaatgaggtaaatcagatggatcaatataatgatatttatatgaacgtagaagagcagtatagaaaaggtggaactcaaaaaacaaaggggaagaagtaggatgtgatggggggtgagaaagacgacggggagaggcgtggggggatatgagaaatatcggctgtcaagcagcgattaatttggataaggagcgcagatataaggacaaacgtggaatggatacgggggagcggtgttgtaggaatatgaatatgcagtggagggagaggggggagaggtagaaggaataaaaaaagagatagaatggctatatagagggaatgagttgaaaatagtggtgcaacataaaccctgggggaggaatcacggcagttgtatccaagtacgtagtcagaagaggggaatgattgcaagatgaattgggaggaagaaagatacttggaaaaggtgatgtaagtagcctttataacaggaggagagatatcagccgggagagaaagatgcatctgggcgggaacggaataatatagagggagcgaacacaacagcctccgggaagtcgcaggacctgtgttcagggaactagcggggcccctccggggacaccggcgctggtgggcgcggtctccgggctgagttcaggcctcggggccggaggagtcccacttgccaggggcgcccgccgtgtgcgctcgactcggggcttccggccctcgtgccgaattcgccacccaggc

SEQ ID NO: 454625 - DNA, 1001 bp, Homo Sapiens
  misc_feature (81)..(299): n is a, c, g, or t
  misc_feature (327)..(851): n is a, c, g, or t
cttttttccgggtttgtattgttcgcagtttttattgttgagatgacttgacgcttgtgcccagctgtatccatggccatnnnnnnnnnnnnnnnnnnnnnnnnnnnnnnnnnnnnnnnnnnnnnnnnnnnnnnnnnnnnnnnnnnnnnnnnnnnnnnnnnnnnnnnnnnnnnnnnnnnnnnnnnnnnnnnnnnnnnnnnnnnnnnnnnnnnnnnnnnnnnnnnnnnnnnnnnnnnnnnnnnnnnnnnnnnnnnnnnnnnnnnnnnnnnnnnnnnnnnnnnnnnnnnnnnnnnnnnnnntggtctgttatttctatagtgtaaaatnnnnnnnnnnnnnnnnnnnnnnnnnnnnnnnnnnnnnnnnnnnnnnnnnnnnnnnnnnnnnnnnnnnnnnnnnnnnnnnnnnnnnnnnnnnnnnnnnnnnnnnnnnnnnnnnnnnnnnnnnnnnnnnnnnnnnnnnnnnnnnnnnnnnnnnnnnnnnnnnnnnnnnnnnnnnnnnnnnnnnnnnnnnnnnnnnnnnnnnnnnnnnnnnnnnnnnnnnnnnnnnnnnnnnnnnnnnnnnnnnnnnnnnnnnnnnnnnnnnnnnnnnnnnnnnnnnnnnnnnnnnnnnnnnnnnnnnnnnnnnnnnnnnnnnnnnnnnnnnnnnnnnnnnnnnnnnnnnnnnnnnnnnnnnnnnnnnnnnnnnnnnnnnnnnnnnnnnnnnnnnnnnnnnnnnnnnnnnnnnnnnnnnnnnnnnnnnnnnnnnnnnnnnnnnnnnnnnnnnnnnnnnnnnnnnnnnnnnnnnnnnnnnnnnnnnnnnnnnnnnnnnnnnnnnnnnnnnnnnnnnnnnnnnnnnnnnnnnnnnnnnnngcactccagccacgctgcagtttccatcaccaccaccaaccacagcgacacaagccgcagtcgtgcggaccccagcatccagcgtgtggcaggtggcgtcccctctcctgatcctctatgccgggaatggagcagctactcgggaagacc

SEQ ID NO: 454626 - DNA, 561 bp, Homo Sapiens
tcgtgctcgtcctccagctctgcctccatctgcccgcacctgtctgaccagctgcttgcttcgttctcctcgctctgctcgtcccggcccgtgcaggtcccgcgtcgaactggcgccttcatcggcctgcaggcttgaccctccaggccgcagctcggcatcttcggtgcccttcagctcgtcctccagctcttccagctgcgtcttcatctcctccacctgctgctctagggcccgcttggacttctccagctcgtggacactcttgcccacatcatccttggagctcataaggtcctccatctccgtgcggaactgcttgttgagccgctccagctccgccttctgctccatggcttcctccagggcccgggccagcgacagagccttggtctccttctctcgggcctccgcctcagcccggtcgcgctcctctgcctacttggcagagatggtcttctcctccgccaggagctggtcaagcttcttctgcttcttctccaggttgcacgcgctctggcgctggtggtccaggtccaccagcaggtcgtccagctcctc

SEQ ID NO: 454627 - DNA, 807 bp, Homo Sapiens
acccccacggtggcagatttgctttagggttcctgtgtaactgaggcgcttcacccacagtggcctctccgtgtggctttcctggtcgacggtgtcagaaatgtttcctgcagcggcaggcaggtgcagcggcaggcagggttggcggggaggagctgggtgacaggctggtcaccgctggcctttggaccctgcggggcgaagcgctttgggattgtagcaattctgtgtgaggagtgcaaggtgaccagtcgtgaggtttcctaagcagccccagggtgaccaggcaagcgtgaccctcgcgaggccccgaggagccagaagccacatttgaccgcagtttagagacatgacgtggccgtgccttgtgtccacccaggtgtgtgcagctcccgagtcacacctggctgggcctatgcggccaaggctgtctacacggcactgctgaacctcacatccgactgctcggtgctgtctggaatgacggccttcagggcagcgtgacagaagcggttcagggccggcaaatttgttttctgctcaatgtacagcctcagcttgtccctgaaggtctccccgagaaagctgtagatgagggggtttaggcagctgttggagaaggcggcgaggttgacaatgtggcccgtgagggggtgggcatggcggaaagactgcttgcagggagcggccccaggctgcgtccgctgcaggaggtgcacgctgatgaagacgttctccggcagccagcagacgaagaagaccagcaccaccgcgaggatcatgcggagcgccttctgccgccggggc

SEQ ID NO: 454628 - DNA, 1084 bp, Homo Sapiens
tccttccttcccccccaagtttaggccaatcacagggacccttatcccaccccaaggctcccgggaggcctgcccaggggctattcctgggcaaaccttaaacttggggaacgccttttctcaccttcctgtttccaagaatggtgaggaattaaaggagcatttggggaatttcacggcccattctggagatgtaactgagagggggagtccccaggcctgtctggccttctctgggtaaaatgttttgtgtcaaagggaaatggggatggccccggggtttgcaaatcgttcttaattcattctgattccctccttttaaaaaacctagccctgcagcccttggggaaggggtgtgggtcaggcttcaggaggctgtgcagggaggccaggcctggggaagctggagggagagacgcccacctaccacccagagactggcgggcctcctgctggaggagaccccgaggggcttaaagaagccaggcaggagaatcagggccccagctcttctccgagagcagccgatcaggaatgccttctccctgcgccagctgtcactcccaaggggatgccttctttggtttcctttttattgcagaggggccaccagggagtgggcaggagtgaggggtgagagcctgggggccgcagagccaaacttcgcctgattaataacccagatgttcccgtccaagcacatggaggtcccgggagctcttgggaagtcagaccccagctcggtcccgtgccaatctgcagttaggaggcaggtcctcggtccgggttgacacgtaggccacagtcttgggcgccctgatctggctggatgggaagtttagtctccacccagaagaggagctctgaactcctccacgttaaagaaaaagttaggcggggtaaactgcaactttctttttaacccgaagtgatcaaacctcggggcccctctgcactggttcttggagcatggccaggtgcgggcacctggggtgggaacagtggggggaccagggtgggcccctgggctccgaggccgccccaggcccgcctcgtgccgaattcgccacccaggcctcgctac

SEQ ID NO: 454629 - DNA, 1065 bp, Homo Sapiens
  misc_feature (302)..(302): n is a, c, g, or t
gagttgtaatgggggccttgggcgccaggcggccagtgaccgaggcttcgccccaaccttcttgggggctttgtcctgtacagcttgtgggggatgcagctgggcagcagctcctggacagcctgctctctgctgaggcgccgagctgcacgtagcagtgccgggccagcagctcaaccagctcttctcctttctcgaagctgtactcgccagaccagactcctcggaggacttggcggtaaataagctcggtgctgacagggtcctcccgggagtcgtgccagggggtgaagaatccttcncggaagtagatgcgccagggtgactggcgctggctctcgcccctctccttgggccatctgctcacatccgggcgatggcatccatcatgtggtcgcgcccgctgcccagggaccagaacttgtcgtacacggcgacctggagggagaagcccaggtggtcgctgaggccctgcttgtgagcgatgtgcatgcacatttcccgagatgtggaggctgagtccacggggacggttaggctctctccagtggccaagatgacttggatggggatgtgcttcttggacttgacagcctgcagctccagccaggtggggggctccgcacgcaccccattggcataggtgcgtctcaggcgctcggcacagaaggggccgtaggtcgccggcccttggccgatgaagttcagtagatacttcatgaacctctctgagggtgggaagcagccgaggcagaggctgagcaggatccagccccgggccaggctgcttgttttgaagttctccgagagctgcttgcagatctggcagtaaatctcatccctgaaagacacagaccattaggagagtaggctgggggctggaggaggagaggagacaggggtacctgggcacacagctcttgtgcacctctgagaggtcccatatgcagggcacctctccagcgccggggccctgcccagcctcctcctctctcaggacagtgccaccaggctctgcatccctactcgattcctctccctcgtgccgaattcgccacccaggcc

SEQ ID NO: 454630 - DNA, 908 bp, Homo Sapiens
gccaaggcagtggtgctggcctgcctactagacttcctgccggccggtgtgagccgggccaagatcacgccactgacactcaaggaggcatacgtgcagaagctggtgaaagtgtgcacagactcggaccgctggagcctcatctcactgtccaacaagagcggcaagaacgtggagctcaagtttgtggactcggtgagacgccagtttgaattcagcatagactccttccagatcatcctggactccctgttgctctttggccagtgctcgtccactcccatgtctgaggccttccacccaacggtcacaggcgaaagcctgtacggggacttcaccgaggccctggagcacctgcggcaccgtgtcatcgccacgcgcagtcccgaggagatccgaggtggtggcctcctcaagtactgccacctcctggtgcggggcttccggccccggcccagcaccgatgtgcgcgccctgcagcgctacatgtgctcccgcttcttcatcgactttccagacctggtggagcagcggcgcaccctagagcgctacctggaggcccacttcggtggggcagatgcagcccgccgttacgcctgcctggtgacactgcaccgggtggtcaacgagagcaccgtgtgcctcatgaaccacgagcgccggcagacgctggacctcattgccgcactggcgctgcaggcactggctgagcagggccagctgccactggcagcctgggctggcgcctccaggcactgacggggttgtgccagccactgtacaattacatacgtgacccccgtgcacactctcctggctcacgctatccaactggactgcttgtactgacttcagaccctggccagacggacggactggcctcacggggacgacacggggccctcaaa

SEQ ID NO: 454631 - DNA, 938 bp, Homo Sapiens
ctctgctggctgttttgtgtgggttctttggggtttttgtgttggctccccgtcgattgtgctgctttggtgctcttggtgtgcccctctgtcggcgctgcgtctttgctgtgatcgttctttctcgttttgcctcagttgtgctggtctgctctcgtcgtgggttcttttgccttcttgctggctgtcgtcgctgttggcgttgccgttgttgtcgtctgtggctctctttgtgcccgctctcgtttgcgctttggtgcgtctggtgtgttgctgcttccgtcggggcgttccttggcgcgtgtgccgtttctgttctgtgttgtgctcgttgtggttctctccgcgtgtctccgtgcgtgttttttgttgtgcgttggttgggtcttgtcttttgttgtgctcccggtgcttgtctcgcgtctcttgtttttctgtctcgtccctcccggttggcctcggtgctgcgttgtcttctggccgtcttcctgtctttgattaggttgccctccgtatgcagtggccggacgtactgctcgtatcctgccgtgcttttgcccggttgcccgcggtccctctgtgtctttgcgctctgtcgccttcctgccacgcctgtggcgcgcgcgtcttgtcctcgtgcctatccgtggtcgagcgtggcttcacgtgcacgttttttcccaagcgttcctgtgtatccgtggcgcgtccaggctgcggggtcagttggagggctttccagcgcatggaggggaggggctgtgcggctcccagcctttccaccagggcctggctggctggggctggggcggagggccccacggagctgcgaggctgcggacaggagtctgcggcctctagtacttagcgatgtcccccttcttcaggatgacctgtcgctgccagggcgccagcttggctctcatcgtagcccagcc

SEQ ID NO: 454632 - DNA, 558 bp, Homo Sapiens
gttttttctttggtgttgttttaagcgcacaaagttagtctgtatggtgccagtggacacccctaatccattcccatagataccagctgtgtctttccgagggctccccaaaggataagtcaactttcagaggctcagcacagacacccatggccggggtgctggtgccgctcatacactaactagctgagatgatggtcactccgtgagtaaaggccagttaggcaacattttctgtgttcacccccaaacgttttccagaacacttgttccgaaagcatgttgacctccaaattattcagaaaattgatggccatgctggagggtttagaggtaacttctccccactccctttcttccttgaagataaagcagagttctagcgtaactggaggggggctagacaatttggttggtgagaggaggcagtgtagacacagacgcagaacacaagttccttaaagaaacaaaaattgagacccttttccattttgtgagagtcacaagaataaatatttctgggacttcctggcctgtctcccttcacagggttcattc

SEQ ID NO: 454633 - DNA, 748 bp, Homo Sapiens
ccctggaacccggcggcattttgcacatccactcctcaccttccctgccttggtgctgccagcagcagacatagacgggtgcagaagcggggagctccaggtgcaggagggcaccgtccggggcccacgccctctgcccgcctccctggggctccttcctgccacctcctcccatcacctcctgcggcagaacagcacccgtgacccacccagagagcaaggccagtggtcttggtgctccccgacggggcccggcaagttctctttcttctctctgggaaaatgaacgtccaggacacacctgtatcccagagagcaaagtgatgaggagactgagcgtccccagccccacctggcggcatggacacagaaaagctacgccggctggcctctccagaccagttcccaggctgggtctgccgctgggccctggggcggtggggacagatgttgacacaaagttatttatgttttcttagtatcagaagaggattctcggcactaacacatagccagtcctaactccgtactctgtgtcagcccatcccctcgacaccctctgtttcctttcccggccccacctggccggccctctgcccctgcagagctgaggcagcctggggttgatggggaccacgcggtgcctgcaggtcctagaagtgagctgggcaggggctcttcagaccacacagccctgaccgggccttggaggagagccatggacaggctcctccatgccgtctttcct

SEQ ID NO: 454634 - DNA, 693 bp, Homo Sapiens
  misc_feature (32)..(32): n is a, c, g, or t
gtgaatcgaaaggctaggtatccctccaattnattcccttcctgagacgattatagagtcttcctcatctctttccatagaacaaaagctggaggatttggcaatggaagatgctttatgagcataagaagatgaaaaatgtaacttctttccccttataccaaatatagtagaatctctttcttgagacaaggttgtttcatatgaagcggaaacagcagaaggggatctaggatacaatctataaccttcacttggagtgattatctgcctacctagaatcctgaggtgaggaaagctagctgtccactgttggcactcttcttgtagactcttggtatgcacactcaacttctgctcatacaagagttcatcaatggctgtgaacattgtctggactttttcagtggcattttgatcgagttcaccatatccccaggagaagtccgagcttccttcagtagatatccctgcgcctgtataacttggaaaagcagacagtgaattcccagtgtcggctgatgtaaaagatgattctcttgtgatgtcagacttgctttgggaacttgtgtctttctcatgactgtcactggtgggggaaatttcctccagcttctctggagggggatgatggttaagagcatgttttgttattcctttcagctccaagctctgtggcaccgccttccgagc

SEQ ID NO: 454635 - DNA, 1075 bp, Homo Sapiens
ggggcgtaacgcggccggagtggagactcttatcggcggcgggcccgcgaatggcggaccatcgtggcgggggaccagaagtgggcgggccgggagactggcccccttaaggggacaattaaggggggccccgtggccccgggaatgaggaacacgcccgggggagacggcccccccaagtggttttccccaaagacaccctttttccaattaggatccccaggccttctagtcacttagacctcccagaggggcaggccacctagggcagcggaaggcgatagcttttcctgggtgtgctgaaagctggggccaccacacccaggctccatcccctgaacagcaaccactgtcctctttgaggaggcctgcgttttggcagaggtgctgacagctcccagctaggtcaagggctctcatttggcctctccatctcctcctcctcaacctcaaggtgagacgaccgcggatgcacaaggtgggacgaccgcggctgcgcaaggtgggacaaccgcggctgcgcaagttgggacgacagcggatgtgcaaggtgagacgaccgcagatgtgcaaggtgggacgagggacgaccacggatgcacaaggtgagacgactgcagatgcccaaggtggggtgaccacggatgccaaaggtgccctaggtggcagaggacagcatactttgtgtcttctttgttaacttttgctgtttactgtcattggatataggcttcccaggaaagcatggggcctcaggcaaggggaccctctgcagctgacagctgtgcgtttggcaggccagtctctagcccctccaagccagcagtgagaggcacacagtttgtgatatgtgcagcagatccccgtggtcacggcccactcccacacctccttgctgcgaagtgggtcccttagcctgacttgaggctctgcgggctcccaggctggtggatcacacactcagtaagccaaaaggatggtgccgctgggggcctgggacagaaaagacaaactctgacctgaagtttgtgtccactttagcctcgtgccgaattcgccacccaggcctcgctac

SEQ ID NO: 454636 - DNA, 900 bp, Homo Sapiens
ggcctgggtggcgattcaaaacgaggcgcgaggagaggcgcgcagcgaccgcctgacggcaggcaatggtgtaagcgcctctcggcctccccctccccccagacgcggccgggtcctcccttcgccttctggacacacacccctgcctcgtctcttccgcctctctcgcactccggtccgttcctgtcctctgcggaggccagccctggggaggtgcagcgcccgccaggatgagtggctccttcgatcgcaagctcagcagcatcctcaccgacatctccagctcccttagctgccatgcgggctccaaggactcgcctaccctgcccgagtcttctgtcactgacctgggctactacagcgctccccagcacgattactactcgggccagccctatggccagacggtgaacccctacacctaccaccaccaattcaatctcaatgggcttgcaggcacgggcgcttactcgcccaagtcggaatatacctacggagcctcctaccggcaatacggggcgtatcgggagcagccgctgccagcccaggacccagtgtcggttaacggaggagccggaagcagaggtgcgcatggtgaatgggaagcccaagaaggtccgaaagccgcgtacgatctactccagctaccagctggccgccctgcagcgccgcttccaggaaggcccagtacctggcgctgccgagcgcgccgagctggccgcgcagttgggcctcaacgcagacacaggtgacccatctggttccagaaccgccgttccaagttcaagaaactctacaagaccggggaggtgccgctggagcacagtcccaataacagtgattccatggcctgcaatcacaacatcaccgccctctgggaacacctcttaccactcaatc

SEQ ID NO: 454637 - DNA, 1114 bp, Homo Sapiens
tctacctgtatgtcaagaatgataatgtatttatcatcggcatcccgacgtgaatcacgcggattgtcagatttcgacagttcttgcacttctgtgtcttgacacggcaatatatagatctcgcctactcgggtcagaggtcctacggcaaccacttagccaatctttcggcgaacagatagctgccacctgtagcgacgtgatatatcaggtgatagtgcacgctggtttaatccaccactcggggtaagaagtccgacagggcagtccagcacggacgtcgttcgacagtctgaactcgcagttcgccggcaacaggtctgcgcaagaagatgaggtccaggtcctttgtaggaacagtgccggctgtgcctggttgcaggtacattggcttggcgtgccgatccattgaggcgcaccgtccgcggacgccaatgctgtttttcggccaggcgccgccggcaccaccttcacgatcaggctcggctgcagctcgagcgtgtgggaatttgcacgcagcccgtgaatcggaattggtctcagctcaggatgccgtgcaagccgctgcacatgctcccaggttcagcacatttgcagtgcgccgtagggctttcgcaatagtccaagcaatgcccaccgaagctgccgccagccggccgaagtcgccgccgccgaagtcgtcacgccgccgaagtcgccgcactagggggatgtaggggctgcaggccagctcgtcctcagacatggcgaagtaccacttcaccactccgccatgtagtgcccagccgagcgccacttggccctggtcagtcactggaggcaggccgcccacttctaggagcgcagcgagcgagagcgaaaccgagaggcggcaacacttccaggagctgcgagcgcgctcagacagcaaatagcgacttcgtctttcccagacccctgccgcctgcgctcaccactccctccccgcgacccctcctgcgccggctgcacaccccagctgcaggtggtcccgaactggcggcatcattgctgccacacacagctcagtgtctctggagctttagcagttgtgcggggaaaatgtcttcagtactttttttataccgggcttctc

SEQ ID NO: 454638 - DNA, 1359 bp, Homo Sapiens
  misc_feature (417)..(596): n is a, c, g, or t
cagtcccgctgcatcgattatttgttgactttgtacttcaattcagtccaccgaagcagtcactttggcacctcgtccaaatctgggtactgtgcaagatccgttccttggagacaactgaagtgaacagtcagcacacggcccgttcgtctcaaagcttgcgcagcactctcccggtatctcagatactaccggctcgtcagtaggtatcgagagagaacacgagccacgaagacgctacggtcacagcctcatcagcacgtgtgatttctcatcgaagataccatgttatcaagtacttgctctaaaggtctccctggttacactcacaagtgatccaacagggcatgcatcggcttaacaacccacaggaatgttattccctgcacgatcctggacggcctacgatgctctgtnnnnnnnnnnnnnnnnnnnnnnnnnnnnnnnnnnnnnnnnnnnnnnnnnnnnnnnnnnnnnnnnnnnnnnnnnnnnnnnnnnnnnnnnnnnnnnnnnnnnnnnnnnnnnnnnnnnnnnnnnnnnnnnnnnnnnnnnnnnnnnnnnnnnnnnnnnnnnnnnnnnnnnnnnnnnnnnnnnnnctatttccccttcttttctaacgagctagtcactctgcatttagggcaccaccctacatacatggttcatctcatttccaggtccttgatttcatccgcaaaaactctattccacaataatgtcacacgtggagattcccagtgaatgtatctcctgggggccactattcagcctattacactattcttagaagatgcctagaaggatatggccaatgttatcccagaaggcttcatgaaggaggtaatagaagctaacccttcaaagatgaaagttggcgttcattagagggtcacaaggggaggaagggaatgtcaggttcagggaccagccagaccagagctaaggaagtgacatcacatggaacaatttgtgaacagcaagcagtagggcctggctgcaggacagggtgtgaaagtgggggagcagtgatcaggagggcccagagagatcagcagggatgtgatcttgagaagctgtgtgtgccatgatctggccctattaatccagaagggtctgatggaagcctctgtgattctcttccatggttaaacattttaattgtattatacctcggatattcctaaatatttaaaacactggcatggttgaactagacaacctttaagtagtttgttccaaccatgagatttagatttcatgatttaggttttatgatcttaaactaaaacctgttagttttctaccactagtgagatcatggcctctgcttttctcctgggaagtccctcttataatcac

SEQ ID NO: 454639 - DNA, 903 bp, Homo Sapiens
aagtgcttgtagcaggtgttcacgtgggcctcggagcccatctgcgcgatgcggtcaaagtggtggatgtagacgtgcacgaacacgcggaacagccgcgacaggatcttccgcaccgtctgcaggaagttcttgggaatcggagtgccaacgttgttggggaagaggtcctcgttgttgatctgcgcctcgatccagtccatcagcaggtccatgtacctgggcgcggagagttccgtgggcttccggaacttatgctcatcctgccagcggtactcatacttggggccccccgacatgacggggcaggactgctccgtgcagccgtcgctgatggtgccgtagatgaggttgacgcggttaaagaagtccaccacgtgaacagccacccagtcgttcaggtcctcgcccgggggcaactgcacggccagccgcaggtccagcccggcgttcagcgacgcctgcgccttcttgtgcagctcgaagcgctgggtgcctggctcaaacttgcgcttggggcggaatgtcttgtccttgttgaagacttgcttcaggaaggggttggacatcttggtgacgcctgctctcctggacttctgtagaggggtcctgggccagctggctgggggtgctgaccaacccgagaggccacgaaacactcaccaagccccacagctctcccgcggaccgtgtctggggctccctccgctctgctcttctcggattcctccaggaacagtggagaagacaaggcaggaatcagctctcagaattccacaccaaggccttctgggctcccccggtcttcccacggacgagacacaagtgacccttggaaacttctgatcgcctctgccgcccgccttcgcccctcccggtacccaactggccgcctcggccgcc

SEQ ID NO: 454640 - DNA, 911 bp, Homo Sapiens
tcggacgaggctccaccctctgctcccgtttctccctctggttcatagcccgcgggacagagcagccctggattgggaggctcctcaggtctcaggctcaggtgcagaagcagagcccctaactggaaggctcggaggtgggccggtgaggcaagcaagccctgtggggggttgaggacagcttggtgttggatgtccctcactgcagcctgtccgtggatgtctctgccttaagggaattggaggtggaaccatccatgtcttgaaggtcaactggagcgtgaagagaggagcgtgcagcttgagggtctaaggataactctggggccatgacatgcatgagtctcacagaggaccccgagacttctgtgctgcgagtacccggacttgttctgagacctttgccctagaggatggccaaggggctcctggtgacctatgccctctgggctgtggggggccctgctgggctccaccatcgtgtacctgggaagggacagccactgtcctgctctggatgctgaccctggggggaggtgggctggcgctggctctgggagttctggaagactctccaatgcttagctagctcagagccagcagagcccagggcacagtaggcagagcccccagaggggtgacacccctgtctgagctcccattcgctttagcttgcccaaagttgatagtcgcgcactctactctaggtctatgttgggcacctgacttacgccctttctatctcatgtgtcaactttcctatacttgcgtgcctcctcactgggcatctggtgctttcggggcgctctggcatggtgcgttgctcgtggtgtacagccacgagccttcagactattgtcgaaccactctggggtgtcagcattctctgcaccttgactattctttttctg

SEQ ID NO: 454641 - DNA, 921 bp, Homo Sapiens
  misc_feature (88)..(88): n is a, c, g, or t
  misc_feature (138)..(138): n is a, c, g, or t
cacactctctgcccactcacctgccttggctgacatcggttgtgtttggtgctgacactctgatcccgaagctagggagccccaaggntgccattgaccctggggtgccccacacagttcagccctgcctggcaggancgccagtactactgtaactgcagcaggagctccgcggcctgccttctggccccacgcccacaggtaagttcacatctttgtactgtactaccctgtctcacctggggcaacctcagagccccactaagctgaaggccccctgggggagggggaagcatggtccttatcatctgccctatcttgccccttcctgtggagtgggcagaagggctcccggggattcctcagagcttccaggtctgagcagccaaaggcccagctgggcctccaggaccagcgcgagcccctgccccaccctcccctgcgcacatgtgccctgctttgtgacctctgttgaccttcctggaagcagccccattaccctgagaatgcggagcgccctggcccacctcgccctgtgtttccaggcctgcacgtctggtccttcagctgcacatggaactgcagggcaggctggcggggggccttcagatctcagatgagactgcacccctttgaccaccctactgggcacctgcctccagcccctgagaactccatcttcccctagttctgcccaggagcccctgagaaccccatcttcccctggttctcttgcccactcccctgctggggctccttcctggcactgaggaggggcgctcccaatgctgtgaggcagcggggagggaccgtgcacccgtggctatcagagccctccgctgtccaccctgggcctgggacacgggcctggggcagtgtgtgtctgctggtcatgtgctggttgccagtcggggaggattc

SEQ ID NO: 454642 - DNA, 774 bp, Homo Sapiens
  misc_feature (67)..(111): n is a, c, g, or t
acgggggcttatatgtgatgtcaatatttcttcctctgagaaatggatatatatgtgtctaatgtannnnnnnnnnnnnnnnnnnnnnnnnnnnnnnnnnnnnnnnnnnnncttaaagcataaccacaaactgcaaaaagctaggtaagctattttgttgcagctcataaggtggtgaaaaggactctcctgtgtttcttactcataggcaaggacaacatgtgctttttggtgagctgctcataattcctgaaatgtgtggtgccagggcaagggggccatcactgcagtcaggccctcagaggagtcctgcaggcttcctaccagtggtctccaagggtgcaggagtaactggggctgggccagcctccccccttacaaggctgctttccaggaagggaggtctggtgtatctcatgggagaatctggggtgtctgtagtgtcacccctccagcatgcgccactaaggacctgacggtctgggtaggtgtgacggttccagacggacagcatggacactctcgcaatactttgccaaatgaggcctgctcagaggcactatcgagcctgacacagatggctgccttccaccctcttggcgctgtgtgcccatccagacgcaggcttccgcactgcaacagcgcctgcactttcagaggtcctgtaactctcactgttcggctgggagacaagacggtcaccacactgatctacaccacgcacacgctacttccatctcgcactcccctcccccaacacccgtctgggccacg

SEQ ID NO: 454643 - DNA, 636 bp, Homo Sapiens
  misc_feature (67)..(121): n is a, c, g, or t
  misc_feature (131)..(141): n is a, c, g, or t
  misc_feature (234)..(247): n is a, c, g, or t
  misc_feature (287)..(298): n is a, c, g, or t
aaaaagaagtgtgggggggtttccccccgggggttttccagaaaaaatttatttggggggggggtgnnnnnnnnnnnnnnnnnnnnnnnnnnnnnnnnnnnnnnnnnnnnnnnnnnnnnnnaaaaaaatannnnnnnnnnntcccaatccgaaaaaaggggggcctggggttttaaacccccaaaattcccctttccaaatttcccccatgttttcccggggaggccaattttnnnnnnnnnnnnnntttaagcaaaagtttccccacaggcggggtttaagaaagnnnnnnnnnnnnggccaggttaaaggaccaaggtcccccccaaggggaactcccccttggtgccttgcccatccccttcgcccccatcctgatgctccccctgcacccacgaatctctccttcctgggactgtcatacctagaaacatccagtgtgtgacctctgcggagcggctttttcactcagcgtgatgccctcgagacccagccatgctgtgtgttcacttctgattgttgagacatcctctggggtatgtacagaggaatattttctgaacggtgagaatctagcacactcgtcccagctccatttttggtcctgggttggcctcgtcggaattgccacccagc

SEQ ID NO: 454644 - DNA, 1012 bp, Homo Sapiens
cctttcaaaatcccatttttcaaggttttgggttcggatccaggtttaaggatttcaggatgctgcccggggtggaagtttttgtccgtttttcgtcgtgataaggaagctgacagttgaggagagaaaggcttttgggctgccggataaacttccctgctttgtttccgtctggttggaggctggtgaaatctgtgctcttatgccaggaagtccatggactcctcgctcggcactgaagtggctcgacgtggccttcttctcagcatcctgctccacgtcggagcccgtgtgcacagaagagtttgtgctcatgggggagcgcggcatatccgacaaggaaatccgtcggcctgtgcccccactcagcacaggcttgctcatcaggatcttgggggatgccgtcatgtcaaagttgagcttgaccttctcctgcttgtctatcttggcagtgccggcgctggggttggtgggatcgagcagcatttgatactggctgttgggtgtgtagggtgtcctaaatggagagtaattaaaaaccccaaacttcctgcggatgttctccacgtaaacctccatctcttgcatggcactgttgaagatgctcttagtctttttcacagaaaaaggaatttctttagacatgaggtagcaattatttattggaacccaggccctgtcatgttgtccaaagaatcgggcatcgacctgcccgtctttatcccttagagcttttgcaggccagaatggaaaccccttcagtttggcccagaccaaaggatgtggattgctacaaggctcacaaaaccagttatctcgtttttggcaagcagctagataacattctggacatacttcgatttcattcatctcatgttcacagattttgatgactactttcgctatttgcgtcaatttgtgatttcccccattataaatgatgcagttgtgcaaaatccactttgcatcagccaggaaggcttctgcctcgtgcgaattcgccacccaggcc

SEQ ID NO: 454645 - DNA, 967 bp, Homo Sapiens
  misc_feature (358)..(358): n is a, c, g, or t
accacagggtttatagggctacgcgtgccagcgccaatcaggaccccacgatgtgagcctgcccgttctccaagcgtccagcccatcttgggagactcctcagaactcacgtcgacttttgtcctcccagttctactcagtccacttgatctcagcctttactgggccctccttgagtgcctggtcccctgctgggtttcgggggacaaccacggaccagacctggctcaagtcatagatgggttggcaagggaagtcttccctgggggaagaggtgccttgagcacaggtttaagggtggagaatgtctgggccatggaaacagcagcagagaggtttggagggccattctgcagcnggatcttgtgtcactagagctgatcttgccgggtgggagtcctggagagggccatgggaggttcaggtctgggggacaggggtgcagacatacatggtcagacttgcgttaggatgtgcctcaggaaccaggacaggctcccactgggccaggtctgtgaggagtggcacagaggcctggggcaccacacccagtgtgggctgcagcggggccccccagagcctatagctggccgggtccccagagcagcaggccgagtgcagggagcagcgcaaggatggcggcagccggctgcagggcatgggccccgctggcgttgcacaagtcggtgtcacagcacgtgatgttcttcttgcccacgtagtagtcctgtgagtcatccacgcagttcaagctgcagcctttgctgatgacggtcaggaggccaactgcgcggatgcgcgcggtccagcactgctcccccagctgggtgcagttctccacctgcaggcagtcctcgttgctcacctgggctttgcaggagtagcacagcagggcagtgcctggctgcagggccaagcctgccatcaacagggcaagcagcacagccttcatggtcactggtgggcc

SEQ ID NO: 454646 - DNA, 1060 bp, Homo Sapiens
  misc_feature (37)..(37): n is a, c, g, or t
  misc_feature (112)..(112): n is a, c, g, or t
aaaatgctgaaactcagctggactcccgcttctcctntcttccaagccaaggcttcctgcccgcaccttgtggcgcctccttcaccaagtggccccacggtgaactggaagnggctgccggtgacgtgctgcccacggtaacttgacgctgaccgtgtgcacgcccatctcctggggcacaaaccggacgcagtgtgagttcttccccatgggcacaatctctgcctcagtcacacggccagaggggctggtgacgtgggccgacatatcactgctgttgatttctgggattttcaggttcaggtcacaaatgctcccgacagttggccacggacgtggtccccgtctggttcgggtgatgctgctctcgtgcctcttccctccccactgatcttcacggtaaatgggctcccaggcacgtgctcgtcagcgaatttggtggagacgatataaaccccaggcacggtagggaagtaggagactttgcaggtgccatcttccaggtcctccgtctggatgtccactgttgctggggccttccaccgccaaggatatgccaccataacctgcatcccttgtgtccacgatgaagtcagacatctcgaaagtccggccttctgacaggccgcggccatagactttggctcggcgggcgtcaccaatctccgactggaccaccatgatagacacggggctgttggccacatggttgccatttttcttgatgctgaccagatgttcgcccacttcccgggggatgaaggagatgccaatgtggttgcttgggcagcctcttcaggagacagggctcgtctcggccagatggggccttaatgctggccgtcaggctgctgaggtcagtctcactgatgtcgagcaggaagtcagcggctgagcccatcttcacctgggagcaccgcctgctgtcatctgtgatcttggctgtgaaggggctgccagggatgtgcttgtcattgtacttgaccagaatgctgtagtcgcctggcagagtcggcaggtaggtcactgtgcatgtcccatctttattgtcaatgcagcc

SEQ ID NO: 454647 - DNA, 1333 bp, Homo Sapiens
  misc_feature (35)..(35): n is a, c, g, or t
  misc_feature (1293)..(1293): n is a, c, g, or t
agcgccaatatatgtttagatagagtgcgctatangtgtgtcctctagcagagcgagggtcagctggggtgtgcgcgaggacggagaggcgggggaagggggtgagtaatagtcgagagagcagaaaatgaagaagttagaatcgatgccgttgcgtatgagtgcgggagagaatgagggagcgagcagagtgatagtgaaggattggccgttgtggagtggttacatgatgttgtgattatccagtattaattcagatattgagagaatgattaatgttgttgatggagtattgtttgtagttgtgggtgtgtgcatagtgtagttgcgttcttgtatgtagatcgattattggatgtattgtagaggtatgtggcggcagatttgtagaggtcatacttatgtggaacagaggttgatggcatagtgtaaggctgttaggtggtaagcgtgagtataatgatgtatggtgtgctgccggtgcggggcggggaaccgtcgtgggggtgagtcttggcacgctgttgacgtcgtaggattatagtattcttgctgcgactgatttgagttgacagagtgatcggagggtgggcggtaggtatgaagagaagtattgtaggacagggatatggagcatcgtagggacggtgtgagaagagagaattaaggctgagggtatcggaggttgaggggaagtgtgaataatactgttagattcgccgtgtaacgtatgtgtatgggtaaaaaagtgtagcatgatgaaggtagaggggagggaggggtggtattttaacttgtatcgtgttctatattcgaagattagtagtagattagtgtgggtagatagacacaaaacagggtgttagggggaaaggatagttgacatggatctttgtgcgaactgtaaggtggttttcatatatctgtaggcaatggaatgcaggcccagtttccgagacaggtatggcacgatggagaactgcatgaagaggcaggtaagttctgtggcgtccagcacgtaggtaagcaagatgaccgaggaccggcctagagcgctcatcctgccgggggactggccctggtccctgggagcccgagctccctgcatcctggacaggcgcagcagggagacccaggagagatccaagcaggaggctggcggagcagggggcaaaagtccagttgatccgggcaggggtgctgagtcactgggtcccaggcagcacccgcctggccttgcctgcctttgcaggggcgggcttgggcacgggtgccggtggggtgagcgctccnagggtgacctagacaccggcctcgtccgaaatcgccaccc

SEQ ID NO: 454648 - DNA, 791 bp, Homo Sapiens
gttaatctccatgtagagatttgagtccaaaaataaacggcaactaacagaaggagtgtgaaatccggggattccacagggcttctgtccgtccaccttccatgcagctggggctgcatcctctgtgggctggcttcatcctctgtgggctctgtggggcctgctccaagtcatcagcattccatgcccacctggacctggtcccagactttcggggaagccctcagcctggggctcctggcacccccgttgcggctggggaagagaggtgtggaatccccagagaaagggaaggaaaggcatgaggggccttccctggggggaaggtcacaggctgggggctaagatgacggccaggaggctcagggccagccccaggctgagggcactgtgggcgagggcggtgcgggtgggtgcagcgttgtgcagcttctcattgcacaggtcctcctggcagcactgggtggagctggtgccgctgctgacctggccttgcagggtgtagctgggtgtgcacgactccgcacagtccttcttcaccagattccccctcagaggctccactgtgttcgtggtcttgcagaagcgagagctggccgggcagaccacagaatgcttgcagttgctggagctggtgcacacgtggcagcgcagggtaagggctggccctgtagccacagccagggttgcaaggagcagcaatgctgtcctcatctctgatgtcgtctgggagcagtgcgggcccctgcattgccaaggccttataggcacgggctgggcgggggtgggcc

SEQ ID NO: 454649 - DNA, 1449 bp, Homo Sapiens
  misc_feature (253)..(253): n is a, c, g, or t
  misc_feature (498)..(498): n is a, c, g, or t
  misc_feature (809)..(872): n is a, c, g, or t
ttttgttcttactgtgggtagagcgaggggggcctctaaaattgctatgcgtcgtaagggagagatcagcgagggagagttctgagtgggatggattcgctgcagtgactgagcggcgtgaatctccacagcgcgagggggcggagcgtcgggcaaagaattagcggtgcgggaggaggagcgtagtacagtctgcgggaccgggctctgaggtacgcgcagcggcggtcggggctctcggcccgcgcatatncaggctacgacatgtgccgcaaatctcgtttagctcattgattcttgtgttgtgctgtgggtatggagtctgtgaaggtgtggggcgatgagtgtgacagtagttgtgcgtggaggccgtgaatcatcgtgcgtgtctatgatgcctgcgtgtttcctgtagcgcgcagcagaggcgcacgcgggggagcagggatggaggtaagtgtgagtggtcgtgggatgtggtgcagcgagtagtggttntgtgtcataggagtgaatttagtggtcatggctattgttcgcgcagatgtgggcggggagagtatagtgaagtgtgtcggtggtgtgggtgtggaccggcatgtggagtgcgtattgtggtgtgggggtggttcgggtggtaggtggtattccatatcgctgtcagttcggtggtcgcggggcgtctgttgttgactctacagcctctttcggttctgatggtgtcacatgtggagggtaggtggtattctattttctaaatgtctgcgtaagttagaggagagagtggtggtttttggcgaggtgacagnnnnnnnnnnnnnnnnnnnnnnnnnnnnnnnnnnnnnnnnnnnnnnnnnnnnnnnnnnnnnnnncatatatgttgttttgggggccgtcccggtggtcgggatgggacgcttcgcggtggggtgggcagtgcggtggcgttttatggggtgggtccggcagggagttctgggttgtcgtcacgcacggtgggttgtgcacatggtggactttttagttgtaagaaggccttaggatgcaggcagaggcaggatcctgaggggaaaaagacctgggaaagaagaccactggtgggaaccctcttgctcgcaatcgtcttgcctctgcctgacacttgctgattggcctcaacacttggaattctgctcggatcctaggattgtaaacacttcggagctccagtcctgagtcgatgacatgttggatggaagggagggagaaggagaagtcagccagccagtgagtgaccacaacctttcgggcatccatgtcctcatacacagcctgaacggctcgtccacagtctgggtgaaggggcagtactcgtggtggaagcccttggagaagcaaggactctacctcgctggaccaaggattcacagcacagggaaatttcctccctcgtgccgaattcgccaccca

SEQ ID NO: 454650 - DNA, 1456 bp, Homo Sapiens
  misc_feature (174)..(174): n is a, c, g, or t
  misc_feature (181)..(181): n is a, c, g, or t
  misc_feature (734)..(743): n is a, c, g, or t
  misc_feature (791)..(877): n is a, c, g, or t
  misc_feature (930)..(941): n is a, c, g, or t
cagaaggagctatgaaggacgagaaggggtgggtgaagcaagtaggatgagatactacgtcatagcatgcgacatgggtaagctgaaggaggtttgttcgaatggccaggcatcgtatcatggctgggcttatagtctattagtgcggtcgcggtgcacggtaggattcggcgnagaccanaccgtagtttttctatcacgtggtggagttttcgtgatatatgtgctcgggaagtgcagatcaatgtgtattactgccgtgtcttgacgggggttcgggtgtgtgacgtggggtgttcatcgttgtgttaggggatctcctggtcgagtgagtagggggagagcggggacagatacgtggagcgctcggggtgatgtgctcgtgcatgtgtgtcttatgctggcaggtagttgacattctggtcgatatatctatatgtggaagggtttgagggtaggcatgagaagagggaaggagggcggcagaggacgaaaacgttaagaatggtgagcgtgtgaggagtgagagcataacgtcgggtactaatgttcagtggggcggcgattggtaggttgggagagaaagatgttgctgactaggcggagcgacggaaggtatatcaacaagtggatggggagggtcgcgctgtggagtgcacgggaggggttggtgagtaatagggtgggggaggataggttgggtctttgggttggaggggagagaggaggtgtannnnnnnnnnaagaggctggggtgcagtgggagactatcgggcgtaaagggtggtttnnnnnnnnnnnnnnnnnnnnnnnnnnnnnnnnnnnnnnnnnnnnnnnnnnnnnnnnnnnnnnnnnnnnnnnnnnnnnnnnnnnnnnnaagaattacggggcgggggtggagtggacggcaggggcgggtgtggcaagacnnnnnnnnnnnncgagcgcacaggggggtttggtgttttattgtttttgtagatgggccgggcgttggataggggggcgagatattaggtggggaggttgggaggggtgcagcgacctaatgggtcaggaggggtgtggggtgaagtcgcggtggtgggcggctggggccggtctttccagagcccctcgaagacctccccaaagtagccggaccccagcttcctgcagagcgtgaactcctccctcggcctctcccagtcatcccaatggggcaggggctcaggctcgtgcttccggcagggcgcggccagccgcaggccgtgggacaggctctgggccctgtggtagttcacaagctcgggcaggctgaggaaggacaccgcctcgttcaggtgcagccggcccccggcacgccgccagatcttgtagtgccgcacagcctgcgtgtcccgcaggttccgactccaccgtctccctctcggccaggtagttgtggggcacatagccgtgggccaccctcgtccga

SEQ ID NO: 454651 - DNA, 1107 bp, Homo Sapiens
  misc_feature (45)..(54): n is a, c, g, or t
  misc_feature (182)..(182): n is a, c, g, or t
  misc_feature (294)..(294): n is a, c, g, or t
  misc_feature (309)..(309): n is a, c, g, or t
  misc_feature (706)..(746): n is a, c, g, or t
aggtcttttccccaaatgtccaggttgaggggcgggtgttttctnnnnnnnnnntgaaataaaattcgggccaaacttacccggagtttcctgggattaagtttggccccggagggatagtgcaagatctgttcaaaaagcgggagagtcagtggggattgaagatgatgcgaacccgctgngttcgctgaaagttgggtacaaatccatgcgttcaggaactcattcgctcttttactgaaaaagctcgcggcccatcaggacttggcacaggcaaattatggaagtagggcngtgtaaacaaaacgnctatatctcctcaattatattgatgatgaagattatcgtcggcggatcctgacgcagcttaatcgagggagaaggccgccacgctgtggctcgtgcgatttgttacggacactgcggagagatcagaaagcgttatcgtgaagggcaggaagatccactgggggcgctgggcctggttactaatgcagtggttctgtggaacacgctctatatggaggaagcgttgagctggatgcgccgtaatggcgaagaaattatagatgaagatatcgctcggctatctcccctgatgcacgggcatatcaatatgttgggccattatacattcacgttgccagaggatattttaaaaggggaactgagagctctaaatttaaatataaacaacgaattatcnnnnnnnnnnnnnnnnnnnnnnnnnnnnnnnnnnnnnnnnntatactggtgacgatcaccaaactgcccctattctgaaaagtcaacctgtcggttgttttgttatgcgcgccattctctactcagtgctttcttctgacagcatgttgatttaatgtaaatatcccagccttctccggagaatcgcaatggaacttcgccagctacgttattgtttggtgaccgccatgacaattacccttgagcaaagaaatttaccccaaaatgggcaatagatttaaatttaggaatttacacatcacatttaacattaagaacaggtataaataagaaacttccattgatagtgggggtgacttgaagtaagccttattttctcctcctttgaattcgccacccagc

SEQ ID NO: 454652 - DNA, 1146 bp, Homo Sapiens
  misc_feature (390)..(670): n is a, c, g, or t
  misc_feature (699)..(713): n is a, c, g, or t
  misc_feature (908)..(934): n is a, c, g, or t
  misc_feature (993)..(1003): n is a, c, g, or t
  misc_feature (1061)..(1071): n is a, c, g, or t
tgggtggcgaattcggcacgagggttttgcttatcttgcaatctgttcatttctgttgatgaacacagtcaaataggcctctatgtgcagtctcctggtttccctggtcaaagtggaaggttggtagaaactggccttcatgtctttgtttccctcaaagttttattcttagtaacgctatatatggttttatagaccacacatatatagtttcctgtgtcttagatgataacatccttaaaatatgaaatatattttgaacctagatacctacccagtattctctgcacagagtaaacatttcattaaatgagtttcaaggactccataccctgatataggagtacattcaagaaatgagtttaggccgtgagccactgcacctggccnnnnnnnnnnnnnnnnnnnnnnnnnnnnnnnnnnnnnnnnnnnnnnnnnnnnnnnnnnnnnnnnnnnnnnnnnnnnnnnnnnnnnnnnnnnnnnnnnnnnnnnnnnnnnnnnnnnnnnnnnnnnnnnnnnnnnnnnnnnnnnnnnnnnnnnnnnnnnnnnnnnnnnnnnnnnnnnnnnnnnnnnnnnnnnnnnnnnnnnnnnnnnnnnnnnnnnnnnnnnnnnnnnnnnnnnnnnnnnnnnnnnnnnnnnnnnnnnnnnnnnnnnnnnnnnnnnnnnnnnntcataaataacattgaattttatgggggnnnnnnnnnnnnnnngaacacaccaggaatggctcccttcattccaccagttctggccttaaaacgcgaacgggcaccccaaataacctacccccatgcgttccgacccccaaagcataagaacctgtggaaactaacacctatttacccccgccaccatgtaccaccccacaaagcctgcgcgcgctcacctctcccccgactattatnnnnnnnnnnnnnnnnnnnnnnnnnnngtcccgcggaccgaataacgccggcccctacccgctttcccccccacccttctgtttannnnnnnnnnnggatctgaatatcccctacacgccctgcatccccacccccacctatcttcttactttnnnnnnnnnnnacttttcccctccaaggattctccctcacaccgccccatttacgtagcatgaccgtgtagctacacggacgacta

SEQ ID NO: 454653 - DNA, 1330 bp, Homo Sapiens
  misc_feature (159)..(159): n is a, c, g, or t
  misc_feature (540)..(549): n is a, c, g, or t
tgcggacgagtgggggttaatacggccacccccacatctaacgtggctgcgcgggtatatggtggccaaccaaccgcagggtggtggctaggcgtcataggcgtgcgtggaattcgagtattgtgtcgggcgcggtgtgttatacgacggccacaatcnacgcgcgcaacgcgactaatataaaataggggggtggtaacggtcggtatgtcatatttagtataggggcgtattatcggggcgcgcgcgtatcggcacgcgcacggaaacgctaatagtaccgcgcgcggcgggctcagttgtgatagagaaaatggggaagcatttgggtaggggggggaataaaatggggcggtaagcagcgggggcgcgggaataaggcgggggttatcgcggcccgccttttattcgagcacaagggtagaggggggggcgcggtgtggtattcgggtgcaacacaccaaggggggccccggggggtgcccctgtgacggcgctttaattcctcccacaaatgaggcgggagggcggagggcggcnnnnnnnnnnggggtttacccaattgggccgtttttggggggcccaagccccatttttaagggccggaaagggccagtggggcccccctcctggttgggatccagcaaggccaggaggccccttgcaaccccccagtaacaggtcttgagtccctggacaccggcttttgtgcctgagagggggtgggagcgcttctctgtagggaatggcttcaggtccgggatccaggggtaggggaacctcggccgtgggttgggttgctcctgccagggggtactaggggcaaggccccagggtggagccagttctgggagctgtgtccagctaggcatctgtgaccccaaatggcatgaataaaagggcaggttgctaagagccaggggagggcatggggcagggagaccaggttggcccagacaggacagaggtgctccagggacagggtgctggagtgaagccaggtggagcggtggagctgtggagcctttgaaacatcctgagggcccaggcctgccacagggtgacctgggcagaggagaagcccagaggacagcaaggtgcccgaatgaggtcagggcttctggggtggagggacgggggggcacagtggcggcgggggaaggaacgttgagtcccaggtgagcctgcctttccaggccaagcccttggagtgagggtgctcctgcctggggggcgagaagtggaagtggctcacagtccaaggtgacaaatgaacccatcaccggtcagctaccatccctgtgcctcgtgccgaattcgccacccaggc

SEQ ID NO: 454654 - DNA, 1682 bp, Homo Sapiens
  misc_feature (309)..(309): n is a, c, g, or t
  misc_feature (338)..(338): n is a, c, g, or t
  misc_feature (810)..(810): n is a, c, g, or t
  misc_feature (1031)..(1068): n is a, c, g, or t
  misc_feature (1109)..(1169): n is a, c, g, or t
gcgtgagatgcggggcgcggtgatgagtttggagtgtgaatgatgggaaagatgggggggtgggtattcaatgtagctggtcgggcggagatgaggggggtaggataagtgtggagttatgggaggagtgtgggtgggggtggagggggtcgtagatatggtgggcgattttggtagtgggtgtttcataatcggctgaggagtgccattgatagtatggtgggagatgtgtttcgggtagggtaagcaggtttgaggggaaggggtgtgtgtggtgtacgtcggtttatgtcgtggagtccatgactncgtattgctggttgtgtgggagtggtttntcgatgggagtcgtgtttaatcatgtggggcgcggacgagtgcgcttctggtcccagggattagtgtgtagtgtcttgagcttgggccgagttgtggcggcgcgagtggaccgagcgagaggcgcgagtggggacatggggggccggtccaggtgtggcattattgtcattcgtttttcggtgtgaaggaggcggcactaagggccgggtcgcgcggagtagttgagcaggcgggagactgtgccgtgaccatgatcgacctcagtattagtggtgtactatactgcgctagtgtagcggagaatggggaggcgggcgtgggaggcgcgtggtgtgtccatgcactgcacgaattactagagtccgtagagtggtggtgcggttcgggcgcgaaggagggtggttgagtggtgtatgtatgacgtgtgggtaggcaggcgacagtgggtaggaggtgggcgtggtgtcaganagtgagacgtggcgggaggcggccggaggcgggggttgggttgtggtgtgctgatagggtggggggacgggggtactggtggcgcttctgtggagataggtagtggtgatatgctagcgtatgtggcaacaagggtggatgggagtgaggcagggtgtaggggatgtatgtaaagacgaacggaaagggtaggacagtcttgtttggtgttccgagtgttnnnnnnnnnnnnnnnnnnnnnnnnnnnnnnnnnnnnnntacttgtagtctacgattccggcttgggtgcggggggggannnnnnnnnnnnnnnnnnnnnnnnnnnnnnnnnnnnnnnnnnnnnnnnnnnnnnnnnnnnncgtgggttcgtgtgtgttgggggggtgatggcgcgggtaaagggttgggtctgtgtgtgtgttgggtcttgcggctgggtggctggtggggggggagttaggtaggggtgggtagtctcggtttgggagtctgttcatggggcgcctcattttctaatgaggtggggcatctggtcgcatcgatgtgggtatgcctgttaggtcggcacgacatgtcggttgatatatggacatgcacaggaggtacctgtgggtggatgggacgagggaggagctttggtaaatactccccaggctggccctgtgcttccgtggggggcgccgccccaactctgagcccttgggggtctccggggcacccagactggccctgtgtctgctggccgccgagcccgctccacccacaccacctctcccggtggagttctcggcctacggcgtccccaagcccggccaccacggagaccacccccgcgaggacgcccgggcctcgtgccgaattcgccacccagg

SEQ ID NO: 454655 - DNA, 1095 bp, Homo Sapiens
  misc_feature (76)..(76): n is a, c, g, or t
  misc_feature (110)..(110): n is a, c, g, or t
  misc_feature (124)..(124): n is a, c, g, or t
  misc_feature (147)..(147): n is a, c, g, or t
  misc_feature (167)..(167): n is a, c, g, or t
  misc_feature (225)..(225): n is a, c, g, or t
  misc_feature (311)..(311): n is a, c, g, or t
tggggaagaaacccttttccttggtttccaccagaaggaatgctctcagttttgaccgtccaggtgtccgcttctncaagcgattctttcaacaggcttttcagactttncgatccttggaggnaaggttcccgggcctgtccatcntttaagatcccagggtactnccaggtctttcttcagctgggaggtagggtatcatcagcccgatttttccatgtaaanctgggagcgctgacggtgtgggtcatgtaccccatggagggcatggagcgtcggtccacatgagatgagttctgaccagcgtggcnccgtgccctccttgagaatcccccagcgagatgtccacactcctcctctggtccggtggcttcactgtgactcgctctgctggtgtgtgtggccgccggggtgggaagacccttgggggtcctgggggagggatgtccgagggagatggaggcacagagatggagcggggcacctcctagcatgctcctgctccggccctggtcggtgaactctggggagccaaggcagatgggcgctgtggggctgccgtgccggaactgcatggcgctgctgccactcgtagagctgccacacggtgccatcccggtgcgcccggcgctcttcactcgacatcttcaggtggctggctcggtcctgcgcatacttgtagtcacttggcaggtttcggggaggtggcgaggagcccccccgaggggtgtcagggtgcatcttgggaagagtcatggtagttttctgggaaggacagggattggccaggacccatggcgaggaagcgtctggtccaagggaagactcctgctatcccctttctgggcccttgcccagtgctccacctgggccagattgctcttcctttggcatgtgtttttcggggttggtcctgggaggaaaggcccgctggtacccaccagtcccattctgttctcctgggccatatgaggcaggcagcattccattcttctctgcccgttgggtctgtgcctgctggcctcttgggccagtggcgtaaatccataaacaaggcatcctcctcgtgccgaattcgccacccaggcctcgctt

SEQ ID NO: 454656 - DNA, 679 bp, Homo Sapiens
gatttattcagctacatcatccctctattaaccccaccccatcaggcacgtgtgcaaacctcgtgactttaccccacattactgaaagcaaaatatatttgcttcatctgcccctactaaccatccccctgcctgctgcctcagtcctgcaacctaaagctgtagtcgcctccaatagccagtccatgccatccctgcctgtgcctagatcagaggcccagagggccccctcagttgcctgagcagctggtggcttccagggagcatctgtgctctaccccgtgccccatgcctgccctgcgtgctggttccttcagacccctaaccctactaaccagcaggctcatctcacctccaggcctgaaacatttcttttcttacttttgttcctcccccaattttccctgggcctggagcagccaagaatttcgggctgtttgactttctgtgagcccccagcgaggggaggcccagcctccgaggaggccaggaaccctgcttcagcagcccctcagggcttcccaaggatgtccagcccccgcatccacacgttaacataatgagtcactaggcttctggggcagggcccaacttcacccatgcatgagagactctcctcctttccagagagaatcggatcgcaccacgtgtggcagcctgcggcgggcgggaggggggc

SEQ ID NO: 454657 - DNA, 683 bp, Homo Sapiens
tacttggcacagtagatgtcataagatgtcgcagagaagatgcatttccctgtaccctttcgtgcccctatcagtgagtctactgtgaacgcaggacatgaggatttcctgactctttcttaggcgaagcctagtcgtatctggtggaccgtgtccttgggactctcctgccctgctctgggcgatgctgtggctctgtgccctgtctgggctgcctgccctgtgtgggatgcgtgggatctgtgccctgtgtggggtgcctgacctgtgtggggtgcgtggggtctgctacacgcttggtgagaaactgcatcagggcttcccgccgtgtgttgctaacatccccacacacgtgagtgccttgggaccctcgtcaacacactgagctgaggccactggtccacggcaccctgcagtgcacatgcccttcctggccagcggctcccaggggcgccatgctctccaggcacctgccccgcctgcgagcacagcctggccccctgctgcactctgctctctctgcccgctcgggtccactgcagctgagcaggtgggagaagcctcttcaacttcacacacttgtcgcctctagcactgggcaaggtctggcattcagagttccaagaagtcccacagataccagtggctaagtctgtcttccctccaggaatggggaagcaggc

SEQ ID NO: 454658 - DNA, 964 bp, Homo Sapiens
ggagcgaggcctgggtggcgaattcggcacgaggggagaaagaaatgaagaagcttagggcagagctgaggaagagttgtactgaacaaagcgtgatctctaggactctgagagaaaaaagcaaggttgaagagaagcttcaggaggattccagaaggaaattgcttcagctgcaagaaatggggaacagagagagcgtcattaaaatcaatttggagagggcagtaggtcagctggagcatttcagaagtcaagtcatcaaggccacctatggacgggcgaagccgttccgggacaagcccgtcaccgaccaacagttaatagagaaaattacccaggtcactgaggacaacatcaattttcagcagaaaaagtggaccctccagaaagagacccagctgagcaactccaagcaggaggagaccaccgagaacatcgagaagctgaggacgtcgctggacagctgccaggcttgcatgaaaatatcctgttgcagccatgacctgaagaaggaggtcgaccttcttcagcacctccaggtgagcccacctgtctcggggctccagaaggtggtgctggacgtcctgaggcacgcgctgtcctggctggaggaggtggagcagctcctccgggacctcgggatcctggcctccagccccaacaaaggttactgggactttttttctcacatggttgcatgactctaaaatgtcggcgttgaatctcagcattgatggcgacatctgtagaggaagtcttactgggtatctggccaagactatcccattctccagaagcccgctgatgctctgcatggaaggcggtaacgtgtgcacttgaagaagaaaagacaacattccagtgtatacacgaatcactggaagcagagcgtaacgaaagcaggccaagaggaactgaatgcaaagtatggagagacgtagtagctgttaacgtccagacaatc

SEQ ID NO: 454659 - DNA, 677 bp, Homo Sapiens
ccacctctgtccctgaggttcaaggcccccatgtcataaccacgtgtccctaagctgtcaggcatggagggactggggagggttctagagatgggacgctcagagtggagaagtggtccctcgctaccctctgtccccagcatcgccagtcccagagctgaatgctaagttgtcgctcgactgaagccatcgatcatccgtcatcattcagcgcacctgtgggcaggcctccccattcctgtctcacggcagtgggcggtgccggtagctggcatggtatacggcggcagaggtggcatttggcagcaagtgcaatgaggagtcgagaggaccacagcccccagcacaaatcctatccagcacaggccatgcccgagccccagtgcctgggccaggggccacagcagacgctgtggggagctccgaaggcccaacaagtgttttgtttgtctcattcatggaggggcctgatgacaccagtgagtctcagcctcaaccagaaagagccctggctctgaggaggcccccagatgccaggcagccccagggcacaagtcacccaactctgatgtgtagcttccttcctgctgccagaagccccttgggtactgtgcagagcctgggtaccccctccccggcccaccccgggccttctcttctgttcccaccttcaagac

SEQ ID NO: 454660 - DNA, 715 bp, Homo Sapiens
tggtaatgtcgttttctaggacccagggtgttcattagcatttcttggccgtcaggtgaggcgagaggtcattcgtgttctggaacttccgttttactgtgtatggaagcatttgaagcgattgtatcggtatgatgtatcactggctgtagtttgtccatcctggagctggctctttgtggagaggaggtaaggatcagtatctaggtagaggggagcctcgccaggctccaggttcgggcacactgggccacagctgtcctcaggggccaggcctagacggggtgtatggtggccaccttcatggtgtggggtgagttgggggcccttcccccgcatttccgtccattggcccacaccaacccttacccagggccaggctctaagtgtcatttcccaagggccctgtctcctctggctgccagctagagggcacagcattggatgggggccatcccaggagccggaaggttctgtggggtcagcttctacccccagttctccctgggcttatgatgttcagtctttatatgactgaggcttcgtaagggccagagagggcagtggctctcaatcaggggtgactgtgcccctgaggacattcagcaatgtctggctcctttatgggctctcacgactgggggatggcgtgttgctgcatctggtgggtggagaacttgtgggagtacacctcctccgtctccaggacccggcc

SEQ ID NO: 454661 - DNA, 914 bp, Homo Sapiens
  misc_feature (59)..(172): n is a, c, g, or t
tggtgaaaccctgtctctactaaaaatacaaaaattagctgggcgtggtggcgtgcacnnnnnnnnnnnnnnnnnnnnnnnnnnnnnnnnnnnnnnnnnnnnnnnnnnnnnnnnnnnnnnnnnnnnnnnnnnnnnnnnnnnnnnnnnnnnnnnnnnnnnnnnnnnnnnnnnngactctgtctcaaaaaaagaaaagaaaataatatcaagcaaatcaaaatatcacccacgtcaggttccaggagtccttcgttccctccctcatcctgtcaccctcccggcctggcacctccagtttacagagacccccttccccctggagccagcctgacccctgggacagtgctgccgcgggggtcaggcaggtggtgagtggtcagggatgtttgtccgcacttgacagatgggaactctgaggcccagagtggcacaaggacctaccagagaccctgcagctgtgactggaggcttccacctttttcctgcccagcctggggctctggacctgggagaacacatcaggatgcccggggtggcagtaggtagctcccatgccttgaggcacttggctgctccctccaacccctgacagcctcattggggcctgcactcccctcggtgccttggaggcttcgcctagccctgtcctggtccttttaccctgagcccagtgctgagaaaatctggatccagagctggacatgtcctttctggatgctcccaacccgtgtctctgaggagcatgagtgacagagggaggaactggtccgaggccagagaggatggtctgcagctggctcctggtgcacccacatgccacgggctggaccccatttagggtgtgtactctgggaagaccgtaggaatggtgctctgagcagccgacaaagcaggggcctgggactcagctgggg

SEQ ID NO: 454662 - DNA, 1444 bp, Homo Sapiens
  misc_feature (109)..(109): n is a, c, g, or t
accgcgctgtggacagctgggggaggagaacaatcagacgtgccccggcacggtaagacacgtggaatgcagtgagtaatgtgagggaagcggaggtctgggtagtgtngcggagattgagtggcgaggggtggcgctgcgtggttgatagaggcgcggcgtaggtgaggggcgcgagaacccgtacaggtgcgtgcttgcggggatcccaggggccacattgtggtgcagtctaaccgcatcgcctgggttgcagttgagctggagtctccgggtgtccgtggcgcggcgggcgggcacggacacgtacatggaccgtagatgtaccccgctccaaagggtcgcttcggaaaatcggagtcagcgggtcgcacggatcaccgttgtcaccttttggtccctgggggccaggtgggcctggtgtccccggaaggtggagtccgaaagaactggaccctgaggttgagaaacctgggaggccttgctcgccttggtgtcctctggggcctgggggaccttggtctcccttgggacctggggggccaggtgggcctggggggccggagaggaaggtttctgagttggacaggaacgatcctggtgggcctggtgggcctggcaaacccttcccctggtgggcctcggggtcctggtgggcctggaatggaaggccctggtggcccacgtgggccgggtgggcctgggggaccttgtaaattaagaacttcttgatgtcctgggagaccagctgggccggcagggcctggggcacctggaggtcctgggggtcccatggctccaggaggtcctggggggcctgggacagtgagcatcgatgacccctccgaagtcacgatcttgcctggagctcctggttcaccttttattcctggtcggccaggggtaccgggaagtccctgaggtccctggggtcctgtgagacctggctttcctgggtctccagaaggtcctggtgggccacggattccaggcatcccagtaagaccttgttcacctcttgggccttggtgtccgtctgggccagcaggacccattgctcctttagccccgggctcaccaacagcaccaggcaaacctctcatgccaggctcgcctgtgaggcctcgaggtcctttctcaccctggtcacctttgggtcctggtggtcccactggtcctttgtcacctttgacaccaggaagtcctacttcacctcggagcccttggagacctacaggacctggagggccctgtgggccaggagagccgctggaacctttgggacccacagaacctgggacaccaggtgggccatgaggacctggttcaccagcagcccctctttcccctttctctccagatccaggaggccctgcctcaccacgaggtcccatggggccttctcgccctctctggccctcgtgccgaattcgccacccaggcc

SEQ ID NO: 454663 - DNA, 1118 bp, Homo Sapiens
  misc_feature (70)..(70): n is a, c, g, or t
  misc_feature (83)..(104): n is a, c, g, or t
tttgggggttagggccactttcccatgaaggtttagaagtgccaaattggtgggggcaaaaattcccagnccccacacagacnnnnnnnnnnnnnnnnnnnnnnctttttttgaaaggggttgggttgacccttgttctttcagttggggctgcaaaactccctggtaagcaaggcaatccctcgtggccaaatgctctcccaggtttggtgtcaacagatgttgcggaacctcaaagttgggggcatgtcacggatggcgctgctcagggccatgagccgcttgcagttctcccacgaagacggctgtcattggcagcaaaggcctcgaggatcttggcggtgaggccgaagcagccgcggggctccacgatcttctccagcacatggcacctgacgcctgccgtgctcacatactcatacaccacgccgtgttccaggtgcacgttgtccacagtcagggtgaccatggggctgtcctcacacaggctcagccggggacccagggacagcagtgggaaggctgaatcagcctggtcttcctcctgggcctgctcgccactggggtcctcagtggaggcctcctgactggctcgtgcttcctgggcatcctcatgggtgtggtagatccactggtacaggcccagggcctcttcgcgccgactccggaatgcctggaagtgctccaggacctcaggggcaccatcgttcatcacgttgctgccattgaccttcagaatgcactgaccagcacagagccctgcagccatggcctcagagcctctccccacagcatagacgtacggtggggcagctccacgaatctggaagcacagtgtgtccggctggtcggggattttgatgatctatttggccttcgtggccaccaggaggcgcagagggcggcgggagcagaaggactggttgaggatggactccacctctgaaaacggccgcaggaacaccaggtcctcattgatggagtagatcttcctccccacctgcaggccagccacctcagccagcgagcccctctggacggacttcaccaccacagccttgttcttctcctcgatgtcaaagcctcgtgccgaattcgccacccaggcctcgctacct

SEQ ID NO: 454664 - DNA, 1081 bp, Homo Sapiens
ccgacgcttatgtttgttgtgcaccccactttcccccaggactgtgggggttttagagttccggggggaaaccccccttggggcctcgggattcgaaacccccccacccaactcccgggggggaaagggggagcccttttttcttcttccgggggagggctaggccacaggggtttcccgtgccccaccccattaagttccttgaaaagcccccccctgggtccccaggaatgtaagaaagttccttcttccctgccagccaagttcccggggtccagtgaaggggggtcccccaacctcccggggcccccccaggttctttgcccttcttcatagaccatggtacagggcgaacattgggctttctgcagcttggtggatatcccttgctgggcgtggcggcacgcaggctgccccaccctgcgggcccagcacagcttccatgatctgcatgaggtccggggctttggcctcatcatccaccacaccaatctgtgcacgaccaccaccacgttccctgtcccggaggctgtaggtcaaggccagcccccgagccttctcagaaatgctggtcttgggcccattccactgaatcatcatcttgcctaggtccagcaggaagatgtcacccttattaaagctgttccaggagagctccacctcagtggcagacacgtgcttcctccctttgatgtgcagcagtcgctggatgttgaacaagttggtctccacatgcttgaggtcagatgctaggcctcccttcctgtagatgattcccgggcggaagtagctgcagaagcagtcggactcgtggccctgcgcctcgcggtgcagcacggtctggccccccagctcgtcctgtaggcgctgctggaaggcctccgcagcgccctgcgcttccgcacccgcctgcttcccgacccagtagtgcaggtcgctggacgccccctgcgtggccttcgggctctgggggacttagggtccgggtgtttgtgtatatgtgttgcggggaagacggaggtgcgggtggagaaggggaggatgtaccaagggccctcgtgccgaattcgccacccaggcc

SEQ ID NO: 454665 - DNA, 773 bp, Homo Sapiens
tcagtcacatgcatgcctgccacctccccagtgcctctgcatgaatctcccagaggaaagtccacgttccaggaagttgtgcatccattaattttcattgttattcatggggaaacccagtgccaggcttcttgtggaccatgcagatgtttttcagcccagcccacagccctgccctgtgggtagtgggattccccggaggctggtgaggacagctgcagcagagtcctaagcagacatatgggagaggtcagagaactggcgagcctgggcctctgaagcagagaagcagaggacattcaggaggtgcagtgtctggtgctacagaggctgaagaaggccagagttgacaattgggataagcagctttcagctacgtggggcatggtgggtggtgcaaaggaaggggtacagacagcccagataagaagctgcctgggaaagaaagggagggagccatagggcctcggcaagtttttaggatgggaaaggaaggccagcgataggaagacgggacaggaaaaataacgttgacaagatcctgagagggggtggaccagggttgaggagggggtacaggaaagaccccaaggcttttaagttagcatgtgcatggtgaggtgagaagagggtgcaaatgccacagctggcctccaaccagggaaggcggggattcagggacaggccagtgctagtggggagtgcacaggaggcctgccctgtgcctctgtgccggacagccgatgctggcggagactgccacgtgcccggcc

SEQ ID NO: 454666 - DNA, 1147 bp, Homo Sapiens
acatagaaggctgacagatgactcccacgtgcacatacttcctacctacaggtcacatccaagggaggtatggttgatacaagtgtgagcttcgcagatattgctgacaagcaagggaatttcagctgaggagaacattagttctttcactgaagattcctagtttctctgagaagttcttaagggtgaccagacctggccatgctagggtctacaagttacccatacgccacctcatcaggactgtggacccctctcactgtgtcttcttggcaggcagagcttactgaccccctgggatggtgtattcattaaaatacttgctgtgtttggtgtcttttccatgacataacacttctcgagaaaagttcctgctgaatgtagtttacctgtcccacgacttgaataatcagaggaaattatccaaagctggttactgacccaaaaggtaaccatcgattatacagcttcctgatttaggccctaaggaatgcagcagaaaggtgacgaacatttatcatgaccagagtgagtgcagtgagctagaagttggctgagaggaggcaacacatgttgatcagaagtgagcacatcacccgcctccttctccaccctcagaggcagcgatggatggcagccaggccttttcctagtacttctcaattgcacattcttccaagtgcaagtgatgccatcattaggaagagtgggcgttggaagaaacagcaaaaggttcttgtgtctatgttgatttgaaattaattaaatttgtatcctcttcatcctctgttggcagcctcagcagactccctcaggggctgcttctcttggaaaacatgagcgccattcaggtttaggattcactgtcacttgggttgtgatttgattccttctcttccttcaaggtaggtaaacattcaaagtcggcatttctattcatgctgttcatccatttatcaagctcttccatttcaatttccataacagagggtgtatcttcctcaaaaatagggactttcacgttttcacttcccagttcatatgtctgtaaagcactctgagatccttggctagaaggttcttgtttagttctttttcttttatagtatattgccctcgtgccgaattcgccacccaggcctcgctc

SEQ ID NO: 454667 - DNA, 1212 bp, Homo Sapiens
  misc_feature (100)..(100): n is a, c, g, or t
  misc_feature (104)..(104): n is a, c, g, or t
  misc_feature (428)..(428): n is a, c, g, or t
  misc_feature (533)..(533): n is a, c, g, or t
  misc_feature (546)..(546): n is a, c, g, or t
ggggacttaggagggggataaaacgggcgcggcgcctcccacccggaagagggtgacccgcagtacacgggcgcgggagaggagagccgcacccgaaatntaanaatatgtcgcatttttcacaaaagcgcgcaaagggcggggggaacccggaaaagaaacgcgtcccccgtgtaagggccttttccgcggacaccatgggtgggggcccgacccccattagagcccagttttaaaggggccccgtaaactggggtcaagggggggccgttttccccccattggcgtttttgggcccaaagcaaaaccctcgaggaatttttattttatagaggggttcagccttccagcagggttaggtgccccccttttcccatgctggaaagtcgtgcaaggtcccccggctgggttggtaccccccggggttnccagggctggctggagtggccacactggagtagctttttctggtccaccttgtccaggatgttcttccggagcacacgggccaggctcagctccccattgcacanccaggcggaaganccagttccatcagcagcttcaggatctcttctgtcaactccaccaggcagagctcatccacccacccgtaccagcacgaagaacgtgttcttgctgacgcgcttcttgaatgtgtcggcaaagggagagaatttctcatatctgtactgcagcttcttgatgagctcctctggggagatgaaggtcctgtaggtggtcaggaatgcctcgcagtacaacaccaaatctttcctgtcagtctcagtagcatggaccagtaagatgtccccagatcctccgcggacgtccggcccgtcatcaccctcctgcttgagcgtcagcctggacataatttcgttgtggtcaatgagggacagctcgtccacttcctcctccgactgagccgactccagagcatctggtgactttggggccctctcactgccgtctctgctgtccttcccagggacgccgctgaccgctgagggatctctgggatgtccgtctttcccagccggtggctctcctcgagagggagccagctcctcgctgctctggccagaggaatacagattgacatattcaccctcaccagcttcctcactggcgttttcactcagctgccgctgcttggggggtagggcgggcggcggggccagccctcgtgccgaattcgccacccaggcc

SEQ ID NO: 454668 - DNA, 1145 bp, Homo Sapiens
  misc_feature (98)..(112): n is a, c, g, or t
  misc_feature (119)..(140): n is a, c, g, or t
  misc_feature (170)..(170): n is a, c, g, or t
ggggggcgcttttatcttttaaaaggggaaaaatcaaaaatagggggggagggtcttttttggtaagagggggattatttttgggtgtgggcgccccnnnnnnnnnnnnnnnaattttnnnnnnnnnnnnnnnnnnnnnnaccgaagagggagcaacctttccccccctngggggtgttctgattccagggcctttgccagctttgcaggaggtgcacagaagctggatgcttttgtctggtggccatgagctagactctgtgccttttggtgcttttcactccacagcaaacccgcagggtctcctccacggctggtcagcagcttctcgtagagcttctcataggactcatatggtggaatgtcgatcccggttaaaagcaggtatgggccttcggaaggttgtctgtgttcgcgtctatcaggtggatggtgaacagccggggccctgccgcgcctgtagaaccttgcaaagccttgaagccttggagcgggactcgcgtggacccagtcacaaactgcaggagcctggccctcctttcttcatcgaacgtctccaccgcttgccagaaccaccgcacgatgttgctgtcggccacacagtgcttcagccgcgtgttcgacttccagtcgttcaagtctattttatccaggccgcctatgatcagctccagttccttctggtcaaaaggcttcagcagatgttgagggatgagctcattgaaccccttctgcagagctaagaactgggcttcgattcctctcataaacctccagtttacatacaaccggacgtattctttcttattctcctctgtgactggcacatttctgccattgggtttcagttcatgctgcaggatccgcccgaaggcgttgtgttccacgcagaaggtgtggtccagtacaggcgtgatgtcgttctctaggatccacaccaagctcttatgcagctctgggtccacagattccagatctgagagctggatgggcttccccagcagctgcttgtagaagggcactgtgaagcccccgttgatgtagtgtccatggaacacagccagccccatgatccgccccacaaagtgaaataagacaagtggtcggggttgatcctcgtccgaatcgccacccaggcctcgcta

SEQ ID NO: 454669 - DNA, 1073 bp, Homo Sapiens
  misc_feature (214)..(223): n is a, c, g, or t
agaaagaagaaacacctgtcctctccgctggttaggggattggggacaaggcctggagtaggtttttctcactcccagtgttccaaccaggggcggttgccccccaggggcagggaacggggtatcccggaaagggtttccaaggccggccccatggcccccttccgtgggtggacctggcaaaagcgggaacccttttgggggttggcagctnnnnnnnnnnggagggttggctaaataacagcggaaacggaaccaggtccatttggaactgctggagattttgctcccagaccaaagatcggatctaatatgttttcgttttcttggagtcagggactgaagacagctgcatttcacccattttcttcatcttttcatccatgtcaatcttctgttccagttttttgatctctgatttcaggagtcggagcgtgtcttccttgtggtggtgcctcgcgaccgcagtggcgcaggcagagtggatggcggtgatccagttttcaagctccgtctggctagtggtctgaaaaaggaaggcatcacccagggaattgctgaggcagaagacaaagtccttcttggggtgctcaggcaccgcctgcacaatgctgttctccacccagacggcgtgtttggggatgctgttgtggtctatcccagacctgccgtcgctctcgtagaaaaatagcgtgcatcctttcagggacacccagtagtgcttccacttcctccgggtggctgactccaccttcttgttcttcttgtgcaccaggaagttcttgacggccagggcgccggccttgcgcaccgtgccctgtgcggcggtcagcaggatgtccgactggcccggagagctcagggtgccgctgctctgctcatcgctgtgcgccgagccggcctcctccaggctctcgctgttggtggtgctcatctccagctcccgccggaagttctcgtacaccccctgacgagccgcatccccggtggagctgctgccgctgtcgctgcccacaaaggcccggcctgtggtgggtgacctcgtgccgaattcgccacccaggcctcgctcc

SEQ ID NO: 454670 - DNA, 1315 bp, Homo Sapiens
  misc_feature (648)..(742): n is a, c, g, or t
  misc_feature (1089)..(1105): n is a, c, g, or t
tagcgaggcctgggtggcgattttcaaaagggtgcgccagacgggcggtgccctgagggctccgggtcgctggcggcgtggacacctgagtcccggggtatgggtctcccgcgaggagtgagctgttgccgcagaatgggctgctggctcctgccctgcttcctgtgatcgagccggccctgaggactctgtggagatgcctgtaacccaccggaaatcagacgcatctgacatgaactcagacacgtcccccagctgcaggctccgagccttcagcagaggcggcagcctggagagtcgaagcagcatctcttgctccagaagcttcactttggatgatgagagcctgaagtacctcacccatgaggaaaaggatgtgctcctgttttttgaagagacgattgactccctagacgaggactttgaggagccagtgctgtgcgatggaggagtgtgctgcctctgctccccgtctctggaggagagcacctccagtccctccgagcctgaagatgtcatctacttagtgcagccagcacctggcgccggggtaggcgagggtcttccagaggggacccaggcagcatggcctgctcctgctgggaatgagcgcaggaaagaagatgctgagactcctccacctccagnnnnnnnnnnnnnnnnnnnnnnnnnnnnnnnnnnnnnnnnnnnnnnnnnnnnnnnnnnnnnnnnnnnnnnnnnnnnnnnnnnnnnnnnnnnnnnnggggggaacacccccaaactccttgcgcttctgagtcccacgcccccttcgtttatgggcgcccaaaaagaatttccccgaaaaggaatgcgcccgagggaaaccaaaagtcgcgttcttcggcgtccgcgctttcgcgcattttacagcgcagagggctcgggctccatctggcgccaaagcggggatacgtacccctgcgttcccccacttcatgtacctcatcctcgggcggccattctgggcaggcctccacaccactcctagaacctctctagctcgcaccctgcaccccctatcaccccaatcgcggtcaaaatcactgtgcggctcactgcagcgtctannnnnnnnnnnnnnnnngcgcggccgcgtccgggcgggcgccgccactcccgagacattcgatgaatgggacatgatcacagcatgtgagtagagcgggcgctcaacgacccagcgaccatatgagcgagcacaagatttctctcacgtcggcatgggggacgcccccataatcgctctctaaatacactttctcacatactctcgaccgcagcaggacacactgtg

SEQ ID NO: 454671 - DNA, 1169 bp, Homo Sapiens
  misc_feature (197)..(197): n is a, c, g, or t
  misc_feature (208)..(208): n is a, c, g, or t
  misc_feature (214)..(233): n is a, c, g, or t
  misc_feature (237)..(237): n is a, c, g, or t
  misc_feature (241)..(241): n is a, c, g, or t
  misc_feature (323)..(323): n is a, c, g, or t
caaaaaaacgtggtgttggggttcacaagggggcccagaaaaagggggggttacccaaaaaggggccctatagaaaagtgtcctggggagaagaagggaaaaaacctttttcacaggggggaggtgccccatctctgggcccccttgttttgtacatccgggtccatcccccacgccgggtcccaaaacacccaccntgtggaaaggntcccannnnnnnnnnnnnnnnnnnntttnaatntccttcaggaagcagcttatgccagcccccaaccgtgggtaaaaggaggggttggtatgcaggtgagggctactggggaggncacacgggaagcacaaaggagaaaccagccgtggcacagaagggctgccaagcggtcttccaggctggctgtcagccctcgttcttcagtcctccgagggccacacaggctccatcttaccggaatttgtgctccatgtgatctcttgtccccttggccacagcaaggtgggcgtggctcagaagatgctctgccgcctgtttttccctcgtcctggctgctggaaggccaagcctcggtagcctgggtccttctggagctggatctccttcagggagaagatggaggcagtgtcttcaagctggtgcacacgctctcccagagaccggaagtaggagtgactcagggcagcctctgttgacatgcgactcttggattcatacaggagcaggctgctcaggaggtggatgccatccgtatccaacctgggcgcgtggttgatgagcggctgcgggaggtagcaggggaagctgtaggtgcggaactcagagaaggcggtcacgccgggccacgtctcttctgtgggggtcccgaggaggcgaaagatgaggtgcagctcctccttgactgtggagcccgggaagaggggcctccctgtggccatctcgtagtggatgcagcccacgccccacatatcaatgggggtggagtactctgtggatcccagcagcacatcggggggcctgtaccacagggtcaccacctcattggagtaagtctttgtgggcactgacttggccctggccagtccaaagtcggccagcttcagctcccccctctcgttgatgagcaggttctggggcttcaggtccccctcgtgccgaattcgccacccaggcctcgctc

SEQ ID NO: 454672 - DNA, 415 bp, Homo Sapiens
ctggtgtttgagtacctggacagtgacctgaagcagtatctggcccactgtgggaacctcatgagcatgcacaacgtcaagattttcatgttccagctgctccggggcctcgcctactgtcaccaccgcaagatcctgcaccgggacctgaagcctcagaacctgctcatcaacgagaggggggagctgaagctggccgactttggactggccagggccaagtcagtgcccacaaagacttactccaatgaggtggtgaccctgtggtacaggccccccgatgtgctgctgggatccacagagtactccacccccattgatatgtggggcgtgggctgcatccactacgagatggccacagggaggcccctcttcccgggctccacagtcaaggaggagctgcacctcatctttc

SEQ ID NO: 454673 - DNA, 1085 bp, Homo Sapiens
  misc_feature (1010)..(1040): n is a, c, g, or t
ctgggtaataatagctcggggcccctatacctggtatccagtagtgcccccacgccgtgggcatatggggaagaggcgggcccccttaaactagcgcggggggtttcgcccgttggggattaggaaagcctttgggtggggaaaattccccccctgcccaggatgcaaggggccttttggccggtacacaggagaattcaagctgcggcccttaggtggggtggggggaattcagaatctgttttacctacggctttgcaggggacctctctgtggcattattaacaaagtgcgggtgttcccaagccaatgttaagtagcaagtcaggttcggaagtcacccccctttggatcttttgtggtgcgcctgcatgttgtgcaatgctgtacaaacagtgggccctacagggactcctggggagggaggacagtagcaaatctgaggctgagctgagacagaaaagcctaactaccaactcacgggctaggactgtgtcctctgtgaaccttgaaagcacctcactatccagcgccaagtcccagtgtcgagggacaactcacacccccacacacagtgccttcgtggcccccaagcagtccatagtcactgtgagcaaggccagctctgtcactttctcctcctcagcaatggcagaggtgttaactactggcaggcagggtaatcaatcactgtagtaagaggcgagggggctactgagagctcctcagagtgtctggagggctgcagaaatgggtgtgacagatacaggataggaacacgcactcagcccccagctgccatgggtgtggacaatgcaggcagcagtctattcagaaaggcctgagttcttggttcagatgctgagtatccatttgtgcttttaaatatgctcactttgaaagaagatagagtataaatcttttgttcttcctctaggcaaacactaagaagcttggggaaaactgtgttaggcttataccaccaggcatctcacagcattgtgtgactnnnnnnnnnnnnnnnnnnnnnnnnnnnnnnnctcctcccctcgttgccgaattcgccacccaggcctcgctaccta

SEQ ID NO: 454674 - DNA, 1566 bp, Homo Sapiens
  misc_feature (18)..(18): n is a, c, g, or t
  misc_feature (72)..(72): n is a, c, g, or t
  misc_feature (160)..(160): n is a, c, g, or t
  misc_feature (217)..(217): n is a, c, g, or t
  misc_feature (447)..(447): n is a, c, g, or t
  misc_feature (466)..(466): n is a, c, g, or t
  misc_feature (553)..(553): n is a, c, g, or t
  misc_feature (560)..(560): n is a, c, g, or t
  misc_feature (574)..(574): n is a, c, g, or t
  misc_feature (755)..(755): n is a, c, g, or t
  misc_feature (1210)..(1210): n is a, c, g, or t
  misc_feature (1216)..(1216): n is a, c, g, or t
  misc_feature (1257)..(1271): n is a, c, g, or t
ttgcagatctaatcatanaaatctttcgtatagtagtatgtgcccgagtgtcctgttcttggtgatcagtgnggtggtatgttgagctgtgagaagcgggcagtatacgcgtcatcactatccgaacccagtccaacgcaacgtagcgtgattctggtantcgaggcgttcttctatcatcacagtgggtggcgacggagcgagggagggacccttnactcacatgcgtgcgatagcacatgagtcgcgcgcaaccgttccgtgagggtcccccccctaccacgtcggcagtcgctcgctcgtagttgtctatatgtgtcctatcggagaagatgttctctagcggttgataattatgattatatcctctgtcggtcgctctgcctagtgtcatctcgtcttgtgtcgtccctagtgcctgttgatgtatgcgtgagatgtgctcgngctcgccgcgagccgtccngcatgcctcggagccgtagctctctcgagtgcggcagagtggtcatcacgctcatctctagcatgctctgtctgctgatgtctctantattggncattcttgtccgancgaggatcgtagtagcgtatgttactgtggagcgtgtgtgactcacggagagcgtctgtcgtatgacgcgctggtttcttatagagtatgtaggtgatgtatgtttgtatgtatttcctataggtgcccatttatctaggattgtgcggatataatcattctatcttcgctctcgagcctnttactcgtcaactgtgtcacgcaggagatgatgccgcgcacatctctatgtgtttcctctcacctccgccgggtgacgctcgtcggctatacccaatttcttcgacacaggtgttcctgcactgctggcgctctttccggtgtctgggacgctaactccatgatgacaaacaccttgtgccctccccgtcagtgtgtttgttcccctcagagtggaggcgccggcttcctcggttcgggggcccgcgtgtcctttgtattttactatgctcttctggttgggacccgttttaagctagtacttccctcttgattgcgggcgctctggttttggcttccagatgtgggcgtcattgtctgttcatgctcgtccaggtgctctagtagttagggcgtccaccttggcagcatcattgttctaagcagtgcccactctctatggtggctccaccgatnttctcnctccccgctccatggggcagcacccccgggcaccgccctcnnnnnnnnnnnnnnntgaagagcgggcgaaccgggcacctcctggcacaggggtccggggaatttcccgaggcccccccgcgacaactcccggtgcctctcaagggtaaggggggcccggaggtgcagcgggctggggacgggaggctggggtgccggggaaccctccagcgcagcgccgggagcctgcgcttccgagggcgtgcgaggctggctggcgggggcggcgctgtctgtgtcgggccccactgcctgtagagtaagtgactgtcccggctcggggagccctcgtgcgaaattcgccactcagc

SEQ ID NO: 454675 - DNA, 1037 bp, Homo Sapiens
  misc_feature (278)..(278): n is a, c, g, or t
  misc_feature (356)..(441): n is a, c, g, or t
  misc_feature (444)..(464): n is a, c, g, or t
  misc_feature (834)..(843): n is a, c, g, or t
  misc_feature (857)..(947): n is a, c, g, or t
gtaatagaaaaaaagtctcgccctcactatagggcggggttgaaaatttcccgggggtattttttaagtccgattcatttaagtcgagcggttagtccgggctttattccaagatataatccggcgtcttttattgtgatgaccgggagtgagtttaccctctttttccagagaaagtggggttccggaaaacagctcatgcccaggtgccttttgctttacctttgtgtcggcccacggacaatagatgcccgggttgttttgtcgtcttcgcccgngggccagccggacttacagaagcccttaaatataatttaccatttctggccaggcacagtagctcatgcctgtaccannnnnnnnnnnnnnnnnnnnnnnnnnnnnnnnnnnnnnnnnnnnnnnnnnnnnnnnnnnnnnnnnnnnnnnnnnnnnnnnnnnnnnttnnnnnnnnnnnnnnnnnnnnngagccaggcatggtggctcacacctgtggttctagctactgaggaggctgaggaaggaggatgatgagcctgcgcagtttaaactgcgccacttcactccagcctgggtgataagattatgtctcaaaacaaaacaaaaaggccacatcacattgtacactttaaatataaacaatttttgcttgtcaattataactcaataaagctggggcaggtaggggacacggcagtacagtaaaaatccctcacctatctgcttgcacaaatgcaagcagatttccatctgggcagcttttttcaaacttttggcagttgcatcctcacaactgccttattacttaattacataatatttaaccccttatgcttnnnnnnnnnncccacgaaactacnnnnnnnnnnnnnnnnnnnnnnnnnnnnnnnnnnnnnnnnnnnnnnnnnnnnnnnnnnnnnnnnnnnnnnnnnnnnnnnnnnnnnnnnnnnccacaaaggctgcttctcatttataccgggagaaacgttgccagcacagctgctgtgcaggctcctcgtgccgaagaagccacccaggcc

SEQ ID NO: 454676 - DNA, 1086 bp, Homo Sapiens
  misc_feature (196)..(196): n is a, c, g, or t
  misc_feature (256)..(256): n is a, c, g, or t
  misc_feature (321)..(321): n is a, c, g, or t
  misc_feature (341)..(341): n is a, c, g, or t
agggggcccatttgtttggggccctgaaaggggggtttcggggggtccttgcttgttttctgggggaaagaaggtggttagcccagccagcaaaaggggggcacatgttcgtgggggactggagaacccactttccctttaaccacactttttcttgggtcccttggctgaaccagagggtcaacctcaggacctngtgttgcaacaacctgaaaaaggtgtggtgtattctaccagggagcccttcccagggtcnaggcattcttttccccctacacccaaaaaggggtgagctggccaggtgaggccaggcaaggggtntagagggcccccttaacctnacgggcgggcatacctgctgacctggttctgcactgaacctgagtttgggcccttacacacttgacactctcacagcagcctggagggtgaggggccgaggggctcgcccaccccttctgacccaggctggaagctgctctcccctgtctgccagcaaatggtcactgatccaagcgggtcaggccaactcgactggagcagggcagagaagatcctgtttgtttcccgaggtaactcctgccatcctcctctgtctcttcacgtggcggagtgttttctcagcagggtggggcagggctcaggtgtgaaatcctgggaggcattctgcttgcccccaccttgctgctgcgaggccctggtcccactgctgagccgggggctggcagatccctgggaacggctgagcctgtgtttcaagggcaagcatcgtgcaccgaagcaggaaggctgcttccggcagtgtggagccggcggtggagggcagggttagggcctgttctccagctggccatgcttgaccctccagctccaggcgaagctgccatcaggggccagtgtgcactgcaggtcgatgcccgagtctggcacctccatgtcgtagcgaacaggctgcccgtctttggtcaccaagctgaaggctgcagctgggatctggctgctgatgccagtggcgatgtctcccactttgacccggtggaactcccggatgtgcaggtgttcaccattaagagactgtatttggac

SEQ ID NO: 454677 - DNA, 1180 bp, Homo Sapiens
  misc_feature (215)..(241): n is a, c, g, or t
  misc_feature (253)..(312): n is a, c, g, or t
  misc_feature (459)..(503): n is a, c, g, or t
  misc_feature (505)..(507): n is a, c, g, or t
ggagagtgcgcagtataggtgtggtgtaatcgtggtaggtgacatggaatagtgcagcggtatagggagaagcgtgggaggacaagtggtggctcgtatataatgtatcaaagggtagggtgggatcacacagaagagcgagtgataggatggtgatcgggagtgtaacgataatgtaatgactgttctctgctggaggaaaggtgtacgacgannnnnnnnnnnnnnnnnnnnnnnnnnnatcctaaggcannnnnnnnnnnnnnnnnnnnnnnnnnnnnnnnnnnnnnnnnnnnnnnnnnnnnnnnnnnncgatatagggtgtcgcagacgtgggaatctgaaaaagaaaacgaagtgtggggggccatgagaggtgagtgcggattttaacagcgtaatgatcggggtggagggtggaggtcggtgatggggtgttggtcttggctgtggaggtannnnnnnnnnnnnnnnnnnnnnnnnnnnnnnnnnnnnnnnnnnnncnnncctgccgggccacggggccctaggtgggggccagctcgaaggcgccatcactggtgggggtggtgaagaaggagggcgggttggaggccgcagatgcctgccccccactgccctgctcctgcgagtggcgctcctccagccgcaagctgcgctcaaagtccagcaactgccccatgaagttgaagttgggggagatgttagacttcttcctcttgaccaggtcataggcatcgttgagagagaggtggagcttctgcatgaggtaggccacagtgacggtgacagaacggctgacccccgccaagcagtggacgagcaccccgcagttctgggacaaggcctcatcaatgaactcaatggcctccggaaagaaccgcgacaggttctggctccagtggtcggagatggggatctgcttgtagtgaaagtcaccattcttctcgaagaagtttgggaggttgggggtgacattgaggatgtagcggatgcccagtttggccaggctctccaaattggcggaatcccgggcactgcccagatagaggttgggcaggatctggacagggaaggatgcccgcagccccactggtgggggtgtggcaccctccgaatccaggccacagctcatggagtcgcggtcagcctccctcgtgccgaattcgccacccaggcc

SEQ ID NO: 454678 - DNA, 1068 bp, Homo Sapiens
  misc_feature (616)..(616): n is a, c, g, or t
  misc_feature (677)..(678): n is a, c, g, or t
gtaaaagggaaaagcctatgggatttttttgaaaaaattttgatcttcattccaagaaatcttgcccaaccttaggttccaaaaaagccctatttaaggatcttccatgggcttaggataccctttaggttaagccaaaatggccccaaggggtttttaggtaatacaaaaaagaatcccttcgtttcaatacgcctggcgaccggatagggacatttcactcatgcggtttcccacagagtttgccaggtttccgtggccacaaaaggaaaatcatatttttcagcggatctagacacacaggggcacattgtcggctctttaatgtcttgtaactgttgctgcaacttttgcacatctgcattgacattggtattatccttgtccttttgtaatactggaatattcccacttgagatatcatcagtggcatcttctgaacttttccctccacagcacataatgaaaggcactcttcgttcaactactgctcgacactgcacacactttttcttcaggttaggacagttttcccaagcccccatgtgggcacagggttgaaaaaggacagttgctttcttgtcagagcataccacacattcttcaatctttgtcnctggattgaacctgttctttacagatgaggcatttcttgacacgtggagaacataaagaanncaggtagcaatatgtccacatggaccaaaaagagtatctctcttcatatctgagcacaccatacactcttgtaaggtttcagaatcattactaatcatagaaggactccgagaacccacttgaccactgactttttccttatgacactttgccagtgctttgcagagattcggatcaggacagagatcaagtggcgattgacccttcttatttcgaatgctcaggtcagcaccattggctgccaagaaacaggcaatagatgctgcactcttcttctctgccccctgggtaccaagtcccattattaacgtgtttttggatggctcccaggcagcatccaccttccccacatcttgccctcgtgccgaattcgccacccaggcctcgcta

SEQ ID NO: 454679 - DNA, 1162 bp, Homo Sapiens
  misc_feature (41)..(77): n is a, c, g, or t
  misc_feature (105)..(327): n is a, c, g, or t
  misc_feature (600)..(609): n is a, c, g, or t
  misc_feature (700)..(700): n is a, c, g, or t
  misc_feature (1050)..(1050): n is a, c, g, or t
ggcctgggtggcgaattcggcacgaggcatgagcatgttannnnnnnnnnnnnnnnnnnnnnnnnnnnnnnnnnnnngagatggagtctcactctgtcgcccagnnnnnnnnnnnnnnnnnnnnnnnnnnnnnnnnnnnnnnnnnnnnnnnnnnnnnnnnnnnnnnnnnnnnnnnnnnnnnnnnnnnnnnnnnnnnnnnnnnnnnnnnnnnnnnnnnnnnnnnnnnnnnnnnnnnnnnnnnnnnnnnnnnnnnnnnnnnnnnnnnnnnnnnnnnnnnnnnnnnnnnnnnnnnnnnnnnnnnnnnnnnnnnnnnnnnnnnnnnnnnnntgagccactgcgcccagccacatgtgcgtgtttgtgtatattgcgtactggtggggattgggcttttgtcatacctatcacccccccagcagaacaccgtactcaggtaaacatttcaaatccttgccccccactaaaactcacgcccaccctggacctgtctcgtaggttggctactttcccaccccttctggaccactcgcttaccacctcatcccgcagccccccccttcgctagcccgccaaccatgcgcgcccagcacccaacacttnnnnnnnnnngcgcgaagccgctcacactgaacaccaccttacaatcacgcacaccaccaccaattctggagctaggcaaaacaactaacagccgctagtnctctgagtatgaatcgcgttatcaaaataaaccgcagcatgcgaaacgagctaagatacaacactatcgtctcacttaccgaataacccccattaccctactccctcccaccacagcgcttcaccttaaacgccaccccttaaccaacacaccaaatcactcagcacgctagaacgactactcacgcatacacccatataccacaagccttagtacgcagcgccatacgcgaacgtctccgccattcagtgttaataaatccataaccattgtcaccacttagtctgacaccacccatatcccagttctactctaccacgtatcattatgtacctgaatatctgcgatcnttgctactcccaccaagacgatatatcatatactcacttacgcacacactacacgacatcacctcccacgcacccttccactcaactgtcttcaacctctatacatcacact

SEQ ID NO: 454680 - DNA, 1019 bp, Homo Sapiens
  misc_feature (166)..(271): n is a, c, g, or t
  misc_feature (286)..(327): n is a, c, g, or t
  misc_feature (977)..(977): n is a, c, g, or t
cggccagggccccgaggggccggggccagaattccccccgaaagcccccaggggaggttgggagaccaaagaacttggggccacccatgggcaaaaaccccccgtttccccccaaaccaattccaaaaatttagcgggggtttggtgggtgtatgccctatagtcnnnnnnnnnnnnnnnnnnnnnnnnnnnnnnnnnnnnnnnnnnnnnnnnnnnnnnnnnnnnnnnnnnnnnnnnnnnnnnnnnnnnnnnnnnnnnnnnnnnnnnnnnncagaccctgtcttgnnnnnnnnnnnnnnnnnnnnnnnnnnnnnnnnnnnnnnnnnngaaggaaacaggaaatgaggaatagttccattaggtcacacagcaagccagtgatggagtggagctggcaattctgatagcatctctctccttctttctacctgttctgccaccttttgttatcttacatacttgtcaaaatacaacctgaggaaagcaagagtgccagggcatggtgaaggctaggaatagtctgctgcaaagcagggaagccatttttccctcactggctatggggaaccctatgttaacagtgactgagctttttccttagttgatcttgtgcagcatctaacctggatgtgagcaaaccagtgtaagaaatgaaactgtaaagggaaaaaagtggatacgaagggaggcaggcatacttaacatgaagaaaacctggtcatttggcactctttcagttaggttctttcacttggctggaggtctggtgtgccatagcagttctgcaagcctgccagagaaatctaacgatgagagtacagtaccttcattgtctaaacttcctcccaactagttaagtgaaactagctaaatgagcagtgctggcttattccttcggagtcatattttttaacatgtgaaatataattattgtaagagtccactctcttaagtttcaggatttgttggaagactgnggaatagagggtggccattcctcgtgccgaattcgccaccca

SEQ ID NO: 454681 - DNA, 1694 bp, Homo Sapiens
  misc_feature (152)..(152): n is a, c, g, or t
  misc_feature (267)..(267): n is a, c, g, or t
  misc_feature (337)..(346): n is a, c, g, or t
  misc_feature (364)..(364): n is a, c, g, or t
  misc_feature (371)..(371): n is a, c, g, or t
  misc_feature (505)..(505): n is a, c, g, or t
  misc_feature (511)..(522): n is a, c, g, or t
  misc_feature (533)..(533): n is a, c, g, or t
  misc_feature (582)..(582): n is a, c, g, or t
  misc_feature (589)..(589): n is a, c, g, or t
  misc_feature (627)..(627): n is a, c, g, or t
  misc_feature (638)..(650): n is a, c, g, or t
  misc_feature (675)..(675): n is a, c, g, or t
  misc_feature (700)..(710): n is a, c, g, or t
  misc_feature (779)..(795): n is a, c, g, or t
  misc_feature (811)..(874): n is a, c, g, or t
gccactccccttttcaatggggggttgtttagcggagaatagggggcgtcccacttcacggcacctcggtgtattgggtccccccctttagtgagcccattttttgggcccccccctcacctcaagccagggggcagacttgctcgccgccnaggccgaaaatcgcttacggggggggttttcccccgcctcctaccccccattggggcggtgggggcccgcgcccccatttcccccaagatagtttttcccctccaagatgttttngccgggggaacaaagaggtctttgtggtgtttttcggccccccctccaaccttgtggggcgggcctccgnnnnnnnnnnacacatcggtcctccctngtccccncgataaaaataggtgttttcgttcggggttcctttgtacgcctccccctcccccaaaccgaaagggtgccccgcgaaaaatgcacagccctcgtgttatagaagacggagcgaatagggggggttgggggtgangcccannnnnnnnnnnnaaccaaaaggntaccccgcccccgcccagcgtgagcgggggcgcccgctccgacacaaanaaaaacncgtgccgcgggaggggtggtgcggaaaaatatattgtnttttgacgccnnnnnnnnnnnnnaacagatcatggtgtggcgggggtnggggggggggctacttttgggaggnnnnnnnnnnntctctctagtggggatggggtgtaaacaccccctcagtaccccggggggggatggtccttggggagggnnnnnnnnnnnnnnnnntcttagggggaagagnnnnnnnnnnnnnnnnnnnnnnnnnnnnnnnnnnnnnnnnnnnnnnnnnnnnnnnnnnnnnnnncgagcccaacgggggggagtcccgttccccctttcccccggttgaaaaagtggttctggggaagtccccgggcgaccccacagcccccccaggggcttcttttgggaaaggcgccccagggggaacccaaggctggggttccttgagacccaggctcccccccgctctctagagcccaggcatgacccacttgctgattggggacagggctgtgctgccgcccggctgggcctcgccaggggttacacgtccgtctccacccgcagacgctccatcctgcggacattgccctccacggccacacggctggtgatgaagcgggcaaagtcctcggggaaccatcccgtctctccgtcccggagcctctcgccatagagccacccatcctcctgctgcagaaccaggaccacgtccgcctgctgcagtgtgacctcgtctgcttgcttcgcgaagaaggccttggtgatctccacctggggcaggtctcctttgctggagaggccctgccactgtctctcactgtgtgtgagcgccacgatccaccgtgcccggtcactcgcggagtccgaggagagcaggagctgctcctggcggccctcgctgttgcgaagcagggtcacctggaaggggtggggcacggaggagctacggttgccgcccccgggcagagggagctcagacggctctatcttctctacctggatgtggttcatctgggcgtagtcctggaccatgtagctctcctcgctcttcttcttggtcgcgaccaggacatcgttgaaccctcgtgccggattcgccacccaggcctcgctgctag

SEQ ID NO: 454682 - DNA, 1860 bp, Homo Sapiens
  misc_feature (150)..(150): n is a, c, g, or t
  misc_feature (198)..(198): n is a, c, g, or t
  misc_feature (287)..(287): n is a, c, g, or t
  misc_feature (702)..(702): n is a, c, g, or t
ggttacacgacgtggtgcgggggtaagtcgacatagcgttgtaattatgttgggacgatcgttgtgcttgggcttggatgcgcgacgcacaggcaggcacgagagaagagcgagtgcagaacgtctaagtgctggtaggtcagacaggtngcggtggtggaagcgcacacggtgcgtccatttgtgtatatgtcacgnagcgggctcggatctactaacacaacatgcactcgggggggtttcgcgcgggttgcgaacggcacatatggtgtgtgaatgtaaagtanggaatactgtgcgctcctgtgatatcgagacgtcgttacgggtgtgtctgctcaccagtgggcaggccccccgaccgtcgcgcgcgtactaaacgggagcaggcatttctactcgtggcggcgatctatgcgcctgactgtcatcgtacttgtcactcagagccgtcgccacgtcattatggacaagaatagagtacgtcggcgttgatgtgaggggtcggcgcgagggatggtgtattgtacggccgtctgcgtggttggggccgctactcgcaacgcgatagatatgatggtgcggatacgactcagcggagctagaggacatacggcacatcatatgcggaccgcgacacagccagtatgatgcgggggtctagtgttccattggcgcgactgggcgttatccggctcaggnccgcgggaatgtagcggatgaggcgcggaccggactcgtacgagtacgcgagaggatggtcccccgggatatgcacagggcggtgtggcgcggcgaggggggaggtcggccgcaccaccggcgcggctgatgggccgcaactcgggcgggggtgttggccagcccgcgcacggaaacagctattgtttcgaacacacatgcacgactcgacgactagcggccggactcgataggaaggtcatgagcaccgcagggccgtttgatgcgacaggagggaagtaacatatctagggtcaccgggttctcactgtagcataggagcttgactacggggtgaccgccaggggcagctttgacagctccacggctgccttctgtctcatagtgggcccggtggtgggctctaggctgtacctcgatcctcagctccagctgctccatattggctgggcagaggccattccagtgggggtagggcagaggtcctgaagatagggctgtgtcccccaatccgggccttggaccaagcgagtggggagggcactgcccaggtagtccatgccagccacctccttccgggaacctcctggaggagccacagactcctctgctcccaagggcagcttcccattgcatgaggcaggctcctcagaccgaagcagagccactgcctgctcgctggaagtccgccgtgtcttctgagggatgctctcagctggtggggcccccacatagtcaaagggaccaggggaaccgggtcccgggccagaggcaatgggggtggtggaggtggctcagacccctcttcccccaggctgccacggcgggacagagctggggaggctgaagatggggttcccgagctggaatagcgccgcttgccacatggagaggcaggccgcggggaggctggggtgggcccaggagcactgaggagtagccagctatcctcctgccctcggcctccggggcttggaccatacaggctccagggatcttcgggggtccatggccgaggggaggcccggggcgagggcagcggggagcccaggccaaagcgggaggccgcctcatttagctcagactccacctcgtcgcaggctgcatacagggctgcctcgtcagaggcatcggagaagaagctccacgaggacaggc

SEQ ID NO: 454683 - DNA, 1009 bp, Homo Sapiens
  misc_feature (965)..(965): n is a, c, g, or t
taggggaaaaaagttagggttcggaatccacattaaatattggtcatggcagagcatgggcttcatcgatgtgtgaaaaaattggacgtgttcatctcaaacaccaggaaagtgcatctaaccaggggatttgccaacacatttgttagtctgtaaacaacacctgaatacaacaggagagctgccatttataggaaccctgagagtattttgataatgcagtcatccctaatttacctactgtgtaaatgtagattttggaggttgctcaaaagggatgcagccattatagggcatgttatagtgagaatgcagtgttaaaatctagggtgtggatcctggagacaaaggacccacatctctctgaaagtgaggtttcggttagagagcctgtgcagccacaggcagacacacctgagacttggtccaagcacctttcctccaagaggctttcctctatgttctcatttctcctcccaacaggtatttttacccctgatttgtaggcagaagtaaagcccaagcaactcaatcaaggtcacaaaacaggcatagctgagaccagaagccaagtctccctctgccttcttcactagctcactccaccctatcgtggcccagtccacataacactgtgccagggcctagcatctccttccacgctcccaggagctcagcaagggagcatcttgttctctggccatccagagcagcagccagggagaggaacagcttaacttcctgtcacttcctgcccaccctgccctccaccctagctcagcttggaggtggagccaacagtctcagtctccggaactaatcccctctagcagcccccactccctacagaaaccctgtgctaaggcaaagttgagaagttaaggctgagcagaacctcttgagagctggctgaggtcctgactcggtaagatcagttcactttatggacctgtcccaaagtggcnttccctgatcccctcgtgccgaattcgccacccaggcctcgctc

SEQ ID NO: 454684 - DNA, 1057 bp, Homo Sapiens
cgttattcttcaattcctgcacatttaccacttgagggacattcttcaacgttgatacagatcatagcgtttaccgtctggtgcctgactggccatctgccgcctgagtgctgctgcggcagctgcctgcggggctgtagatggggtgggaatggactaggtgcaccatgtttcacggttttcgtggcaagcattgtgctatcggccccttgaggaataattttgctagcagatgtagccactgaagttcccatcacaccaggtgaagaaccatgaaccaggtgagatttagcaaaaggtgctgcatggggcaagagactgggctggatggaaggagtgcgaaccacgggggcgtgccgaggggcctgaaccactgcctcgtcatctttacaggacgtccgtgcatcttcactctccagagactgggagacagatgacgttgagctgacttcatccaagtcttcataatatctctgagacagaaaggctgatcgagacaggctggctggagcagtggatctcactggtggggtcttcctcttggccaagaagtttctcagttgtgcctgtttcatgggggacagtttggctggtactttgggcaaggatttggtgtgagattctatggtgtttttcaacaaagcattgcacaggctttccaggtcactgtcaaaactgtgaatgctgctctgggaaggaacagccgaggacaggctccacagggaagtctgtttgtaaaggcggagctgctgaagactatccaccaggtgattcagcctcttcctctgttggttgatgatttcccgattgttggctagggtgttaaacagtgtctctcgctctggcacaagcaggtgcctttgttttttcttttgttccagatgctgatcccactccaagtctagaacatcattcacatcttggacagcaaatttcacatactgatgaaggcgccgaatttcctgaagctgagcttcactcttgggatccagtggtcttttataaagcaaatgcagataaccagagtcaccctcgtgccgaattcgccacccaggcc

SEQ ID NO: 454685 - DNA, 920 bp, Homo Sapiens
atttcttccctcaattcccaccatttgggtccaccttttgccggttacctgttctggccctcaaacaaaagtgggtccactgtggagggtcacaaattttgtcatttcatgatagcttttgggggccagtccgctaagaccctgaggggaactggatgaacacgccatagtccttgatgctcttcacaaaaccaatgagcagcattccaggatggatttctgagaagttcttgggatcctggccaccttctactgtggagaccaaggctggcttcctgcaaagaagaacacgcccctcgctctggctcagacacaggactcggtgaaggatgtcacctgcctggagccaatgatgtaacaatgggccgttggcaacgtggtccgacagatgagatgtggggaggaaagcacggatgttgtggggcaggacagccacctccagcccatctttggtcttctctaaaaccttcacatctaccaactgcccaatgttaatggcttttcctttcttctgactgtgtcctgcaggctctttctttggctctggatcactcgacagcttgaaggataagagcatcctctctttggatggctcacagttcaatacgacaaccttcaccacctggccagtgtaaaaaactctctccgggtcagggatatactcagtactgagctcatgcttgggcaccagtccctgcacattgttgtagaacttcacaatgcagccatagtccttgaccctgatgatgaagccatgtgtctgcagaccaggcttggcatcggcatagcaggtaatgacaggtagtttggactcaatcagggtttttttcagggtcatcatcagcttcttggcttcagggtcacaaagcaaaacccggcacttgacctcatcccctcgtgccgaattcgccacccaggcc

SEQ ID NO: 454686 - DNA, 912 bp, Homo Sapiens
  misc_feature (43)..(54): n is a, c, g, or t
  misc_feature (126)..(182): n is a, c, g, or t
  misc_feature (212)..(310): n is a, c, g, or t
ggggggggggggagcgcgcggccccccccctcctatttttgtnnnnnnnnnnnntttttttttttaaaccacccccccttttgggggttttcttccccccaaaaaagaggtttcttttttcttcannnnnnnnnnnnnnnnnnnnnnnnnnnnnnnnnnnnnnnnnnnnnnnnnnnnnnnnnccaaagtctctctttttcccctaagaacannnnnnnnnnnnnnnnnnnnnnnnnnnnnnnnnnnnnnnnnnnnnnnnnnnnnnnnnnnnnnnnnnnnnnnnnnnnnnnnnnnnnnnnnnnnnnnnnnntttcccggccgcccgaaaatttggggaccggttacccagcccctgggtttagggccgggccaagtggaaggcaccgacggggtgagagtttttcatggggtgggtgagttcggaggatggtgagggggggaggtggacggaggtcattgccggtcgcccctccacagggtgctggccttcttggcagaaggggccagttttttggctgggtgggggagacatggtgcttgcagggctcagtggtggtgttgctcaggacaggggacttcagcttcaccgtcttagaatctgctccacttggcggcgttttggagtggccagcggtggaacagttcgtttcctgagaatcgcagagatgggccgctccactcctgggggtctggggggccttggtggagtcgctgctggccgagtgctctgggctggagctgctggagcccctcctgtcgaggccagcgctctcgtcgttccccttcagcccatgcccgttggcagtggctgtagccaggagcttaggtgaggtagagaggacaacatccctgctgtcccaggagccctgcctttggctccctcgtgccgaattcgccacccaggcctcgctc

SEQ ID NO: 454687 - DNA, 1279 bp, Homo Sapiens
  misc_feature (979)..(979): n is a, c, g, or t
  misc_feature (1191)..(1199): n is a, c, g, or t
  misc_feature (1221)..(1221): n is a, c, g, or t
cttctgagactcacactggacaacatttttctctgtgtggccccgggagctggtcccctccctagggaagagcctgtggctgcgttgtttgaactttactgtgtggagatctgctgtggggacctgcagctagacaaccagctttataacaagtccaatttccactttgctgtcttagtctgccagggagaaaaagcagaacccattcagtgttccaaaatgcagagtctcctcatatccaacaaagagttggaagaatacaaggaaaaatgttttatcaaactttgcatcaccttaaatgaaggcaagagcatcctctgtgatattaatgagttcagctttgaattaaaacctgctcggttatacgtggaagacacatttgtatactacatcaagactttgtttgacacctaccttcctaacagcaggttggctggtcactccacacacctctccgggggtaaacaggtgttgcccatgcaggtcacacaggcacgccagggccttggtgaatcctgtgaagttacggaaactggtgatccagccagtaaatttgctcgtcagcatccacgcttccctcaagctgtacatagcctcagaccacactcctctctccttctcggtgtttgaaagaggacccatcttcaccactgcgaggcagcttgtgcacgccctggcaatgcactatgccgctggggccctttttagagcaggctgggtagttgggtctctggatattcttggcagccctgcaagcctggtgagaagcatcgggaacggggtcgccgacttcttcaggcttccgtatgaggggctgacccggggccctggagccttcgtgagtggcgtctccagagggaccacatcgtttgtaaagcacatctccaaaggtaccctcacatccatcaccaacctcgccacaagcctggcccggaacatggaccggctctcactggatgaggagcactacaaccggcangaggagtggcggcggcagctccccgagagcctgggcgaggggcttcgacagggcctgtcccggctgggcatcagcctgcttggtgcaattgctggtatagttgatcagccgaagcagaactcccagaaaacatctggaggcacaggccttcagcaaggacacaaggcccaagggtggtcaatctccgggttgtgggggaaaaggaaatcttnnnnnnnnntttccaccaaagccccattcgngaaggaagcctggcttgaaacctgggtggttccaacaaaaactggggcttaatggggc

SEQ ID NO: 454688 - DNA, 606 bp, Homo Sapiens
ggattgtagactttcaatgggaggattgtgaggccataaatctctctcagagcaagtgtgggctccagcgcctgtcagatcccagctctgctgttcagggctgactgtgaccaagtcctgactcccctgcgccccagcaaggctgtgccttcagcacttgcttgcgcctggcttgtgccagctgagcgtgagctgagattaactgagcctcaaatccaacccagggtcaagggacccagctgtgggagttggggtagcccaggctttggtttctcctcagaggcctgaacccagggcaggatgggggcaccgctgggaggcaggttctaagatgaaccccaacaacccccaactcctcactttccagagcagtccacggatattttgatccaagagagaattactctgacaaggagtccctgtcgttcatgatagacacaatgaaatccaccctcaaagaggtaaggcggggctcaggcagctggtgtccagccactgtcgcccactctggtcccacctcacccatctcttctcatgcactgggaaagacccctggtctgccgccaggcccaacaagtgaccctcgtgctttgatcgccacccagc

SEQ ID NO: 454689 - DNA, 1299 bp, Homo Sapiens
  misc_feature (684)..(684): n is a, c, g, or t
  misc_feature (869)..(869): n is a, c, g, or t
  misc_feature (1027)..(1027): n is a, c, g, or t
  misc_feature (1206)..(1206): n is a, c, g, or t
cctgggtggcgattccagcacgaggccgaaccagagcctcatgagcatcaccctgcaccaccggatccggcaggcccccaacccttactcgtcggaaatcaaggcctttgacacccggctgcagagaggggagctcttctccagggaggacctggtctggtacaagaaggtcttgtgggaggctcggaagttcgagctggaccggcatgaggtcatcctctgcacctgctcctgtgcagcctctgccagcctcaaaatcctggacgtgaggcagatccttgttgacgaggcaggcatggccacggaacctgaaaccctcatccccctggtgcagttcccacaggccgagaaggtggttcttctcggagaccacaagcagctgcggcctgtggtcaagaatgagcggctgcaaaacctgggtctggaccggtctctgttcgagcggtaccacgaggacgcacatatgctggacactcagtaccgcatgcatgagggcatctgtgccttcccctctgtggcgttctacaagagcaagctgaagacgtggcagggcctgaggaggccgcccagtgtcctgggccacgctggcaaggagagctgccctgtcatctttggccacgtgcagggccacgagcggagcctgctggtgtccccggacgaagggaatgagaactccaagggcanccctggaggaggtgggctgagggtggtccgtatcaccaagcagctgacccctggggaggaccgtagagccccagggacatcgcccgtcctcacgccctacaacgcgcagggcctctgagatcagcaaggccccttcggcgagagggcattcgcccgggggtggcccgtgtccctccatcaccaanaagccaagggaagcgaagtggcgccttattgtgctgggtgagcacccgtcccgcaacctgtgcccaagaagcgaccttggaacccagcgggcccaccaaagaacttggcctcaaagaaaagtttcttggggcttcctttggtgggaccccccacccangtgaaacgtgggtttgccacgcccgggcccccaggaagggggctcctgcccctgatcggaaaaccaaccatccctttcggggcttgcttggcccccctctggggcgtaaaccctctcgggagcttttgggcggaggtttatgcaggaaccccctctggctcggtgcccgccaagtatgngcgccttcttcgcacgaagggcccaacttgtcccccttctctgaaaaaacgccccctcccacctgcgcacgagggctgcccaggagaacgggc

SEQ ID NO: 454690 - DNA, 1504 bp, Homo Sapiens
  misc_feature (30)..(31): n is a, c, g, or t
  misc_feature (87)..(87): n is a, c, g, or t
  misc_feature (124)..(124): n is a, c, g, or t
  misc_feature (134)..(134): n is a, c, g, or t
  misc_feature (213)..(213): n is a, c, g, or t
  misc_feature (272)..(272): n is a, c, g, or t
  misc_feature (500)..(500): n is a, c, g, or t
  misc_feature (591)..(639): n is a, c, g, or t
  misc_feature (1026)..(1072): n is a, c, g, or t
acatctgccgcgggtacgggggtcgtaggnnactacggggcgcggcgtcatacaaaccgacgccggcgcgcgaaatagaatagcgcngggataccagatgtttccttgcctacaaaaagccgantggggtgggntatagggggcaggagggccgtgggggggcctaaaaaaaaccgaggtggctacagcgaggggcgaccgcggatacatatnacggcggtgacacacaaagggggcgggggagataagaacgcaggtggatggggcggtantagagggataagaggcggcgaccgcaggtgtgtgggagcgggtggcaggaaaccagcccgaccaagagggaggagtgacgagcagagaggaaaacacaccacgacagtggtgtgatggcgagggaaaaccgcgcatatgtggggtgtataagataaagccgcgggattggtggtagtgtatatccgcgggcccccgcgaaatagtgggtggtgtgggatggtaagcgncccaccggttcggctgggcggagtaggacccgcgcatgcggagccagccgggcgggcataaaggagatggtgatgtgaaacgggcgaaacnnnnnnnnnnnnnnnnnnnnnnnnnnnnnnnnnnnnnnnnnnnnnnnnngtgggacagggccggcggcaaagggggattgggggggcacaaacggggtaacacggcagtgggggatgaaaatacggggcgaaaagcggggggaatggtacgggaatggatataggaaatgggggggcaccggcactgtacataacgcgggcgggggcgaaaaaaggagggggcgcataaaaagtaaaaggccgccagggcgaatggacacaatacagcataggggtggagtaggatgccgcggggcgctaggcgtatgtgggggacatttacgggggctaataaaacgggggtggggggcgatacccctttgattctggccaatcgggcttgaccgggggtggataaagagcggatataggcatggaagggttggatcggataaannnnnnnnnnnnnnnnnnnnnnnnnnnnnnnnnnnnnnnnnnnnnnncgaggtataatggaaggtggggggcgcgacgggcgggttgggatagaaacgggggatcgggctagggacggggagtctgcggacatgaagaggggggcgcaaacccacccctgggaaagtccccggagactggcaggccactcgcccaatcgcgccgcgcgctccgggcgggcccgcggccgcctggggtgggaccgagcgaggtaaacaccggctgcctgcggttccgggggcccgcggtgtctctcgtcccttcggcggccttcccctctaggagcgacttccctggggccaccgtcccgggcctgcgcggcgccttgccgcactcccagcgccggaagcccctgtcgaaggcctggggccaccttgaaagccggaatttcagagcggaggcgagccacagagaccctcgtgcggaattcgccacccagc

SEQ ID NO: 454691 - DNA, 812 bp, Homo Sapiens
gctttgctcttcgggaagagcagtactctatccagttgaggtaaatcacacagaaactctccttagatatgcctgccagtcggtggtcatagtcttcatcaatgtttggattaaaggtcgggtccacatcgacataattgcgatcagcacacagacgaagtccttcctgcattgtctcattagctagccactcctctagcttagacgaggtcgtaacataataaatgatacccttgacatagtaagtggtgagtactttccgaagatcaaagacttgaagcatagaagcagcactgttatcagtgatgctataaccctcccagaaatgtactttgtgactatcacttcccaagctagccatcgctgggttaaatgcagcattaaatgaaagcatgtgaggaatatggccaggttcacaacagcaaaatccttcatcttcctctacaccttcagtaatggcctccacttcccgttgttgacagtaggtacctctgaattcaagtccccgcagctgaaaagtgaccagaccattgcctatctctataaggtgtactaatgcattgagatagtcagaggcaaggatgaaacagtcccctgtactgtagtttccccaccgtcctagtagcaaatcaccacagaggctgtgctgtagggatctagttaaatgctcataaaagatggaattcagattgttgtcatctgatcctggatttctatcaagctgggaagccaatctggtatttgaatgatccactcgttttgtgttatagtctctctcccagaatttccctcgtccgagaacgccacccagc

SEQ ID NO: 454692 - DNA, 1343 bp, Homo Sapiens
  misc_feature (598)..(623): n is a, c, g, or t
  misc_feature (1268)..(1277): n is a, c, g, or t
tctcacaagagggttacagtttacaaaaataagtcttttggccttaagtcatcttggaaataagtaatactgcatctgactctggtgcgtattagctaggaaaggttgtaaatggtgtcagtgaggtggggaaaggaagtcttcctgtcacatatgcaggttcgttttcattctagggcagtgccaggaagtatattgatagctttgtaggtacaggaaaaacatcatcattatttcctctgttcacatttactggtcttaattaacaggtaataataatacatgtacttttagcctgaaacctcttccacgccatgggtaacttgggggagagaagaatcctccaaacgatggagtagccagtggtaatacgaagcagggagaacagaaaggtagagttactaaggccttcagtgaacagaaaggagcagagagcaagattagatctgagaagatgctctggggactgagcccactgttgttggtgtcagggaggcttactggagccacacctgcaggcgctgtgttcaggcaccaccttcctccttgagctttgcctgtctcttgccttatcagttcttcctccaccaccctacannnnnnnnnnnnnnnnnnnnnnnnnntgtgtctccttgttacaattaagtttctggatattgacttaagaactgttaggaagaggactagaaaaggcttcccctgcctatcctctccgatcaccaaggtggaagggagctagtaggactcttccttgacacaccttgtagtctaaatgttcggaattctattcaagacttacggtaactattatgagggaggcatggatttccaccgtcgggccaggaagagcacctgttgctgcaagatcaaagaagagaggcactcccaaacctgacatgcaaattatcctctgagaatgaaattggaaatgaacacctaaccaactattgccgggaatgaccccaactgaaccattgccaataattgatctgaaaaacatggcctgacattgcacatttaacccaacaatgcctgatgacccaatttctttgcggccctacaaatatacttggagaaaaccactagggggctttggggttcggggaaaaaggagctgggcaattttttaaccaacttcgtgtgggaaccccaggtttctaaccctgtggaaaataattgccaatttcggggaaaaggggttcctggcaaaagtcacgggcaccattccagggttggggccctggcttggggcccttcccataaccgcnnnnnnnnnnattcctctggggttcccggggggtgacctctccccaaaggaaaattgggccccttccacgctgggg

SEQ ID NO: 454693 - DNA, 1103 bp, Homo Sapiens
  misc_feature (124)..(124): n is a, c, g, or t
atttttccaagggggcttttttctccaaaaatggtttttttccggggccttggtttctttcccttgtaagaccggcttaaattccttttccccatggatatttttcacatgggatttggggttntaaataaaaaatggaggataggggtaaaggcctggggcaatccgtaattctctttatgggcatttcccagacaacatcaaaggataccagtgtttgccctttttctggtatttcttgtacagactgaacacttgttccatatagatgattgttatactggccagcttcaatgaatttatgttcctggatatctttttccatctgctctctgaaagtcacaaaatgataatctcttccatctacctcataatctcgttttggtctagttgtatgaggaacacaggatccaaatttgtcaggaaattctgagatcaagtcatcatttatcctgtctttcataggtcccaatatgatcactggtcgagtataattaacttcttgttgattcactggttcataagataagacgtattcttcttgaccacggtaactactttcactatcgctggcattagaagttacatgcttcaggccttttgatcccatgtcgtcagggatctcccctttatctctcgttttagaattgaatttcactgtttttaatcgggctcgttctttcttctcaactctgcgtttactgggaatcactccgacctcatcgctctcaccatctggtgtaacctgcctggcttgccaccattcatcatcagaagcattaataacatggaggatatctccaaatttgaagttcagtccctgactgggaagcccactgtctttagtcttgtcataatcaaaaagggctctgacatagagggatcgcttctggctagttcgaagagaacctgaccctgaactaatactactattcatcatctgctcccgtaaatcatgtattttagcttcaaaacgactgtatcttcaggtcgatattgtgcaacaattgtgacagcctggccagcatttttcaatgcagctgctgcctgctcatgactagcagctctgaggtcaaccctcgtgccgattcgccacccaggcc

SEQ ID NO: 454694 - DNA, 607 bp, Homo Sapiens
  misc_feature (12)..(12): n is a, c, g, or t
  misc_feature (30)..(30): n is a, c, g, or t
  misc_feature (101)..(101): n is a, c, g, or t
  misc_feature (189)..(189): n is a, c, g, or t
  misc_feature (198)..(210): n is a, c, g, or t
  misc_feature (231)..(231): n is a, c, g, or t
  misc_feature (240)..(240): n is a, c, g, or t
  misc_feature (254)..(254): n is a, c, g, or t
  misc_feature (265)..(265): n is a, c, g, or t
  misc_feature (286)..(286): n is a, c, g, or t
  misc_feature (304)..(304): n is a, c, g, or t
aggatccaaggncatccattttatcctggnctttcataggtccccaattatggatccacctgggccgagtattaatttaacttcttggttgattcactggnttcataaggataagacgtattcttcttgaccacggtaactactttcactatcgctggcatttagaagttacatgctctgaaattgcanggacaatgnnnnnnnnnnnnncagggtcatggagtttaaaangcaaatcantccaaaatgaattnttgaggatatnaagccatatataacaaaatanttttttaacagcatgcanttttctttttctttgaaacgtttaagtttttcaaataataaatatatattagcaaaggaaaactcctgtaattaaggacaatgccttatttttgtacaacacagtttatgaacaaatctattataaatagcaagtagaatatgacaaaaagggctaagtgaccctgaattagtccaaatgtagacatgagtactcaaaggagaaaatactgttggcactatttcagtttttgaaacagcgttaactggcaaaggggacaaactatatttaaacaaatagatgcccattttaatgacgggatgt

SEQ ID NO: 454695 - DNA, 808 bp, Homo Sapiens
ccttaaagaaaagcactttatttttccatttaaaacaacttggtcacagggacgttatttttacataaatggaagtaatttgtaaaatttccatgtaaaaggccttgtgtctgagtctgaggtgataagaggatatgaatacaagtatataaaaacagtgcaaaatgtgcagcccacagcctccggagttggcttcagaaatcccccttaatgttgctagaccagttacattaaatattaaatgtaacaccaggtaaatattcctgggtttcctttagtctaacatccaacccagatatgcaataaaatgaaaaactcaaaatccctaacaactcaaaccatccaatcacccagaccattaggatcacaatgagttgagactgcaggctctatactgtgacatctcgtcagtggctccatcttaagaaatacagaattttagttgcatcagtaactagaatagactagctctgcttttaaagctttgccttttaaatgtagatttctagaagttcactttcaaggtgccatcaagaaggctaggccactaagaagtcacaagcccaacctagacatcgcagcctcttaagacatttgtcttcactaaccgttcagtctttaacctgctgctgatcctacaatgaaaacacttagtgccagctgaagcgtggatgcttgtctatcagcaacataattaagtgtagctgattctgcaagaaatttatattagtcacagcagacatccacaggaacatactgaatcgtactcagtagtgagtttcctcgtgccgaattcgccacccaggcc

SEQ ID NO: 454696 - DNA, 498 bp, Homo Sapiens
  misc_feature (416)..(416): n is a, c, g, or t
  misc_feature (431)..(431): n is a, c, g, or t
  misc_feature (436)..(436): n is a, c, g, or t
  misc_feature (444)..(444): n is a, c, g, or t
ttttttttccttaaagaaagcactttattttccatttaaacaacttggtcacaggacgttattttacataaatggaagtaatttgtaaaatttccatgtaaaaggccttgtgtctgagtctgaggtgataagaggatatgaatacaagtatataaaaacagtgcaaaatgtgcagcccacagcctccggagttggcttcagaaatcccccttaatgttgctagaccagttacattaaatattaaatgtaacaccaggtaaatattcctggggtttcctttagtctaacatccaacccagatatgcaataaaatgaaaaactcaaattccctaacaactcaaaccatccaattcacccagaccattaggggtcacaatgaggttgagggctgcagggttcttttactgtggaccttntcgtccggtgggctnccttntttagggnattacgggttttaggttggcttcggtaactcgggttgggctgggtccgcttttt

SEQ ID NO: 454697 - DNA, 615 bp, Homo Sapiens
tctctctgcccggctcactgagcagcggcttgaccttggtgaagagccgccaccactgccagttccgcagcttcaggtaggcagcgcagttccgctggaggaccttcatggcggtaagctgctgctgccgcttggcaaatgctttcctggccaggtagcccctgcagcaggcctggaaccctatgatgacgtcggtgatcttcaggtctcgctcctcctccaggtgggccagcacaccggcacggaagaagactttgctctggccaatgcggtacagattgctgtcgagctccagggcttttatcatgagcacgcacgcctgcttcccgtccatgaaacccttgggaatggagtttggagtcaggatctcatatctctgccgaaactcctggaagaccaccctgttggggaagccctggcggcagatacggatgccctcgagaacaccgttgcagcgcagctggtccagcacgagatgcgggtccagcttgccggccttcttctcgtggttggggatgatgcagcggacaaagttggggttcgtgttcctcagcgtagccatcagcttggccagctgctccttgtaaagctgcctcgtgccgaattcgccaccca

SEQ ID NO: 454698 - DNA, 1300 bp, Homo Sapiens
  misc_feature (504)..(556): n is a, c, g, or t
  misc_feature (744)..(774): n is a, c, g, or t
  misc_feature (892)..(922): n is a, c, g, or t
tgggtggcgaattcggcacgaggctgccgtccctcatccaagaaggccctcaatgcgggctggtggccttgtggatggcaggtactctcctgtcgccccccagtggcgtccccctggagagactcatacgggtggccacggaaagaggctacacggcccagggagagatgttctcagtggccgatatgggcaggctggcccaggaggtgctgggctgccaggccaagctgctctctggtggcctgggcggtcccaacagagacctcgtcctgcagcacctggtcactggacatcccctgctcatcccctacgacgaggacttcaaccatgagccgtgtcagaggaagggccacaaggcacactgggcggtgagtgcaggggtcctgctgggtgttcgggctgtgcccagtctcggctagcctgaggaccctgagctgccggggctgttccacccagtgctagggcacgccctgcccacccccatcccctgccagacgaagggcnnnnnnnnnnnnnnnnnnnnnnnnnnnnnnnnnnnnnnnnnnnnnnnnnnnnnacctatcccgcaaacacaagggccggccgatcgggccgggagcgggccgaggccctccccgcggcccccggtcgcgtcacccccgcccggcccacgcaacggcgaaggtaggcacaacccgcgagaatacgtcgcggcgccagagccggccactgtgccggcggatccctcgcccggacagcggcctnnnnnnnnnnnnnnnnnnnnnnnnnnnnnnnacgggggctcgcggagagaggatgggggcggatacgccaacgcccaccgggacgacgaacccagcccgccctcgcggtgaaagcaccgccagtgacgccggcagacgggagacaatannnnnnnnnnnnnnnnnnnnnnnnnnnnnnnccgccccccggaacacagacgcaaatgcacccccacgcccaccggattcacgccccgccggagcgcctcccacgccacagcacccggggtagggctccgccagccgccgaccgcgatcaccccacgcccgcctgaacgcccagccacctcggcacgcctagaggcgcacgtataagccccggcgcgctgccgcgcgtcgcggccctcatggaccgcctacagcaaatctcacgcgccacctccaatgtgtccggaagtcatgatgtgagagtacccgagagaccgctctacgcccaccgcgcccgcccgcacccccgatgcgccgaattgctcagcctagaatcgccgttcgtcgcggctaatagggcaccccctcct

SEQ ID NO: 454699 - DNA, 1228 bp, Homo Sapiens
  misc_feature (1200)..(1200): n is a, c, g, or t
gctgggcttctttctgtctctttctgtctttctgtctctctccctacccccgctccctctttccagtgctctggctggctgtctctccctttctccccctctctctctgccttaggctctgtctccaccgcagggcccaaggtgaaagtcctccccttgccggaggccagctggcagggcctttcgtggctggaagtggccagtttggttccggtgctgacccctaggccccagcgcagctgcctcccgtgctgtctgtctccccctctctgtttatgtctgcgctgtgtctcacactcagagcctccttgcttctgttaggttcccatctctccttctgcctcactctgggcctcttctttctacttgtacatttccacctctctaggcctctgctctcactgtccctctctgtctgtctctcagcctttatctctgggttttgatcccccactccaggatctgggccccttcttcccccttcgctcaaacctgggctgctataggcagcagaaccctgaccactgagttaaacaccccccaggcgcaccgacggacacccccagcaaaggaaaaatcgccgcctattctcctaataataaccaggaagcgcgacttgagcagaacgcaggaccagacaacatataagaaaaaaaaggcaacagcgcatgcaataagactatcaaccaaattacacaaatatacaaatcacatcactatgcagcgctataagctgaaatatcccaagcacagggtggatgtgcaggatgaaggagactatgtgacttgttgccggtacgtaaataaagtagaaatacaaaattgaataagatagatacgtaaagattcactcacgtgaagaggaaaggtatattacctaactcttagacaataatcaatatataatataatacatactacagctaaaatatatagtgaaacaagagcaaagcactaagactccaatgataatatgatagaatgaacgactagaaagaattaacatgtgagccgacgaccatgctcagagaacgagcaaccaacacacggtatacgcaatgcgaacgattgtataagccggccgtgtctcgattatacctagaaatatacctcgggcactcccatcgatataattagaccgtggcacaccgaaatgcctaaattgaaacgctgcacatgcgtcgcgagccgactatacantatcagacacctcgacgccacctgcacg

SEQ ID NO: 454700 - DNA, 1226 bp, Homo Sapiens
  misc_feature (547)..(547): n is a, c, g, or t
  misc_feature (1150)..(1150): n is a, c, g, or t
  misc_feature (1202)..(1202): n is a, c, g, or t
tgggtggcgaattcggcacgagggcagcttcccggaaagagcaacgtattttaaaaaggaaagtaaagcccacagagggaaatcaagggtttttttgagcaaagggggtcttctgaaggtaacttattatttttttctttccaactgtgtgtcacctatgaccttttctgatggagatgcattttctttttccaagcgtaagcttcctaatgtgctgtgcgtgcttcctacccacccaccccgagcagcctggccgggcaggactggggctccatggggactgtcaccctggccctggaggtgcagccgctggcagcagcctcagcaggctggggtgggaggcaggagaaggcagagctgggaagccctccacccctgcctggctcctgcagtcgctgacttgctctgtcccatgtcccatcctcggctgtcagggctgctgactctgctcagccaacagctagctccctcgctcgcctgctctcttcccctctgttcccacgccagctcctgcccctggaaccagagatgacaggcccagggcagngaatagcacattcaggaactctagggcacccggacccccccacccacttgcctcctgaggcctcagtggggaagggcaagcaggggtcttccccaaaggcacaaatgaacccactaacttcaccctagaaaccccgtagaaagaaacacccctgcgcgcgaagaaaccaagcctgcagcgcaccccaccccccaagctcgggtccctcaaggtggagggacctaggcccgcaccttcagggtgtacgcagagatacgaactgaacgggagggaaacacgcccgccaacaaaatacggttccaccaccaccccacacaggcccctcaacctcaacacccgtccacccccatatatacctccccagacgcgcgaaaccactcatggtaccctggaggagacgagtcttcaccccgactggtcgcacggaacacgaccaatcgccgtcagcgcaaccacgctccaactcgtcgctgccagtcgtcgaagcccacaacgagcaaacttgacgagcctatcatgaccctgcgagagaacgctgagcatcagccacgacggagaacccacccaccctaacccctctaccacttgtacaacaagacaagncagccgtcacacgcccggacgaacatgaacgtccacccgcacgcccaccganatagacccagtcactgagtcgggc

SEQ ID NO: 454701 - DNA, 1148 bp, Homo Sapiens
  misc_feature (37)..(37): n is a, c, g, or t
tggtgtcgaagaggcccctcagggagtgtattatagntgggggcggacggggatgaattctagtgggggagagtgcgcgcgcggtaaaaggtgaactatccgggggcggcgaaataacgggttaggggggtattttgaaagggggccggtgattatgtgctgctatcgactgtattccgcataggggtggtgaatgagggaggcaggcacggccaatgatgttcatggggggggttcacatatccccccggatgagtaaaggtggagcggccatcacccagccatctctttgagggtccttagcggcttcaagatttgggtaaacccgggataagggagtggggttgggaaacccgtgccttttagggccagtccacccagtttgggtggacacaggtgccactgggccatgtatttggaaagggttttagaaatcccttctgttctacaagctcagcagttggacaattgttctgagggtttgcatatagttagcatatagttaccatggagagttttaataatgggtaactacagaaaatggagaaccaaaattattgtctgtaaacaggtgaccttaaaatatagagaaggaagcaaagttactaaacctaaatagttgcgggcctgcgctcaaagccaggcctttgttaatacttttaacaaagtattctttgttaaaagagagattagcagatacaagtgttaacatcaaacccagacttctgagtctgaaaaagagctggccggggaatgccctcctcataccccaagcccgactgcaacgcagtgactctgggaagcaacccagccttcactctagttgttttgtccccgcatcctgtgctggggtatggattctctggcctcctctaagggcagaagcttgaggctttgcctgcacgcttgggtaactgtaaacatcatcttcaggcataaaccatgggcctgtgattgctggagtgattggggcccgaaaacctcagtatgacatctggggaaacactgtcaatgtggccagccgaatggaaagcactggagaacttgggaaaatccaggtaaagacctattggggaagcagttgactaaggggaaaagatcttccccagaggtgaggggaccctcgtgccgaattcgccacccaggcc

SEQ ID NO: 454702 - DNA, 1302 bp, Homo Sapiens
  misc_feature (430)..(519): n is a, c, g, or t
  misc_feature (615)..(655): n is a, c, g, or t
  misc_feature (808)..(817): n is a, c, g, or t
  misc_feature (1027)..(1088): n is a, c, g, or t
  misc_feature (1126)..(1138): n is a, c, g, or t
ggcctgggtggcgaattcggacgaggaaacaaacgcggctcggccgcacgtggacagcggaggtgctgcgcctagccacacatcgcgggctccggcgctgcgtctccaggcacagggagccgccaggaagggcaggagagcgcgcccgggccagggcccggccccagccgcctgcgactcgctcccctccgctgggctcccgctccatggctccgcggccaccgccgcccctgtcgccctccggtccggaggggccttgccgcagccggttcgaacactcgacgaaggagtaagcatcgccttcgttttcgcgacggtcgccaccaacccccagtacatcccagtcaccacaagcaccccacgacaccaagaccgagtaccccaatccctcactacaccgcgaaaaaccccaataatcccataatttatnnnnnnnnnnnnnnnnnnnnnnnnnnnnnnnnnnnnnnnnnnnnnnnnnnnnnnnnnnnnnnnnnnnnnnnnnnnnnnnnnnnnnnnnnntcctcccgtaaccaatattaccccccggtgaatatgacaaatacgacgtgcgcggataaaataccgtgaactctcccgctaacctcggcgcgcatnnnnnnnnnnnnnnnnnnnnnnnnnnnnnnnnnnnnnnnnngaataaagacgcgcccgccaggcctaccccctatattgtacccgcctcaaccccatcccccgaaactgccacccaagaccccctgagactgcaaagaaaacaccacccctgaaccacccgcaccaaaacccccccaaacacgtaacctaaaannnnnnnnnnatattcgctaccatcgctcccgtatcttaccccctcttttcccccttccgcccctccgctctgtacccctatactcaagcttccccccgccccaccagtcccttacattgccctagacaagcaccacaccttatatataccccacgtaataaaattatcgtccctaccaccaccgacaattgccagttgaaactcctccatataattttnnnnnnnnnnnnnnnnnnnnnnnnnnnnnnnnnnnnnnnnnnnnnnnnnnnnnnnnnnnnnnaccatccttatttagcgacacggcatatctcgaacaannnnnnnnnnnnnatgtatatttattcccactaccacacaacaaatacgccccacgtgccctatatgcactacaaatacccaacgcacaccactacaacccgactaacaacaacactaccatccaaccctcccaataagatattataatcacaccaatcgtcacgtaccgctgagaa

SEQ ID NO: 454703 - DNA, 1132 bp, Homo Sapiens
  misc_feature (47)..(57): n is a, c, g, or t
  misc_feature (77)..(89): n is a, c, g, or t
  misc_feature (241)..(324): n is a, c, g, or t
  misc_feature (387)..(419): n is a, c, g, or t
ccgtcgcgtccgacggggcgggcgggaggtggtaggcgtatgcggannnnnnnnnnntatgtctatttggtgatgtnnnnnnnnnnnnnaaaagttaggggatgggcgtggcactggtacggattttgagctgtggttggggtgagaggtcaggcgtgggcgtatgtgtggttcgagtgcgtgattaggagggtcgggtatgtttgggtagggtggtggcagcccgggggcgagcaccgcnnnnnnnnnnnnnnnnnnnnnnnnnnnnnnnnnnnnnnnnnnnnnnnnnnnnnnnnnnnnnnnnnnnnnnnnnnnnnnnnnnnntcgctacgtgatgggaatgcccgcgggagtaggaggggagaaaagaatgtggtccgataagannnnnnnnnnnnnnnnnnnnnnnnnnnnnnnnncggtagcgcgtcgcgataggaccaagccattcgcagtcacgggggatagagcatcaagtggcggggtgtagggtatggggtacccttcggggggcggaagaaccggggccaagatgtcgaccccccaccagagattacaaataacttttcaaaaggagagtgctactgttctacccttattacaggaagccatctagttgggcttgtggtgaatggctgccctgtaaggtatgcacatacaagaacattggttagcaaaagatatggagacatagttgtatgttatgaacactggccatgcttcaacctaatgtggtgaacagcatctggacttaggagtcagatagattccaggttcaaatcctgaagctgttgtttaagagctgtgtgaccttagacaatatacttaacaagaacactagaatatttgttattcccttgggcaatatatttaagttggcagataataagcactcagtggttgcaactatatctctctaacagctgtactaagtgtatttccttctcaactgtccagaaagcagggattctcagccaggattttgtagaagctccaggaaaatcttcacttacttcaaaatttgtcacaagcatctcaaaataatttttaataaaaatcagttttgttcctttcacttagaaagtaattctattcatgaagttctttcctcgtgccgaattcgccacccagc

SEQ ID NO: 454704 - DNA, 1608 bp, Homo Sapiens
tgtttatgttgtataaaatggagaaaagggggccttctcgccccctggggggctgggtaaagggtttccaacaaggcaaaggggtgggtatttttccccttctccgccccccttgagccggggtttggacaaagcccccccagccgggggggaagccctaaagcccaagggacttgtgtctcccacttttcccttccagaaaaccaataagccgccatgaggacaggggatgtggttctgtgttcttcccctgatgtagtctaagtgcttaggaccactgcccccgcacaagattggtatgccatacgtattttttaggagaagaattcctctgggttctgatgccaacaaagggggccccctgaaaccttatgcccaggccagtccagggatccaggttcccacgtgggtccctgagagggagaggtgagccagggagtgggcctcccagtgtgaccagaagcaagggagggtatgacagacccacagcaccacagcacagctggctaacagccggggacacctctcggaggacagcgtcctcacatgtctggcttcccccatctcagttgtcatactgagtccacatcagtgttttccagcctgaatgctggggcaagaggtgggtttggactcgggggtggtgcagaagaggaagacttgggaggaggctgagaaggggtgaggaggaggagcatcttatattcttctagagaagggcacagaccaggaagttaattcctctctaacaccagcaatgctagcatggaggtagaagctggaaggaggaaggcttgggagcgctgggctctgctctgtcttagtgtacaccaagggatgtccacacaggttttctcataaggccctcgggagccctcctgctgctgctggtctgaagtgcacagagtctgggggctcgacgtggctgatacccctaatagccctgtttatcacatcccctgtgggtttcacagagtggagacaagacagctggggtcaggggaagtggggcatggcccctggctgagatgtgagcttgccggtaccggtaccctgatatggcactttcctttcctagtctacccaaactccccccgtccaagtctcctgggaccccaaacactccctcaattgactcacagcaggcttggtggaaacatcttcctggttaatttctataccccaactccatcccactagaagccggaataggtatatgcccagccccacttgttcccctctccactgggaatatgaagaccagccattcccagatcagctcttgggaaagagctgcaataaaatagcttttcttaaaaaaatcattttttgccttctttctcctgcaacaagtagattacaagacctctgaatgcagggcctttgcaggctgagcctgctctgatgggcacacagcccaagagggtggaaggcaccatctttcagctcctactcctctgagcaggcctcatttggcaaagtatgcgagagtgtcctgctgtcctctggaacctcacacctacccaacctcagtccttgtggcgctgctggaggggtgacactacagacaccccagattctcctcgtgccgaattcgccacccaggcc

SEQ ID NO: 454705 - DNA, 419 bp, Homo Sapiens
ttttttttcttgttttctaacctcccagcttattcctggagagttaaaacacagttactagcactaaaaacattaaaagtgctgcgcgctggcctcaatgactggtacattggagaagctgtgcagcagcatccttttctgtggtgggcagggcaggagatgaaccataggagccaaaagtcagacaaacagaagaaggcacaccaagcctgaaaccctccggacaacagcagagttaccagctgagggatgtccctggaggtttctgacccatgagaggccccctcaccctccttcaccctcctcctaccaccaagctctccggcagtcatggacttattcctccccgtttttactggacaccatgtttcaggtcaatctggtcacctgtagtctggtggcatctctacccctactgt

SEQ ID NO: 454706 - DNA, 1054 bp, Homo Sapiens
  misc_feature (244)..(244): n is a, c, g, or t
  misc_feature (268)..(386): n is a, c, g, or t
gttttttaggaagctttttcttaatttctacctttaaaaacctccaatgtaaaaaattattcccttttcccaaaacccaaaccaaccattccggtattaggagctaaattccaattttgggggattaggagataaagaggagaagcagggttctctaaattctgctttaggatttctctttcaaatctgtcatagtctggaagcaggaataagaaaaccaggataatttcccttttccccactntagacaagtaaatttataaaaacnnnnnnnnnnnnnnnnnnnnnnnnnnnnnnnnnnnnnnnnnnnnnnnnnnnnnnnnnnnnnnnnnnnnnnnnnnnnnnnnnnnnnnnnnnnnnnnnnnnnnnnnnnnnnnnnnnnnnnngattaaatgctaatgtctttacctatttctcacaaaacaaaacttacagcctcagcagagagtacttttaagtccatttttattttgtaggacttgtgatagacacagtcatagtaatgtatacagattaccaacatgcattcaagtaagaccaggagagaaaagatgagaagtagagctgaaacttctctaaaatttggagtaagagctcttttccattctacattctcctggcttcttcctgctagacttctctgaagggatcttgctttagaaactaaaggatgctgaagcccttgcttgccaaattccaatttctcatgtcctatctgaggataagaccacctcagctcctcttctggagaaagcgaactagcacaggtgagagtggggaaataacagcaggctgagagccagaatgaacatcccagtgacctgtctctaatgctgggttaatgacaggttaacacaatgctagcttgttagagaagtccccttttgctaagagtgggtacagtgttaatccaaagtctgtggatcaaagtgctccctcttctcattcattaggtctgaattactcttacctcacagcagaagaaaagactgaatgcccatttggggtacagatgccaccatccaagcctcgtgcggaattcgccacccaggcc

SEQ ID NO: 454707 - DNA, 1060 bp, Homo Sapiens
  misc_feature (44)..(44): n is a, c, g, or t
cttccctcctccctctgcgggctcaacatctggcctcttttttnacttcaaactaataatgttctcaaattgcacctgtaatcctggtccttcaaacctgaaatgaatagctgttggctggttctgtttgggctggttggttctgcccagggggtcgtcctctcccgcttctttggcgggtggtggggcctggggtcaccaggctgaggctctgggttcagggttcaatttctacggcaggctccctcctcatcctcattgtcgtccagatctggttcagcattttcactgtcagaggaatcttctttcttagagcgcatctttctttttcttccacgtttactcttcttcgtttctcctccattttccccctctacgccatctgggccagcacaattatcagcatgtcttgccatggtattccgacgtgtaaatgttttcccacacttagaacagacaaaagccgcagggacgaagttggggtcgtgatagcgcttgaagtgcatgtcgagaagctgcttctggcggaaggtcttatcgcagtggctgcaggcgtaaggcttctccccggtgtgggtgcgcttgtgcatgatcatgtgcctctcctgtctacaagcgtaatcacactggtcacacttaaagcgcttctcattcttgtgtgacttctgatgctggatgagggcatagcgctcatgaaacacagcatcacagtaacggcatttcttgccttgctcaatataggaatgctgctttcgcaagtggacacccaaatcactttttcgggctatgactgtgtcacagtggggacagtgaaatttggccacattttctgtgtgcttctgtaaaatgtgcatcttcatggtaccactttgggtaaaccgagcatgacaaatataacattcataaggcttttcccctgaatgggttctcatgtgccttttcagcttgtatgtgtccctgctggcataactgcacaaactgcactgaaacggacgctctccagtatgagagcgaatgtgacgttttaatttgctgcctcgtgccgaattcgccacccagc

SEQ ID NO: 454708 - DNA, 1037 bp, Homo Sapiens
  misc_feature (837)..(922): n is a, c, g, or t
  misc_feature (928)..(928): n is a, c, g, or t
gggtggcgaattcggcacgaggagcgagctcctggacaaggcttcggaaactgatgatccatatgagcgcatggttctcgttgccgcatttgcagtttcaggatactgctccacctatttcagagcaggaagtaagccattcaacccagtccttggggagacttatgaatgcattagagaagacaagggattccgctttttctcagaacaggttagccatcatccacccatttctgcctgtcactgtgaatcaaagaattttgtgttttggcaagatatcagatggaaaaacaagttctgggggaagtcgatggaaatcctgcctgttggaacactgaatgtcatgcttccaaagtatggagattactatgtgtggaataaagtcaccacttgcatacacaacatcctcagtgggagaagatggatagaacattatggagaagtaaccatcagaaatacccaaagcagtgtttgcatttgcaaactcacatttgtcaaggtgaattattggaattctaacatgaatgaagtccagggggtggtgatagatcaggaggggaaggcggtgtaccggctgtttggaaagtggcatgaaggactctactgtggtgtggccccctctgcaaagtgcatttggagaccaggttccctgccaacaaactatgagctgtactatggcttcacaaggtttgctaatgcggctccatggtgccacatcccgccactcatagattttcctttctgccaacaggacgccccggcttacgccaaaactacagatttgtggttccatagttgacgtcccagagcggcgaccgccacgctacgcgcccgcannnnnnnnnnnnnnnnnnnnnnnnnnnnnnnnnnnnnnnnnnnnnnnnnnnnnnnnnnnnnnnnnnnnnnnnnnnnnnnnnnnnnngtcggngccatttcgataccgccgtttaactataattcacacacccaagcacttcatctaaagtaaaagacctcaattcttccgactttccgcactccgctcgccgtcttccttt

SEQ ID NO: 454709 - DNA, 481 bp, Homo Sapiens
actcatcaactctcccttccccaagccccagttttctctgagctctcttttctacaattcaaagtcaaagaggctctgagggcttaaagcatcttagagaaggccaaataccaccctttcatttctcaatggagcacactgagaggctcagagaagttaaagaatcagccctagtcgcacagctatccatggcatctgtgtgatgtttgtggaactgggttgttggcaaagctggcccttgaacttcactgctccttctgctccacattccaaatttttctggcaaaagccaggggtcgttctgaaacaagagttggcatagctcattatagctcaggtggtcaacgccatgagttctcagcacactcaggttgtgttcggttgtcaagctgtgactattcctacagttcttccttggaaagctacaacttttccggatatggtacaaacagatctgatcaccccccctgtggaaacagtc

SEQ ID NO: 454710 - DNA, 1213 bp, Homo Sapiens
  misc_feature (83)..(92): n is a, c, g, or t
  misc_feature (352)..(370): n is a, c, g, or t
ctcaaagggtttggctatccgcattgcttggggtttgccggtcgttgcgttctccgaggaggggctctgatgttaatgtggannnnnnnnnnactgtgaaagataagttagtatgaaagcgcgattgtatacacttatccttgggttctagtatgtgtgcaacggtcacctcgggtacgctgctaactgcggcacactactccacttgataatgcgtgtgctgtggcttcatcacttggcgtgtgcttccggccacagccgatttgctgggtgggcggggttatagccacggcggaatacattgtaccgcggcccgatggcgccagcggagggggtggcggcgggcgcgacnnnnnnnnnnnnnnnnnnnatagctcaaaggtgggccgcggtgggggaggattgccccacaaacaccgaggtgggggcgaagaaattttgtgcccgacatttacatggagggtttcgtttttttgatgggtggggcaaggggaacgggaaaggcaggggaggggggaaccagtgccatcggggaatgcatggcggcgcccggaagttcggttcgtacacccatgtgccgggttcgcgggttgtgcggttaggggggccggggggccaccggtgaggttccacccaggagactgccccgggatcggtcccaccagtggatcagtgccttgcccagcccttggagtttggactgggcagggagtcagcggggtgcgctggcttgggccgggaaaggtgggtgtggtaggagagcgggactgagcagtcataggtgggtggggatctagtggtaggcaggcccgggcacggccactttcctttgcccgggctcctttggcatcctcggaaggggctgtgccattcctgcagcccttccgcgatccagggaatcctctcttcaaacctgtccttgtccacaggcccgatgagcgcgctgggggatcgataggagggggcaataaactagaattggagaaccccaggagggcttctctgaggatgtgcacgttcaggatcccccagatggagaaatgggaaggaacttgatcggggtgaaggaaccgcttgagcaaaggcaggaaggagtgtcggcgcccttcattctggaagttcctccttgctttcaggactcagtttcctgggttccccttcacggcccctcatctccttacagtccagggtctgagcctcgtgccgaattgcc

SEQ ID NO: 454711 - DNA, 1248 bp, Homo Sapiens
  misc_feature (702)..(767): n is a, c, g, or t
  misc_feature (847)..(847): n is a, c, g, or t
caggcgaaagctttgttggccctccagcagcagtgtgctgacgcaggcacaggagcatgaggtggagaccagggccctgcaggacagctggctgcaggcccaggcaagtgctcaaggaacgggaccaggagctggaagctctgcgggcagaaaagtcagtcctcccggcatcaggaggaggctgcccgggcccgggctgaggctctgcaggaggcccttggcaaggctcatgctgccctgcaggggaaagagcagcatctcctcgagcaggcagaattgagccgcagtctggaggccagcactgcaaccctgcaagcctccctggatgcctgccaggcacacagtcggcagctggaggaggctctgaggatacaagaaggtgagatccaggaccaggatctccgataccaggaggatgtgcagcagctgcagcaggcacttgcccagagggatgaacagctgagacatcagccagaacgggagcagctgctggaaaagtcgcccggcccgaagcgccccacgaaatgtcctcccacataggccccctttgcgcgcctggcaccccattccccttaggtaacgctcgcaatcgtcccagcgtacggggctttatatgggcaaatgaacggtgaagatgggcagccgcacgcgccgcgggcggcgcgcagggcatacgcacaccccacgggccctcacggtctnnnnnnnnnnnnnnnnnnnnnnnnnnnnnnnnnnnnnnnnnnnnnnnnnnnnnnnnnnnnnnnnnngctcaacttcccacaccgcctcagcgggatattgcgccccccgcggcctactcccccgacatacctccaaataccggcanacttcgcacatcaagacgtgactaacacatattgcgccagcacgacgacacgccgggactcccctgcaccaccctatgaggtcacgcgggacatacccccaatcgtcacagcagcggtctagcgacacaccacagaccgtacgccacgcggataccacctaactgagcgttattacaccccactacagcgttccccaacctatccccgacgcgccttatgtcccacaccgtcatatacccaccgcacaaaacaacctgacatacaccaagagcacgcaactagagacgggcgacacacgaagactccagtaaatcagaatcgtgtgcgcagcgggtataccaccaccctcgcgccgtgtcacggcaccacctccagccagcaacacgatgcactctccgct

SEQ ID NO: 454712 - DNA, 1567 bp, Homo Sapiens
  misc_feature (1208)..(1226): n is a, c, g, or t
caggatttatgcatcatccatcattttttacgtctgagccaccaagtatttatcagtgggtgagttcttgtctgaagggtgaaggaatgccaccttatccttacctccctggaatctgtgaaagaagcagacttgtagtcttgagtattgcactgtacatacttggtgatgagagcttggtttctgatgaatcctcacagtatttaaccagaataactatagccccccagaagttgcaagtagaacaagaggaaaacaggtttagtttcaggcattctacatctgtttctagtctagctgaaagattggttgtctggatgactaatgtaggattcactttaagagatttggaaactcttccctttggaattgctcttcccatcagagatgcaatttatcactgtcgtgagcagcctgcctcagactggccagaagctgtctgtctcttgattggacgtcaggatctttccaagcaggcctgcgaaggaaacttacccaaagggaagtctgtgctctcatcagatgttccttcaggaacagaaactgaggaggaagatgacggcatgaatgacatgaatcacgaggtcatgtcattaatatggagtgaagatttaagggtgcaggatgtgcgaaggcttcttcagagtgcgcatcctgtccgtgtcaatgtagtgcagtacccagagctcagtgaccacgagttcatcgaggaaaaggaaaacagattgctccaattgtgtcagcgaactatggctcttcctgtaggacgaggaatgtttaccttgttttcgtaccatcctgttccaacagagccattgcctattcctaaattgaatctgactgggtgtgcccctcctcggaacacaacagtacaccttaatagtggaaacatccatgtgcctcccaacatgacaagctgggccagctttcataatggtgtgccctgctgccctcacaaaagctcctgccctcccccatccactctgcttggattggttcccacaatcccccccgctgcttagttgcttcatggcccacacccgctccctacacgtaccacccgcgccatcgaccaccctcccccacgcctttgtcgatgttcccttccccgctacccccttcccgcccggcccacacaccccccaacacattcgctgagcctcccatagctactatcgcgcactatcgtacatgcgcccgaccttctnnnnnnnnnnnnnnnnnnnacaagcttcctcacgtcgtcccatcaccccccaccttcgttacgcactcacgcccacacaacaacgcccacacataatccacgagcatccgcagccagcccacgcccgcagacaacccctacctacccccccaactccttaccctgacacaaccgccaacattatagccaccctctatctttctcctccttctgacacatcttccgctctgcccgcctccgccctccgaagcccgagtatgactcacatattagaccacataccctataccccacaacaccctccacttcccattccccacccatctccattccactcctaaaacacagaccccccacgcg

SEQ ID NO: 454713 - DNA, 1203 bp, Homo Sapiens
ggggctgagagagacaagctgtgctgcgacagttgaagtagggagggttagcgttggaaagtggtggtgagaaagtgtgtgagtggctagagtgtatgtagtgacttgagacggttgagcgtgggatgggtggtctgttatattagggagaagaggtgttggtgaaaggaggtcgtgggtagggtgggcggtcattcggtgggcggagggctgagatacggtggtcgtgcattgtatatataataggtattagggtgtgatgttgttatatgcaaggagtgttggtcagatcatggcgtggtctaatctgctagctgtctggtttagcgcattgaattgccaatcagaaatccagaccatgaggctttgttgtttattgtgctgtgggtaatcgtggcgttggattagattatgttctggtggggggggagtgaatgaggtgggggactcgtgaccgaagtgtagcctggtgctgagttattagtggcgtggggtggaggggtggtgttttggtagataaggggtttgtagtgtcgtgtgtggcgtgtttggtttggtgatgagatgggggtgggttggttgagaggggtgcggtagggggttagaattggttttgagtctggtgtccgatgtaattggggttgtgcgtatttgggggtgtgtaggttcttctgcgtcggtgtcgccgtgtggggccatgtgatgtgtgattgcagtgtcttagggcccggggccatactcatagcctggccggaagtggaccccggcctcccgctctgcctcaatgcgagccacgttgcacagctgagcatagacctcagagctcctcgggggacacagagcacactgctggctccaggcctcgccgtcctggcagcagcattccgtgtaggtggtgcggtgcccacgcaggggttctctgcacacatcattggtgacttttttccagcagatgtccatgtggatgtcgtggtcagggaggtcctccgtgctgctggtgctgttcatgcagcgctgctggctgaggtccagggtgagcggggggctgcagaagcagtggaaggagccctccgtgttgacgcactcgccattctcacaggccaggtcctggcactcatcgtgatcctcacacttcttgtgggaagcatcgtagtggaagccgggatgcacaggcagaccctcgtgccgaattcgccacccagc

SEQ ID NO: 454714 - DNA, 594 bp, Homo Sapiens
tttatagttgtttgcctagtgttcattttagttactcgaattccttgcaaggtaggttttgtttgtttatttatggaagttatttagtaggaatttcacacttaactgggttttcctttggcgtatgacaaccttacctaggacttagaaatctgtgatttctgagtttttggaatttaggaaaatgctctgggtaggattgatagtagattgaataaattaagactttaagacagaattgtagacttttggagttgggagataatttaaagaatattttaagccaccagttttacagatgaggaaacatgctaaattaatcaccacatttacatcttattagtccttattaaagaatggtaaccaaaagtctgtttgaaatgtttgctctatttgtttggtttcattatatgacagagctgcaggttcttgatattaatgagtaagtggaatgcagtttatttagcagtgttctattagaggcactgaaattttcagggataaggaaatgaaagagagtttagcattgggaaatttgcaccatggatagattaagaggtagacagttaatagaacatttacggtttgcagttg

SEQ ID NO: 454715 - DNA, 814 bp, Homo Sapiens
  misc_feature (324)..(332): n is a, c, g, or t
  misc_feature (516)..(541): n is a, c, g, or t
  misc_feature (553)..(553): n is a, c, g, or t
  misc_feature (568)..(624): n is a, c, g, or t
  misc_feature (696)..(696): n is a, c, g, or t
aaaaatgacaagcattgcatcccagtcttgtgttccgaagtcagtcggagtacttgaagaaggcccacgggcggcacggagttcctgagccctttctgtagtgggggaaaggtggctggacctctgttggctgagaagagcatcccttcagcttcccctccccgtagcagccactaaaagattatttaattccagattggaaatgacattttagtttatcagattggtaacttatcgcctgttgtccagattggcacgaaccttttcttccacttaattatttttttaggattttgctttgattgtgtttatgtcatgggtcannnnnnnnnagttacagaagcagttgtgttaatatttagaagaagatgtatatcttccagattttgttatatatttggcataaaatacggcttacgttgcttaagattctcagggataaacttccttttgctaaatgcattctttctgcttttagaaatgtagacataaacactccccggagcccactcaccnnnnnnnnnnnnnnnnnnnnnnnnnnaactttattccntgagggaagcattgnnnnnnnnnnnnnnnnnnnnnnnnnnnnnnnnnnnnnnnnnnnnnnnnnnnnnnnnnactctctcgaagaagaggaccttcccacatccacgaggtgggttttgagcaagggaaggtagcctggatganctgagtggagccaggctggcccagagctgagatgggagtgcggtacaatctggagcccacagctgtcggtcagaacctcctgtgagacagatggaaccctcacaagggcgcccttggg

SEQ ID NO: 454716 - DNA, 530 bp, Homo Sapiens
ttagacttccaacttgcagaactgtcagaaaataaatttctgttgtttaagccacccactctgtggtaatttgttatggcagcaaactaatacacatattcacctgcagagcctggtggaataatcttagagaggctgcacaggacaattcataaaaagtgaatgaaagggagtcccaatacctcgttatcacactggcacccctcaagagggatccttattatttcaagtctatgagctgtagcacaatgcatcaggacaattcataaaaagtgaatgaaagggagtcccaatacctcgttatcacactggcacccctcaagagggattcttattatttcaagtctatgagctgtagcacaatgcagtctgcagaaagacgaggaaattttagaaagagcagtaaagccaagatgttcagaagcatccctgagtggacaactggagacacagatgactgaactatgtgcttccactgctcctgcatgatgattttacttagtacatggatcgcgcttgcagttggggga

SEQ ID NO: 454717 - DNA, 375 bp, Homo Sapiens
ctgggtctcttggacccgtctgtgtaatgaaggtgtcacagtcgggttgagaaaccaagcgcgtgctaactgcgtcacatgagagggcgctctcgtgaaattacccgcaaacacgcttagaaaggactgatgcaaatgtcagttcgtcttaagagatgtaataaagtaagggcaggaactctgactcctacctaaatattgaaggtcttttttgcttactgagggtgttagaatgtcaggccttccctcccctgcccccgtctagagcggtgtttcccaaatacagtgggttctgtgcagggttttcagggagccggttccccactgggtcctcactgcccctcgtagtccactgatgagattggccgcgctttg

SEQ ID NO: 454718 - DNA, 681 bp, Homo Sapiens
  misc_feature (96)..(96): n is a, c, g, or t
  misc_feature (162)..(162): n is a, c, g, or t
  misc_feature (177)..(197): n is a, c, g, or t
  misc_feature (441)..(441): n is a, c, g, or t
aaaaaccagcacaaggcccagggtcctctgggcatgtgggtcttctctgtcccctcactagcacacactggcttgggtcattgtcacgcagtgcanacctttgtgcccatgacaaagacacagggccaactcttccactatctccaagtctagtgtttgaanatttatgtacagacnnnnnnnnnnnnnnnnnnnnncataggcaacagaactccaaagcaaaacagaaactttggtcagatctattattccagttttgccagagaaaggctttccccaaatgtcgctgggtgagcgcggtcctatccccctacagctcctatcagccaacctggtggccttaacgttcatcactgtggactcaaaacacctaaaactgggaattttccaggcccagtttggcagtagggcttctgtaggcagtgaggtaagcggatacancgttccgtggctgatctgtgtgagccgcagcttggtgctgggggacaccagcttcagctttgcaggaaagccatgtttaaagagtagcctccagtcctactggcccaatgcttttgccatcagggacctgacaaggtttagaatgaggtgagcgatggtgacagtatccctgggcctggacactgtgtgccaccctgactgtgtctggcagcccctccacctggctactgaagccagtca

SEQ ID NO: 454719 - DNA, 368 bp, Homo Sapiens
caaaaccaacctctaaacacaaaactgtttttgaaaggaagactctaatattcaattagtgcctttctctcttgagaagtagattcttgcatgaattaatttatttcttctcagttttatttgaagatgttatacttttaaagaaagatttgaaaagaaaaagttcacccattattccattggcatcattcccttaatactacagttaatctgtttttcaatgttattttgtggtttccccgcccaggagcttctttgcaactttggttttcttctacttctactcaggttcagggaggtgtccactgtctctcaaatcaaccaccagactttagaggggcacaagattgttaacgcgctttgcagtt

SEQ ID NO: 454720 - DNA, 448 bp, Homo Sapiens
tagagtatagatctctggacatgatatacaagaaatatctttatgattagcatatatttataaatagttattaagtgtgtatgtagttaataatataatacatgtacatggttcatccattattctccagataaaatccaaaacttttctgcacaggaatgagtttttaaatatctggaatgatataaaggagtatctttatgatcacatatatttttaaatagttattattgtgtgtttcgtattcataatataataatgtaatggctcttcattattctccagataagatccaaaacttttctcataatatacaaagtttttctgcatatgccttctatgcatccctccagcaacatctctgcctaaccaccccccttccccatccctgtttaccctccagatattctgtagttcatcatcgcctgtaccagtggttgtcaactcc

SEQ ID NO: 454721 - DNA, 512 bp, Homo Sapiens
tcttctccctgacacaagaaggaggctcacatttgaacttgatgtttagttaatgtgatcattttctgttgaactaatgagaatacagtgaccttgagggttaggttgtacatctgaattgttcgggctgtttcctgtcttttggatgttttgtttgtatagatattttcattttatgttacatcatttgttctttggtagcaaaaattgagttgaaatgatacagttcctgaaatctatgatttcatgtttcggagatatgtatcaggaataatagtgtgggttctcatgagaaaatctggattgcattactgtgctactttggtttcttgtcagagaagttagtagtttagacctccttcagaatcctttctttggactttgtgtttccttacgttgtgccagccttgattttatttgtctgtcctctgtctttctataccatttgtttacacttaactctaggcttggtattgaaaggaagtgtagatgcgcagctacccaaggggatc

SEQ ID NO: 454722 - DNA, 203 bp, Homo Sapiens
ccggtcatgatcaagtccgcatatcacatcatctcgggcccggcgatattttggagtagatgtggtacaccaacagctgctgcagaatagcgtgccccagttgctgcggcacgaccatggggaacacgaggtcaaatccgttggattcgagcacaatggtggaatcctttcggctaaactctgggagtagactagaaatgaga

SEQ ID NO: 454723 - DNA, 235 bp, Homo Sapiens
  misc_feature (52)..(90): n is a, c, g, or t
tactgcaaagcgcgaaggaatgctccatttctggtgtgttgttttcccagtnnnnnnnnnnnnnnnnnnnnnnnnnnnnnnnnnnnnnnnccaatctcggccaggggatgtggtggcaaatagacggacaagggcctgctctcctgaaactcactggagagataatacaataaataatatcatttcagtaaccaaaaagtgctttaattattaagtctgaaggccgttgcagtag

SEQ ID NO: 454724 - DNA, 336 bp, Homo Sapiens
caactgcaaaccgagaagacttttagtcattatggcaataagtagtatagggggaatatctccttcagcactgaaaactaagcaagagtcaggcaaaagaaaaaagctttggagaactttctacaaaactgggattgaagaaaaggatggtttgtgatttacatccacaagagtggccacgaaaaggaaataaatagaagatgtaacaaaaggtcaccgtcgcagacttaagtcagaggagtaaaagctggagctaagataggctgtgcagtacccagggcatattcatatcttcctagtgtctaacagtaagaacactaattacaatacgcgctt

SEQ ID NO: 454725 - DNA, 273 bp, Homo Sapiens
caactgcaaaccggtaaaagggataataaggatcactgttgatgttctctgtaaatgtataattaatgaaaaaggatttgtaaggctggccttaagctgtagacaatcttgtgtgctttgcatgtctttctgtatggttctgtcaaagaaagggaatcttaggttaggatgcaggcccaggaccccataagcctgctgttcaagccagtccagcaaagcggtcagtggcaaagtcggctacaggtctccatcttgtttccgcgctttgagttg

SEQ ID NO: 454726 - DNA, 252 bp, Homo Sapiens
tgcctcatgctgctaggcttggagacaggtggaaagaattcatctgtagcgccgtaagccgcaaagtttttaaggttctcccttcctggatgggacgaggctgtacattttccgtcccccaaattttctaaacctacatggaaacatccctctttatcctaatgttaatgaattgggaagccccttccatcccagatcaatttcacaggcactgattaccagatgtggagtaagcagcatttaatgaaccgg

SEQ ID NO: 454727 - DNA, 325 bp, Homo Sapiens
tagaggatccccggaacttcccggggcaacactgtagaaagtgaaaaagcaaagactgatagttcagactctaatgatcaagctcaagcatctgtttcctggatcattcttttctttgcatgcagaccagttgtgtggctctgccttccttttacatggctagttatagaaagactttgaaatcagcagtagttgaccagaatgctcatgtcagaggtatcagcttgcttcaggctcctgctggtctcttgtatcggtgataaacccgttgttgactctgaggaaagtgtgacgtgcagtacaattcatgacaccgcgacagtgg

SEQ ID NO: 454728 - DNA, 247 bp, Homo Sapiens
cttttcactaatacctcattctctccagaaaacctagctggggaagccaattaccatggaatctggcccacaaaatagataaatagataactaataaaatttcccggcattctgttctgacttttccggagactggaagtcctagaaacagagaactgttcagtagaaagagcagaatacagtaggggttcggttccattcaccagcttgatgaccagcttagtgcctcctacaatgggccgagctc

SEQ ID NO: 454729 - DNA, 704 bp, Homo Sapiens
agattttctgcttagcgacttggggtcccctctcgtttgcttctggtaggagtcgcaatcccagcagcaatagcccagaagaggacacggttcccgtaccgaagggttcagtaccagcagcccgaccatcacgcggcgggatgtctgtggttggcattgacctcggctttctcaactgctacattgctgtcgcgagaagtggcggcatcgagaccatcgccaatgagtacagcgacaggtgtaccccggcctgtatatcattgggatcaagaactcgagccattggaaatgcagcaaagagccagatagtcacgaacgtaagaaatacaattcatggcttcaaaaagcttcatgggcgatcatttgatgatcccattgtgcaaactgaaaggatcaggcttccctatgaactgcagaaaatgcctaatggaagtgcaggagttaaggtgcggtacttagaggaagagagaccttttgcaattgagcaagttactggaatgctgttagccaagcttaaagagacttcagaaaatgctttgaagaaaccagtggctgactgtgtgatttcaattcctagcttttttactgatgccgagagaagatctgtgatggctgcagcccaggttgcaggcttaaattgtttaaggttgatgaatgaaactactgcagttgcactggcgtatggaatttataaacaggatctt

SEQ ID NO: 454730 - DNA, 588 bp, Homo Sapiens
cgcaaatgtgaaatattttacgtgttgaaagaaaaataacatgaacctagacttctgtatccagtaaaattatctttcaaaaatgaaacagaaataaagactttctcaaacaaaaattgagagaattcttcaccagaaagtttgtcttgctagaaatgataacagataatctttagagagaaagaaaatgatttcagtcagaaatttggacctacataaggaaagaaagcacattacagaaggaataaatgaaggcaaaataaaatctttttcttattcctaactgacagacaacagtttgttcaaaacaaataatagcaacaatgtgtcagtgattacagcttatggataagtaaaatgaatgacagcaataaggaagaggacaaaggaattgggaatattctgttataaagtaattgtactacttgttaagtggtatagtgtcatttgaaagtgaacttagattagttctaaatgtacatagagtgtccccgtggtccgtgacttacagtttttcaacttgaccatcgtgcaaaccagtatgtactgagtacctataaaaccagttcgtgtttcacattgcgcggc

SEQ ID NO: 454731 - DNA, 468 bp, Homo Sapiens
taatgctcgtgaaatcaacatcctctttacctcctctgagaagcatactgagggacagcaaggggcttttctctggttatggtcagatggtgaaaaccaatggttttcaatattaataataaagtgaccgggagatgaggtcggggacagcaaccagcctctcaccccttctccagcacctgcttgcccaagctccttcctcaccctctgtgctgtgatcatgcccgccttctgctagtccctaagatgctgtgccatctcactggcctctcagcgtaacacatgccatgcctttacctggaatggccctcgtctcttcccctctctgtggtaaattctggctagtacttcagatttcagcctggctataacatccattgggatgcctgccctcacctctcaggctgaattgccagactgcattctcttatggaaccatgtacctctttttcctttcacattagcgca

SEQ ID NO: 454732 - DNA, 408 bp, Homo Sapiens
  misc_feature (385)..(385): n is a, c, g, or t
aaccaacaagactgtcatttattaatacaaatttatatagtggcatatactattggagaaatcagaaattcataacacacaaattcatattggaaatacaaaaatcatttgagagtcaagaaatcaggttgacagcaccacaaatgtttactcagtctgagcaggtgtgtagtatccaaggaataacaaatacctataggcaggactgaggactggaatatcataaggactgtggcaaacacattccaacactatttcccacccaacaataggaatctggcgggagtcctctagggagggcctgggggttacaattaaagggggcggcaaggcagggaaaaatggggtacaggaccattctttctttttaacctttcacaggccnggcttttaaaggcaggtgggtta

SEQ ID NO: 454733 - DNA, 358 bp, Homo Sapiens
taatctactacatgagaggtcattgttactcatttccaaagctgttatagacttggaatgtggaattggagaggcttttcgaatgtagttagtggtgttcacaaaagagccactgcctttcaacttggaccctaagaatgaacttatcacttccatttagaacttatataagcaaaaatatctgaaggcaaatatcaagccatgtttccacactcccaaagtatctcatttgtcatgagccatgagtgtcactttttaaactccttccctgaatgcccaatcaacaggaaagaagctgcagagcaagggcagaagagtctagaccaggtgttgggaactatagctcacagactggcca

SEQ ID NO: 454734 - DNA, 479 bp, Homo Sapiens
tgtggatacggagggctgattgtgctattcagtcatacaaaaggctgttcagaagattatgtttcacagatcctttcaaccgaaaaacagagtctgtaagaagcttaggtctcataaagaagatacttatgagtgtggcttttgtctaatggattttatcctcaaggagaatcacaggaggcccacaaaatcttctgtatcagtagaaacactgccatcttggatcaagaaggacagacaacagtacaaaatagagaccactagttcccctaaaattctactggaaagaagcagcgctgagaaaagaactcgaggtaaaaacacactctagctttgatgaaaaaggaagactcagaagacaaaaccaagagtctagagggtagagccaagaaccacggagaattattcttctgctttgaggcctgataaaagaaactccaacatttcctggattttggacagcaaatatctatatctcc

SEQ ID NO: 454735 - DNA, 216 bp, Homo Sapiens
agacttatatgaaaaagcagtgagtcctgtggaacattgggatatgtgacatagggaggactggaggggacttggcctctgggggcctctgtttctccaatgagagacaatttgagctgttatctgaacagtcagtcaatactaatcaacttttttaaatgcacacatcttttaacccaacagttctacttttaggagcttattcaatagttacac

SEQ ID NO: 454736 - DNA, 247 bp, Homo Sapiens
gtgtgagccaccacacccagccagaatttcttgaataatctgtctccatttctctatatagcctcattgatctatctaaactcccatatctattttggttgctagactgttcatcccaattacatgtgccagtgtcactgctacactaattgaattactataaatgtataatgttttcctatatgttcgtggtacattttttttgcaacgttctcccaaggatctgcaggaacacatatgtcaaggc

SEQ ID NO: 454737 - DNA, 413 bp, Homo Sapiens
ctggctacagtttctagatataggaaagtgagaaatggtagcagccttgaaggtttagagctatattcccataccaattatggctagaaacttaaacagctctattgagacattatgggaagtctaatttcctgttactctactttaacacagccaagtaaaacagtaagaaagcttgcttaattcaacaaggactgagtgccagagtgtcacctggaaacttgtgacaaataatcatgcctcacacattcatccttggtttttaggtaccaagtgcaagctgtcatctatcctcttccattctaaacttgactcatcctcgctaacctgttaccagaacgactctctagaaacccagaggctttctgaagacccataggctatcccccatcttcaactatttcacattgagt

SEQ ID NO: 454738 - DNA, 397 bp, Homo Sapiens
aaaccgcggcaggctaacttgttagtttgtcaatagaataaaatctcagacatttcatggtttttgataatctaacacatattgatatgatttcattaagtatctattgaatgtcctcagtgtgctagcactagttttaacttataatgagacttgaattctggatccaccatgagttgacagtgtcagttaggaaaagatcacattctacaagaataagatactttagcctcactggctgctcttaaaagccatctctgcattgttctcagtcctgctcccttctcacagcagccacctccacagcaggaaaactgctgcagcttgatcaccagagtccctgtactctctctttctttttaatcccctgcatcggagcgcgagagttctcggggtc

SEQ ID NO: 454739 - DNA, 334 bp, Homo Sapiens
gtccggctgagatggtttggcatgccgaatgttgagcagaagtgtaggttacacacatactttaatcaggtatgttcccatgagactaagtgatcatccttcccattctatattaacaagtctagagacattgagtcactggtctgtagtcacacagctcacaaaggacagagccaggattgtaacacagctctttctggggccaaagttattctctactccagctcaccactaactgttaacctctccagactatagcttttcactttaaaataaggtgactggactagatcatttacccgacagacctaaatgttatggccgcgcataggga

SEQ ID NO: 454740 - DNA, 333 bp, Homo Sapiens
ggtgttactaaatggctgtgtacgaagttatcatgggctagtcccgtttcttgttgtctgaagaaagcaaaatgaggtaacatcaattttaaaggctacagtactccctttccatcttcttcctctagaacatgaggtttataattcccaaacttcagctcccctcttcccagttacttcttcctacctcacatgtaaacctccattaaagaaaactgtctctcactccaatattgaaagataaaactaaaaattactatagagtacaaatctcaagagtttagggtactctgataagttatactttttgtgtaagatagatgtctatatgga

SEQ ID NO: 454741 - DNA, 615 bp, Homo Sapiens
tttttttagaacaggtgaactagacccttgggtttccagtgctagcaggtgcagccagtgagagaattcctggtgccggtagtgaatgatgcaagtgtccagaactagggaggctgagaggtcaatggtggtcacctgcacactagccttgagggagttgaggcagacaatgcgttggcgactctgggacaacaacaacccatcttccagcagcagttcagtgctcatctgtgccatatcagagtttgctgtgaagcttcgaaggggcagctgatcctcatcacggtggtacaggaactgcagcagcttcagagtccaagtcaggtgcctcttttgactattcatggacaataccacgcttgtgttctccatcttaaccttgacctggtctggcagctgctggagaaggaataggccaggcagagttggctcaactaagttttctgtcacctctgaacagggaacaggcttagatgctaggcttgggccctggcacagcagttggctctggaagaggccctcatgcagttcagcatggagtgtccacacatccacagtgatagcagtgagatgccgactgctaatgcccacctttagacactttgcatccagagg

SEQ ID NO: 454742 - DNA, 398 bp, Homo Sapiens
ctccgtttacgtgtggaattggaatggattttgaaggagacgatggtgagaatttggggcccaatagagtccgaggcgggtgcggaaggggatgatccagatgttagggcagtctctgctaaggacgcctcttcctgtggtattgggtggtgttcaaagaacttggagacaaacagcaaatcaagttggtcataattaacacacatcagtggaacttctgtactacaacgctggtgaaatttataaccacatgtttgacagcggaaaccctggaaaagcagctttcgacaaaagtcacaaaatgctaaggtgaaaaacgtttttcgtacaaagttgtgtgttgtaagtggaacattctccaacacttccacatgcaattcttctccagtaagccgaaa

SEQ ID NO: 454743 - DNA, 422 bp, Homo Sapiens
gtgtacatcccccttcgttgtctttcctaaactcatttgtttctgctatcctccctgtcactctcttttctccaaatctctggccccttactgtctgctgagcatatcaggcatgcgttttacaagggcctttgcccttattgatatcctttgttattttgcctcagatagtcactggtctgcctgtccaactatttgtttgtttttcaaccatcattttgctgaggtgtcccttatcaccctatttaaaaaaacaatcactcttctacacctccctggcattccttgttcctctacaccctccactttcttttcttacaaatatcaccatttgatcttgataatctcactacactaaaaaggtaaattccattaatgtctcattagaatcacatgctgtaaagaatcagtatctggcacat

SEQ ID NO: 454744 - DNA, 853 bp, Homo Sapiens
tattcgatgccactcaggatgcagccagtacagacaaaagcaataagtatttgtgtgcatcctgagtggttctggtgtatttctggtgtggttttcctgtcctcgtttgatgacctggcattgtcctgcctgcttttagtccaacagcatggtgttgttggccattcctcagtacagtggcattaggttgaaccactgatgaatacaatgctataatgttggctcacctgtcagtaaagatgacatgttattggtctgcctgtctgtagtacaatggaacaatgttgttctcttaatgtaatgttgatggatgatgtcccaagtacaatagtgtagttctgtctatcctcaatacagtaacaggcatatgtcttcccagtggaagaaagatatggtattggttcacctagtcttaagtctcaatatcatctgttgctggtctgcctgttagtacagtggcatgatccacctctcagtacacaaatatcatggagctgttctgcctgctcttcatacataaggcataaggttgagccacctgccacacatatgatgagatgggatcattccaccacccttaaaaatatgtcttctctgctgtatacaaacccaattcataacacttctcagcatctccagagactgtagatccccccaagagggtgcagtcctgttctttgccgcattaacagagaaaacgagaacgtcactcttcctaggtatcttcagagtattcgcgcagcaactgcaaagggacttaggggcagggagagtgtgaggtcatcccgtgccaggcagaggaagcagcactcccaaaacactttgctgaacacgcagtctgagcagccactcg

SEQ ID NO: 454745 - DNA, 180 bp, Homo Sapiens
agatgagcctgctggagaccagagaactttccttttctgaaaatatatctgatgtaagacagacttttattagggttaaaacatggacattttgagggctacatttgtatagcaacatggcatcatccttaatatttgtatcctttcttctacttctagcacctagcggtaccgagctcc

SEQ ID NO: 454746 - DNA, 385 bp, Homo Sapiens
gtggtgggtactttgggacattatttcaaatgagtaaactctaaattgttacatatttatgctgctatatattagaattacctattttacgtgccttttcttaggaaaagagagtactggatcatggttttcttccttacttacaggttgcttcacactgagtgataatttaaaattgtttcatatgtagaatcatgtgtctctactgttgccctctctgtgtctgcacacataatgcctctttcactttggtgaaatatctatataatgcaagtacagcatgcatatttaagaatttctgaactaacacttgatatcacattttataaagattgttggtactcagatttgtatttgcagctagattatgtcagggacccactcg

SEQ ID NO: 454747 - DNA, 527 bp, Homo Sapiens
agtgggcagggggaacagggggtttctgaaggacatccagcccagtgccctggaaacagccacgaggaaaaagtgctcggtgcaccagagtcgtgccttctcttcccactgcaacaaccaagcccggtttctgccccatgggtgtggtctgtccctgatgtcaggctgggggaatgactttttgtgggtttctaagatgagttttcacctcaaagctccatgtaccatttcctggtcctgaaggcgcctcccccaggtgatgtaatccaattctggcactgactgcataaaactttgcacagttactccccttcctgggcacagcttcccacttcacccacacagggagtttcggagaattcaatctccagtggatattcagccagaggagaagaaagagaggcacaaaatgctttggatgaggacaaaggcaaaaggccccagcagtttccctgaaacctccattttcacctctactaaccactggggcatctgcaaatcttttatccaaggtttaatccttccct

SEQ ID NO: 454748 - DNA, 286 bp, Homo Sapiens
atgagccatgatgctcggcctatctggagcttttaaatatatatttttaactttacagagttgaagtaaactctgttagtatttgtataatatttaacaaccacgtacaaatagataatgactaaatttgacacttgcttttctgttcctaattacttatttgtttaaaaggagattaaagatcttggagcagaatgccttttgtttattgaaatgcagcttgtttggctgagcagaattctgttagacaataattatgcaccatctgaatacagatacttcatag

SEQ ID NO: 454749 - DNA, 389 bp, Homo Sapiens
attgcaggtatgaaccaccactccaggcctttgtcttgctttttctctagcaatagcccttgcttggttcctttcatgccattcctggtgccacctgctggtacagacatgctttcctacctctcacctaagagagaggatggcctagaagagaacttggaggaagcaagggttatagagacctgggctcgtagattgtgcctcttttccattacagctgggttaacgtagcacacaggatcagttttctcatctatcaaatggggttgattgcaagtatttcatgaattatagttaggaataaaactatatgcaggacacatggacaccaaaaacaatcttaaaagataagccccagatggtaggcagatatttgcagggaccactcg

SEQ ID NO: 454750 - DNA, 329 bp, Homo Sapiens
ctgtatctagtggacacatggcgggcctgtcctctttggctgcacctgttcatggatagtccatttttgttctgaaggggcgtcattggaaaagagaggcaataatatagtggaagtattcacaggcctcatcaaatcccctggagccctactattaaatagattagtgatctgtgctctccagagttacacatccccaaatttccatttctttgtgcttggtaaacacaatcttaccccacatctttacttgggtttgacttataataaaaatataccaccaccaaattatatgttccagtcctaacccacagagcagggaccactcg

SEQ ID NO: 454751 - DNA, 397 bp, Homo Sapiens
cccgatgggtcctgcggttccttgtcctgcccctgctgtttctggagtgagctcttgattttggactactcacatttttccgtcaatgttctgtgacctctgagaggtcacaggggtaaaaataatacatggatgcatgaaacccttccttagctcatgggaaagtatcctgagaatgggtatcaatttccctgcccaaatttttacatggagccaaactctgtacaaagcacatcgaagcctaatcacattgaggattccaggagacactatgtctggtccgttctctcctgtgtccccgagtcaaggcatggtaggcacgaggtggggagggagcagtggcaaggggccttgggaaggctaagctatggagaagaatgggaggtgcaggggagca

SEQ ID NO: 454752 - DNA, 418 bp, Homo Sapiens
caattcaaggtagatttttttagttgttaaccaacagctatactctcattttcctttttgccagcagaggctccatttttgtttatacagtgaaggcttcccatccccgatttccgattccccatcattcagatggcttggtcataatggacctaaaccagttaaggcaaataaatggctcattgacatggaaatgagtccctcagagaaagaatttcctccttaataaaaaatgatacatagaaggaaacacccttcattgccagaaacaagcttcaactatcttaaaactagtgaggaaaagacatagttatcacactcaagctaattctatggaaagatgataaagactccttggtatttgatgacttgattttagccactgatttagtcaatcccactgcagggacccactacg

SEQ ID NO: 454753 - DNA, 397 bp, Homo Sapiens
tcatgcaggctgagttatgttttctaactatctttcattcttgtggtagggaacttaccctcaagtgtagtatcttttactcttgagccatctggtagcgtggaattgtttttctatttttcacctgcctattttatagacctgtattgaccttttattcatcagggataaaggatgttgctttcaccctgcggtattgttttccctctgttgtatgtatagatatatagctacttgtcaattttccaattttgcaaatgatctgtatgtacttttagttgtatttaataaagtgacagtgagtgtcagacaccatctctctaactcatatttacactgaggtcagtttcccaggtactaattttcatatctaagttgatgattgtcagggagaaga

SEQ ID NO: 454754 - DNA, 540 bp, Homo Sapiens
cctaccaccctctcgcctcctcactggttcctattgtggctaaatgttggtttggcacaggatttcaattctcctcccttcacttgacctgtctgctctttctgggcaatatgatacgacatactataagcctttagtttgcacccttgtgctaatgagattcaaatctccagtcctgaccatctttcatgagctctaaaccatactccaatgttcactggaacatctgtctttcctggggtatcttatagactctttaagcttaaggtcaacattgaactccttttctctactcctgccaccccaccaagcctgctactgctccctaccttagatgttgtcctctctattcatcctgtccccttctctcctgtatcttcctcaccttccatatccagtttggtcaccaagttctcaaaacatttctcagacatggctattcctctccattccctttgtttccgccctagttcaggtcatcattccttgcctgaactatggcaatggcctcttaacctgtctctccctggggtgggtgga

SEQ ID NO: 454755 - DNA, 194 bp, Homo Sapiens
tcttctccctgacaaatgaaggaggcagttgtgatcattgctggtggaaccatagctcagattttcttttttaaagaataatgtattaaaaatggaaatcattttgcttctagattggccagaatcttttaattatctgtatgagaggatttacagtgatacttcacatttgaagtagtgttgtatagtttttc

SEQ ID NO: 454756 - DNA, 545 bp, Homo Sapiens
  misc_feature (453)..(461): n is a, c, g, or t
  misc_feature (464)..(464): n is a, c, g, or t
  misc_feature (529)..(529): n is a, c, g, or t
cccccaatggaatcccaggaacatgtgggtccagcaggtgactctgaagctggcttggctgccatctcagacaggacgcaggcctgacaccctcagcttttagctttgtaaacttccctggcgctttgtagaatcttgtgtttcttctcttctcagcagatatcattcaagtcacaagaactgtctggttgagaaagtaatttaaaatatttgaccttttatgtttcttttatttagaaactgtgagagaaaataccgtcaatatctgttaggtctagaaatattttcttccgaaagtgaatgttctgtttaattcttcttcatgcaagtgagtgggcattttgtacactctttagcttgaagcgggagtggggtcctattgtattttcccttcttttgtctgggaatatattctttttccatttgggatacagtttttcaacctttggggannnnnnnnnccnttctaggtttttccctactcccacaaacggtaaccagtaggggaaaaaatcaccccaccaaaccnggctggaggtttggaa

SEQ ID NO: 454757 - DNA, 588 bp, Homo Sapiens
ggtgcttagaggatcccgccatttactccaggctacttcatctgaatcatttccacctttattttgaccctcagattcagattcacactctaactagattcaactgtgtaatgcagttagtcaaagcattaattttatcatccttgtgagtaagagctacttccaaatctttctgagacttctcaaatgatttgatttgctcactgagctcagcatgtaatttactccagtcttcgatttccttgctgcaactgctgctttggtttcttgcttatagcctgagcattttgcttgcttgaacgccgatgggcattctagacttcaccttgctgcttcactatagctttagcttgcatttagtggcaatgctgaacctctgaaaattgctggaggcattgcattgaaataacatcctttaacttctctatagatttcttgttttctgatatcaagtcctgattcttgacattctgttctctctctagattctagcataacacgaagatttttagctgtgtcatccagaatttcctgatttgtttcaagtgtcttgatgttatccttatatttaatttgtcagggtgaaga

SEQ ID NO: 454758 - DNA, 470 bp, Homo Sapiens
  misc_feature (57)..(112): n is a, c, g, or t
  misc_feature (413)..(421): n is a, c, g, or t
cacccttttgcataaatggtttgggaatcccagacagaagggtttcaatttgctatnnnnnnnnnnnnnnnnnnnnnnnnnnnnnnnnnnnnnnnnnnnnnnnnnnnnnnnntaatcttttgctcacccactctgtctctctgcccgtctatgggataacactctactatttatgtagtcaatatatactaacatagagatagcctttgaatatggcaattgggaataagcaaaaatgatcattgataacgttaatagacttttttatatgtcagagttcaagaaaccaaagtttgcaacttaaatctcagttttcaaacagtaaaagtttgtatagatggcactacagaaaaataaaaatggttattcctaccagctccagaaatgtgttacacaatatacactagaagacnnnnnnnnnaataatagtattttgtccttaggtagtattgttcctttcaaccaaagac

SEQ ID NO: 454759 - DNA, 612 bp, Homo Sapiens
aaggatcccctcttctccctgacatagagaaagcaaaggatatgcctatgattagtctaaaatgcagccatcaccccccatacctcttctatggcattcatcctaacatcatggaggcctttgtcctagagaattatgtgacttgccctagagaattagtgaatgaccaaaaagagactttccatttatcttcctttgacttaaaaggcatgaaaataaggcaaaaaaatcaataaaataattttcctgaggaaaggttaagagatggcactttcctttccgggcccagagctggatttctctgaggtttgaccatctcaggactcagacagactccagtgctattttctggacatttgtggtgaagcctcagccaccatgttcaaggtggtttgaatgaaaacatactcagattgtcatatttatagcagggaaataaaaactcaaattaggcatcctgcagcaggctactctgaaaataacattaggcaacatcagagcttcacttgcaaagaaatgttaaatcattttagggaaatcagtgaagtctctttagaaacagacatcttgtgtatggcgtaacccagtcttggggccctcacggagaagagg

SEQ ID NO: 454760 - DNA, 523 bp, Homo Sapiens
  misc_feature (28)..(28): n is a, c, g, or t
ttgattggtatcagctatttccataaancgatcggatgagttttgatggacagatcaggcttttgtttacagctgttttgctcctaatcattccaccacatcacatgtcatggacctgaattgcgtcaagaagacgggcttgtctgtcaggccctggtgggcactttgatagcgggcatgctgtgccatgacacgtgtggtgttgggtcttgctggacaagctgtgctgtgttcagtgtgcggagcctctgctagatgctctcatttggggcactgggccagtgctactgggagcacttctgttttgtgtcactgacatccaatagcatcgttatgtagagcaaacaccgaagggctgcatttctttgtgggcttattctcgagaaaactgggggcagatccctcctcaaggaggggagggccaccttggtttccagtcaagtattgtgaaaattatccaacactcaggcaatccacccaagcctgctgcccatgtctggagaagcaaagtgtcaggagaaga

SEQ ID NO: 454761 - DNA, 765 bp, Homo Sapiens
ctcccttcacagcaaacagactgtgaaaaaaacattcaggtaggtttcatcaccgagagggaaaacttttcaggatagaacctggctgttcagattcatctggtatccgcccaagagaataaatgcaatagaggctgaagggacagttttcaccaatttatcatttgaaaagctcctgctttggtcttttctaaaccaaggcttttatttcaaaagcattaaatttgacgctggactagtgggaacccaggcgcactggaagggggatctgttatagttgattgaccaggaggttaaaatcaacaccaactttgcactgagattcactgttgtaggacgtgtaatagaattcattctggcatcttctctgtggaggtaggagttactgattaaaggttaggagtagagaaaggtccctttctgggtttacaaggatgccagattctagtacagctgatggggacaaaaaccataatgactcagaccggtggaaatggaagatcttcagcagtgagtttgcttttaccattggagagatgacaacactaaatttgccaagaggctgagcccatgggaatatgcaaactttaagcagaggctgagctggtcgaaaatgttgcctacctggcagtagggttacataatgccactgtacagtattgttaaggtaacaaaataacggtattcaaaccaggctgttgtcgtgaaaggactatattgtgataggttaaagaggtatgctaattattttatgtcaggggagaa

SEQ ID NO: 454762 - DNA, 227 bp, Homo Sapiens
tcagcttgctaaacttctttcacatggtggcacacaaactgttaactatttatacaagagactacttgaggttaaagggttaaaaaggatcaacatcttggcacacttataaccctttctaccatactagtatgctgtggcaaaactgggaaggccttacttaagctctgagttatttcatctgtaaaattacgatgttaattagtactttcctgtcaggagaagta

SEQ ID NO: 454763 - DNA, 636 bp, Homo Sapiens
atcgaatcatgtgtcgacaaaggtcccacttgccttgttctagtgctggttttgaatagaagggtagcatgttgcctacttactgcagggacttccatattctacaaaaaacaaccaggacagcattctttttatactacacaatttgggaagatatgagcaattctttatctcgttttctaaactcaaagaatgtagccacaccaccacaggggttagtttaataataagattaaaaagtaccatacaaggaaaagcgaggcaagtactcttctggtgtatgtaaactataatttattaaactgctactacatgccagatagcatacatatactttaagtcatttcatttatttctcccagtgactctgcagataggcatatcatttgtattttacaagtgaggaaactgagttaagtaaattgttgaagatcagcagaaaaggaagaaaaaaaggggaggtttgcctgactccaaaataggtcaggtctgtctcctgttgcagagttttctgaggatgtgactagaatctttgctttgggcaatagcaagtagtaaagttctgctgcacattcagaatcctccatttttctttcacaaatttaacctgcctatcttggtctttatggacaggtg

SEQ ID NO: 454764 - DNA, 385 bp, Homo Sapiens
cttactcgatatttcagtttgggtttagtccttccctctaggaatctcttcacaatcttattgtagaatgttatcatattgtgtttaattgcctgttgccgtttcctagactgaaaacaccttagatatgaagtctctggtatctaattctgcaatttgtgttcttctcattcttgatgacttagtttctctaaagcaaatttacatttccactactaccaggaatcctaaggcaccaccaacccaagatcacttttaggacattttatgcttgaggtttcacaaactacacagcatagtttcaaattccaaacctccttgaggtatggcctatagttacaaattctcaggtacattttttttctctaccctgagagccaatgcc

SEQ ID NO: 454765 - DNA, 425 bp, Homo Sapiens
tggaatacataagtttattgaggtgatttgtagtataaccatctttcctgacctatcatgggactatatgtcagtcatatttgaaaagaatttatttgggaagaattccacttgttcaggactcagacagaagacagaatcacatgcttcctagacagtgatgccaaggttattactttgaaatgagtagggtcaaagtcatgctgatgggagaaaaatgcttttctcatgtgaaattgtgttctcttaaagataaataaatgaagtcatatttgctgtttcaaagtgtttgccttccgtgttttgtaaggaaatgatggcagcctccactcttggaaaatcgaactgggattgtagcacccatcattcttctctttctcaagagatcagggtcttcactccctctcactctatgagcacgcgga

SEQ ID NO: 454766 - DNA, 554 bp, Homo Sapiens
aggaaagatgcccagacgttggcaagaagcttcgagtgcacccagacaggactgaacccaggtcaatctaatcaaggtgtgatacactggaactagggccgcccttcaagctcacaaccttcactgaggcttaccacatcatgcaaattaaattattaaggccagcttttaaagtgtgtacatggggtggggggaaggcattttctaggtttcattatttctgttaaaatgtacgcgattcttgaaataaaaatctggacgatccagtggaaacagcaaataaaatctctaaactataaaaaaagtctcaaacactttaattgtgaccttgtgaaatacgactcatataatctggcaccaaggatacccatatgtaaaatggaaagaaattactcttaaaatgtccttagggtcaacttacccggggctggcgggccaatcatgttgatcgaataaactacgtaagtttatggatcactttcactctgtttcggtatacagcacgctagagggagggggagttaaattcatccctgctcttggatctccaacct

SEQ ID NO: 454767 - DNA, 827 bp, Homo Sapiens
tgtttattcgatgccacccgtactgaatcttagccagcgagcactttaaaagaaatttaagtaatgaggaaggatcatgagagtattgaccaaactcagttttgtggattttcagtgcattataagtactcaagctttcctacacctgtcctgtttgctatgaaaaattttgtagcattagctattgattgccttgattttcttgtggaattactaattagaggcaaacttttatcagtcatgcaattatgccagcgaaaaagatatttgaaagcacacttatcccaggagacttcatcaagtgggacaaccctaagggctgtattagtgagaagttcatgggagaaggagcagaaaatctcctccatatatcctaaaaagggaggattctcctgtttcccacccttccacgatgaagggggcctatttgtgcttcctgaagccttgatttgatgacattccttagggtgtgatcccagagctgaagttcaatgtctgtgctaatggtggctgtgtctatgcatagtgtgtaaatggacacactcaataaacattggtaagcagcccaatgaaggccaccacttgcacaagagccaatgcagatccctaggtagggccactgacccttcaggacagaatggaagaaactgcacacagggtcctggaaagctgttgtagtttcttcattctcaaaggtactttcaagtgctgagtgagacctcagtccccgcagacgagagctcccagggtgagttctgagaaaagacagttagtgcactggtcagagctgattatagtcgacgctcccatttactgtgaagcaatcg

SEQ ID NO: 454768 - DNA, 415 bp, Homo Sapiens
acctggccccgatgtgctcacatttaggtagactgggtgtttatctactgagtgaattacagccttcggcatgatgtcaaggtagcaacaaaacccaaaaaatccatcctttagaaattgttttaagtcacaatgatgataccttctttaaaagctttgacttactgaaataatgcttttcatttgtccaagatgagtacatagcagaatttggaaatatggttccaaaaggctaaatagactgacttttttgatatttttcccttatagggagaaagaaacattaacggtttatcagatgccttgactgtactttttactgctttgtcttcaaggcctagtgtaataattaacatctagtatgtgtttgatggatagccaatttttgcttcattggtatgttgttaccacagtc

SEQ ID NO: 454769 - DNA, 116 bp, Homo Sapiens
tcacattactgagtcgtaagcagcctaatgctggccatcaatctccatttactaagaaaaagtaaaggataaaacaattcacatacaaggctaactcctgctaccgtggaatactg

SEQ ID NO: 454770 - DNA, 488 bp, Homo Sapiens
acttgctatcagttccacatcttagttggttagtgaggcttttatttccttctttcctcaaaacttagatttgtaggaagaggaggctataggaagaacatgaataaatgagtctggtttgaggatagggattgcgtgtggggtagaaaactacacaaactcaggacgcttttaaaatttttcttattaaacaatagtcaacacaagacttctgtagccagatgtttgggggtttctcttcatacaccaagcaagcaatcacttcttgaaatcatcaagcaattgaatcagtgtctacaaattcaattctgacactctctacctggaggtagactcagaaactacagattgagggcttagtcccaaaagattgtatccttcttcctaccagtcacaagtccaggcctcttggaacgtctgactgacttgcttcaaattagggttcttgcaaaccccgtctttgggttgatgataagtagaggctcaca

SEQ ID NO: 454771 - DNA, 512 bp, Homo Sapiens
tacaccacctgagtccaggagtttattggaggctgtagtgagacctgattgtgctattggactacatacagcctgggcaacagagcaagaccctgtctcaaataaaaataaaccctctaagtagattcctgaacaagccacctcatctctgcagtgaatgaggactctctgaggggtggacatttgagccaggacctgtctccagttgtataacttaatgaataaggattgtgcttggcacagatgtgggagttacagaagtggtcaggtgataaatattaacagtttgaagaccaagtgaagaaccagtgttctaattcatttggactttctgaacaccttatgtggtttctctgtccttcccattaaaaacaagtattgtgctaccaggcctctttttcctcctgcctgagacgcgtagctgtgatcactgggacctagctgcaatgaaggcagtggtttccaggaggagactacagtttgatctgtgatttcatattgtagtacaaagg

SEQ ID NO: 454772 - DNA, 501 bp, Homo Sapiens
aaaattagacaatccattctcttgaaagcaccggtgtcttgaaagaatatttttccttttgatctgactatcgtgaaaatatttttgaaagttcttaatcatagttttccacttttgagcacttgctatctatagacactgtgcaggcttcacatacattacattctttaaccctcacagtaatcctttgaggggggtaagatcattcccattttgtgggtgaggaaattgaccccctaaaatgataattgacttgtcccagctgacttggctagaaagatctggatcctgggatttgaatccagggtcagtctgagtccagagcccttgctctttaacagctatgggtgaacagaccaactttaatccccaggggtgggtggttttcatccagggatttgtctctatgactgtttctccattggcataatgttaggcacgtggaaggcaaaggtaggggaaccaccctgtggcttcatcctcatcactgcacgtggaagt

SEQ ID NO: 454773 - DNA, 472 bp, Homo Sapiens
tcttttataatcctatctacccccaccctacaatggagcaacttctagaaaaagcatcattttagtcataaatatttcagtatgcatctctaagacagaaggactttttttgggaaacattccccatgcccatttttagcactggtgctatagcctgcctagtgattctctgagctcccactctccttccactaagttcccctttgctcaacttctccagagttttctacgctgcttgcaaccttggaaggatacctgatacagtacatggaaaaagtcctttatggtggggcaataaaggatactttctaagagaatgctaagaatacaaggacatatcacagcagtagaaaaaggtcccacgggacacagaggaagggaccagaagttgcattgggatgaagctaggtgtgaaaggggatgagctcaactgagggaaggaagagagtgcagatgtagaaccgactggtcc

SEQ ID NO: 454774 - DNA, 636 bp, Homo Sapiens
atccccggcatacctggaccttcttaaccagctcactgtgcataggttgagcctgcaggcctacgcggatccgcttggtgagtgccccctctgggaagacggcctgcacctggggcaccactgtgctgctcagtacacctccttctgggcctatcagattgctgtcctgtttgatacgagacaccactgcaaaggtactgtgggaagtctcgggtgatgatgcggcagattcgtttcttttctaggtcttctgggctatccagtacttcatccatgccgttaagaatttcattcaattcatcttcagtgtagtcacagaaatgctctttccagctgtccccattctcactgcgcaggaccaccagattccctttcctttcctcgaagggccgcaaagtgagggatctccacgatcacaggccccaaggaagctgagcaccagaaggtccaacttcgatcaggcgactggccaggccttctccttccaccattggaggcatagttgccagtctgtggcgctatgaccagtcggcaggtgactcgcgttggagcagtacatttccgaggtggaataatgattcggagcccattgtgtctgcatcctcgcatagcaccacctcgggcatccaccataaa

SEQ ID NO: 454775 - DNA, 775 bp, Homo Sapiens
  misc_feature (661)..(661): n is a, c, g, or t
tttgttcctttaagatttcaagccttcatgccaatctggtcccaatgcacttcctacattatctgctttagatttgcttctagcttcctttttccttccttcagttgtatctggttcttttatgtgcaattttagcctctgatttttcagcaatgagctttgaagtcaagaattcagctgctcctgcatcgaagaaagtattccctatagctttatctttaatggcccaaatcacttcacagccttcaatttcatacactaactcaagtgcaataccaccgttccctatgatcattattctcttagctttagtaagctgtttctgaaattcctgagcactgtctgtatcacggattcctaatacataaggatttccttcacatatcaactttggtttagctccagcacacagacagagtttcttatatacgtgctgattgccatcttctgttacaatgcagtgttcttcactcttcagttgctttacgccagattctataaccttaatgttgggaaagcgttttcctaacatggtacttgattgttcttcaacatcgaattcttccaatattttagaaatctgcttgaaatttgtaactgctttaataacaggagaagctgttaccaagagaatatcttccgatggaaagtgagtagccanactgctccggcacaagtgacgcccgcgatgccgccgccgaccaccacgaactttcctgccgtacgggggagggcgcgctgcctccatgctgccggactcccagtggtttactga

SEQ ID NO: 454776 - DNA, 591 bp, Homo Sapiens
gatgtcgaatgtatgttgaagaaagtacgcacatcttatcttctgaacattttgatggaattaaccacaaacttcatgcaagaacagtaaaaggaaagatactattcaagtccagtacatcataatgcagaattctgtatcagtaccaccaaaagatgaagataaaaatgaatgccatttcccatccagtactgaagtgttaaagttagaagacatttgctaagtcaaatcacttcaggaagctcatcctgggagtggaggaacagatgttctgtcattgccacattcttctggacacagactggagaactataggaatgtatgttgaagaaagtacgcacatcttatcttctgaacattttgatggaattaaccacaaacttcatgcaagaacagtaaaaggaaagatactattcaagtccagtacatcataatgcagaattctgtatcagtaccaccaaaagatgaagataaaaatgaatgccatttcccatccagtactgaagtgttaaagttagaagacatttgctaagtcaaatcacttcaggaagctcatcctgggagtggaggaacagatgttctgtcattgcc

SEQ ID NO: 454777 - DNA, 412 bp, Homo Sapiens
gagagagaagaagctttatggcaactgctgaagctcaggtttgagttaatccattaaatgttcataaaatttattattttatttatgacttgtctgtcacagagtgtgagtaggaaaggtgatactgacaccactggaaactttctgtggggaaatactgaatgtcatatgatcctcctcggctttcctctgaacacagtgtcttgagggtcagtaatacatatcagtaagtacctcctggtctcaaaggagagagaaaaccagcaggtcagcacatccttactgtattcctgaccaagtttgtcttccagctggtgaaatctcaaggcatagacacaggtattatcagccagtgtgggtgtgcatccatgttctatatgtgtcatgctgtacattcgtgatcaaggaccga

SEQ ID NO: 454778 - DNA, 512 bp, Homo Sapiens
taatcagtcgacttgattacgaatgtggagctgttcgaggcgctcctaatgtgactgaggttctttaccgcgcgtacgcacccactggtcaatccggcattgtccgtccctgtagaacgctgagcaaaatgtgggatctggcttgcctgcgatggcggtgggtcagcgacagattgggcaccgataaaccgctatcgcaggcaagccagctcccacattgaatgcatttcaagtcgggctcagtctcactcctcagcgctgtgcaccaccaccagcaactgcgcctgcacctctcccaccgagcgaatccggtggggtttctgcgcgttgaaatgcagcgcatcaccgcgcgccaacagcacgcgctcgttcatgaaatccacctcaacctggccttcatgcacgaataaaaactcctcccccaggtgctccttgaaggtcttgtcggtgaactccgccggcggataaatgatgaacgacagctgcgctcgctgacttggtacattcgtcat

SEQ ID NO: 454779 - DNA, 407 bp, Homo Sapiens
gtggatttcagacaagtcgagttcttcttggagaaagactagttccttccccagggaggagctgaggccaagaacctcacccctggcagagttgtgcagtcctgcgggcctgatgctctccagatcatggccagacaagcatccgttctccttcctgccatctggacaagcttcgtcaggggatgtgggatctggggtggtccaggccatggattccacatggccagtggcgttttctttcagggcagatgtgctcccaccctttggatggtgctgggctgaaccatcctggagtcctgctggagatgctagagaccttgtcatctgttccaccgggaactcgtggagactaatggctctctcttggtcacaaaaacagggataatctgacatacgtgggccaggta

SEQ ID NO: 454780 - DNA, 756 bp, Homo Sapiens
  misc_feature (82)..(134): n is a, c, g, or t
ccgacgaatttttgttgtgttgttttttgtagagacaggatttcacatgttgctcacgctggtcccaaactcaagcggtttnnnnnnnnnnnnnnnnnnnnnnnnnnnnnnnnnnnnnnnnnnnnnnnnnnnnnagcctcaggctttttttaaaaatacaaatggttgcatagtgtactggattttttagtccttattttacaacccataggagtactcatagagctgcctcattcttttgaagcagaaataaatatccttatacatatttatttatgcatatatgtaagtatatcaatgagataaatttctcgaagaattactaagtcaaaaggaaggtgtatttaaaactgatagatactgtatatcaccattagaaataaggaaaactcacaccatttatcttatttttctctcaccttctatatccaatccatttgcaaatcctgttgactctaactccaaaataaattcaggacttgaccacttctactctgattcaacccaccttctcttatcaggattatatttcagtagccttttaacggtctccttgcatcagctattgccccttcattattaggagccagagtaatattttcaaagcatatatcagcccttggctccagatcctttcagagcaaaagccgaagtctttgtggtgtcttaaaaagcctgatcagcacctctccttttccccaaaccatctctctgcccccctttgtgatcacatttgctaccgttgactcctctgga

SEQ ID NO: 454781 - DNA, 427 bp, Homo Sapiens
gtagaacacacacagagtaacagacacctggcaacaggcattcctctgagccccagcaggagggctggagccctgagacagaggtgtgctagctacacaccaccaccgcaggccatacaagccgggtcctcagcacaggctggagggctgtggttaaggaggctggaggcacgacctcctgcacagccttcccttctgaggacagcctcatgggaatccccccctttaggacccaaatgaaagagaggatatgcaaaggctaaaccgatacagggaagctctcttggaaggattaaagaggggaacccggcaggccacaaacgttaactaggtttctgaggtcattcagagaaaagaagaaagtccagcacaattctaggagagactgtgtgaggcctatggtatgtatactccctttcgtcccccg

SEQ ID NO: 454782 - DNA, 689 bp, Homo Sapiens
cctccacagagcgtgcctcacaggcagcgcctcatccgcatgctggagacctgccaggccttctctcttggaggtgaatatcgggggctttcaaggggatcaaactggccagcgccagcatgtccactgttacagccggcctgggggctcagagcccctctgaaactaccaatggaacatcccaaggtcagaccaccggccgtttcaatccatttgcatttggcagacattcagcctcttatttcaaaggcaaatttatgcttgcttcactgtttctgcttttttaaagcaaagaaaaaaagctttcccagcctggggctcaagcatgtctgggtcacggtgacagtgacactttgaaaaccacctccaggtgcctccagtcagggcaagcaggctttctcagaacccacgctgatccaggccgaggggaacctcagctgtgaggggggcacggtcactcagaggacggccctcacccatagctcattccagataccagagcagccaccaggaaaggcttggccaggtcaccgtgcctcaatcgacagcattccagcagacttctgacattcaatcctgaatcctgcagaagcgggcagcagtgaggggctttgaagagctgtggtcacccaggaggggaactgaaggtcatccagtccaaccctctctggtgtctgatccttttacaa

SEQ ID NO: 454783 - DNA, 408 bp, Homo Sapiens
tcctcggtgctcttgatgttgctggatttctgcctatagccgactggttctccttagaagaaatgcccctttgagcaatgcattctgaagtgtctggcctaggctggcgctgtgctgtcttgggcctgtctcaatcagggcccatgcccaagaggaacaaagctccttccacaaagaataagtgaggccatgcaaccttttctgaggggctgccgtgtgccaggtacccagcacaatgtcacattcattataacccagccttgtagacacgccaagcttccagcacctcagtgccttcacgtgtgctgttctctgtgcctggagaacctgcccggccacagatcccttatctccaggtcgcagcctgttgatcagtcagggaggccttttctggcctttcgtcccccg

SEQ ID NO: 454784 - DNA, 634 bp, Homo Sapiens
  misc_feature (127)..(127): n is a, c, g, or t
tttctgtggatgatcaattttaatacaattatacattcatgctgtggtggtaacaactttcacattatttgtaggactacttttctcaactcatgacaaaggcacaatccaaaagtataaattaacngttacaataagttttaaacaaatgtggacaaaggaccaatctgaagtattaaacagaaaacatctgaatatggatcaacttgaatatattttcattccagaaaatattttgtcttttcaacactgtctcattttgctatgatggcagttttgtgtacctggtgacttactcttaatacccattcaacatgtaacaattataattaagcattcacatactggatagacaacctagatttttaaatatgtctgattttttaaaattatttttaaatgaattattctgctaaatgtcttacttttccatttcagttaatcatgtgaaaataaatgctttttcttccccttatagaattcagtaactcagctattttactttagatacatgtgaatttagccaaggattattaaacaaatagaaaaaaagccatccaatcatagtgcttaaaggcaatgtaatatgtaaaatgttaaaatcaggctgatttatttccttgatgggaatttt

SEQ ID NO: 454785 - DNA, 625 bp, Homo Sapiens
aatcgtatactctaccatgtggtctcgtagcccacaagtatttacccttcctaaccatcctgcccgttaatgccaggtacatgtaccttgaggagagctatgctgctctaaccttgctactctaatgttgttactgatttctcagagtaacattacataatatgccccaacttatttcctttctttcttctaaccaaacgggactgaatctcttcattggattccatatcttgtcttgttcacactgatacctttgacttctctcggtcctttatttgtatttctatatgtgtaaattcagcttgttttcagtctgacatgccagctcctccatacatttcatttgatcctctttccaccccagggccgagggtaccctaatattgtcttcctcactcactctgtacgtctctggtacataaccttctatgttttctatactgaccgtgtagctgtccttcttatttagggagtggaatcacattggaattgggcaccatttcttatctttgtagtcttcactaggtgcgagagatgatatttacaagggcagggtgataggaaccgaatgtcttaaagggtgaagtcatgtgaaatatagtaattttgacatgttctccctaca

SEQ ID NO: 454786 - DNA, 658 bp, Homo Sapiens
  misc_feature (120)..(137): n is a, c, g, or t
ttatttacagaaaaacagagccggcatcagttagacatccctgtttttcgagattccttgtaaacagtttcagagattcttcagagagtgtgtatgtttctctctcttttttaaggtttnnnnnnnnnnnnnnnnnnctagttgttttaagataatgttagagatacgtatctctaacattattgaaacacacactaagaggtgaggaaagaatgattaaatggtagaaaaaagttaactcacatttctccttctagaagctctattcctttataacttatatccttcacgtgcagtttgcatatagtagctctgctaaaaacaaccacatggaaaatttttggtatctctaacattagacaacataccccccaaactcatgtttctgtttccctactttctctcttactttaaaattgtagtattcccaagagttcagtggtggcaaatgttaataaaataagttagtacattttggaggttcttatatcctttgtagggtaagctgatagtgtttagatttctgttcccattattccagtagtgttttaaattatttaagataaataattactgtaatgttagagataccatgagttatgtgaaagattataaacccgagtttccatagagaaggggaacattaatgttagagata

SEQ ID NO: 454787 - DNA, 258 bp, Homo Sapiens
gccatattggatagctcagcgagcaggcccggcagcatcctgtgtgaggtcccagtaatttcgcactcagtaggttcttcacttgggtcagttaagactgaccatctatttttcattgtcatcagtaacactggatagcattctcttcttggcagagtaatctaagacaaaataatttcacatatctaggaagcatggcactccagtggcatggcaatttagtgtatttatgcatcccaatcacatgttcagcagcat

SEQ ID NO: 454788 - DNA, 364 bp, Homo Sapiens
tacggattcgagccccgtaacccgtatctctaacattaacaataaaaattaaaatgacaagccttgggttctttctattcagaaatttaactttaatatctgttagtcattaatttttgcttttcaatgggaaataatttaaagtaccatattgtgtgctatcctcttgactgcagccatgattatttgagatctaatgtaacattagaatactgcactatatattcttatgtactataacaaatgctagatgaagctgaactctataatttcgtgggtgatgttcacatgcagatgaatgactgacataatgttagagatacgggatcctcaagatcgcctcagcagcaccgtgcactgcctc

SEQ ID NO: 454789 - DNA, 444 bp, Homo Sapiens
  misc_feature (269)..(279): n is a, c, g, or t
cacctagacattatcagaagacaaaatcacatcatactctcaagtttacagtctaagtctacaacgtaaggtgtaatatatccagccaaagttagatttgcatttattttgcatgataatgttagaatggtttcaagtaacacttggaaaggataacctaaaatgaaaaagtttagagagtgaaatgcatattattttttatgtgggaaacatgaatcttagttgtgaaaaatagtcttgatcgatactctgaggaaaagtaaccaggnnnnnnnnnnnaaccattaagtgtaaggttagagataccctttctacatctttaatagtcaagtctccttttcttaggagttaatttcgggtcagaaaatgataggttggtttcattctttaaggggaggccggtatacagaagccagaacgtgaaggtttagctgtatggttgac

SEQ ID NO: 454790 - DNA, 335 bp, Homo Sapiens
  misc_feature (45)..(56): n is a, c, g, or t
tatctctaacattagactagcaagagtccagaagtttgacaacannnnnnnnnnnngggcaacatgttcggaattatggaaaatcatacgttgcttctgggcatgtaaaatgtaaaccatatgggtaggaatttaatattttgtaaatttatatctgtggcaaatacatagttcatctcctagtaatatgtagcagtaagaaggattgatggatgtttgtataccactatgtgataatgttagagataccacccgccagaatagctaaatttaacagactgacgggcataataagtgttgggcagatgtggcactgacttctcttgctgctcgaa

SEQ ID NO: 454791 - DNA, 622 bp, Homo Sapiens
  misc_feature (65)..(93): n is a, c, g, or t
caatatgattaattagtaacttactagaaaccaggtcatcaagcggaatctggtcccagaaagannnnnnnnnnnnnnnnnnnnnnnnnnnnnatttttctgtgagcaggtaaacttagctacttcggcattgctgcatatttgaccttcgagagatataatagtagatttgaacaggggctggtattattatgttcttagcaataaatgcttttctaatgccttttgaatacatttgtatttatgtggctgtaatgacaaaagatacaaaagctttttaaaatttagagtaggtattagtcttattgtttaatcttttttttaaaaaaactggatatttcaatcttttaaattgcaatatataagactattccaactgggcatttcaatccattttttaggtgctttagagataattgcttgccagtgccaattgagggcattagtactttgtgctcataaattggcctctgtatgcagtactaaaattaatgcagatttctctttagccttccaacatttcttgttgatagtgatgtattttattattttctttttcttaaggaaatgccagtgtgtcctaggaacctaggataacgaaggccacttacacttattaaaa

SEQ ID NO: 454792 - DNA, 434 bp, Homo Sapiens
agctcggtaccccccccaatggaatccctcgtagagaggaggcctcagcctcagtgcatatttgttgcattacactaataaggagttgtttgaactacagtcgtctttctgtttaagtatagttctacttgtaaatttcgtgtagggatgattcctgacacaaggaatcatcacatctattacatgtcgaggaatactcactttcactctgtttgcagcttgctttatgtatttgagagtgctcttgttagccttgcagtctcatcctactcaagtgtggctctgtatccaaccaccgtcttggagatctcatgaagatttctgaaacttttgttctgcaggataccttcctttgtggttatgtgtctctgtcaactccagcctccgtgtcttcagttcagtgaaactactactctgcttggattccattcgcg

SEQ ID NO: 454793 - DNA, 552 bp, Homo Sapiens
cccccaatggaatccttcctagttgaggcttcccccaaaaagtcaatctaagtcatcactagtgattctcattcatataactattttaattgtttgcatactatttttcgctaatattttgtatgtttgtgtattattggctctatttatcttccaccactggagatgtgagcaatgacttttatcttgctcacttctcagttacctgatcttagaacaatatctggcaagtattaggccctccataattattttttgaaccaattaatgaaggaatgcatgcatacactcatgccatgggcccagcactctggtaaatctccctgatggaggcatccttcgacttgtattctgctctacttgtccccttcccttcttgcatacacagcctagtttctaggaaaagtgacctatgttctgttcttcagcagctttctacttataataaatccattactatctggcttgtacctctacccctcgcaagaaactactcaccaccgtttctccactgccaccacttcctatttgctaagtccagtgatgcatttg

SEQ ID NO: 454794 - DNA, 335 bp, Homo Sapiens
agatatgaagttaatgtatttggaattcctttttaacctcaaattgtcatactcattcctttttgtcatgtaaacaactgctgatatctcaccaagagttttcactctgactggacctcatctgttctgattctgcaagtggatctgtaatgtactcaatatacttttgtttcatggtgtatgcgtaatgtgcatcagtttaacttgctttctgctttatctctccttttatttcctgtagtgatcctgcttctaacctgtgttttctttcagtgttgacaccttggtaggataatctctagtatagttaatgcagatgatgcctggagatgatg

SEQ ID NO: 454795 - DNA, 585 bp, Homo Sapiens
gatcccatattttcctattcctgtctccctgcttcttttcccttgaaagaatctttatagctgctagttggttacgttcttttcaaatcaacttcgattcattttctgggatcaccagactttttctgagttttgtaatcagcagtgactctggctgccaaattttatggttatttctttgatcttatgctgctagacatcttagtggtgtttttcacaggtcagtactatatccttcttaaaacactttcttcttttggatttcttactaccacgttattttttctatccaacttatagcttattcttgggcttctttgatgagtcttataaatattgtgatttacagagttctgtgctagatacctttctcttttctgtgtatgccttccctctgaggcaatatgtagcccctggctttcactgtcatcattatgctaaaaaccatcaaaagtgtttggtcaaaagtcaaaggagtatctgttccctagatttatatgctgtttctactgatacgtgtaatagtcatgaccaagttagaattatcctgttggatccatttgggggggtacgagctcgatcgta

SEQ ID NO: 454796 - DNA, 254 bp, Homo Sapiens
tatttaagataagccaggttaaaaggaaccaactagtttttgatgccagccatacccactcaatagcttcaacaaacattaacaatgaatatatcttccttaaggtgggcattacagagcttaaataggaaatgccaagctcacatattagcccagataacacggagaatcggcaaggaaatcccagaatacagaggaacacagtagtgatatgttaatatcacaccttttatgctcctacgccgtgacacttg

SEQ ID NO: 454797 - DNA, 462 bp, Homo Sapiens
ccaatggaatccatcagaagctagtaatgtttttatcactctttcatttagtgatcttaggtaaattgcataaccctataggttccaggttcccataaaataaaggtgtttattttataaaaataaaactggctgattcttcaggatcctttcaggtcctgtgttttttctgctaacccaggctgccttagtcagtgaaccttggctaattaccaggtgtgtaccagctcagcctagggatatagagattaaaccaacttcagttttttcccttgagttattcatggcctggtgaggacaagaagcatggattatggttgatataatgaagtttggaaattgttgcatagaagtacacatagaatgctgttacatttcgggagcagaagtagtgggatctgttaaatttgggggcttctgtgacggtttcataggggcactgcagctccagcttggaccttg

SEQ ID NO: 454798 - DNA, 641 bp, Homo Sapiens
tcactcttgcttagagacatagatggctccttgctgggaaatgctggttctgtgatacctcaagcagaatatgaatgggacggaaacagccaagtaggaatgggagactacagaattcctaaggcgatgctcacattcttgaatggaagtagaattcctgtcactgagaaagcacctcataaaggaattattagagattcaacctgtaagtaccttccagagtggcagagctatcagtgctttgggatggaatatgcaatgatggttattgaaagtctggatcctgacacagaaactcgaagactttccccagtggctataatgggcaacggttatgttgatcttattaatggcccacaggatcatggctggtgtgctggatatacatgccagagaaggctgtccctgtttcacagcattgtggctctgaacaaatcttatgaagtttacttcactggcaccagtcctcagaatcttcgactgatgttgcttaatgttgatcataacaaggctgttctagtaggaattttcttttccacacttcaacgtttggatgtctatgtgaacaacttattggtctgtccaaaaactacaatacggaatgccagcagaacactggaatttataccatctgtcaagac

SEQ ID NO: 454799 - DNA, 206 bp, Homo Sapiens
gcctctatagatactgtgcttatattctcttcatgtctagatggtagaacttattaacaatagctctttagggctatactgagggagcggaaatattcttggttcaagtctgtttatcggcaagagcatttggggatgaaggacatatttccttcctatgactttgctcaggtttctggggattggattcatttgggggtacctgc

SEQ ID NO: 454800 - DNA, 346 bp, Homo Sapiens
tagtctttgttctatctgactttgaacatgcaaatatatttcctaaatttcagagggagaatagagaggtttattatcttcctgatggttactctgattcctgtcccctcctttccatgtaataattcttaacaacttttttcatcttctccttgcatttgctcaccattcttcatcctcaagtttcaggaatctttgagttttagccatcccagtgtaactgcactttgaaaggtcaccagttactccaaggttatctagtccttcctgaaatacactccggtctactctctcttcgtgagctttctatgataacgcaatctcttttttctccactgctttttgc

SEQ ID NO: 454801 - DNA, 843 bp, Homo Sapiens
aggtgactctagacgatcccttattattcgcaattcctttagttgttccttttatgcggccagccggccatggcccaggtgaagctgcagcagtaaggaactgaagtggtaaagcctggggcttcagtgaagttgtcctgcaaggcttctggctacatcttcacaagttatgatatagactgggtgaggcagacgcctgaacagggacttgagtggattggatggatttttcctggagaggggagtactgaatacaatgagaagttcaagggcagggccacactgagtgtagacaagtcctccagcacagcctatatggagctcactaggctgacatctgaggactctgctgtctatttctgtgctagaggggactactataggcgctactttgacttgtggggccaagggaccacgctcaccgtctcctcatgtggaggcggttcaggcggaggtggctctggcggtggcggatctgacattgagctcacccagtctccagcaatcatgtctgcatctccaggggagagggtcaccatgacctgcagtgccagctcaagtatacgttacatatattggtaccaacagaagcctggatcctcccccagactcctgatttatgacacatccaacgtggctcctggagtcccttttcgcttcagtggcagtgggtctgggacctcttattctctcacaatcaaccgaatggaggctgaggatgctgccacttattactgccaggagtggagtggttatccgtacacgttcggaggggggaccaagctggagctgaaacgggcggccgcagaaactgttgaaagttgtttagccaacctcatacag

SEQ ID NO: 454802 - DNA, 614 bp, Homo Sapiens
actggaaaggcaccatgtttatttgacaatttcaaacatgacagaactgcagaacacagacatcaagattcccctgtaattccatttggggtctaaagcttagattttgttttgtttaagcagtggcaaacattatgtatagatatagatgtgggatcataaaatgtgtttaaaagttattgatgcaggacaactttgcatatcaatacacaagcatttatttgatttgttttaatagctgtgaaatatcccactgtatgaagagactaaaatctgtccttgtgttgtggatatttggattgatgaaccattggaacaaaacagagagggcaatcaaagcatttgacagcctggcaggtcaaagtgagaggtttattacagaagacagtaatgctaaaaggggaggagagctaagtgaatccacctgctgcaatgagagcccagaatcccaccaccctaagaggcaggagacaacgtggccaaaagggcagaggcccccaggtctcccagcagtgccagatgcaaacttgtcatcccaccctgtgtgtgggcttcctatgccctggacagtctttcctgagacagagctgttttaagagcttagagcacacatt

SEQ ID NO: 454803 - DNA, 156 bp, Homo Sapiens
tgacgcatgtaggcattgtttggtatgtattctaaagcctttttaagcagttcaatcgctttgtctggctcatcttttcttcgataaaacttggctgcactgcgaagaacatctgttacacctggggctttctctcaggcttcttcaatacttact

SEQ ID NO: 454804 - DNA, 257 bp, Homo Sapiens
cgctggtttattgtgaataaccagtaactttacagttcagtggaagatcctacatttggggttctttatgatgtttcaactttcctccttttttcgcagaggtacacagcagaaaggtccctctcgtagagcggagtatcttcagggacccagtacatcatgagaaacccaacgtccatggacagctgccaatacctcacccttcccagtacctgtaagtgtttatcttctttataagaatattttactttaccttc

SEQ ID NO: 454805 - DNA, 260 bp, Homo Sapiens
gtgtttgttgcattggctattctgggttcttggtcttgaactctttgcctaagccaatgtctagaagagttttactgatattatcttctaattgttatggtattaggtcttagattgcaacacaggttcctgagtgtcatttgaataaaaagttaagcacgactataatacatataaattaatgtgtgccttaaaaaataaagcactacataaaatgtgtggtagtatttttatgtacatatgcatctacttgcatcact

SEQ ID NO: 454806 - DNA, 330 bp, Homo Sapiens
ggatcctcgactatatagtgacatactacaatttatacaagcacgtacccactcatgtaactgaagtacaatctttcattgatcatactgatataaagttattatttcaattgatataacctgctctattcatttgtctattccagtctttgtaacatccaacattatcaattttgagctcacaccaacataaattgttgtcacttgctatctgtgaagaaatggttctaggacctctcccctcatggattaaaaaataaaatccacggatgctcaattctctcacataaaatggtttataatatttgcatacaacctacatgcatcact

SEQ ID NO: 454807 - DNA, 550 bp, Homo Sapiens
gagatgatgcgtgtaagtaagagctggatggtttctcctcttaattttctaaacttcaaagtgcaagggaatctcaattacaggctagagaagtactgtttcatcttctgactatttggaggctaaatctagcaattaatgtctgctgctacatccatatgacgctgtagaacatactttacaccttaatgatatgtgcacatttgttgcctctccagtaagcttgcttaggctcttcctttctccaggttctcttttactccaaagggagatgtagtaggacagaatatcttaggagttccacagttcaaagctacagctgtatagaattgaggtgaaactttgaagtttacaatatggaaagaaccatgtgtaacttggttatgttaaaaaaattttcttatagaaaactgtcaatgcagtggttgatttctttcaatcaaataagggattggatcttgagcaaataacatcagcaacattgatgacgctggaataaattaaggagagaacagctacaggtgacgaatttgagtgtctacatgcatca

SEQ ID NO: 454808 - DNA, 139 bp, Homo Sapiens
ctggccatggaagtaatacattgtaataaggaagaaagttaattctcatataatttattcgttcctccctctgacgtacaaactaaacctatatttcaaagtccttgtatatattatacggatggatacatgtacaccg

SEQ ID NO: 454809 - DNA, 499 bp, Homo Sapiens
gtgtggttgatctacgaggatcccgagtgatgctgtagagagagattcttaaaggtggagagagatgttctagacaatcctgtgatggatacctcttcctgcaaacgtcaatagtcatgctgaggttggtgtgaaaacgaagaatccccagtcaaggaactggaggtgatagaaccatgaggctggcaagccagtggccagtgagccagcatgttagactgggaagaagttttgacatcacccagcttgacagccttgtttatgtgcagcccgtgatgttctcatgctcccatccgtcatagataagatgaccttgtgttatgcaaaattcccagtgcactccacataaccccatccctgtctttcctacttaggaaggcaatgtgaatttaagcgactggaattaatcttattgtagaaacaaccttgactttttttctgtttcatgcgaaatagcacatcactcatgagtttcagatcaatgatcagtgacaggtta

SEQ ID NO: 454810 - DNA, 291 bp, Homo Sapiens
  misc_feature (44)..(104): n is a, c, g, or t
agaagatgatgcatgtagcatgtagttaatgtctgcatcgatcnnnnnnnnnnnnnnnnnnnnnnnnnnnnnnnnnnnnnnnnnnnnnnnnnnnnnnnnnnnnnaagaaaaagtaaaaacaaagcccagcctactttgaccccttccaaatgcaggtttggacaatgcacgctcacaaacgccgactctgtttctctgctctgagaaggaaatggtgccaggttccctgcctagccaactccacctaaaagaagacatggacaacacagggagccgatccctacatggggt

SEQ ID NO: 454811 - DNA, 358 bp, Homo Sapiens
agtgatgcatgtagtggatactattgtgctccacccatgtccccttttcagggctgaggctcttattgccccagctgctgggcattcttgttgctaactatttacagctgtacctctcactaggccagactcttacccaatgttacacagccccctccaggatgaagccaagtagctaatagctggctgatacaaagacacaaagggtggccccctttgccttaatttgtgacaattccaaagagcatcccagctcctaactccctacaggatgagctgaggtctcagtcataactgcattgcagatggtatctgcctggacagtcccacatgcatcactcggatcctctagacagcc

SEQ ID NO: 454812 - DNA, 477 bp, Homo Sapiens
gagtacttagattctgtcagataaagaatctttgaagtaatcagttctcttaagaaaagtcaaaagagcagagccgataagaaccagaggaaaacaaagttaagcctgaaatcagtcctattcagacttccagctatatgaaccaatagacttccttattaaaaactgatttggtttgtttacctattggtaaaaactttgtaaggacttaaagaccgtgacattttaattaaataatcatatgtgtttcaccccaatcaaaccctatatgtttttatgagtatgggcaaaaggtgtggaagagttcacatctaggagaatgacaacaggcattcaatagagttacaaagaggtatttttagttatttttaatgagatggggtctcactatgttgcctaggctgaatttgaatttgggcacaagtgatactcccacttcaaccagcctcctggttagctggaactacttgcatcatt

SEQ ID NO: 454813 - DNA, 385 bp, Homo Sapiens
  misc_feature (61)..(113): n is a, c, g, or t
gaaaaaaacatgcttactttcatcaactattaatatgacctgtattcagaatatgcatgannnnnnnnnnnnnnnnnnnnnnnnnnnnnnnnnnnnnnnnnnnnnnnnnnnnnctagcatattttcagcatctgagttgtgcaaagatcttagctttcttttcatgaaaagaacactaacagttttacttaggactaggtgttttcttgccagaagaaatgcttttaggcatatgggaattataataagtatcccaatatgaaatttccttcttcagataacaaatgacaatgtcaagatggttccatttcttttcaatcttgcccttctcctttctcaaagaaagccttgctgtttctgaacagtcattcctacatgcatcact

SEQ ID NO: 454814 - DNA, 330 bp, Homo Sapiens
catgtagcgaaaggatgaacacgtgtggagacaaaattgcacagctttgtatcttaaaatagtgccctgccacacaaacaaaagatcccctaaattactaggactgttagaaaaaatatacttttaacttattaaaaaagccaatattagctaatgacaaagatctctggcaagattgagagagaaggcttttcagacagaggcagtggtctggagaagcagtgtcttgtctgtgctgcttctcacttcctgttctattgtcatgttctcttggccacactcttcttgacatgtctccccttctgctatccaatccttgtctttttcccg

SEQ ID NO: 454815 - DNA, 366 bp, Homo Sapiens
gaaatgctaatgagacatgtaaattctctctccaaagccatgtctcttgtcctgggtggtccgacagaaacagcataggattccagaaggacaaagggaagccacagcttcgataaaggactcaaaggtaccaggggtaggaagagatgctatatctcaacacaaaagccctgcaaggccagtgaaaaaaggctagtaagagcaggaagctaacagtgaattagcgccaagtgagtttagttattgctcttatagccccagctgttacagactaaatccactacacactgatggtacttggtaggttgttctggacatttctaatgcctctttgccataacactcatacctaaggatcaagatcag

SEQ ID NO: 454816 - DNA, 317 bp, Homo Sapiens
agtgatgcatgtgggagaaattttttatctagtaatgtttggtgtgtattatcttaacattagtgctgaattttagtaagcacttctattttggtgacttttggaacacatgggtagagcattgtcaagtggcttggttagtttccattacccttatacaagtgttgtcattctgtaccatttggtgcctctttcctgaccgtgtgatagtttcaggtagttgaagggaaagccttgcatgttaaaagataatgtggacagaagtaatctttatttccctcttatgtactagtttacacttacactgcatcatctaa

SEQ ID NO: 454817 - DNA, 495 bp, Homo Sapiens
ctcggtaccctgagtattttagtattattgtaggactcaagagggaattaaaactactaaaatgactcctcttgtatgacacagaaagaaatgttttttcacagagggaggagagaaatatcttcaagagagaactaatagaatcaaatcaatgtaccatgtctcatctttttggataagtaactgttagtaatccagacacttcatgagctttcattatgtaaagtctttagcagaagctaaaggaggggcaccaacctacagtaattttaacttaagtacaaaatagagcatgaaaataaattattgaaatcatttactcccactatttttgggttagggccaataatggggagagaaagagtgtagactagttttgtgtttgtggctattttagatagagtagcacaagtaatctattatcagtaggctgttttgaatttactggctgtcccttatgagttcaccgttagattggactgccctcaatgtaca

SEQ ID NO: 454818 - DNA, 430 bp, Homo Sapiens
taagcagtgaaggatcacccatgagaaatctacaacggctcaagatcaagtctatttaggtgaataagtcaatctagaatgaccttggtataattataccatttcctgaggaccttcttaataagtgccattaaagctttaaatacattaagactattcttcactaaatctctgctaatagtaggtattaattgagactcaagaaatatcaaataacttatttatggctacacagctagatactaatggcagagagtgtttaattagaagtacttttactatcccaggttgcctcaaatggaaacattttggacagcaatgtaaggtgaatagctgagcatgatggcacaagctatagccccagctacttgggaggctgaggcacagggattgcttgagcaaatgagttgagtccagcatggacaactgt

SEQ ID NO: 454819 - DNA, 554 bp, Homo Sapiens
  misc_feature (370)..(461): n is a, c, g, or t
atgagagtacctgtctggggaatcatgacattctaagcagtgaaggaatcaccaatgagaaaatctacaaaggctcaagatcaagtctctttaggtgaataaggcaatctagaaagaccttggaataataataccatttcctgaggaccttctaaataagtgccattaaagctttagatacattaagactattcttcacaaaatctctgctaatagtaggtattaattgagactcaagaaatatcaaataacttatttatggctacacagctagatactaatggcaggagtgtttaattagaagtacttttactatcccaggttgcctcaaatgaaaacattttggacagcaatgtaaggtgaatagctnnnnnnnnnnnnnnnnnnnnnnnnnnnnnnnnnnnnnnnnnnnnnnnnnnnnnnnnnnnnnnnnnnnnnnnnnnnnnnnnnnnnnnnnnnnntgtattcctgcagcctgcttgtatacctctcctcaaagtgctttttccttctctgccacatgactagtctgtgaattttccaaacttccacac

SEQ ID NO: 454820 - DNA, 390 bp, Homo Sapiens
  misc_feature (265)..(273): n is a, c, g, or t
acctttcatcttcaagaatctgatgactgagttttgtaggaatgtacccaacagttggaccagagcctggccagttcccaccaattggagtaagctatttaattgagggttaagaagctcgatagttttttcaatctgttatcagaaaaatattatctaaagacactgatagcagctgactggtaaaactgaaagttggccttagtaaatggaactagtaaaaaatagataaaaatatgtaaaaccttttatgtcctgtcaaggnnnnnnnnntaagcccacttgatttgttttaatattgtaaatattcattgccagacctaaattataccaaatctatttcgatacgcatctctttacatatgcaagccacatctttaaatgcattcg

SEQ ID NO: 454821 - DNA, 520 bp, Homo Sapiens
agtgatgcatgtggtttccagagaatagggtggtgaggtggaggggagcgtcagatggcattatctcatttagtcattttaacactataatatagggactgctagcctgccatttcattaattagccattagcgagtttaaagtgccttaccccaattttctgagatcgctttcaagcccagatgtctgacttcatggtctgtccttttaactgcttctaagtgaacgaagtgaggagggagcgaaaagatttccctatttcaatgcacatcttttccgatttccctttccaagttagtgtgtgttatgtttaagggaaaggaccatgatttcgtccttgttctcagccacttgctgtgtgactttggtcaggttgcccccatgttttaggtgtttgattcctcctgatttgtatgaagatagcaaaagcacctaattcattcgatctctgtgctcatataacgacgcactcactaacggtctttactttagtttagtttagttattaagatccaccctt

SEQ ID NO: 454822 - DNA, 701 bp, Homo Sapiens
  misc_feature (489)..(489): n is a, c, g, or t
ataattaatttggaactcatacagtattctatttttcatcaaacttccacatagtaggtttaatatgcacaggtgacttttatctgaatcagtgttgattagaaaaaaatctgttattgcttagatgcattatttagtatcttgtactgtaaggaagagtttgtatatcatggcctgtcagaacagtcccgcaatgtgttttatgaactgaaaattctgaaagaataaggtagtgatttatatgagaatacagggaaagggttacccaaagagtctaatgaatttatgtctaaaccatagagtggaatgtgagagacacacagaactccagagttgtgatgcaaatacactgcccagtggaaggagaagaggaagtttttggtaatagtgtttcatctaatgtagctctgtaatgtatgtgtgccttcattattggaagagtgttcaacagttcacagttgaatagactgaagcatgatgctggaatcntgggttcagattctagatccgtatcctacatatcaccaatgcttgtttctcaatttttgtttgtcattactttaagtctctttaatgcattagagtatccaaggttgacagtgaagggactgcatttgggagctatctgaagacaaaaacagctttttgaagtttctttcatacgtcaccttacatggcctctcgcattccctgtggaaaag

SEQ ID NO: 454823 - DNA, 397 bp, Homo Sapiens
cctcgatcaatgcttagaacgagtcactgccaattcagttttgttgatagagattattgtagcctctataacattaaaaacatcaggtttttgactggttccaccaagtacaagacttcaacttttctctgatatccttttacagaaaacttagcgtagagatagtcaattgagtctgtgatacactcaggacaaaagaatgtcctttacacataaacaatgctcaagtgtaagtctgggaattgttcctgtgctgtcttaatttctccactttaacagtgaagtgttcaagagatggcccaccaaatctgtatctcacatcattcctttgcaattgttagaactaattacttatacagaacctaattctgtgctaagtgctctacatgcatcagga

SEQ ID NO: 454824 - DNA, 294 bp, Homo Sapiens
cgctcattgagatctcccgttatgataaatgaccggcttccctgtgctaagctatattcatttctgtgtcaagcacatgagaatggatacttaattgaaaatgaagtaaaattctgcctaattaagttgggtgattaggttgtgaatttgtctgtgtgcttgaataagtgatttagtaacaggaagtgattggtattatctgtaaagagaattagccaagaggaaaggaattttatttgaagaagtgtcgtagccaggtgatatagctgatatgagaaactcacatgcatcagt

SEQ ID NO: 454825 - DNA, 397 bp, Homo Sapiens
tatgcatgtaggggtgtaacatgtttttgtgagggattttgagtgatattggtgccatatcaacaaactgctttggtgcccagataactaaatgtgaaacagaatgggtgatccccattctcctcatctcagtttctagaggactctcaggtacatgaaaccttcttcacaccttaaggtttccttgtggtgaatcctgagtgaaacactcttggcccagatattaaaattcttgtagaaagcactgcaaacaatgacagtgatgagatgccgccttccagtaactttacggaccacctcttatattaggaaagaaggtagtcatggaaagatgaggggagagcaaacacatactcccttatatatagttcctcgagtgtccacctgacacgtcctg

SEQ ID NO: 454826 - DNA, 264 bp, Homo Sapiens
agtgatgcatgtagggaaacattattttcacatctggtatacattcttgggaggtacctatctgccgacaccctttagatcttttttgatgtagacttaaacattatacattcattatgggagtgtgatgtataaattgtcattagaagtaatgacatgtgtgcaacaggcctcatattttcccactcatctactcctgaaatcctgctcctttccatttcctgtcgcagtaaatggtaccacgattcacccaccccagacacg

SEQ ID NO: 454827 - DNA, 516 bp, Homo Sapiens
tagctccgaatgatggaaatgggttgctgagtgtaatggagaatgaaagtcactggagttgaggagctgtagagtgtcagatgagtcatccaaatgaaacagatattgctcaagaaagcaagaagggaatcaggcgctaaaggcttccatgattatgagggaagtggctcagggtcaggaaatgacagagaaaaggaaagggagacaaccacaggtatttaccagtgcaatattcagtttgaccatagaacccagggtggatagggtaaaggagactcacaggaggtatggctaccatggtaagttgggccagaatcagaaagatctttgaatgtcaggctaagaagcctagacttaacaggaaggcaatagggagcaactgaaggttgctcagcacctatcagaggtatactttggaaagataatagtaggaaacagcgctgggcttggagtcagaagacctgggttcaataatgaacagcagctaccatttatggtgcacttactctgtgcagg

SEQ ID NO: 454828 - DNA, 229 bp, Homo Sapiens
atcatgaggtcaggagatcaagaccatcctggcctacacagtgaaaccctgtctctactaagaagagaaaaacactggctatgaaagaatatgcatagttttaccctgttttttaataaagattgaaagaatacatatgcaaataagtttacttttatttttggtaacactttactgcattgtctgaatattgacatcagtatgcattatgaagctacctggctcacat

SEQ ID NO: 454829 - DNA, 191 bp, Homo Sapiens
cctgatggaagaagtagtgattatcaaattagctgcaacagaggaaacaaatcacaaatgcctaatcatttgtttctttgattcaaaccaataacctgtcttcttaaccttgatattttatagaaggaaatttgcaaatcaaagtctatagtcacacacatacaggaatctctatctccacatgcatcact

SEQ ID NO: 454830 - DNA, 237 bp, Homo Sapiens
agtgatcagcttgtgcaggccacgaacctgcatcatccacaccaaagcaagttgagttcaggcagtagatgctggaggtgttaaaaatgggacttacagagctagactgcctggatctgaattctagttcctcttcgcaattgctaagtattatcgtgacagagatattttctgtcctatgttaagtgagactactgatagtacctgtttttatatagtagttacatgcatcactcg

SEQ ID NO: 454831 - DNA, 430 bp, Homo Sapiens
ttggtgtgtcatctcaggaatcagacaaccccaggccctcactcacatagagcaccggggacaagctgcttccactcgctgccatttataatggctacatgatcggacagctataaacatcagatgagatgagatatttaatggcacccagtcaatgttaacttctaataactgactcttagagaccctgtagtaaacttaaaagtctcaacctacagtcatctagatttctacagagaagactgtgtttccagaagctgagaccacatttttgtctttccctacttacatgcttcactcttctccattaattgtattatttcctgtctattcctgtcctttagctaataaagaaaaacttgactagccactccacttccggtccacgatacatttgcaatacccagaaccagtctacatgcatcattgc

SEQ ID NO: 454832 - DNA, 303 bp, Homo Sapiens
cccgagtgatgcatgtggtcggttcgcaatccatcatataagaatttatcttaatgaaacaattttatctctaattgattcgttgactttttaatagacccttaacatttacagttacattcatgtctcaaaacacttgcaaatgtggcctgcagtttctctctgctaaagtttcacatctaatcccttatttagatgtgataaaatcagacattcctgggcagttttcaggtggttctgtggttactgattatgaacaggaaaacagcatctctctacatgcatcactgggtaccgagctcg

SEQ ID NO: 454833 - DNA, 550 bp, Homo Sapiens
  misc_feature (455)..(493): n is a, c, g, or t
agagagactgcctgtctccattgaatctttcagctaatcacctgcccaagcttaaaggatactcctaattccttttgtagctttgtgagcatggggaatggtaagggaggctagtgacatctatactatcactaggccttcactgactcctggaaaatcactccataaagggtaattgatcataatcctaaggagtatagggggtaccgttctgctgaaccatggggactttctattgctagttgacacataattgttttcccacatctagccaccctgagaagacattaccatgctttcctgaggagcaataaatgctgagggtttttcttaaatctgccactttctaaagcaggggtgtccaatctcttggcttccctgggccacattggtagaaaaagaattgtcttgggccacacataaaatacactcacgataactgatgagctaaaaannnnnnnnnnnnnnnnnnnnnnnnnnnnnnnnnnnnnnnaaatctcatacgttctttagtaagtgacgactttgtgctggatttacactgcacatc

SEQ ID NO: 454834 - DNA, 353 bp, Homo Sapiens
ataatgtaattgcagcatccacaaagaaagcttcatgcatgtagtatgtatgcatatggtaatttgttttgcctgtgtataccttataaatctttattagtaaaatcttgattaccaacattttctaaatccatagtttttctgtactgctataaatcacttggaaaataagataggttatcaattttttatttacttgttatttgttttacaaaaatttgaaagtatagagtttcactaagctttttgttatttttaatttatataaaataggtcctacaatgcatatcttggttaatgtatgaatcaaatttttcatgatatccttatgaatgaaatacagcctacatgct

SEQ ID NO: 454835 - DNA, 410 bp, Homo Sapiens
agtgatgggtgtggctggaataggcctgcattttgaaaatcaaaactagatttatttcctttcatttgttgtactgctgtggttactcagtaagcagcaactatgtcaggttcctggtttacagagtaaaccaatagcaagtccttttatgtgcttctagaggtatgctttccttccttgagttacaaggaaggattacaagattaacatttaccttatatatgagtaagatgatttacaagatcagcacttaccttatataagagtaagatgtaaaggcccgactagacagactctaaggagcatgtaaaatatcaagcctgtgcttatacaggatctgggcaaatacatccttgctgtttgcagttaacactgattatactgttaatgctattgttgagctacatgca

SEQ ID NO: 454836 - DNA, 462 bp, Homo Sapiens
tggtacaaagttctcctttgtaatttttagatgtggtgcggttggcgtgatcactgtctgagtgaatgtttgtagaggagaggtttcaccagggggttcattggtatttaaagttaaaatagagaatgaaaagtgaaagcctttgcgttggagactcgtttcaaaggagaagaaaatggcatgtgccgtttatgtatctcatatagggttgttgaatgtagccaaatgtgcctgtcagcatggagcttggcactctgatgggcgtctgaatcatagctctctatacgaagcatccattcccctttctaagaacagagaaaggatccaaagcacccaccttcatttgctgaggaaggatggggatggtggagatttctagagaacagttgtagtgtaatatttcctgttaccacagttattcccaacttttgttgacacatcatcatccagggacattctcat

SEQ ID NO: 454837 - DNA, 178 bp, Homo Sapiens
cctctgaaaggaattgtttttctcctattcgctttcatggcaaatcatttttaaaccgggactcaagctctgaaataattgtgtagcaaatagtggctgtgatagatgtggcactctccacagggtaaatagaaaccactgcagtttcagtcctcacattttatttgggatcctctag

SEQ ID NO: 454838 - DNA, 261 bp, Homo Sapiens
ggcggtaccagtgatgcatgtagcttctgcagctttaacctttagcagcaaggttttgtgagagctcagcctgctctaccttgttcagtgagtctcttagcagaaagatgtctgttccatcagtttcttattccactcaaatctgtaagattaggactagaggtactagtcaagtggacacttgttgggagtcgtaccttttaattacttagcttctcttgggttttgagtagggtcagactacatgcacactcttacact

SEQ ID NO: 454839 - DNA, 341 bp, Homo Sapiens
agtgatgcatgtagcgtattcaaggctctcagaatcctaaaaggtcacagtccttttattcttgcctcttttcacttctttactgttcttattgatttatttgggcacataagaaaacacagtaggccaagcccactacttctattgaaataaagtattctgcagtcaaaccacacaccataaagaaataattgcagtctgtatatattgctaatggacatctctcagcgattccctgtctcataagctttaaacacagacattagtataaatatgcagcaatcctcattcggtccacttatctctgcatttctgcatggaaggcagatcaccacattcgc

SEQ ID NO: 454840 - DNA, 654 bp, Homo Sapiens
gatgagaagaaagaggagagagcagcgactgaaggtctgagccaaaggaagagaatagtatgtttattgcagcagccagagtggcctgtgtgactgtaagtcgcctgtcaagagggagactgcaaggaaagtgcattgatttgatttggagtagttgtaactgcagcatgaagaatatgatatataaggatgataattgaggaacaatttaatggctgcataccttgctgaagttgaagttccttctggagataaaggtggcgaaaaaagaaagtgcttaggtagaagagctttttaaaatgagttaacagaaaacagcagactaaatatggaattgaggagtaggaaatgaaggaaatgaatttgaagatttactttctttcaggatgcagagctggtatgtaatccctctgtttctaggtgccttctcccactttcatatttcgactgctcgtcatgcggcctggtgtgtggtgcagcttcgagattgagcctccagccttctgtcaggatgaagcagctaggtggctgagatgctaggctcctagtgggggaggtgtttagggctgctatagactttccaccagtccttgtattttctagcgcgacattgcagtcttcagaggaacctggacctctcagttctgtcatcct

SEQ ID NO: 454841 - DNA, 311 bp, Homo Sapiens
gaccaaagtgcaacaataggatgaaggggcacggggaggttttcccgttgcaacctcacctcatgaatcctgaaattagattgctagtttactgggtctgggaactccatttcagatgtgaatctgagagtacctcagataaaacatataattaaaaaggatgtttatattaattacaagacaggacaaaacatttgatctttataaaagaaaaaattatatctactatgtacatgtgtagatcatatgtattaatcataatggaaaaaggtataaagtatacctgaaggaatttactacatgctatcact

SEQ ID NO: 454842 - DNA, 155 bp, Homo Sapiens
agatgatgagtgtggttaagttgctgagttgtgtgtgctgtgactgagtgacaaatatgtacatgatctcaatactataggaattacttacttacgctccacaaaggaagtataagagcattcgaaacctgtctaggccgactaccttcatctgc

SEQ ID NO: 454843 - DNA, 370 bp, Homo Sapiens
gtatgatcgagtgtacaagaccatgtaaggaagatgaaaaggagtgttcaagaacctacaattttcatatcttgttgaaacccaccacaagagctcctttgcctgagataaatcagtacctgctgcattctttctttctgatggcaacaggcactttccctgaggcaaacttgaggaccgtgcagacaccatgcacagtagaccacgaggatgtctggcttgaaggagactttgggatgtttggggtttcagagaggaagaggatatagtttaggtgttgtaaaacttggcacttcccagaaaattgtaacatgtttgatcttaactgaattgtggatatttctcctaccgggtttccttcaatagcatt

SEQ ID NO: 454844 - DNA, 377 bp, Homo Sapiens
taaatatttttaagtaagtttcaaagtgattatataaattgctgaaggtaacacagctattagtgaaacacctggctgtgaactcaagcctaaggaacagtctttgccctgcatgctttctgctgcttccccctagctctctgggtagttactagaaactgcacccacttattttcattttatatattaatgttgagggaaaataaaaagttttctgtgtgcaaccccttcattgaatcagggcagttactcatttatgatgtaattgaatttccttccggattctgttctggctcattgatctgtctgtctcttccttcatcagggcccacccagctttaattaccaatttctgttacttttcattatccaaacat

SEQ ID NO: 454845 - DNA, 324 bp, Homo Sapiens
aatacagatatgcacacaaagcagacattaataagacacacaagggtatgttgcgactcgtacttggtgaggacgctgcagaagaggggcacatagggcctcagctcctcggggagtgtgttcaggctggagaaggcccggaaatacaccatgccattggtgggctgggcgcagtactgaacagggatatctccagctgggaaaagcgtagcgttcacagtgacctgtcaggaccacgtccaactccgtgacaggtatggtgggttcaatatcggaaactttcaacgctggcagacaagaggcatcttgaggtttgcttgtgga

SEQ ID NO: 454846 - DNA, 480 bp, Homo Sapiens
gaagatgaaaaacgcgctggcttctggcatgggcactgccttttccttaaggtgaagctcagagagtggtcttggtcgagggccgacaggcatctctggctcctcctcatcctcttctcctgtagtttctgggttggggtaggggctctgatcctcattttcattgggctggaggtcatccatgttgatcttggtggcgggtggagactctccgtcagccgtgatggatttcagctcaatcttctcctccttggattcccccactgccggcttctccaccaactcttgtttcttctctgggctggcagtcctggccagcttctttctctccttatcctcttcctcctccttttgggcagattgcgaggctcacagcatcagccaggttgtccacgagcaattgttataagcacacagttcagtagactataggttccacagatgaacgaggataactggagtaaactgcagatccagata

SEQ ID NO: 454847 - DNA, 488 bp, Homo Sapiens
gggtagccccccaaagagggaaaggtcctaactgtcgggtaataggaagggtgccagctggggcctcggcatggcattgccttggatccctctcccatacataaactggactttcactgttatatttcctagcagaaccttgacgattggcaaaattaagactctgagggtatatgtagagaagatttctgtaagtagtgtttggaacataaaccatcttgcgggaaactctaagatttctctggtaggtctaactctactgtcagggtaaagcttcacttgaagcagctccggagttaggcaataatggggattttcaggtgcgggagaaatgtctatcttgagctgagctgtaataggtcttagtcgccgtaagacagaagatggccttctcatatcagcaaggaatttgtagagatcttcatcacttaagcggtctccttcctgcttaaaaaaatttgtcactgtgagagtagctggtcatacgc

SEQ ID NO: 454848 - DNA, 164 bp, Homo Sapiens
aaagatgctgcaacttaagtccctagaagcatttacctatacctgtctcttaagagcgaagatataaggtcaattctagttgtaactcagaaaaatctgtcacagatcagacagctgacgtcatgagtgctcactcctacatgcatcactgggatcctctgacg

SEQ ID NO: 454849 - DNA, 332 bp, Homo Sapiens
tgatgcatgtagcactttttgtttgaagtatagttatatttggtttacatgaaaactcacacgagactcagttggagttactacatttcgacaagtttatttaatctatatctcaagaaaagatgagatgagttttcacaattcctcagaagaacttttacagaatccagtgttactaaggctccctgtgacatgtgtagcctggtctgtttctattgtagcttgcctagtgacatggctgagcaattcaggtcttactacagactgactttgcctgtgtgtagatcttaatgactgcgtgtgataagaatagctaaattatttcataacta

SEQ ID NO: 454850 - DNA, 414 bp, Homo Sapiens
ccgaggtgagaccttccttagaggtaggttatttgacgtcagctctgcaagattttaacataagtactttttctgagctggatagactttccacatcagaggttgtgatgtttcttgagagctgtcagttaggggattatagttcaggggactctgtttctgaatgttctagtaaaggaaccctaagtaaagaaatgaacaaagaattaaaggcaagtgcaataggagtatatacagaaagcaactctgtgaggaagaaacacttggaacctgtgaagagtggattgaatcagaggaagatgattagtcgttggataatacaagtcagctcaatcagtgttctttgggtactcaactctgaggttcgtgaccaagaggagcaagtacttctcacgaaatctgtgaagactgcga

SEQ ID NO: 454851 - DNA, 170 bp, Homo Sapiens
gaggatcccgctggtatattagatgcttctgaccaagatcttaaatctagattgagtgaagcaaagacaatggaatggttagagttgatttgctgtcattgcagccctgtcctggcaagtctttcactaaaagacatgcattctgcttcttaacagagcctccttgagtt

SEQ ID NO: 454852 - DNA, 296 bp, Homo Sapiens
atctagagcaactctggatcctcaggggcttgttcctccagaatagcaatccagtaaggggcatctgagagttgagaataaggggagagctgaactcatggctagacacaacttggcttactaaagttcagagatgaaaagcctcatttcagtaattacagtttagttttttagaacagctgtataaataccaaatggctattcatcatatctttcttcttcctcaaaacaagggttataccgtagacaccctaggacttgcctctattctttgtgtctacatgccacatgcatca

SEQ ID NO: 454853 - DNA, 397 bp, Homo Sapiens
agtgatgcatgtagagagaaaatatgttttatgataaaatagactggcacatggtttgtaatagagtaacatccatcgtaaagaggccttttcttgagaacccatccaagcaggtcagtaacttgtcaaacgtaattggattaagagaaaaatgttggatgaaatatatgttgtctgaatttctataccttctgtattttgtgtccctgttaagagtcctgaattaagcagcattgccttaaggtagtgtatttgttctacttattgaattatatgcactgatcattaggataaactgaccttatcttcccactgcagcattactagttgcctttgtctattgtcccccagtgcttcactcataccccttccataacacttaccacatgcatcacat

SEQ ID NO: 454854 - DNA, 624 bp, Homo Sapiens
tcttttcactgtcactaacaaaagggtctacggctcttcctttgtgcttggaaattcaggagcacctcccactgcaaggattaggttatgaatctaacaaatgagaacccagtcttcaagtgcaatgtatttgcctatgatcaagtttgctagcagttgagaatctatagttttgcaacaccacggtgattctctctgctgtattctaaatcacagaatatgtggtattattccacttgttctatcacacctacttacagacatctcgatttctgagatgtgggctcatctctcaatatccttccagtgtcaatttcaaatgttgcctgatctaactccacaacacttcaaacacagaacaccacctcttgtgctcctaagttaaacgtgatggtggattaatcttggtcctttagttgataaatcaaggtaatttactgctgctatacccatacacagtccctcccctgctggatctcatgcagtgtggctttgttgctttcacttatgattttgctgctttcatttgggtcgatatcattgtagttattttgtagacgaagtagtaaaaaacttgatttttccctatcctatatatctacagcatcacgggatcctctggcg

SEQ ID NO: 454855 - DNA, 239 bp, Homo Sapiens
ataaacataggacctgaggggtatgctctcttacaagactctcaagaagtgttaaatgtttaagactggctgccaatgctaactggttctgctgtcatgatatgtgtaatagcctgaagtgctttctctactaaataaccagtaggaagacatatcttaacacttaaaattcaaagtaaaccccaaatatttccaaccattgtaagttccaattccattttcctactacatgcatcact

SEQ ID NO: 454856 - DNA, 248 bp, Homo Sapiens
ggtgatctagaggatcccagtgatgcatgtagcaacttaagtaaaagcaactggaaagggcttgatagaaattctgagttgtttgaagtataatagattattaggatagtaatttctttgtgaattttactgtaaacaagcttgattctagtgaggacttatgctaattgctcacttatactaacagcaactacagagtttttatttaatactgtttcttatacaaatatcatcaaatgcacatccac

SEQ ID NO: 454857 - DNA, 408 bp, Homo Sapiens
tagacctcctgtggacagcttccctgttatgacagattttttgtatcttaaaaagtagcttctttagatgctgtaagactacgtgttatcgataacctttgcaaaataaagcatgttgatttttcagactctgtgggcaactgaaaagcccttttgttttcttaaggtcatagaactttataggtaggaggaacttagaggttaatttgtacaactctttaattttaaagcggaaaaatttgaggtacaaagagcctaggtgacatgctgaaggccatgtcgcctgtttgtcagtttagtgttctcttcacagcaccagtacatctccaagacatggcttggctatgttttagcctacaccttcatctctcttaatctacccctaagccccacatgcatctaagggat

SEQ ID NO: 454858 - DNA, 285 bp, Homo Sapiens
atctagaggatcccgagatgatgcatgtagacatttgctgatttgcagtgcttctgagagattctgtggcctctctaagcttagtggagaaagggagtcatgtctgttatggccccaaacttggtttttagcatgcttagtcctaaagtcatggatccagcaattctcaggtgaccagtcctgtcttcacagtcagctctgctggtttccatctttccgtggtctccaccccttagttctaaggcaagattgctgtctgtgtgaccctggactctggctcagtga

SEQ ID NO: 454859 - DNA, 1315 bp, Homo Sapiens
gtaggctagtcatctagaggatcccgacatgacccaagcatgcatgcatgcctgcaggtcgacgtgtattcaccactgcggtgcatgcctccctgtacaagttccgtcgacacgtgagcaccgtgctgacctccaaatatcgttaagctggagcctggtcgacgtgtattcaccactgcggtgcatgcctccctgtacaagttccgtcgacacgtgagcaccgtgctgacctccaaatatcgttaagctggagcctggtcgacgtgtattcaccactgcggtgcatgcctccctggacaagttccgtcgacacgtgagcaccgtgctgacctccaaatatcgttaagctggagcctggtcgacgtgtattcaccactgcggtgcatgcctccctgtacaagttccgtcgacacgtgagcaccgtgctgacctccaaatatcgttaagctggagcctggtcgacgtgtattcaccactgcggtgcatgcctccctggacaagttccgtcgacacgtgagcaccgtgctgacctccaaatatcgttaagctggagcctggtcgacgtgtattcaccactgcggtgcatgcctccctggacaagttccgtcgacacgtgagcaccgtgctgacctccaaatatcgttaagctggagcctggtcgacgtgtattcaccactgcggtgcatgcctccctgtacaagttccgtcgacacgtgagcaccgtgctgacctccaaatatcgttaagctggagcctggtcgacgtgtattcaccactgcggtgcatgcctccctgtacaagttccgtcgacacgtgagcaccgtgctgacctccaaatatcgttaagctggagcctggtcgacgtgtattcaccactgcggtgcatgcctccctgtacaagttccgtcgacacgtgagcaccgtgctgacctccaaatatcgttaagctggagcctggtcgacgtgtattcaccactgcggtgcatgcctccctgtacaagttccgtcgacacgtgagcaccgtgctgacctccaaatatcgttaagctggagcctggtcgacgtgtattcaccactgcggtgcatgcctccctgtacaagttccgtcgacacgtgagcaccgtgctgacctccaaatatcgttaagctggagcctggtcgacgtgtattcacccactgcggtgcatgcctccacatgtacaacgttccgtcgacacagtgagcaccagtgcatgacctccaaatatcagttaagctggagcctgtcacttctatgacggatcactccagtacccgagtcgaattcactgggtaa

SEQ ID NO: 454860 - DNA, 472 bp, Homo Sapiens
tgacgtgggaaaacctgattcgtctagagtcgacagctccagcttaacgatatttggaggtcagcacggtgctcacgtgttcggacggaacttggtacacgggaggcatgcaccgcagtggtgaatacacgtccgaccaggctccagcttaacgatatttggaggtcagcacggtgctcacgtgtcgacggaacttgtccagggaggcaatgcaccgcagtggtgtatacacgtcgaccaggctccagcttaacgatatttggaggtcagcacggtgctcacgtgtcgacggaacttgtacagggaggcatgcaccgcagtggtgaatacacgtcgaccaggctccagcttaacgatatttggagctcagcacggttgctcacgtgtcgacggaacttgtccagggaggcatgcaccgcagtaggtgaatacacgtcgacctgcaaccagtcaagcatgctcgggtactgga

SEQ ID NO: 454861 - DNA, 235 bp, Homo Sapiens
aggctccagttaacgatatttggaggtcagcacggtgctcacgtgtcgacggaactagtacaggggaggcatgcaccgcagtggtgaatacacgtcgaccaggctccatgtatgcgtgcttgggtggtgagcgcggatctcatgtattcaaggagcttgtactaggaaggtgtgcacggccgtggtgaatacacgtcgagcatgtgaggacatgactgcatgctcgggtactgga

SEQ ID NO: 454862 - DNA, 534 bp, Homo Sapiens
cgatcaaacccagagggtgtgctccagtggtcaggctttggggtctcacaggccttccactgtcatatcacaagctctttaggtcacgcttgggagaatattcataaatagacttgtacatccctagctcctgtcttctgctgcttttttccttatctgtggccctctaattatcagtgcactttgctgaactggttactgacactgtgatggcagatgaagagggcagtgtaaactgagtgaagctcttgtgttttcacctgctgtctttggcagctaagaaccagctcaagttgcctcactttactgatacatgctgttgacagatgcataaaatgaatataaattggatatgtgtttggtagcattttgaatctttgtacaggaggagcatgccttacgtgaagtgatcatctctgcaggagccttgacctagagctattcatcctgttacctatgcattgtgactgttacaattatgcttccggtatcatctcactcgtccgtttatgatcatgatatcagttattaact

SEQ ID NO: 454863 - DNA, 420 bp, Homo Sapiens
  misc_feature (46)..(68): n is a, c, g, or t
gattttgagtgtcggtttctctttgtttgattataacctttatatnnnnnnnnnnnnnnnnnnnnnnntggtgataactacgttgctcgaagtctggtgccactgtattgatacacattcccatcagctttcctacagactcagtaattaatttttacagggcttagaactatggtcatgcacaagactagatgaggggttgaagcaaacattccaacagcaaactgagatgggatgtttccttttctacttacaaagaaaataaatagaaatagattttacatgctttatttctttgagacaagccattgtaaattgttactagacttagtagtagtataccagtcattgactggtcttttcaactccactcaaatttgtatgaagcaattcctcttatactatcatcttttttgtatg

SEQ ID NO: 454864 - DNA, 716 bp, Homo Sapiens
aatgtttgtgaaagaaagattcctcggcatctatggtgtctgagagtttagggaatagagctcctagtgggaaatgttatcctgataagttccgaggccaaatatatatacaaggttagcctgccaagcatcgtaactactgtaccggatggcaaacaaattgattagagttaaaccatagcatgcaaagtggcatccatgccccttcctcttgggcccttttttcctagcattataaagtaggtagatgtatgttaaaaatataggctgcttctagtcaacatttccaggtggaggcagatgcaataagctagaggcacttcagctgaattttccagctgtgaatggaatctctggttaatatactaacatgcacaaaataaagttgtgactcttacgggcaaatttctgaatcaattattttagcaaggaggtatgctttgggtatagacaggcagcacaatgcatagtgtggcttcaactttcatctgacttaagtgagggataaacaatccttagcatggaaaaataaggtcaactcaggttccataacagggaaatgtgacaattaagagactctgtatgctgaaggccaacttagatgttggcaccccactttgcataataagcagtcctgatagttccattccatatcacaagtatcacagccattttcttcagcttccaggtttgatcgagtactgagatcctctaga

SEQ ID NO: 454865 - DNA, 506 bp, Homo Sapiens
ggtctggtactcctgaccttctagtgatccacccgccttggtctcctagagtgtatggattacgggtgtgagacaccctgcctgaccccatctcttttttgattacaccttctggtaaggcggctccacttatggaggagaaggtatcattactacacagctggtacgagatcgtgctttcacagtcctcttggtaactgctttagttacttctctttgcctcagcttcctgtagcacctcctggaggctggccagtgtcaactaacttctggttaagcagttaaccatccctatatttgcagcgcgacaaggtaactctaattgtgtcttaggatgtcaatcaagcctccaaatatgtgaagataaaaataaaattctttttggatagaaaacattttgggagtagatggaaagggaagtgattgtgtgatggtaatatggtagctactccatgtttactaagtgctacacgtgcaatactgccctgaagataactgttcatacc

SEQ ID NO: 454866 - DNA, 604 bp, Homo Sapiens
ttatagggtatgctgcataattagtagaataaatgctattcttcaggtgtatggaacaggttctataggcaagattccaaggctccctttccttccaaagtgccagttaatatcataaattccttagcttctcagaaccccccagatgcaaagaataggaaggtctcaaagaattttttaagtgaaaaataatggcagaatcgtaagctcctaaagagccggtactgtgcttaaaattactacccattcctacactatcacaagctggaataaatatctcctgattgcaatacgaccgaaaggcaaaagctgggtgcagagtaatttaagcaaaaatagctgatatttatcacctgcttattgatagaatggtgcaaagttcatcctcagttccagattctatatatggaggctgaatgtccctaacctcatattaatatccttccatttatacaaaatttcaaaatgaatgattttgatggcaccatccccattaagacatgatatcacagttaacaaagttgaatattaaaatcctttttatggagcaggtacaccgctatgagtatgatatagccttcttttaagagatgcagatacactt

SEQ ID NO: 454867 - DNA, 569 bp, Homo Sapiens
  misc_feature (50)..(97): n is a, c, g, or t
ttgagacattagctaagttaatttaattatgttttgtgacgaagtctcgnnnnnnnnnnnnnnnnnnnnnnnnnnnnnnnnnnnnnnnnnnnnnnnnacccaggagattctaatagcaatgcattaatagaatcagccatttttgtattttcatggcataaaattttattcactaaatctgactaatcaaggacctatttatatggttattgtaaatcttatcaaatgaaatctttgggagggggaagaaaaatgctgagaacctcagctgccatgtttgctcacccagctacttggcactgagtaaagaagcggctgtgtggctgccacctgccatatgttcacaccccagctgctaggagagaatatgatgagacacattcactcttcttcctccaaaaggtttggcacaaatagctaaagggaagcagaaaagggctaatttataaggtcagttaactttatagctacaaagagccagtgcacttcttttgtagatgagaaactttgctcagtaccaaattgctagtcttcaccaaactctgggcatggcccatggtctacatgtt

SEQ ID NO: 454868 - DNA, 603 bp, Homo Sapiens
gagcaaaatgacattaaaatcatattggctcttcctatccatgagcatggaacgttctccatttgttggtgcttatctctgatttctttgagcagagttttatagtatctcattatagagatcccccacctccctggttagctgtcttcccaggtattttcttctttttgtggccattgtgaatgggcgttcattcatgatttggctgttggcttgcctgtagagtgtataggaatgctggcaattttcgtacatcgattttgtatcctgggactgtgctgacgttggttatctgcttaagaagcttttgcatagcccatactttttaccttactgcattcttatgaaaatcattcactgagtctcaagaacgtattcattctttttttccagttcacacttgtaacactctaggaagtcacaaattctcaaatgaattgttccaattggttgctcattattcatgggctctgttagaatgtaactgtgctcctccttagagggcaaaaagtggattagtagtggctaatgataagaggagtttacttcctctagtttttgatatttttttgtgtgtcaactataactttcccatacatatgt

SEQ ID NO: 454869 - DNA, 669 bp, Homo Sapiens
gctcgtacccgtagctcgatcagcaagttatttcagcaatcccagtcggtgtgtgtcctggttccagtctctgatgccacagtcgcctatctcgtggacaggtggaagtaaagagttaggatcgaagctgttagtaacaaggacaatgaaacactactttatgccaattaggttagcaagaattagaaaactgaaggataccaaggactggggaacaggtggggaaactggaactgctctgaaccagtgttgagaatataaactggtcggatattttagaatattcctggcagtacttaatgaaattgtgcatgcatatatcctaaggcacataagtaagtattgtgtggtggtatgaatgctggattctcacacagtgggaaattagaagaaacctggagatgcaacaaaacagaatggataatgaaattttgtgaatgcagcaattagaaacaatgaagtgggcagatacctaacaatacgaacaattccttaaagcagcgttagttgaaagcagaaacagaattatatctgtagcacaatgtcctttaggtaaattaaaatcatgtatataggtaacatcctgtactttacatatattttggtagacctttatcacacatagaatagttacctggggtacaaggaagggatatgggttgatcgagc

SEQ ID NO: 454870 - DNA, 355 bp, Homo Sapiens
  misc_feature (72)..(82): n is a, c, g, or t
ctcgatcaaacataagagaaaaagagaaatgcttcactagcactagaaattaggaaaggatgtgaaacccgnnnnnnnnnnntgttaggtatgattgtagatgaaaatatggatggaagacaactagcaattaccccttgcaaggaaacaaaacacagacttatagaaacataagaatcatacaaatacccccaacataggccccaccactacccccatgttggaggatagctgaggtatagaccaggaatttcatactggatatcacaagcctatccatgtacacactgagaagtctcagggaagtatagctacacctaactaaagccttaggtagtcagttgatcgagctata

SEQ ID NO: 454871 - DNA, 305 bp, Homo Sapiens
tgaaagtacatttaaagaatgtaataaacccaattggaatgtgcatcaaaatagataaaacttgttaatatggacaagaaaatgttagaggatataatggtaaggggttcaggctagaactctggtatctaaattctagcactcacctcttttttcactggagtcttatcaaggaaattctatacaaataatagtagccaaaggggaagcctagcatcattttattaataaccgccatagaaccagctaatgtggtgctgctccctggtgaactagtggggaagatgtagttggatcgagctatc

SEQ ID NO: 454872 - DNA, 589 bp, Homo Sapiens
tttctgatataattaaacatactctgaccatatgattcagccatccagttccttggtatgtacaaaatgagttcgttacatatatctgttctgtaacctgcactctgatatttatagcagctttattcataatttcccggacttggaagcaacccacatatctcttcagtaggtgagagaatagattatggcgcacctagactatggaatattattcagcactgtaaagaaatgagctatcaatacatgaaaggacatggaggtaactgaaatgcatatttctaagtgaaagaagccaatcatatgattcctactatatgacattctggttataggcaaaactatggagacattattagatcagtggttgtcaggggttgagggtaaggagggatatataggcagagtgctagaggatttttaagacagtgcgactatgtttgtaggtagacagaagggtggatacatgtcactatatattatatccgtacccatagtaatgtgcgatcccaagagtgtcacctgacggactacaatctagtttggacgataattatgtgtctatttatgttcatcaattggttaatac

SEQ ID NO: 454873 - DNA, 449 bp, Homo Sapiens
  misc_feature (36)..(36): n is a, c, g, or t
gtgaataggaataaatccttcaaacatgtcaatggnggaaccgtctattatcttggaccctgaattagttctctgggaatgccccatgtaaatgtaaaagttgcattcttgaagatgatatgggtgtaagcttgtttttctttggttccaccccacgattctaccacatttgtactttttctattaatatccaccatgaagtacaaaacacagtcagctgaacagagggtctcaaagacaaatgttattcttcctagttcagaacccgtggctccagtcatagatgttggtggtttaaatcctgggatatgcaagtttaagatcaggtaatcattgtcagaacctccagccccactctggatatgatctccagccacctcccaaccattcattccatcgcactttgaattcccaacattgaagcaggaagttttcatgttgccaggaag

SEQ ID NO: 454874 - DNA, 222 bp, Homo Sapiens
ccccactacctaaatggctgtaattaatttatatttactaataattttcagaagcactttgagtttaagaaattgtccatatgtcatattttctaatgagtatcagaaatttacttaaattaaggtttatcacttgggtgagatctttcgaccatgatttgctaccgtaaggcatgactgcctggcctgtaaatctgacacaacttttcctaagttgtggct

SEQ ID NO: 454875 - DNA, 406 bp, Homo Sapiens
ctcatgtctgatcatgctttcaaacaggaaagtgggggtgggaatgaagaacaacaggctgagtgcctccacacctctcggcacccacctaagttcatccatgtctttttcttcctgggcaaacacatagagctggccttgcttcctgtccaactcacttccttccactccccacctcaagattgcacgtataacttcttcttacagagcaccaaccacagctcatcaccagactctaagctccatcaggatgggaaggatgtcaggtttctaaaatgctgaatattgggtgttttagcatagggtctgtgtgctcagtgcatgatggtgcagtgttaccaatacttggtgatcatttggatgggaaagagaaggggagggattcaaggatacagccatttaggtg

SEQ ID NO: 454876 - DNA, 323 bp, Homo Sapiens
cctgagcagcaatcaaactttaattaatactctattaaagggaattcctggggggggacacaagcatgcatacacctaatgagttcatctgccaaggctgttattagagatgatgctaaatgtgcctccttactggccacttattcaatttcagcatgtcccatgttaatcagaaatgaaaagcaatcataggtttgcaaccatcctcctctctatggggcccctctgctcttgccgcagcttaacataatctatccttccttctcctttctccacgtggtgaactattcagactgggcttcaagcccgagccagcttacctt

SEQ ID NO: 454877 - DNA, 216 bp, Homo Sapiens
gcctcttcatttttatttcttctattcagcaagtacttgatcaaatgtgctttgtaccaggtactgagctcttcgttgggactataatggtgatcaaggagattgtagattctggcagggaaaactgacatcaaacacggcgacccgacatagtgagacctgtctctactagaagaactttaaaatcacctaggtgtggccgggcacggtggctaa

SEQ ID NO: 454878 - DNA, 320 bp, Homo Sapiens
  misc_feature (198)..(206): n is a, c, g, or t
cattaactgagcaagactttcaggatattgtagatgcacagatggtaggttgtcctgaattctacattattagattactttaattgagatttgttaaaacggttaggactgttttgtccaggaaagataagaggaccaaacatataaggtgaaattcagaattccgtttccttctaactaatgaaaaactgcttactnnnnnnnnnttttatactttccttgctaaggtcccatatattgatttgtacagatccacttagtcattttctcctttttttaagaaccattctcatctgatttttaaactcacgataccagta

SEQ ID NO: 454879 - DNA, 433 bp, Homo Sapiens
tgatcttcgtgccccttaggtctgggggtcctgggattccacaagggattcctctttgcagacttatggtgtctttggtaaattaattatttaattcgatggatttttattaagatattgattatgcccctcctgggtgcttggctctagggaatgattcccttgacctcactgtcctttgcattgtagcaaggaaggcagacttgaggcgaggagcactatgacagagagcagttaacagctctgaagtaaagctagaggctgattagattaccattacttgtggtgtggggagagagcaatgactaggactgctctgtcgggaaggcctttgactgggggcctgtaatgtatggagtagcctagtgtactatgttttacttataaactgctactgcataaaagagcgactgcaagcaaggaattggtgtaa

SEQ ID NO: 454880 - DNA, 168 bp, Homo Sapiens
cgtcagctcggacagtcggtctaccattgtagaagctgggatagtatcagtgatcaagtgagtccacatccacccttgtacaagataaccaaccagaggctgggagaggtggtcacggtggcactcagaaccagaattacatagtataatggttatatctattttcta

SEQ ID NO: 454881 - DNA, 444 bp, Homo Sapiens
caccttgatcttgaacttcccagcctccagaactgagagaaaataaattttatatcatagcagcacaaacaaagacaggctccttcagcagcttcacagaaccttggatgcctcctggcccaggagccagtggggacacctggccattcctgggaggtggagaaaggatgcatggaggaagagaggcatccacctggctcagagaacactaagcagcaaaatattgaaagagttgtagtgcttctcttaactgcttctattaaaatgcaagaggagagaaatgacttaaagataaaatttataattaaaagagaagcagaatgtaaagatttggaaaattcacagcctgggcatataaagatttaaaaaatgtgttggggagaaaaccgagagtggccaaatgactgttgatatggtagaacagactgggccgagctcgattca

SEQ ID NO: 454882 - DNA, 441 bp, Homo Sapiens
tgtgatttgcatagagtgtattgaaagagaatgaaatagtaattttggggtttatctaatacagagaggaaagggacattatatttgatagatgaaagttttctaagccagagaaggcataccaggcccttttatagcctgaatgaaaaaatcctttgatgtctaatttttatcaatttggtttctctattttattagttaggactttttggtgttcaagtaacagaaatacagcttgaagtagcctgtaggggaaaaagttattggttcatatgaccatataataggcattgtatgaataaggatggccatgaagagctagggtgggaactttcccatagttgggacctttccgtacttatactctgtgcatactggctttattcctttttctgaaaatatgtttcttcacatggtagaacagactgggaccgagctcga

SEQ ID NO: 454883 - DNA, 495 bp, Homo Sapiens
ggaccagtcggttctaccatcatgaaaaacgctatgctccttgccaagccacaaaagtggatgtgtatttgtgaagggggagggggtggagatttgagggtatttcctagtattttgaatattcatgtgtaaaaggactttatgttatgtgcttgtgatctgctgctagatagtccataaagcagattccgtaacctaattgcattgacaacctccaccaaaggaaatgatgcacttacatcagatcaccactgcgtattaagaacaaagcctataaaaattgcattagaaacagcatagctctctgttttctaaattattttcatctacgccgttcacattcttcgagccttgcaaggaaaatctccttaattttcctagtcatttacatgactattaaatatactgatgcgacaaaaaaaatcacgctcctttactcactgtgcctttcacacatctttaccttgtattataactacatgtagaccgactgga

SEQ ID NO: 454884 - DNA, 443 bp, Homo Sapiens
aataacacagtccacgtcaaataatgtaaactagtatatgatataatttcaaaaggtatcaaaagttattctctattcgtgggaacattggttgtggtactgctcattagctttatatacactggtgttttattcagaaacaattttctgaatttttctggacctcaagtaatagaattttcatattgttttttcttgatttttttcttccaaaattataacacagactgtagctgatgccataataaagaaatgtaccttcatgctactcatttaaatatccttgcgtgtgactaattaacttaattcattagtacactctattaataaaggcaagcaaaaatcctttgttctgtgtttgtgttagcttactaattttgttcttcacatggcaaaatttttatcctgtccatggtagaaccgactggtaccgagctcgatct

SEQ ID NO: 454885 - DNA, 541 bp, Homo Sapiens
acgggcaagaatcttctgctgactccacagaaggctgacaactgccacagagacttggagaggagtaatgtccatattctttatttgttccaggtatttcaacattagtttctgggggctgtaaatcctgagtggaaatggaatcattctaaatttcagatgaagggttacattttgatgtttctacttccatcaagggattatctaaagtgagatccaatgcaccaatgttcttgacattggcattctgcctgcctgttgaattaagcaaagtaactagggactgttgagctgtatcgatttccataaatgtttctgaatttgagcagccactgcattctgaagatggaatacttttcttcgcacttggaggatccacattctgtgggagcccatttcctttcatcgtagcttccaaatcaacaattttgtgttgattctgttgcctttctacaggaagctcaaggtcccctatgttacaaagatattcttggtcatgtgaagcttttagttgtagcaacctcatagcgacagcaggcaa

SEQ ID NO: 454886 - DNA, 592 bp, Homo Sapiens
atctatattcacacatcagtagtatcagtctagggagctttcattgtattatagttactgctctgagggctcattgttcatgtccccagcacctaacttcagaagctgtcagttaatggataaaactgtgtgtgtttgtgtgtgcatgcacatatgtggcacgtgtgcatatatgagtgtgtgtctttcatttgggggggaggggttgaagaaaaacaattaaagagtctactactagcaatgattcattcccccatctccaagtcttgaattgttacaaaatgtagtctttattgctttcaggttcacccatttgcttagatagacatccttgtatttgacagatgtgtgtttgttctattagcagatagtaagcctgcattcttcagaatttaacactaatcttgtctggccatttacaatatctgacttcctgatcacctaataatgagaataccctaagacctacttgctgtttcctatgtgtttatcaccaagctccatagttgctgattacttcctttgatatcatgcccctaacatcccagtcccgtaccttttggttttgttttgttttgtagcgacaaacgca

SEQ ID NO: 454887 - DNA, 675 bp, Homo Sapiens
tcccccgactagccgacaggtctgctctggacacagcgggactggaggctgggcgggcaggcagtgtgccgttccttctcttgcttgcataaccagccatgggtcatgctctatcctcaccctggccctgcagcaaggctgtgcagcacctgctcatgctcttatctcacagagagatgccatcaaactgtccccatcatcaccaggatgtgtcactacctcacaccatcctggagccaggagccaccgccagctcagtggcttctgtcagcatggtccatcactcctcacgatgctgtcgtctgcgctaggctcatccagacggttctgctccgtggcgtgtgctggggctggagtgttcacaggggctgctgagcagggtccccacgctgcctctgtgatgccttgagctcctccaggttgtctgagtttctacagccacggccacgtccaagaggggagaggcaggacccccagtcctcctaagagtttggcttggaactggtgcagagtgacttctgccctttgtgtaggtcagagcagggcacaaggacagcccagcttcagaggaaggagaaatagagtccacctcttcccatgaggccagaatacatcatacaggcaggacaggcatttagaatcctttctggaagacttccatagcgacagcaggca

SEQ ID NO: 454888 - DNA, 802 bp, Homo Sapiens
agtgcttactagtactaccatcgctctccactgtacctcctgttttggcccacacactgctttgctcatttgtctgagatgtggcagaaccctgatcctcttcctcagtagatttccatccatttgtaaacgtcttaccattgccatttgcactatcattggaatgctgattgctaggcagtttgttccactcaacgctgggtaaattagtgccagtgttttgtgcaggggttccccatcctcttcgacttcctccagaatttgcgccatttccacttccccatgatgtactctgggagtttgctgcaccagattcccacacaccacctcctttgtttgtgttaacttgaaagttagtgcccataggaccatttacgccaggctgcattagagttgcattcacagtgtcaccattagcttggccattagggcctgaacatttgtctccagagtaattagaaccataggcaccccatgtagtaccataagagcctccactttttgactctccattgctaaggtgagaaagggaagtgccattcatacctgatggagcctgcatctgaggatgattcattgtgctcacacgccaggcccctgtgttactactaggcagctcattattctgcactgaaccggagtttggtaaactagaggtcataaagttagtagtgttatttggtccagtcatttcagtggtaatattttgaggttgaccactgaatgaaaccttctgtgtaccacttacttcagattcacaagtttcctgaaggcttccccaggtaccatggtagaaccgact

SEQ ID NO: 454889 - DNA, 399 bp, Homo Sapiens
agtagtggcatcagtggcagtggcagtggtggtgtacgacgaggagcttcagctgctgcggcagcgatggctagcgagacctctggccatcaaggttaccagggtttcaggaaagaggctggagatttttactacatggcaggcaacaaagaccccgtgactacaggaactccacagccttctcagcgaaggccttctgggcctgtgcagagctatggacccccccaggggagcagctttggcaatcagtatgggagtgagggtcatgtgggccagttttcaagcacagcactctggccttggcggtgtgtcacattatcagcaggattacactgggcctttctctccagggagtgctcagtaacaacagcagcttccagccagtagcgacaacatgca

SEQ ID NO: 454890 - DNA, 344 bp, Homo Sapiens
atagaggatccctgctgtgtcgatacaagcaaagggcagtcagaagacatataaataatctcaaaatgtttctcagcatacaaatccattggccaggcctcccccttcacccagagtgactatcagtgttttctttccaacacccatctacttgttcatgcaacatatacattagcatgggttatcttttcattcagaattcagagctgctgtgtgagccagatgcttacataccatttttaattgatttgtacaattaactatgacgggtcacaatcacaaagcttcctttctcttggcaggagtggtacatgtaaagtcatataaattagcgacagcaggca

SEQ ID NO: 454891 - DNA, 638 bp, Homo Sapiens
ggctgtttatcgatgcaccaaatgagaagaaggaatcatggccaggtgaagagaattggtgctcatgcagaaacggagtgacccctcatggacagaaagacagaagaagcaaaagaaaagccctggcaagaatgcttcccttggggtttgctgtggacaggaggcatctccattcattctgtagcagcacttcataactgtgtttggcatatgaaaatctagtggggctaacaaggtccttagttagggcttttattatcccttaattccttgcttaaaggaagatgattacaaagctcatctttatgatttaggaaactaatctttcatttctgaagtgtttctttcttttcctgatcacagatattaaaagaaaaagaaataatagccacagaatgatgtgtaactgtgccgtagtaataaggagaaatacttgaacctgtgtattagactcgttgtgaactacagaaaagacttccgtatcaggcatgacccttctctggttcttaatttaataaggacctatagtgactctatatataatcagaactaaaaatgtcactggagtcctatattctcttgcatgtattcttaaaattgtaattatgagaatgcccatggggctccctctcatcata

SEQ ID NO: 454892 - DNA, 976 bp, Homo Sapiens
  misc_feature (81)..(81): n is a, c, g, or t
tctgtcctttggggatctcatccttttctacagttttacctttcacttcttatgcagataatttccactgggtccctactnctactctggggagtcccagatcaaagtccagatcttaggcacaccacttgccagctatgaaacctaattcacctaacctcctacagtgtcaatttcccattctaaaaagtagtgataataatacatacctcagagtatggttgtgaggattaaagaaaaatgtttaagtgtggtgcaaagtaaaaagcactatacaaatgtaaagttttattgtaattccctgaactagatacagtgtgtcttactagtgaatcctattgactacacttatatctctcatgtgacatgtagtttattcatgtatacacctttctattccctgactggatatattcaacaaaaaacatttaatgaatgtgaatgcctgttatgtaccaggcattgagctgagacctgggagttcaataataaacccagagttcccagccaaaatgatgagtgctacagcagagttaagtaggcagtgctagagggacataaacagagaacagtcgtggggtagaagaacagtgaggtggcccatttcctttcagcttcctatattagaaaaacctaaagaaagactttttcaacctgctagatcctatagttttctacagaaatcactcaatgagcattgatggcctgaaatgaatttcggcttaaatggtacaaatgttcagaagcaggaaagctcagggcaggtttgaggaaattaagcagtccagtttggccaaaatatgtccttatctatgtacagcattggaaaggtcagctagagctagattatgaaaagtcctgaaggccagactatggagcttggggtttatttactctgtaggcaaagatagagtgagggaggtggtcataggtttaaacagagtgtagcataatcaaaaggtactgtggtagcgca

SEQ ID NO: 454893 - DNA, 456 bp, Homo Sapiens
caccccagcgccacagctctatatcgaaaacctaattaaggaagtaacttttttccagggaggggtgggagagggaatttaaaaggtgtcaacttttgaccaaaaaaattgtgcccttgtaccgatgcagctctctttctcccccacctcttgcgagatcagagggatcattcatgtagaagaaaagagtataaatgcaattctgtatctcgctagagaacgtgtgggtgactaaacaaaaagtgcagtctgcttcaccaactttagactgcgtggtgccacatgcctgtgggtccctcttaaagcacagacttaaaatggcaagtattactgaagtatagcctctaatgaggagtggcacttaaactatctgggacaccactactggacacggtcttgtagaggcagctgtccagttttggtggtgactcttgaataggaattgttaaatggaga

SEQ ID NO: 454894 - DNA, 476 bp, Homo Sapiens
  misc_feature (22)..(22): n is a, c, g, or t
  misc_feature (68)..(68): n is a, c, g, or t
  misc_feature (79)..(79): n is a, c, g, or t
ctcctggcccagccaacagggnactgcctcgaaagtttaccgaacgttgggtaaggagctgggctcgngatggcccagnaatggaaccccctagactttcccaacacgtcaccctgccctgaacgcctaactacaaagaggaaaggcaacttaaaggtgttttcctagatgccagccatcagttagtccctctctttgtgctttaaggaagatgctttgtgcttaacacattcatctgctgatgggacaagccattctaaagggcagaaatgatcatctttagaattaacactgactttgtaacacctggatgttaactgtccaaatggcaaattattcatcatttctagggatacagttagctagctgtagcatctaatttttacttactttgatgactgaattgtaagtgttggttaagttttattagtaatataatgtttggcagatgatctgcttaaatggtagaaccgact

SEQ ID NO: 454895 - DNA, 337 bp, Homo Sapiens
catgctaaagtgcgtatactactcaagggcaaaaaaatcaacttcattctgtggaggggcagataggggctacgttgatctagaaggggattcacatatttaaaattcacataaaaatgtcctaagggttaggagtggccctgctcatgttaagcaagaatgaggctttcaaatctcttgtttaccatctcctaccatgagttcctatcacagaagtttatcatggtgagccttaacagagacaacttaaggggaaaaaaacttttagagcacttactggcaactaacattcgctgttcttcatttgtttcactcacctgctatggtagaaccgact

SEQ ID NO: 454896 - DNA, 384 bp, Homo Sapiens
ctgcgcctgaccagaaaagtggtttacctgataaagtggcatttgaactgagatctgaaagtagaatatacttgaagtagatgaagagaggaatgacaatattttatagcagaaaggacagcagcccttggtggcaggaggcatgttgtattccaggaacgaaagatctatgcagctgtagtggagagaatacctgagagcatgtgatcagatgaggcccacctgagggcagatagggctagactaggcatagtgtagccacataagggctttcagtcagtgataaggatttgggtctttatcttatatagacataggagaatccatgttacatattttaagcaggtattgaaggtggggtcttgaggaagtgagtgtgttgtg

SEQ ID NO: 454897 - DNA, 706 bp, Homo Sapiens
agagaacacacgcctggctagctagagaagcaggcaggcgctagcaccccgtggggaggggtctgtgagaggagaggccaggaggacccgcagagggtcaccactgccaaggctggaagccgcaggcaacctggaatcaaatggatgccactgaccacagagatttgaatggtttaataactctgtcttcgtgagctggatggcaagctctcacactttacccgcaggctgtgctgtgcacctcccacacagtggtctgagcagaggcggcgtgggaccagaccctcccacagccagcctggccaaggtggcacagaccagagctctgtgcagacaagcacccaggggtctaggaatgctcccccttctctccaggggccagaggggagaaccaagctgctcagccttccttgctctggccagcaggaggcccttctcctgggagcagccctcgtttctgcctgtcatgcccgagggacacaaggccatccactgtgctcctgctacatgggcactgctggggatgtgctcccactctgagtgtcccccacccagggcctctcccttcactgcacaggacagcaagggcagcttgtgctgggaagcacccgaagaccctcagccaatgccaccacagcccttggctaagaccgtctgccaagccccttccgcagtctctgaaatctgaggactggctggtggctcc

SEQ ID NO: 454898 - DNA, 378 bp, Homo Sapiens
agtcggttctaccatgactttgttttacccagtgataaaatgtactgggataggctcatggttagcaattgatgcataaactattaatggcgagatgtcattttcctaagaaattaacactttgcaaacttggtatgcaaacttgtgttaagagctctaaactggattaatctatcctggccaagctatacccccacactttacttttctctcctgaaaaagaggctattaggaccagttgaaaagcaatgaggtattaatgaaagagaggtcttaaaatctagtttttagctttgtatagagttttgttggcacctcccaacactggcgataacttatctgtgagtttataaggccagagatggtagaaacgactgg

SEQ ID NO: 454899 - DNA, 638 bp, Homo Sapiens
tatcagagaaaaggagagtacaagcagaatgtgccagtggggagcccaactctggagctgactgcttaggtttggattctggttctgctcctcactagctatgtaactagggcaagttacccagattctctgtgtttcagtttccctgtctataaaacagggatggtaagaatagttcccacctcatggggttgttctgaagatcacacaagctaacatacatgaagcatttaaaacaatgcctggcatagaacaggttctatataagttgttgctatcattatggaatgaaccacccaagaagcaaataccctgtctttctcatctctgtattcccagcacctctccaagtgtctggcttacagtagatgcttgatcaatgtcatctgggtggattctggagggcagtgctgatattttgaggaatggccaccatgataccatctcactcagtacatctatggtgtgacatctccctctagatcccttccatggggttcttcatgctgaacggatggcaattgttctactcgcttgtttggagtactgacagttaacaagataaaagggacagaaactgtactgccacaacacagcaaagtttagcaatggcctgccatcgcatggtagaaccgact

SEQ ID NO: 454900 - DNA, 337 bp, Homo Sapiens
aaaaagtactacattatttgattttgatgcctgtaagtggtagcgtctgagtttttaaagtggttgaattttattttgataagatcaggtgatcacaaaatatttttgcacttaagcagtactctttttgagtattatgaatttctggccaccactgtcacaaatgtgtacagcctatgccactgagatgcttacagttatgtgctgactattgaataaagtatgtaagtatcttcatgaagactataccactgcacccaattgaaacagagtcaccaccaccttttcaaccagcaaactaaaacccaactgcagatgaagtccttatctatggtag

SEQ ID NO: 454901 - DNA, 547 bp, Homo Sapiens
  misc_feature (416)..(416): n is a, c, g, or t
  misc_feature (437)..(437): n is a, c, g, or t
  misc_feature (452)..(452): n is a, c, g, or t
  misc_feature (469)..(469): n is a, c, g, or t
  misc_feature (479)..(479): n is a, c, g, or t
  misc_feature (507)..(507): n is a, c, g, or t
  misc_feature (518)..(518): n is a, c, g, or t
  misc_feature (536)..(536): n is a, c, g, or t
ctggagtgtcagtggcccgatctcggcttcactgcaagactccaaatttaggatttttttaaatttcctgagacttgttttgtggcctatcatatggtccatcttagagaatgttccatgtgctgatgaatagaatgtatattctgcagttgttgggtagaatgctctgtaaatacctgttaagtccatttgttgtagggtatagtttaagttcattccttctttgttgactttctgtcttgaggacctgtctagtgctgtcagtggagtatcaaagtcccccgctattactgtgttgccgtctatatcatttcttaggtctagtaggtaattgttttataaatttcagagcttcagtgttagggtgcatatacatttagggattatgatattttcccgttggacaaggctttttnatcatattataatgtcccccnttgtcctttttaagngccgttgcccctaaagnccgttttgtnccgataaaaggaatggccattcccgctncgttttaggcnccttttgcacaggaatanttttccccctt

SEQ ID NO: 454902 - DNA, 721 bp, Homo Sapiens
atatcagagtttatatttaatggtgttgaatagtgttcagacgacagcatgaaatggtagtgggaagacaagaattcaattgcccacaaccaggttcatcagcacaatctatcagaattctagtcattttctttaacgctgtaataaaaccactttgcaagtggtaattttttacacttatttacaccacatttttaaaaaatatgaaatcacatatcctagctacatgtagatttaaaacatttcccagtgaagccatgattttctgaatttggcctcttcattcttctgagtatttgagagggagaagttacaaacgagatggagctaccatgatggtttttttaataaagaaaatctaaaatctgaagatagacagatatgtgagatattattagatgaagcaatataattacattcttgcatgttgaaactatgcctttccaaatttccacaaatatagaaattgccaaaggagccacttatgtttgggcaacataacgtcttcaagtgattattaaggtggcctataagtaaattgtataaaattaatacactttttcatatgttgatgaagtatgatgtgttcagagtccatgctgtggaagacaatgtgttggaataaaattcatagtccctttaaaaactatgagaaaacttaaagaacatattccagtatgtataggacggccatttcaatcttactggatggtagaaccga

SEQ ID NO: 454903 - DNA, 371 bp, Homo Sapiens
gggtcagtagagaactgggattcctttatcgttctgctctaccatcctcagcaggggactttcattctcagtgtcatttcatggtgcaaactgatcactaaatcttcaaacagaaggggaatcagggaggctgaagggagcacattgctgagttggttcggtcgcctttaaggagtcttcctagaagatactacctatccacttgtctctcattgaccatatctgtacccagggaaacagggaaatgtattctcatggttaatgctttggacccttgaataaaatcttggttttgtttctaaggaaggaagggtgaattgatatgggtaaacattagcggtctctccatatccacacagttgttcgcctgt

SEQ ID NO: 454904 - DNA, 518 bp, Homo Sapiens
gtgatcagaggagcaacagacaatacaacattagctgtacagatttcacataccccaatatcagaaatgcttctaaacaaccagaggtacaatacatatggaaaaacatacagaaatgtacagcttagtacactgttgcaaaatatacattcacaaaactactatacaaattaagatagagaacactgccagaacctcagaagcttccagtgtactcctttctaaattctctcaccccgacatccctagccaaacaacttttcttcataacttgaaggagctaaataattgaggttgtcatacttctgtaacactgtggaatgtagtgcttgcaacctttagaaaaccaagtatctcaaaatgatttttaacagagctcttctaagttctattctagacctgaaatattttatggtctatgctcaccgaattctgacttactagctatagttaacagttccggattgcttttacctgctaatcatttaatccttatgataccgcgaggggatcctcta

SEQ ID NO: 454905 - DNA, 242 bp, Homo Sapiens
agtgctcccactgcacttgacaaggtgaagaacttacagctggagagtttaatgccagcaaaggatggtttgagatatatgtgtatatatatgtgtctatactcatacggtacaagcctgtacagtatgttacttgtactcgaatactatgacaagtgtaaaacaatagtaacatactatgtatctaaacattaaaaagatacacgtcaaatagtgcattgtaatcttatgattcacgaagg

SEQ ID NO: 454906 - DNA, 432 bp, Homo Sapiens
attcataactggtaggtaagattatcactatattgaaagggaagtaatgtacttgttttatttatctcgttttccttttgttctggcaaaccgatatggtaaatttggattaatccatggcaagctgatcattgcatttaaagtttgagaaaaaaattatactaaattattgatgtgcaaactcaagccagaatggtaattttttaaaacagccactttcaaggtcccaaccacattaacaggcctgtcctttctgtcagcttctcccaccctcatccattctcatcctcctgtcttccctttccagatctcagtgcaggcctatgtcgaccccaaactattctgtgtcaattcctgagctctctgacaaatgtgagggaaaggaactatgcagttaattcaacccgtaacattgctgcagtctattttcgg

SEQ ID NO: 454907 - DNA, 204 bp, Homo Sapiens
ctgatatcgggaggggagatcatgaaattcattgtccaggagaggaatgtcacaaggtcgattgattagttggagtggggcatgtatatgtgcacgtcacagggattatgatggcttagcttgggctcagatgtctgacattgaggatccttctttatcttcctctgatgcccttctatgagaatgaatctgtaatccgagagg

SEQ ID NO: 454908 - DNA, 426 bp, Homo Sapiens
acgggcccactgatgtgccccccaaacccgagacagcccttttccagatctttgtcagatgactgtcctgcgggttgctgcataccttcctggctgtttgcaggtacatttccctaagagagtagcattgttgtccttgaggcgctacgcagtgggaaagcggggactttaccagtctgcagggtccctgaacacccattagcatttttagttgcactgggaggtttacgatcaaaggctgtcctgagcctccagcgagctctaagttcctgggcctagggctcaggtactctgtctactctgtctgccgatcagtaccctctccagcatgctccacacagcggtggtggccttgctctaccccttctcctggcagcacacctttcattcctgtctccccgggaaacagggggatcgtgctagagt

SEQ ID NO: 454909 - DNA, 401 bp, Homo Sapiens
gagctcggtacccctgtatcccggggaggatgatggtggtaaaaatccaaattttatttacttggatatgcaaaaagaaactggaaggatatataaaaagagcagcagtgatactggtggtgtgggtatcagaaagaggacagatgtgttcatttcatagctttctataccttctggttttttggaccattagaatacatttcctttgaaattaaattcataaaacacaagcattacagatgcatatctattctacaaggtcaattttcagaattgggaaagtttgtcttctcgtattttcacaagcgatttcaaaatcttctggcctcactgtcacttgtgaaaacagacctgattttgcctttagaaaatagagcatggactctggctgtacggcgggg

SEQ ID NO: 454910 - DNA, 204 bp, Homo Sapiens
ctgtatcccggggagagtgactgtcttttggatctaatttgacttttgccccagttggaggaaaatcttcagggctaggaaggattgtatttgtctgaccccagagataacctgggttttgaggaacatggggcatcaacctgaatggtcttgtaagatttctcccacgccagcttgccagtgtttctctgatgaatttagata

SEQ ID NO: 454911 - DNA, 562 bp, Homo Sapiens
atatcattctttattttaaaagtgctttaccaacatatactaatcttcacaacattcaagggaggtagataagtattacaccactttcacagatggagaaactgaggcagagattagtaagttgtattgaggggcataatatacggcacaattaggaaaagaatttgttgcagtcatggatcactgaagacctttctcatgatttctgagtcccatcaacacaaaaagcagcagatgcagcatggaagcaggtcatcactagtttggctagtctaaaggttaaacattaccttgttgataccagatgttgaatatgctgtcttttgggcaagtatccccttcaaacgcattcttacatgcttcaacctctaaacaggagaggggaagctgttgtgagtgcagcaggagggggtggagaaacagcgctgggaaggatagtatgacagaagagaaaacactgaactagatataaacacgcgagggtcaaggactaatacaagaggaccctctgggaaccagtccaacagaaaggaaagccacagcagaaaagaagtatgcagcg

SEQ ID NO: 454912 - DNA, 243 bp, Homo Sapiens
cccatggcgaagcccacgtccgccttcttgagggccggcccatcgttggtgccatcccctgtcacagcacacacacctgccgctgctcaccagtggtgctgtcgataatccctttgaccagtgtgtgcattgctcggtgggagacgaccagggccagcaccactcagcttgggccacaccttgtccagccgctcctgttatatctcgccatttctcattgcggatccgccggttgactccttc

SEQ ID NO: 454913 - DNA, 760 bp, Homo Sapiens
  misc_feature (195)..(195): n is a, c, g, or t
ttttttttatatgaataaaattttattgaattttagataattagaaagaataaagaaatgcaagataaatgctttctaaacagcatctgatagcatcatcttttcagtgtcatggtattttcacttttctttataaaaagtatagacattcatttatttaaatttttacaaagtaagaaccatcaaatggaaaanaaaataagtaatgctaaagtaaattcagctttttatcaatactgaaatggttggcaatggttaggttctgagtgtagccttcttggaaaaacagtgtttgcagcagctgttggtttccattcattcacataactgaaaaaaatgtcaggaagccactccctgtgaagactacgcttgcaggagaagagagcaaaaagtatggtggtaagagggagtaagagaacacatccagaaagaaaagacactcttattgagacatgggatgagtatcataagtaatctaggaaacaaatctgagaagaaatttgtgggttgcttaagtgtggttaaggcaagacagtcactaatgcaagtatggccagatctacatagcacaaaataaagtgggggagtttgtaaattaatctggtgaaccgcaaggccagccaagccaggtagtaaccacaaaagtaatctctttacagtgatgtaaaatgcatctgggcaacactgcaaccctgagctgacacaaatgtagggtagacacttccaggagcacaccagaagataacacctttagtctcag

SEQ ID NO: 454914 - DNA, 560 bp, Homo Sapiens
gatgttgagggccacttatttctctccttattctttcccacctgtaccttggctacttccaaatttgtagacagaatgagaaagatttatagtgggagactgagttagccatccaagcattttcatctctcttgttttatatcctatttccttagattttccatccatgtctatgtaagtgaccacaaagaataactatattcctatcacaagggggagcaagaggatgtagtctcagtgacccatctctgaccaagtccacatgttgtgttatatgtggctctgatggttctgccagtcatgatcttttttctgtggcgacatcagaagtgtatgtttgcatgctgtcttcaacttagaggagaactggaagtcaggagcctttgatgtccttatcctgctgtatgtcttctctgcatctttttctatagggcaccctccttagctcccctcactctgttttctcttctattcagggatatgtttctggactttttcttctgctacttgagtccaggatgcaaccattttgtcctgcatctcttctttcctgtagagcc

SEQ ID NO: 454915 - DNA, 198 bp, Homo Sapiens
tcctgtatccggggaggatggaggcagaggagagaggtaggaaaacgataagagaaagacataagattataaggctcctcgacttggcactgactccacattcctcctagctctggcactaacccttaagagcagaagcagtcattccccagtcctcccttcccccgggatacagctccccgggaatacagggcggac

SEQ ID NO: 454916 - DNA, 302 bp, Homo Sapiens
ctgtatcccggggaggtacagttaaatagagggtggaaaggttgggaaatgtggaatttaggagtataattttattagccatttagtgtcaattgaatgctagctttcttaaagatttgtgtcgttaataggaatttttttcttgcctgcttcaatatggcgactttccttgtccttttgtcttttcaatgcggcgttgcaggttgtgtcttgactccatttttttgtcctgtcctcgcactctcaaccctatttgttgagaggggtccaagtccttcctccccgggctccccgggatacag

SEQ ID NO: 454917 - DNA, 291 bp, Homo Sapiens
ttggccggcccgcatctggacttctgccagtggcgaggaagggacatagcctcgtgtttccccctctacctctggatgattacagactagctttcctattttctgcgtgtgaaataaaggctgtggtctgagcccttctctcccatctcctgtctttgtcctgtcaagtgctggagccagagctcctacagctgcccttggtggtttctcctgttcagcgatggtggcacaaatgtctggaaacccgatgtggccaagactgggctgtccagaagctcatcagaatagatt

SEQ ID NO: 454918 - DNA, 847 bp, Homo Sapiens
tttggtgagcttggctttggcaggcactttcaagtctgttttttcaaaggtctgctgtcgatagtcctccggcagtggtttcagttcaggggattcactaggggcctgatcttgaccatccatgggccggacataagccgtgggcttctgctgcattgcaacactttttgaggggagggagggaggtggaaatgtttgagaaggcggctgggcaggggccaccaaactgtcttgaggggtctctttatcatggactttcactgctaggtccttgggagatttggctgggcaatagcctttactgttattgctgctgccatgaaccttgctgcttccttgcgtccggggaagagtttgctggttggaatgtataggtgacaaagggggaactggggaaggcaaagagatttagggagaaagctccctctctggagccgaatctgtcaccgaagcacagtggtctccgtcagctcttcggtcaccctttcttggtgatgacatagagccgaacccctcctgaccaaggcgatcctgggtcatggtgctggctgtctcggtgggccgcagctttttggcatggagacttggcattggttcagttcttgcgctgcgccatctttggattgtggctaatgttgccaaacagaaagtggtccagacgcaggagtgtgaatggactggtggtggacactagtgtggaaggagctggatggaatgctgctccctttgtcaggaattaaaggatatttcggctttcccaacctattttcagaagcatccaggcgatgagtgtgagacttagtactaaggaactccttcaccttcttcgtagttcccaacatgttct

SEQ ID NO: 454919 - DNA, 498 bp, Homo Sapiens
tttgtctttttcttcccttaagtcaaaatatcaaagggaaaaaccaaaaggaaaagataaccatggttggttaaagtggatgccacgtgctctcttgtggtcattttagcaaatcatgcatcataatagactatcactcactgcccataggaggagatgaaacagcaggaacagaagtggtgggggaagatttgactggtgcaactgctacataggatgaactaggaacaagttttacatcaaggtgttgacccatgttctgtcgccttaggactcccttaaaagaggctcccgtctggaatgtgttaattacgtcgatctgcaaagaatcagagagtgagacagctttgctccacagtcagtccgagagaggtgaagaaagaggaagggagggtcatggaaggttggggaagcaggaatggaagtagatgggaaaaggggacaggagagagctagagagagcttccctcccacccttttctcgggatgaagtaccga

SEQ ID NO: 454920 - DNA, 558 bp, Homo Sapiens
  misc_feature (129)..(155): n is a, c, g, or t
  misc_feature (178)..(221): n is a, c, g, or t
  misc_feature (305)..(325): n is a, c, g, or t
  misc_feature (479)..(499): n is a, c, g, or t
accggccttcattagcaatggtagagataaataactggtcattctcggaaatatattaattattttagtaatatgtgaatctgttccagttccatacatttatagtaggagatgagaaaatttaggtannnnnnnnnnnnnnnnnnnnnnnnnnnattatgaagtctcactccatcannnnnnnnnnnnnnnnnnnnnnnnnnnnnnnnnnnnnnnnnnnngaaattcttgggcccaagccatcctcccaccccagcctcccgagtagccgggaccacaggtgcttgccactgtgactggctaannnnnnnnnnnnnnnnnnnnnggtaaagataagttgttgcccaggtgagtcttgactccgtggttcccagcaatcctcccaccttggtggcctcccaaagtgctaggtatacaggcgtgagccaccgtgcccagccaacaccacaaattttttttaccttgtcttgctagtgaannnnnnnnnnnnnnnnnnnnngaaaaggggttcccccctggtacccgggaataacccgggctcatggaaaccccggcccc

SEQ ID NO: 454921 - DNA, 849 bp, Homo Sapiens
aatagcagccttctattttaatgaattttacacaaaatgatcatcctaattgctactctcttttcaactacagtgcttacagagaatcattaattttcagattaacaccatttcaatttttattcttaggcaactctattgacactttccagtgaaacagtaaagaacatagagcaaaagctttaaggtaccatacttttgtatggtaaataagtatgaataccaatctaagcctcttaacaatgtgtacaaggttagtgctcaaaccacttcactagagtaaatattaattttacgtgtgataggcaaatgtatgtggagggttagggaacaacttattaccatttatactaatggttcaccttctataaaaacagtgaagcttgttacatacgcacacttgtttgctgcaatgtttggcaaatgatttaaagggtacaaaagcaactcatgcagatttctttctgtttgccccaggaaaaacagagatcctcaatttttccccagtctagatagggctgaggcaccaatttctaaccacataatgagaagcacatgtctccaagtcttgactctcttcccagggagacgctgattgccaaagcataacctcccattaaaaagagtgttcctgaaggtggaatgtgtatcattaaccagttacattcacaactcccattagatgctgaagggcagttcatttttcaagggctcactcaagcaaataaccaacagccaatgtagtcattgggtaggataagcaggcggtaagggctctaacagtggaatccttgtcagcgcaaaggaacttctaaatgttgcttatgccaactgctcccctgcaggcaa

SEQ ID NO: 454922 - DNA, 615 bp, Homo Sapiens
  misc_feature (55)..(91): n is a, c, g, or t
  misc_feature (234)..(351): n is a, c, g, or t
ccagcaatcatccgtataacactataaaataaacaacttcaccttacacattccnnnnnnnnnnnnnnnnnnnnnnnnnnnnnnnnnnnnnaaaacagagattcactcttattgccaaggctaaagtgtaatggcatgatctcacctcactgcaacctctgcctcccacgttcaagtgattctcctcaaccttcaaagtagctgggattacaggcatcagccaccacgcccagnnnnnnnnnnnnnnnnnnnnnnnnnnnnnnnnnnnnnnnnnnnnnnnnnnnnnnnnnnnnnnnnnnnnnnnnnnnnnnnnnnnnnnnnnnnnnnnnnnnnnnnnnnnnnnnnnnnnnntgagccaccgtgcccggcctacacattcatttcttatgctgcatctttttcctcaaaactatcatcagtgttacacaatgaaacagtctcaaaaaagcttattaactttaaccacaaattaataaacattccaaccaaagatacctcttttgttcccttcatctaattcagagggttttttgacattatctgtgcctttgcatgcccttgctgttttatatactctctatataactgtattgcctaaatgaaggtaccggctca

SEQ ID NO: 454923 - DNA, 469 bp, Homo Sapiens
  misc_feature (192)..(327): n is a, c, g, or t
aagggcatgcaaaggcacagataatgtccagaaaccctctgaattagatgaaggggaccaaagaggtatctttggttggaaagtttaataaattgtggttaaagttaataagcttttttgagactgtttcattgtgtaacactgatgatagttttgaggaaaaagatgcagcataagaaatgaatgtgtagnnnnnnnnnnnnnnnnnnnnnnnnnnnnnnnnnnnnnnnnnnnnnnnnnnnnnnnnnnnnnnnnnnnnnnnnnnnnnnnnnnnnnnnnnnnnnnnnnnnnnnnnnnnnnnnnnnnnnnnnnnnnnnnnnnnnnnnnctgggcgtggtggctgatgcctgtaatcccagctactttgaaggttgaggagaatcacttgaacgtgggaggcagaggttgcagtgaggtgagatcatgccattacactctagccttggcaataagagtgaatctctgtctt

SEQ ID NO: 454924 - DNA, 535 bp, Homo Sapiens
ctgtataggcaaatctaagaaaagtctgggctattagtatttcatgctcttatttccatttgtgtacacaaatagctttgtgcatagatgcacttaatatatgttaatagaaagcaaggccatattttcactcaaactagttaagttattctagtctatcattcagtcttactgctttttaatttttttcaaagtgtagattttgctcatcagtaatgtgaagcactgttcaccacctccctcgaaaaaaagagcttccatattaagaagtaacttccttttttcattttccttccatctgtactttacaacactaacaaaagacaaaaataatgaacaagcttccatttcctgcaagatggtggattgtcctaccataaaaataattaaatgtgtgactaaaataaacatttcaaaatacgttgaactggcaagaaaattaggaaactttagaagcaaaaatctgagaaagctaagtcataggaatgtgaaccagacactgaagcaagatttgctctgatgacatttgcctaaa

SEQ ID NO: 454925 - DNA, 631 bp, Homo Sapiens
gcagggaagccctgttggaggccactggcattggaggcttatttttcattgaagtatgaagttactttgaatgagcagtgctagtttctgaaaaatcatccttttcctaaagtgtgtaagttaaagaagggtggcaagatgtagtagtgggaattttcgccttagaaaggaggcttagatggtaggttccacatgtgcacaataattagtaatgcgtttgtgaccagcttagtgccagaagcctttgctgtcttttggttgaccgctgtggggtaggtttccagaagcgcagtggctggcacaaagggtgtggcattatggctactgcgtgcccttaatgacccttcaccccacaccttctccagtgttgttaaggcatgctgattttgatggacgaaaaacaaaaacgttgatgaccagtgaaatggtccttgtcatcgcgtgtgagtgatatagggcagtctatgacctgcctgttctttggtttctctgggttcttactgatttagcttgcacgtgctgtatgtaaaggacatctgccaatttgccagtttttgcatgagtgtttctttttcagtttgttctactaattatatttggtcttgtttctgattgcctaaatgaagggacg

SEQ ID NO: 454926 - DNA, 551 bp, Homo Sapiens
cgcccttcatttagcaaatcacccattttaagtatccaatcatgagttttgataactatatagtcttctagcaactatcacattcataatacaaaacatttccatcacccccaaattcccacatacccctgtgcagtcaatcccttcctcctaccataggccattagcaaacactgatttactttctgtcacaatagtttgccttttctagaattacctatcaatggagtctggcatcagtgattattcacatggctgggtatatgacttttttctcttgcctaatgttttggagattcatgcatattgttgcatgtatcaggttagttcttcctaatttattattgaacggtcttccattttttagatataccacagtttatccattcacattactgttggaaatttgggtttccagttttcagctaatgtgaataaagttgctctgaacagtgaattacaagtcttcatgtgagcatgttttcatttccagtggggaaatactcaggaatagttttgctgagtaagatggtaattatatgtttaacatt

SEQ ID NO: 454927 - DNA, 538 bp, Homo Sapiens
tccaataaattttggcaagtaggtaaattcacaggtgtggaacaacagttgattcataggaataacaagggtcaactgtacatgatagaattaccaggtaaaggatttgaagtgtgatgagagacaaatggtgtgcagatcttgacaattaatttaatctgtaggaaggagaaattggtatatgttggaacttttaaattctaacacttccctttacagttccgaattttcttattctgacacaaatgcattcccaaatttttcaccttagcccagatcttattcctgggttctgaggtttagatatgatataagtaacttcagatataaaatagctctaagtaaaatcatgatcatattctcccttttggtatcacctcctcacccaaacttcctgctccatgttaccttccttagttaacatagtactgttcacccacacatgaactggaaatctctacatgtcattaaaaggtttgtgttttcttacagcactctttccattagttgttaacttcaatcacttatatttgctaaa

SEQ ID NO: 454928 - DNA, 630 bp, Homo Sapiens
  misc_feature (287)..(316): n is a, c, g, or t
  misc_feature (606)..(606): n is a, c, g, or t
gatcgagccggtcccttcattaggcaatctcagttatatgaatctgagatactatatttgagatactcagcttctaaaaatgagcctcagagatgaaactcacacaaattcttcagtagataagctgtgattttcattttaaaatctggatgacctatatttacctagtgtaatcacctgtaattagaaatgctcgttaagtgcagtaaaccaccatggcacatgtaaacctgtgtaacaaacctgtacattctgcaaatgtatcccagaatttagagtataatacnnnnnnnnnnnnnnnnnnnnnnnnnnnnnnttcttgttaaaatgataccgtccctctcttcccattgttccactagtcagattacttttcttcacaggcatcactgcatgatcatgttgaccatttttccaccttctcatgtgcaaagctcatcccatgtgctctgttttcttgcaaatttatctcagctctcttttttgtagagttgctttctagattttttttaatgtattaaatcacagaattattgcttatatattttcagaaatactttaggcttctgttatttgtattgtgaacctattttcctatgcttaacntaacattctcattgcctaaatgaa

SEQ ID NO: 454929 - DNA, 473 bp, Homo Sapiens
ttctatagcaaatgcatatgctaaacctaccatcttgaacttcattactttgacttcatatttcactgtttttttcttcctttgagaagcccaggccacagcacaatttaaaataaataccaacatatttaccccatacatttaaattaattttcctttattctttcaagaaagctaaccactatttctgaaatatttggtcataactgaggttcttataaatgcaataaacacacattttaattttacttagtatgattttttcaagccagttttattttcaacttttctatgtgcttatgtattatttgaattcaaagttttaaagtttgagatcctacattatttttaacatctatacttaaattacaaccatgtctatagatttcacatgcattcaattaattacatagtttctataaagacagtttaagctacccacgttttctcccctcttgttcgatttgcctaaa

SEQ ID NO: 454930 - DNA, 459 bp, Homo Sapiens
ccaaagaaacaggaagattagtagttgccagggactggagggaggagagaatgggaagtgaggctaatgggtgcagggtctcttttggggtgatgaaatgttcttaaactagacagtggcaaaagctgcacaactctatgcatatacaaaaaaccacagaactgtacattttaaaaaggagaattttataatatgtaagttatagcttataatgattacatgtaaaaaaaattccaacgaggaaaacgctctaccattgcacatttctttctaagaaaagaagtagttcctttctcactcactatttaaataatacttttacttgaagagacagattaagatattattttttcaaatgatatttgctaggttcaggttgagtattccttatctgaaatgcttgggaccagaagtgtttcatttaggtatttttcagcattttgactatttgcctaaatg

SEQ ID NO: 454931 - DNA, 350 bp, Homo Sapiens
acagtggcaaaagctgcacaactctatgcatatacaaaaaaccacagaactgtacattttaaaaaggagaattttataatatgtaagttatagcttataatgattacatgtaaaaaaaattccaacgaggaaaacgctctaccattgcgcatttctttctaagaaaagaagtagttcctttctcactcactatttaaataatacttttacttgaagagacagattaagatattattttttcaaatgatatttgctaggttcaggttgagtattccttatctgaaatgcttgggaccagaagtgtttcagatttaggtatttttcagattttgtactattgcaaatggggt

SEQ ID NO: 454932 - DNA, 625 bp, Homo Sapiens
gattattataaattaaatatagacatatcataagttctgtagtgtaaaggaaaaagatgttcatgacagactgagaaaaataggaatgggaaatatagtttgaaaattacattgggaaatgtatttattttcaaactactgtacttgtaattttgaatcaaaggctaactcccaacttctgctaatgattggatgagtcttacaaatacccttttccattttttataatagaatttttaagtgactataatgtacaaatccattcaataatcaattgaaggtcaaactacatgccagtacccgcatcaggtacagggatagaggtctcagaaagttcacagctttatgagcaagggagtgtgtacgatggcaatataatgaatcagcagtatggcagccagatgacaggagagatggtcaaggaaagcttccagggaaaataagtgaggccatagagaagtcattttttagagtaataaggaggtcagctgagggcatggcatgaaaaacatattccactagaactatttaaaatatcaagatgtcaacagcaaagtatctaagttaactcctttctcctgagacaatgcaaagaggaggctctgcatgatttcatgcactattg

SEQ ID NO: 454933 - DNA, 365 bp, Homo Sapiens
agaaacaaaactgcaccaatgcacagccagaggctgacagttaaaactaatacataaccacatgaacatcatatttatagagttaacattttttaaggatggtcagtgctaacatatagtattatacatttggcactaatgtttgccattggtccagcaattggcaaaatttgtttctatgtataaatttatttttgaacattaggtctggctagacgtatcttcactatttataaaaaatatttagtcagtaagctcacgttgaataactaggtctactgtgttctggaaactcttcagtagtaatacagctttttcatgttccataatgtacgaaactgtgtccattgcctaaatgaagggat

SEQ ID NO: 454934 - DNA, 323 bp, Homo Sapiens
  misc_feature (84)..(130): n is a, c, g, or t
tcattaggcaatcatgtaatttttattgacaaaagatatatagtaaagtcttattttaagatatattttttctctatctgagannnnnnnnnnnnnnnnnnnnnnnnnnnnnnnnnnnnnnnnnnnnnnntatgccaacatatacctggtgctagaaatattttatgggaattacaattctttatatttgtattttctatataaaggcatatacaactttgaggcagtgtttctgatggagagcagaattcataaagagcttgtgtgtgcttccgtgctccgaaattatatgaaatccattttgagaagaaacttatttgatt

SEQ ID NO: 454935 - DNA, 352 bp, Homo Sapiens
  misc_feature (319)..(319): n is a, c, g, or t
atacatctaacaaatacttgcgttgtatataatgaacaaagaggcagaatcattaatttataaagaattcttacaaatcagtaagaaaatgatgagcataccaattaaaataggagaaagtgtgaattaggcaatccatgaaaaatataacaagtaagctgagactgtttgaagagttgctctgccttactagtaatcaaagaaatatgaaattgaaatgacaatggcgtatcattttctgttagggcaatacagataaagtgtgatgatgtctgatgtgagcagaagtgtgaggaaattttgagaattcaaattagtntcaaatttcccagagagccattgccaaatggga

SEQ ID NO: 454936 - DNA, 497 bp, Homo Sapiens
  misc_feature (482)..(482): n is a, c, g, or t
agatttttagaaattcatttatttgcaaattacagtgaaaaatttctcttccagatgcatataaatccgaagtttttatcctagtgaagcgtacagaatgctattgttatgacatttaagtatcataacataatgtagctaataaagctttttaaaaattatggtaaagtgtatgtgaaatttaccattagtgacattgagtaccttcaccatgttgtgcaatcatccccaataagtagttccagaacattttcatcaccctagaaggaaactcctttttagcaatctctccccactcctttctctcagcttcttacaaccatttatctgctttctgtctccatggatttgcctattttggatatttcatataaatgcactcatgcaatacgttgccttttgtgtctgccttctttcacttgggcaaaaatgcgctcaagggctcatccatggctttagcatgtaatcagtccctcatttcnctttatgggctgaat

SEQ ID NO: 454937 - DNA, 557 bp, Homo Sapiens
gaacactttcccttgcttgttttctttactttctcacctttagttgtctctccctcaaaggcttttctagactctactaacttaatgtatttctccaatatctgccttgcttttaattttttcatcctgtagtatccctttgaccttactgatcccaccgcttgaactgtccttacctgttcttatgtgacggtgactccaaaatttccatgttgaatcctgaatgtctgcctgactccggcattccttttctgattgtgagcaaggggcatctcctaattgacatggctcctcagatgcctcagattatatatgttcagagcaaacttttaatatttcttccagaccattcaccacttcatcctttcatgttccattcatctcaattcacagctatgggcattttcattctcccagtcacgtagcctcaaatcttcatcatctccgttacacttattttttacacactttacttccctcattttgcccctctattctcctatccctggattcacccttgtatgtcatttacattgctaaatgaaggtaccgagctc

SEQ ID NO: 454938 - DNA, 360 bp, Homo Sapiens
agggccctgaggcatatggagaaacattgcgcagaaagatcataagtaagatataatgaaatgggcaggaaaatacacacaagaaagtaacattctctgaaggcaagaggcacaaaggtattctttattgaaaaagctttaggcagttaatgagttggagaagtattgccaagttacactcaccaaatttagtagtatgcctcaatttagtgggcacaaaagctgcttattgttgaatgaacaacaagcataatgtaattggtttcatacaattaggaggtcagcaagccatgcttgttataattggcactgccatagtcaggggcttatgcgacctcaagtgatgatttgcctaatgaa

SEQ ID NO: 454939 - DNA, 357 bp, Homo Sapiens
cttcatagcaaatggtaagaaaggaactttcaaaactgttttagttttgcaaagattagaaaagtacaattctactttctcaacttttcatccttgttaaaggcctggaaatttgcagcatttttttctttcttattttacttttctaatttgttacacaaagtgaaattccacacataaacatgcaagctgaaggttgggtttattcataggttttgtcttaattatagatatttagtttattgaatatcttattgagtattgagtacctgctgtggtccaggcatcttctgaggtcccaggtgtacaaagaggagccaattgtggttactgcctctatggaatttgctaatgtaa

SEQ ID NO: 454940 - DNA, 521 bp, Homo Sapiens
ttcatttagcaaatgggggccgttaataggaaatggaagggatacattgtatttttctgcctctggtagtaaacatggtatatctttttccaatcttttaactttcctgctttttgtatttaaagtgttttttttcttattgatagcatatatttggatattgctttttatgccgtctgacaaattcgacttctaactacagtattttgcccacttatagttaacataattattgataaaattaagatttaaccaaccactttcctatttatttagttttgtctcataaaatgagtgttctaatttcttaaaaaatgtgtagaattggcattatttcttatgtttttggtagaatatgccgataaatccttctaggcctgatgttgaacttgtaaagtgtattgtcaaggaatttttaattaaaaatataatttctttaatgtactttagtcctattcatactttctgtattttaacgtccactttgtcagtttatgtcttctaaggaatttgcctatgaa

SEQ ID NO: 454941 - DNA, 348 bp, Homo Sapiens
tggagtgataaaaatgttctggaaatagatagtggtgatgactgtaaacctctgtgaatattctaaatcaataaattgtatattttaacagagataattttatgctgtatgaaatggatttcaaaaaggtgttattaaaaaaatttcccacaggcaaaacagatgaataagaataaaacttggccagtttcataaagcagtcacatctaatagtactgactggggtaactcttaaggtctaatctctggcagtagtttgctctgggactgtaactttgctgatacagattcttctagcagttttctagagtcagagtaaagtgaccatacctccctatttgctaatga

SEQ ID NO: 454942 - DNA, 278 bp, Homo Sapiens
aatgggtgcttttctccaagtcaagattatgactttggttataaatccctctggtttgagaaagtagtgatttcctaatacttggaagatagtttttataataattagttgtatatttataatgtaaaacaaagagctcaactgcttatgactaatctgagcaggcagtgttgtgtactgctgctatgacaactaataatttcggtctgacattgacaggtaacttgttagaccataggagcttgcatactcacaattgttctatatttgcctaaatg

SEQ ID NO: 454943 - DNA, 471 bp, Homo Sapiens
atatggttggacgaaaagaaaaccaactaagaaacttcttgaatccaatgatttagaccctggatttatgcccaagaagggggaccttggcctttctaaaaaggtatgttatttttgtaagttctaaaagaaataaactcaggaaatgagaaattttaaaaatgacattttgagtagcagttataacattgatgtacatacatatagaaattagtgtgtgtgtcagcagtcatacatgatctgagatttcctacatgaaaggctgttttgcagttgtgtgaccatgtatgtgtataaactggtttcaggtttcctttccaagtgaaaaaaatttttaaatgctttgaagattaagtttgtgtttgttataatttcttttctgggttcaaatcctcttacctgttttctactaaactactatctcaaatatcactagtctactctcctattgccgtgtcgtccaactacatt

SEQ ID NO: 454944 - DNA, 340 bp, Homo Sapiens
ttggacgagctactatatgtgtagcactttacagttttaaaatactttccatgatttatatcatgtgagatgatgatcctattttacaccaggcaattaataatatttttcaacaatataattggcatctcaaatacatagttgttttcctgaaatatcaataaataaaaccaattttatgaggcatttatataaagtagcccccaaatgtttcataataattgatttttacatatgaagcctattatctctgtcattatattttcttcaagtgatttgttgctaatttatgtttggaatgatggggaggtctatagacagcattgaagtgggcatttta

SEQ ID NO: 454945 - DNA, 347 bp, Homo Sapiens
gcggcaccatattggtggacgagaaggaaataaagagccatccactcgagctcagtaatgctgtgacaacagaataaatgccacttctttactcttgcgaaacacagcgcttattctcaagaaagaaagaagtcaaacctaagggagataattcctaagccctgcctaagagttacagaaataattacttctacctgccagagattccaaaaccataagaaaacagtccagataggagtatgcaatttccccttatttacttttattttatttaaattaaccaagggagttgagtcaaatttcggtgaattcatatatgcctgcaccatctaggtcgtcaccaatat

SEQ ID NO: 454946 - DNA, 373 bp, Homo Sapiens
ggccggtaccattttggttggacgatcagagtccagttacataacatactctctgaaaaccacaaagtactttccgaatgtgagatagtagcagtgctatcataattttggttctgactatagcacaaatagcttttaaagatagatttacttgagccatatatgtgggtcctctacaaataagactattattattctggtgtctttttccatcgtttttaagttacaggataattcctcccagtaaaactagcctccaaaggttttaatggcaaaatccaagtattcaaatctataatcagccttttaagcaggaacttagaatgacatgacggttttaattgtcttgttcttcgtccaaccaatatggacc

SEQ ID NO: 454947 - DNA, 124 bp, Homo Sapiens
cgctgcacacacattgttccatattttccatttaattggccccagtatgagccttcattgttcattcattcagcaaacgtcccctgagtgctagcccagggctccacgaggactggggcctggc

SEQ ID NO: 454948 - DNA, 375 bp, Homo Sapiens
  misc_feature (355)..(355): n is a, c, g, or t
cagacactgggtactccaaaagtggggagagaaggaggtggggaggggctgaaaaacatcctcttgggtactgtgtgcaccacctgggtgagaggatcaatggaaacccaaaccttagcatcatgaatatacccttgtaacaaacctgcccatgtaaccagtgaatctaaaataaataaaatgggggtcatgatagcacttccctcctaggctgtgaagatgaaatgtggtagtacatgtgaagtattttgagcaatgttcaagcatgcctttgataaatgtgagctattagtattcaggacggtcatgtaaataattcagtgtccaaatgtgggccctttaatctggacaaagngctgaactcgtccaaccata

SEQ ID NO: 454949 - DNA, 536 bp, Homo Sapiens
tatggttggacgagaaaatgtttatcctcaaacgttagtacaccatttgttccaaggtgggcccactggaacaaccagagtttgatataagtctctggaaacacatctatacatatagtcttttctactttactgtaccgggggaaggtactgatctgggaaataaagaagaaataggaaataaagagacaggactgtccggtggacttgggtacatttggcaccctaaaaatggggggaaaacaaggtgcctgtgttagttctggattccatgttgttgagagtcacctttgcaacaattttgtaactcatacagtgtgtgtatgggaataaagttgtacatgtacaatgggggtataccttaggaagactatcagtgtttctaaaaacattacagaaggcaaatgttatttataatcaaattacccttgaaaacactacagtaactctgttagttaatgatattctattggcgttaattaattattcaatttatttttcaaatgtggtgaaaaaatcatcaccagatagtcgtc

SEQ ID NO: 454950 - DNA, 418 bp, Homo Sapiens
cggctaccatttagggttggacgacattaaaatgttgggatatcatttctaatttggaaagcgaggaaagtggagtctgatagatggagataaaaatggaggagtcagaacactggaggcacatggtaaagtttaagaacagttgctgtgagggcatttggcaaacaagttggaagagaagcagagtgtggatgtggagttgtgtgattccactgataatttcagaggtggcaatctgtttcctttcattggagaaggagctccttaagaacaaatgatttatatacagctctgttgagctcagctcagccagccctaactactgcctagaagcctggtctctaacattccaggtgtaccctaaccttctcaaacttctagctcgctcattctcgtccaaccaaatggtagcggctca

SEQ ID NO: 454951 - DNA, 398 bp, Homo Sapiens
catatttggttggacgaagattttgttgttgatgttttacttgtctagagcattgcttttcaaatttgaagatggcgcttccaggtgtcacttagtgtcatctgatgtcagttccatcgttactggggttcacatgaaggtagtggattcacagacctcagtttatttccaggtatagtaaccatgtgtccaggatagttatttaagtcccatgggtttaactttctcatctggagtcctactttttggggttggtgatgatatttaaggaaataataggcatgtgattggtgagaatgttagctagtaattatattacttcacttacttctcccttccaaaactgcctattctaagtgtttgcttcctcctgtcctgtcgtccaaccaaaatggtac

SEQ ID NO: 454952 - DNA, 412 bp, Homo Sapiens
ggctcggtacctattggttggacgaagatttgttgttgatgttacttgtctagagcattgcttttcaaatttgaagatggcgcttccaggtgtcacttagtgtcatctgatgtcagttccatcgttactggggttcacatgaaggtagtggattcacagacctcagtttatttccaggtatagtaaccatgtgtccaggatagttatttaagtcccatgggtttaactttctcatctggagtcctactttttggggttggtgatgatatttaaggaaataataggcatgtgattggtgagaatgttagctagtaattatattacttcacttacttctcccttccaaaactgcctattctaagtgtttgcttcctcctgtcctgtcgtccaccaaatggtagccggctcatca

SEQ ID NO: 454953 - DNA, 345 bp, Homo Sapiens
attatggttggacgaggaggactgatgcttagacccagtggatctaaatctctgaagaaagggcctggaaatccttgttttcaagctcccaggtatttctgtacacagctgggaccagggaaagaactcaagccctcatctggattatgccttcatcacagggccgcaccaccccctgcctgactctatggtgtcaccagcccttctggtataaggtcctccctggcacggagctgcatctgtctccattagcatttaaccctgggtcctggttctctttccagcagccaagagaatgaagctttacacttggcctggaattcctgtctgtgtgactttttgatg

SEQ ID NO: 454954 - DNA, 233 bp, Homo Sapiens
  misc_feature (101)..(111): n is a, c, g, or t
ggcatgagccactgtgcatggtgctgagactttttttcagtgtctcagagactgttgtatctagaaagagatcttggaggtaatctaatttggtctagagnnnnnnnnnnnaaggctttatttatatacaatgtacatatcatgtaagttacatgatgtgactgtatatcatatatgattacgtatcccatttaaagtgtaccattcaacttttttttcataggattgtacaa

SEQ ID NO: 454955 - DNA, 478 bp, Homo Sapiens
gtgaggagagatggaaagttgatgagaaagagcaatagcatgctagaccaggagatgtgtccatggaatcttaaacctttgggcaggaaaaagttctgctgctgcaaacatttcatatatcatttatttttctaagaagccagaaaaatggcaaatggtttctttttaatccagggaaaaaggacaatcgggcatctgtaggttacccttctgcaacccacaggtgggattccctcaagagagctactgaatgttctagctatctaaatggaatagatcatccaggcaagaataaacaggaatcaatatggagattgtatctgatagaagttagcacaagataaagcaactcagaaagtcacagactagtaagccaacctaaggcaggcgaccaaaccaaaccacagaaaagattagctcctactatctgctgaacttgaaacggtcttttggttttgttcatgttcgtccaaccaat

SEQ ID NO: 454956 - DNA, 435 bp, Homo Sapiens
atattggctggacaaggtttgttggtctctagggcacagaaagaatctatgcctccgaggattcatagaaaattaccacttcctctgtcattatcttttatttattattctctgtgatctgttggtctttgattccctttgtacttttgattcttttgtgattctccctttcaatttggcgctggtttttaccctgatctcatctgtatcgtccacacctcaatgcaggcttcccgcgcccctgcccgggctcccgcagtgcccccatctacatccctgcctccagtcttgttcattgctgctgccagattcacctccctctatgtccacctgttttggaaccttgccattcccatcctgctctgagcttttgctctgtatttcctctgcctgatgtatcctctcccctttcctcgtccaacatatggggatcct

SEQ ID NO: 454957 - DNA, 400 bp, Homo Sapiens
gagccggctaccatatggttggacgacaaactcaaactccttcttcagcctcccaagtagctgaaattaaaggcacccaccaccatgcccatatatatatatttaattttgtacagatggggtcttgctatgttgcccagcatggtcttgaactcctgacctgaagtgattctgctgcctcgaccttgcaacgtgttgggattataggcatgagccactgtgcccagcttcatccactattttaaagacaaaatacaagtgagatcatcaggcaagaaagagcataagtttcagactttcttcttttgtgccacatacacatatattcttgcatctcttcctgccttaggggaacaggtgtttcttctcctgcctaatacttaccccatcctcgtccaac

SEQ ID NO: 454958 - DNA, 392 bp, Homo Sapiens
atattggttggcgaggaaaggagacataaaacaaggggtttcgtaacatgtggccaagtaacggcagatacctgagacatccagtcaacgatggctttcagagaggaggagaccaggaagctggtgtggaagaacaggaactgtgaaagcaaactgagagccgctgaggaagaagtggaggcaccatcctgagaagactccaaagagccccgcaaaaggaggggatgctgccaaggaggggatgctgcgtcggcttcttctcagacagcaacctgatctcaggtttgtgggggaagaaaacagaaaagggaagaaatgggcaagaagcaaatctataatcattgaattgagacaggaaaaggaagaactgtgctgatcgtccaaccatatgg

SEQ ID NO: 454959 - DNA, 346 bp, Homo Sapiens
attggttggacgacagggatatatgaggcacaaagtccaccaagatttgatttcctgaggacagttatcccagaactagcgtcagggacaacgtgctaggtgagtgtggcacttactagggaaaaaaagtgaagttcaaaacattccatttctctctttggcccttaccagttcaactatcccatttacaaccaatagctcatgtggacagcatatgctagaaacagtatcccctgtaaaagggctagccataatttcccctttgtgctcaaatgtattcctcacaacagggtcctcactgtgaatgtcatgtcattcatgcattcattcgtcaacacaatatgga

SEQ ID NO: 454960 - DNA, 309 bp, Homo Sapiens
ggacgagtcaatcaataaatatttattgagcacctaaccaagcattatgcttggtatgcatatggtttacgtctggtaaatgttgccagtcttcccaagtaattgtaaccaatttatacatccaccagttagttcatgaggatttctgttgctccacaccctgacaacacttgatattgtatgtcttttttcattttagcttttctggtggatctcacaatgaggtatgattttgttgttgctataagagtttttaaaaattgaggtgaaatccatataacataaaattaaccttttaaaatgaacaat

SEQ ID NO: 454961 - DNA, 735 bp, Homo Sapiens
tggagagaaaaataaagaaataaaaaccttttgagaagagtctgtaggtttcaccagactatcaaagagtctatggcataaaacaggttgagaacctgcattagaaaaaggagaatagctatgaggtaaaggcaccggacaaagtcttcataggcagagaagcaggattcacatgttgagggaagctaggacccagaatgatggagagatagagaaagctggtgagggaatgatgatgatggtaacacgtcatcactgatgatatgaatgaggttgatggtaacagtaacacagcagttattatttaccgagtgggtcacaaagtttcagacgctgactaagccccttgcaaacatgatcacattcacttttgacaataactgtacaaaggtgtgaatgctatttctcttttacagcctaggaaacacagccccagatatgtccagggtctactctcgggtctcctagctagcaagtcgtagagctagaattcaggccatgggctgcctgattccccagcttgtgcccttactcactcgtccattctgccaagcgcagggaaggtcttgttctcatttaaccaatgaaaaaaactaaggctcagaacgagtaaagtgaagccaagcccaggatctccatatgcttaggaaaagccagtgagacttctcccttgcttcactgctactgatttccttccttatcctgatggtcctccagggccgggaggtcaggaac

SEQ ID NO: 454962 - DNA, 686 bp, Homo Sapiens
gaccatatttgttggacgagaaaagtccattctcatagaaattatgtttaaatttccagaggaattaaataaaacccagagagtttaagttacttatccagcatcatagagcaaagatgacactggaattcaagtcttgagacttccaaacattatctttcaaagggaactgtcacatctttagaatgctagtccatgtatgaattgtaacagctaatacgttttgaagttggggaatcgggggggtaaagaactttaaagtttttgaacttttaatataattcaaagcaaattggcagtccacgttgacataaaaatagctagaatttatgaatttgtattcttggatttgtaaataatatttagcccttagggtcagttcataatatagtaaagcattaagagaatgctcatataaatagccagaatcttctgtttagctgttggaaaactagtcaactgctgcagctctcaagctaaactgttgatgattagtataggcacgagtaagattgaatatgaaggaagcattggggacacaaaatcaagtgaatattagtcacaaagtagtccatattcagataaatttctgtaataaccattctaccattatgttatcagaaccagaacacctgggtctgagttgtagttcccctatctgatgaccaaagggtaaggcagtaaat

SEQ ID NO: 454963 - DNA, 514 bp, Homo Sapiens
tgctgggattacaggcgtgagccaccgtgcctggccaatcattgccggctttcacaatggaagaggtcatgtggcaaggactacatgttgcccccaggagctgaacgcagtccctggctgacagccagcagggacacaggacctcagtcctgcagccgtaaggaaacaacgggaatgcagatcccaagcaccagatgagaacccaccagtcaacattttgattgcagccttgtgctgccctaagcagaaaagccagccgtgccctgctcagacttacagcgtacagaactatgagctcataaacggatgctgttgaagccactgaatttgtggtcatttgtgctgcagcaatttaaaaaacataatacacagtatttaaaaatttgagtgtagatgtctgcatagaaaccacaggcaacatgcgagctgcatgtgttaatgtagaaataatctgtgcaggctcagatctatgacttctcacagttctggtttgcagtactaccgtcgtccaaac

SEQ ID NO: 454964 - DNA, 283 bp, Homo Sapiens
agtaaacgatactatttatgagattaatttggaaatgcctcgtcaccaatttcaacataagttgtaatcattttaaagacaatttgtagaatatctgtatattcagttatttgaaatatgcagatttcagctatctatccaatatattagatttgcagaagcttttatgacatatttctataccacaaaggttagtattttaaaatttacaaacaatgaacagaaacataatagaggaaatatattccattcattcatggccaaaaatttagaaaggaagcat

SEQ ID NO: 454965 - DNA, 530 bp, Homo Sapiens
ggtcggacgatagaagcatcataggaagtagagctgtgtatagttgtaggagaactccaaaaagaagaatttgtctttgctttgttgtcttctgtctgttttcagatctcttattgggtcaggggacagttgtcttttgctgcttttgaaggcagttctaattaatagagaagcagttttaaggactctccaaagatgattcttggaagtgacacctagaggcttgtatgaacactgggaattgaacttcagaatctccttgggtggaatgagttggattacatgcactcgaaggtcacttttattcctgagattctgtgaaggtctcgattggcaaatgagtgtgctactttacatgttcccatttaatcatcacaccaaccctctgaggcatgttagagaggtagagtaggttttctaaggtaatgtctaattaatggcagagcacactcccccacacatatagcttaattctcctacatttgtatagcccttccttcgttccttcgttccttcgttccttcgttcct

SEQ ID NO: 454966 - DNA, 551 bp, Homo Sapiens
atatggttggacgagctaggaccagagccctcacccttcaccctaagtagaagaagccgcacttgaactcagcttcaagggaccagtggctccctggcaccagcagcaggcatagtaaatttccaccgtcccaaagatttccaggtgtgaggcagctggcctttgtagagcacctcagtaaagagctagtatctacactctacactgcctcatgtcaagattcttgtttaatcccccactatcaaggctactcttatgctcatcctatgaaaagtaagagtaacagtttgtgtggcctatgtcctgtgataccccacccttggcatgtttagcagaacaccctggtctctgctcagccttccttggggtcactaggaacctataccttctcttcttcctgtctcctggcttaaatttctccaagcctgttccttaacccatttgctatgtgattgtgaaatcattctcagccctgtgcttagtgagtggtcgcaaaggacctttttaccacggcgaaaaggtatggcacacaaccccgtattcgtgatcag

SEQ ID NO: 454967 - DNA, 648 bp, Homo Sapiens
catttggttggacgaagggaaaagggacaccttggtaccagtactcaaagacacaaggattgagctggtgagggactattttggggattccagaaaagatgctgggcccaagaatctgtacagtggagaggagaagtcttcccttggcctaccagcactatatgtgaaagtgatattggaaaagagagtcaagattgtaacaatatcccacaaggtgagagaacagccattcctatcagaagagctgggcaaatgccaagtttcacactgacagttgcatctcatagtcaaagagttaatatcagggaaaatgatgaaatgctctttagttcagccaacaaaatgaccacttttgataagatgtatggcttgtcaatgtaagcacacctgtcaggtgtggcctatcaacataagcaaggaaattttaccattttagggtatctatgtctgttttcccaaagggaataagaatttcactttaaacagataacattatgttaatgttattcttatcagcaggtcgtctttcacaaattacttaaaagcgagaccaacaatcagtttctgtttgtgtttgttaaagtcaacctgctcagaaagagaaaacttggatttgggtaatggaatatcagatgcaatcacatagag

SEQ ID NO: 454968 - DNA, 825 bp, Homo Sapiens
  misc_feature (805)..(805): n is a, c, g, or t
cgatgcatctttctccccacagacacaagaccacatttctgttggaatcactactcgtttccatgaggctgtttctcaaaccagagcacagtactgccccgttgacaatacatagtcatgtgtcaggtactggtagccaagggacaaacaagcccattttcctgcaatacaacttttatctcaaagatctgggggttgagacatatcaagtgacttaattgctgatttgaataattttctatttaaaaacaatatattatgaagtaaagtatagcatgctaatgtatttttaacacaaaaggggagagtgggccaggcatggtggctcacgcctgtaatcccatattttcattttttacattactctatttttctttctttagagacattttttccttagctggtttcttcagaaagtagagtctgaggcaagggtttacgtgccacgattttgttagggagcatacattaaggatcgggagagaaggataaataacgtgagacagaaaaggagataaaaccaatacaggtacaaggaagtgtattgaactggctaccactaaggacaacggattgtttgatatcacagagttatcttcaatgaagccatgtaaaaaatgtctcaggaatgtctctttcggtgagaaaacgggaagaatttatcccctgctcccatatctcattgggtcaaaggctcattctaatggggtccattctcctgcactcccagatgggtacagggtgtgagggttgctgtggatttctatggccttgttatccaaacaggggaaacctcagggtaacnggtgaggagttgcttggggt

SEQ ID NO: 454969 - DNA, 464 bp, Homo Sapiens
  misc_feature (146)..(146): n is a, c, g, or t
agcaaatattaatccccattttacaaggcctggctcttgctgccaaagagtgctccctcgacagtgactactttaaataccccctcatggcactaggtgagctctgtgaaaccaagtttgggaagaccacacccagtgtgcaattnggttgcttctattgcggttgtggttggcgaaatccttaagtcctggctgtgggcgggagctgcagagactctcttacttaggggctttctttagcttctcagtctttgcagaagatgatgttaaagtggttgaaaaatacttctcagggcctgccattagcctggaaaacactcgtgtggttagccaatcattgcagcattacttagagctcggaaggcaagagctttttaagattctagcatagtattattgttaaataggcgaaaacccagtagtggctgctgtcagtacatggcggctgtcgtcgaccaaataat

SEQ ID NO: 454970 - DNA, 591 bp, Homo Sapiens
acttaggaaggggtggaagtggtggaggaggttctgatggcagaggtggtggccggggtttgtctgtattgccagatctcgaggagattccaccagaccgaggattcagatagtcactataaggacgaacaaattcaaatgcagtgggctgagtgggctgaacaccctgggcactgagcagggagtgaagcatattcacagtgtcttgatagtctattgtctgggtcgtgttgtgaccattggccccagtgggccctttatccagtttcgaatgagggacacgagtattacagctgggctgtgaaaaggaaaggccacttgtgtctgagctatgcccaggcatctgacccattgtaggaagtgaagggaaggagaaatttagggaagaggatttagtactcttggcaatcttggctggatgatcaaacacagcccctccagtctcttcagagggtccccttttacgagtagaactggaagaggaaaaagaactagacaagctataggttttatgtgctaagttgcttgtctggctactatgttttggatcaccaggacgtttgttcccagtaccaactcgtcaccaatagt

SEQ ID NO: 454971 - DNA, 367 bp, Homo Sapiens
tattgtttggacgatatatttgggtgtggcttttttatccaatctgaagtttctgccttttaattagaagtgcttagaccatttatacttgatgtaattttgatagggttaggtttaaattgaccatcttgccatttgttttttatttctcccatgttttttgttcttttcttatgccttttttctgccccctggaattaattgttcttaaatttgcctggtgttgtttcactctatgcatacatagattattatttagcaaaagattgaaagacaccctgtgaggatttctggagcctttctaggcttaacttcttattctggcattactgttctgcaaatgacagctgcctcgtcaccaaatagt

SEQ ID NO: 454972 - DNA, 378 bp, Homo Sapiens
aaacttcaagctcagaatattggctaccttctttcctcactcgtctaccttctttccttattagtcactttcttaccagtcttccttccttttctgtcttctttccttactcgtctgccttctttccttattagtcactttcttaccagtcttccttccttactagtctaccttctttcctcactcgtctaccttctttccttattagtcactttcttaccagtcttccttccttactagtctatcttccttccttactactctaccttctttcctcactcgtctaccttctttccttattagtcactttcttaccagtcttccttccttactagtctatcttctttcctcactcgtccaaccaaataggtagcgagc

SEQ ID NO: 454973 - DNA, 451 bp, Homo Sapiens
ttggtggacgaggagggcttttggggtatgtcgacaaataagaaattaggatcctcctggttcttgtttaaattctaggctgagaatttttctaaatcaaaataactgatcataagaaaacctgttcaaaaggaaaaaaagcaccttttttccaaagctctgaggcctaaaagtaaacacctagaacccaaagcatgcagccttcaatcagaagcaatgtaaaattctaacctcacctgcaggaagcatctctacttgcccagcaggactgcacctaaactgtttcaaacaacacttgcagttcatctcttgatctcactctctctttttctctcacacacacaaacacaacttttcaggatgtaaacatagggagagacaacaactttgttaacctactcaaatatatcacaactcttctctttttagtcaacaaatcgtccaacaatat

SEQ ID NO: 454974 - DNA, 465 bp, Homo Sapiens
gctggtgctgattagtcacagattctttttactgaatgcaaacgaaggctcatatctatctacagccaagccctccttagtgtaggtggcttaataagagtcaggagaagaaggtatatgcccagagagctatacccctgactgataatcctggcaacggcaggttgatatatttttctttttgggtcctcatgggaacacaggaatgcacttcttacatgcggtgagatcatgagcacagcctttccatcttcttttattcattctgccttgcaagggacacatgacaatagccaaaggaaattacatccagaaatccaaaggtgaataggtgataactgtgggcctacttcccattttatgagatgcactgtcttcactagcacaatttgatcttaagcccaagagagctagatgctctagaagccgtgacctttcaatttctcgtccaaatccaatatcagc

SEQ ID NO: 454975 - DNA, 480 bp, Homo Sapiens
ggtgctatttgggatgtcgtttgttgcttttgttgttttaaccgggattggtttgaaatgaaaatgaccacatcagcacaaagcaccgtgtttagtccttgattttctcctcaacaggttggagtttaacaagggattgggtggtggcgaggtcgttctttggccccagtcttgcagcgtgtgtgagtgttactctttatgaaatgctgatgaaccaagccagctgtcatttctcccaggagcacttcagggacatctcacacgcttctcctcactctccctgggaccaggtctgtcccagaaaaccttcctgaggccatgcagcttctgagttccaggacatctctcgggtggccccaggagaacctgacctattttgtggcagatcatgactatttttagagtctaaaccacctttaaaagacagactatcatcctctttcagagaatatcgtccaacctaaatggtagccggctcga

SEQ ID NO: 454976 - DNA, 304 bp, Homo Sapiens
atatggttggacgagatcaagctggcttgcagggaattgacttttagtgacttggcctgcttccactacacactactaccagattaatcttcctaaagcctctttcactcagaactttccagtgagccccatggcctggtgaattacatacacactcctcttccccttgagcctcaaatgtctgatgtaatagtcacaagtcatatttctagcttgatctcttcctacttcctactgacactcatgtgttactaacacagagatttcctgtttcatctctctgattcactttcgtcaccaatat

SEQ ID NO: 454977 - DNA, 435 bp, Homo Sapiens
tggctaccattttggttggacgagaaaggatcttttagaagatagtttgcagtttgaaaagaaacttaatattttacttggcctattcccacttcttaatcagcagtaatggaatacctcctgattctaggttacttaatactaggtttctattgaggtctatttttagagaagggaaaagaaacccagttttatgatatttaaaatgataccattatatacataagccacatatatttccctttttttcatgttcatgtaggatagttgaatgcaaaatagtgaatacattcattagtgtttttcctcataatttaaaaattttcattgttagatcctcaggatacctaaggttatagctaggaaggtaaagaataaaatctgcccttagttggaacaatgccctagtcttaattgaagctgccttagctacct

SEQ ID NO: 454978 - DNA, 356 bp, Homo Sapiens
aatatgggttggacgaattgaacaccgatatgcaactccgtagaaaaaccacaaatagaactaccatacaatccagcaaccccactacttggcatttatccaaaggaaacgaaatcagtatattagagagacatctacaccatgcgtttgttgcagtgctattcgcaatatccaagatatgggattaacctaggtctccaacaacaaacagataaatggataaagaaaatggggtatttgtacactgataggacaggaaccagggaaatactgggtagaagagggcagtttccatggcaaagccccatcctcaagcctggatatctgtggcctaagtgtgtccaaccggggatcct

SEQ ID NO: 454979 - DNA, 439 bp, Homo Sapiens
attggttggacgagcatttattgctttgtctataatgtaacaagatcacaggattaaatataaacattcaggttaattatctagatttttgtccacagtatatgatccatccagacatttgcaaacgtcaggagaaaaatgtgaattatttatccagtatgcatgtcatctcaagggacaaagcctgtagaaagtacaagtgagcatggttgcattgtcagtatgcattcaatctttcaatgtcagtggtgataaaaatgcagtgctaaactaatgaagcaggtgactgcagcctttggctcaagctcacaactctgataactgtcagtgcctgaggttgtgattggtgacattctgacactgcccaaggcaactcaccctctattcctcctttctcccctcccattcgtccaaccaatggggagccttagagtcgacc

SEQ ID NO: 454980 - DNA, 415 bp, Homo Sapiens
tagccgggccatatggtggacgatgtttcatgccggcggtacggttcctttccacagatgcctatccttgggacatacactgcttgattgctctcctggctagagataaccagaagctaaaccttgttaaaataaatgacctaagtaagacaactttctcctccaggaccttgccctttagttatctcttctttctgtatcatccatatcattagtctctgctggctttccactcaggctacaaacccactcaaccctttaaaatgaaacagacagaggagagagagattgtcccgtgtctagctaatgccccttctctcctttccctgtcttaaaagagtgttctgactacccagggaccacttgtttacttccatttactccttaacattggcagcccgactcgtccaacata

SEQ ID NO: 454981 - DNA, 274 bp, Homo Sapiens
cattttcttccttttgctggagtaagtttttttgtatgcataaaatgaaacagatggccatgaactcagaacatcagggttagttccaggcccacctacgagcccttcctgtccattctgggacctctgtgtactgcactgcaattagaaaatgacaatctgtcgagctgtgtgctcctgtatgcttgcgggcctctggtctctgcgtgccgcctcccttgcctgcttgaggactggacttctgccctttaactgcagtctcgtccaaccatat

SEQ ID NO: 454982 - DNA, 331 bp, Homo Sapiens
tatggttggacgagtcacccttttttactaaactgattacaagactacagttaaagtatatgcaggccacagtttatagattctagtcctgatgttttttccagttattttgaacttagaaactagctttaccttcaaaatatattaagaatctgaccacttctcaccatctctactactgctattctgatctaattcttccagctgttttgttgcagtcgcttcccaaatgatttccttactttcccttttccctctccaccttcattcagtctgttcttaaaatagcagccagaatgatcctataaacttgttaaattttatgccttat

SEQ ID NO: 454983 - DNA, 319 bp, Homo Sapiens
atattggtggacgacagcagccttttgtttttaaatgcttttggggggcgggcaacaggaagcttagagccaaacagagcagcctttaatctaggaccaattttcctccatattgagatagtgtccttttaagtcctctacttgttgcttcctgtattatgaagttttgccagtggctggtaggactacaaatgattactgtcccttgggtgagttccagggattgtttgtgtctgctccttttgagtggttcttttcctggcctcaagtagtgtttgcaacaatgcaccatctcttcatctcgtccacctatatggta

SEQ ID NO: 454984 - DNA, 391 bp, Homo Sapiens
tcgagctcggctaccattttggttggacgaaggctcatgtccacgaagtgcctgagggcgcttcttctaggctgcatttgacgctgagaagaagcaggtcacggtgtctactgaataagcgtagcgtagtcaaccacgtcattgagcaccatggaatggcactgattccgggaagaatcaaggtctcctccccagggatggcgcgatttcccaaggcagaacttgatttaagaggagcgagattatgccattttgcatcatgcagaaaaacacatgccatacagaaaatcatctcttcgggtgtcatggagaagtggtggtgggtccaaccgttcctccccgaagacagcgttgtttccaggagcctcggggatggatttgatactgaggt

SEQ ID NO: 454985 - DNA, 334 bp, Homo Sapiens
atatggttggacgatgatgtgtttctaacctgtgaccatttcacatagccactcaaatatggtaaaggtatggtaaagatgatgaaacagttacttggcatcatttgtaagtaatgagtttttagtgcgctttggaccttgagaccacttcataagctttagattttgagaatttcacagcataaagctcatcgctgatgcagtaatgaaggaaatgttctacaagttaatagatgagtgagaggagagggcattcatattagatttatttacttactgaactcagagccttgggttactacttgacccccactgttatctagtttaagggtcc

SEQ ID NO: 454986 - DNA, 404 bp, Homo Sapiens
catatggttggacgatggttccgcaatcatctggaaaattcagatgttgaaagccccccaaagaaaagaaacttagtcaggaggaagaatcagagcttgagggctatcaatggtccagtggttttgtctatgttgaaaaattgcttaactgttcatttctttccacctccattattctgaaaattattctctcaagaattattttttccagtttgggaacagatacacagactaggtgactggcagaattgagattcacaatatgagtgaaagattctaatgcttgtaaacccagtttagtgtgtttggacacagaggctcttgtgacattgtgatatatttacactgggaagatgagtaaggccatgtacctgatctcatgctcgtccaaccatatggtagcg

SEQ ID NO: 454987 - DNA, 386 bp, Homo Sapiens
caaacagggagtttgtagggaagccgacctcagtggaacctcagagtaggaccgcgtgctgggtagtcaacagcacgtcaagccagcacaaacatgttagctttgtcctggactttgcgatgtggtgccaggactggccccgtgacagccccatctccataaaagaagatgaccatggtaccacacatgtcaccataatggagccccctaattctctccattcctggggcagactaccttttatctaaaaagaggattagtcaaagttgaaaacctcaacattgggtagaagggagataccttgctttcctcgcctgtaaaacatacaagataagacctacctcctaagtgatatacaaccaatatatcgtccaaccactatggtg

SEQ ID NO: 454988 - DNA, 406 bp, Homo Sapiens
tattgggttggacgaagatcaggaacttatttgtgacatcataagaccagtaggcaggtggatatatgcatcttgtattcagaaaaggaatcttggctggagatctaaatttgagattctccagcatgtgactgaatggcaatccaagaagaatgcatagatgatgaagagagccctgggctgagccctaagaccttcttcttgtttaacgtggaaggagccaacaaacaaggtagcagaagtacagtcagaggcaagaccacactggagggtatcacattctagaagttaagtaaagcaagtatttcaaaataggacatggtcaactgtgtcaaatgccactaatcaagaaatgatctcctagtattgccatgggatttggcggctgtagagcttgatgaaactt

SEQ ID NO: 454989 - DNA, 410 bp, Homo Sapiens
tgactagattgagttagatttagagcatctcagagataagcctgcgtgtggtctccttacaggatagcaaaaaatattgcagggcacgcacataggcaggagtgtgaggtttctagaatgtcatggctgctgcaggataaggttgaattgtgggtcctggaaagagttgaaccagggagctcagctgtgactgaggatgaggtgattaggggacagtttctgagtcaggctgcctgaggcaggggagagggcctgagggacagggtcacttcctggagcattaccagtcctgagcatcaccacttaaacatcagagagaaagggagaaaggcgataggtaagtgacacttcccgatatcgcccttgggagaatggcttcttgctatttttctcttctttattcgtccaaa

SEQ ID NO: 454990 - DNA, 362 bp, Homo Sapiens
gggctcggtccattgttgacgaataaatgaatgaagaaatacaggcaagaggagggaacaacttcaagaaatagctttggcaggagtgaagcgtgggaacacagggccactccaacagtaaagccggagacagcgtcacgggggggtgtctgaccacctccatccattccacacaactcttcacaacccagagctctgctacagctcttctccttggtgacgcaacatcttcgcctcctctgtccctgccactgtctggtggtccagcttcagagtctgcacagcccttcctcggacagtgcacgtcccctggcccatagcctttgtgcagaaggctggcattaccatccccacctcgccaa

SEQ ID NO: 454991 - DNA, 494 bp, Homo Sapiens
ctccttatgctcatccctccttcctcatccctccttatgctcatccctccttgtgggtggtgctgggggccagcagggcttcctgggctgcatccgctccttgaggatgaatggggtgacacttgacctggaggaaagagcaaaggtcacatctgggttcatatccggatgctcgggccattgcaccagctatggaacaaactgtgaaaatggaggcaaatgcctagagagataccacggttactcctgcgattgctctaatactgcatatgatggaacatttgcaacaaagatgttggtgcatttttttgaagaagggatgtggctacgatataactttcaggcaccagcaacaaatgccagagactccagcagcagagtagacaacgctcccgaccagcagaactcccacccggacctggcacaggaggagatccgcttcagcttcagcaccaccaaggcgccctgcattctcctctacatcagctccttca

SEQ ID NO: 454992 - DNA, 344 bp, Homo Sapiens
accgcatattgtttggacgactgcagcctaggcagctattagggttatggcttcacagtttctcaaacaatggctccaggagagaaggaagatagtaaataccaagtaaacaatgtacaaaatgtgcagcaaactcaaatgtgcaaggagacccattttaatttgattcccacctctttgcaaactagtgaacacaatgtgccacagatgtgtctgaggtgcaaagcccagcaatgaaataacttgataatccatttctgaagaaaaacagccttacctggagacatggaggagtcataagaacttctctccttgcggttcatcttgaaggcttggatgtcctt

SEQ ID NO: 454993 - DNA, 158 bp, Homo Sapiens
acccaacaccatcaacgctttgcagaaagtaaggggtgagtgaagatgaaaatggagcaagaaagagaacttagcatgatgactgcacaccctcagtgaatggcaggcctaaggggagaactttaggcctgtcccacctcacagtcgtccaaccatat

SEQ ID NO: 454994 - DNA, 148 bp, Homo Sapiens
cctatagttggacgaggaaaaaatggtaaggaaaaagagatgaggaaataagaagcaggagatgaacttattcctgtccaaggaggttagcaaatgtgcctactcattaactatctctgccttctccacagatcacaaatgccccaac

SEQ ID NO: 454995 - DNA, 336 bp, Homo Sapiens
ggtcatatgtttggacgaccagaggtggttctgtttttccatcaccagatggcattccttttttcctgaatgctccatccatgctgttgtgccctcccatggaggtttctgccctctgtgacatctcttcactccctctgccctctggttcctcctctgcgcttgcatggcttctggtattcttgcgtctctttctcactcgtacccagttactacagggagatatttccctctttctttgcgagttaaaatctgattggtataaaggcttagtgataagaaagaaggaagctgcaaatttagaagtggaaatgataccatcatcattttcagttc

SEQ ID NO: 454996 - DNA, 369 bp, Homo Sapiens
aattggttggacgagggcgaagggtcttgctggtcctccagaagggtggctttggcctgctccttgcttatctcgttgcatggctcttcataaagaggctcaccaaggtctccgctgccctcttcactctcctcctcgctgtggtcttcacttggctccacagtttgttccaggctgttctccagaagtgtgggagaactgcttattctactttcctcttcagctgtctcatttaagggctgagaaggaggcggtgtgggagtattagattggatgacactttcagtggaagagacgggggctcttcggttagagtagtatccgctacacgtctcattctgaggcaagagataacttttccacaagttt

SEQ ID NO: 454997 - DNA, 570 bp, Homo Sapiens
tgtgaaagcaacccaatttttattttgtacaattggggatttagaataaatgaattgcaccctgccatagattacttacgtttgatttttaaatgccaggttttcatttattactaatcaactgataccagttttggtaactattacaaaggtggtaggcattattttggtagacaaaatgagttcttgattctgttttcccattttacatgagaagaataaatagttcaggttaaattgttttgtgttaatcatactgtttgtgattcatgtcaaatactgcagcatacacatccatggttaatacacgagcaccatttgttattgactgatgtgaggtggttggtctttgttaaattcaaaaatggaattttggatattgttcttgctacgaaatttatctttgtgtgtagagtatggaattgaaacagtttggattatggattttacctagattggacattgttgcttttgtttggtgtaaatctaaagtggatttcttcagtgagggagagacatggttctggcagattatgttgaataaggaaagttgattggattcatttgggg

SEQ ID NO: 454998 - DNA, 539 bp, Homo Sapiens
  misc_feature (124)..(133): n is a, c, g, or t
cacttctttaaagaattccctaacctgataatagaaggataatcattgaagggaactgttgtgggtattgattcaaagaaagctgtacttacaaaatgtccagtgtaattccatgcttatactnnnnnnnnnngacccaaatgactcaatgaataagtacagaagccagacctaagcattttggtttgggttcctgtttctgtgtgctggaagcttccaatgtgcaataatgggctgttcatttggagaatgcaactcatttttccccttgaaataatgtcaaaatagacataggttccaagcaagacctgaagtctgcattggcctgtatttaagtaagcatattcctaaccaccacagtatttcatgagaaatgtgtctgaaggccaccttagcatgataaggacgcatgtcttcctgcctgaccaactccttcagcaccatgatagagagtgcccttgcttggccctctgggctgctgttaaaggtttctcaattctaaacctcagttggttttcttgactcctgggataagtgct

SEQ ID NO: 454999 - DNA, 580 bp, Homo Sapiens
ctctgagaacaaatcttgcgccgacaccctggtgagacaccaattcccacaagcctgcagcagggcctggggctgagcctgggctgcccattcatctcagcgacttcagcctgagaagtgagccctgcctgggctccacacccagagagtccatacaaattctgctccgggaagagtcggggggtctattcaagtttctctgcagacaaaacttcccacaacaggtaccaatctggcctccttcctcagcaccggtagagaaagcaacagaatgggaagtttcctctgggttggagcctcagagctctgcccctcaaggtgacagggacgtccctgtggcttgttccctccacctccagtactgtatgcttgctacttcaaccccctatttggtgaatttctgcacagacacagatctctgtgcctggaatgggactgtgccctgtgcgggtctctcccttggcgtatatccatctagatatttagtctttgagaatctcaaagcagagctctctgggaagagaactgtccacattgctaaataattaagattccctcacttttttgagggccatgtgtt

SEQ ID NO: 455000 - DNA, 526 bp, Homo Sapiens
tttttgtatgtactccttttttataaaaactgtaaaagctcttctgcttctgcaccctgagggcagatacagagtgtacctgagctggggtgtgtcttggactatcccctaggaatatcagtatattttagttgtttaatgcccagcttctaatgactttgttgccttttgcttgaggggtggaaaggggagaggaagatgtgtctttgcctgtcagctgcatgagaaacagttccctttccattaaacagatagggaagaagcaatgctttatctcttcctaaaagactaaaatatcagggcatggaagatgctctaaagactttcctgtctcttcattatgtaactctgcccatgatattttcagggggaaaaaaagttctatgatgagttcacgtgggaaaagctgcataaatagtttgccctacgagtcatcattaatacaagtactatgttagggattcatgtggctttaataagtgttttctctggaggtgagggtgcccactgctatgacggtccaggt

SEQ ID NO: 455001 - DNA, 639 bp, Homo Sapiens
tgactctagagatcccccctcctaaggtgccgcctgtgttgaagcagcggtgaagcagcgaggaaagagctccctgttcgttgtaagcttttgaccggtgcatgcttgacggggtttgcagttggctcaagccaccacggggtatgataatggctgcatttgaatggcatttcactttgttgtctgggattctgtgaaaaatccgttctgatggaaggaagaatccaccattcttatctttcaacgtcttccttagaagtaaagcatatgcgctgtctggttcatccgctgttccctgatttcctcattgattttactcaggatttaaaatccattcttaacaaagggacttacttagcaaggagcctatacttaaagtaccgtacagtgaagtcatcactaaaccactgaaaagaacactgaaaggacaaaggggcccttgcaaaggcgttcccagctgtgctgtgcttgggggcagcctcccctgccttcacacggaggctttcctcaagacaaatgacgacgaatgaggtagaaaacaaaggcctctttccccttcacttgtaaaggaacactgctaaggagcccaggcgtttgtgtgcggatttgtgctctcacatgtacgtgtgtgtggtgtga

SEQ ID NO: 455002 - DNA, 149 bp, Homo Sapiens
atcttattcagtcgtaaaactctttaaataatttgaatactaggcccttataagagacatgatttgcaataatttcttccattctgtgggttatcttctcttttgttctcccatgttttaacagttttatagttttagtttacattgta

SEQ ID NO: 455003 - DNA, 151 bp, Homo Sapiens
ttgcatttcttcaatccttgccctgtgaaaatgtagaaatgtcttctctgcaaagtgccaccctataatgtgaacccatgttcatttttctacttttagacaagctgggagaaccagcagatcaaacatcagtcattttcacttatggact

SEQ ID NO: 455004 - DNA, 227 bp, Homo Sapiens
atttcagactaaaaggagagagtgagggcggctctttgtcatgtaccccagtgagtactcgcaacagggacagcatcaggtttctttccccctcgctcgcgccaagtccccacgtagcatgacactttcaaatcagctaacctggtgtatgaagcatggccagtcctccacccacctccccagagtgggcaggcggaaggagaagaggggtgttttcactttgggct

SEQ ID NO: 455005 - DNA, 751 bp, Homo Sapiens
ttggttattttcactttgggctagcccaaagtgaaaataaaattatttaatgggttttggagaattagggatcattctgtctttcaatactaagcattattttaaaatagaaatgtgttatatttctaatataccttccctgttaaggtcaaaattttgctaggaaaattatgccaacatccaccaaatttttaataatctgtagaaaattctaaaagtctgtcatttatttttacagcatctgaaaacctaactttaaataaaaattaaacactctgttcatagtcgtggaagattttaccttttagggagaaatctgctttgcgtttttttctacgttgatgctttattctttttagtgttcatcatagccttctttgtacaggcctggtctttaacttttgtagattattctgaatttcattctacctctcttctcttctctcagctgtgcagttctactcactgaggaggaccagacttttgtctttgtttacaatgtttcttttgagttccatacatacatatttccagttcaataaactgtccttaagacatttgaaactcaatgaacactgagggtaacattttatttctacctacctgcatccagaatctgccgtattttctctattttgctcagaggcagcaaattacaattgccttcatgatccaaattgcaacatagcttcttcggtatttttttaatttccaaagtcgtattaacttacttttgcacttagggctgtgg

SEQ ID NO: 455006 - DNA, 441 bp, Homo Sapiens
  misc_feature (403)..(403): n is a, c, g, or t
agcccaaagtgaaaattttaaatgtaaataataactaatttagcatctgagaaagaaaaggagcttttatctgaggaatgcaaacctcctctaaatgatcagtccccagaggcgcgtgggaatgagacagcagtcacagaccacttccctccttgggctaaggaatcctgtcttaaaactgctagctatcccatgagtggctataaattaacctaacaatgccacacacaggacaccgtagcccatagagtgtatagccaatcactaatcaatgtcatctgtgtaaaccaatgaaaattcctgacaaacagctttatatcagcccactccttgtggcctctttttgcctttaaaaacatactggtgacaaaggcagaaataagctcatatccaaggttactgnggtctgagtcttccaggcagctgttttcactttgggct

SEQ ID NO: 455007 - DNA, 454 bp, Homo Sapiens
agcccaaagtgaaaacacttttaaaactataatgtggtatacatatatttaattaaataatcactttcctaaaaacaaaactctaatcttgattgctgcaccagccaaacagaaggaaacactatcgcagaagttctcacatggactaagaaaataagtatacatactcccaattcttactgcaggttctccaactttggtaagaggatagactacaacaagaaaaattttataggaagataaaaaatagagaaaacaggggttcagaaacgacataaataagtagcagagttcgaaccgaatccactatctatttaacttcacatcctagtcaggggtggacttgtgacctgtgcagggtttggtgcttgaagggtcccagaattggtgtaatgctctgctgtcttgaaattcttgtttctcaacaacagcccctgccttttcactttgggct

SEQ ID NO: 455008 - DNA, 570 bp, Homo Sapiens
agcccaaagtgaaaatgaggaacatcaggacagcaggctggatggacccttctgaactaaggaagtggggaagagtttaccctgcaggtagagaatttcatgctcttcccacaatacccttcctcttttccttcttccagttgcgttagcaacttggcactccacagtcctttgctcaccgccccctgccttcccagtgcctacttctgttctcagtctctgtggtctctgattttgagtatttttccagaccctatatagcaaatcccatgtcttcccagatttagcatttcccactgaccttttaggttttggttcctcaattctggctaaatctgatttttctgtaaatttgatcctgtttgctgtatctcttccagaaattcctcaaaatttcttattgattgatggcatccgttcctgttttctggctttttaatgggtttattcttatttttatattccttttgtcattcccttggaacttggagtgacacaagaatcaaacacttgagctcagcccgtcaccattgtggactcagtgtatctcattacttttcactttgggct

SEQ ID NO: 455009 - DNA, 585 bp, Homo Sapiens
agcccaaagtgaaactaatagatttttttctggctattatattgaaaatttaaaaattcatgttttttaaactttcaggagacatgaaaatactcatcatctcactgccccttcccagagatggactcctcaacctcaacagacaggcacattttctttgcttttccctgagttgggtgacatttcaatggagaacactgattgatctttgtgtgatcttgagaaagcaacgtgggttttatttgccccataaaaagtaccaaatgtggaaaatgtacttagcatatgcggatgagcatgtagtcctgcagcaacttggtttttcagtctgagcaactgtatttagctgcttcctgtggttgatcagtagcttcatctgtgaagtcaagaaatccaaccagacccccagccacatcacacatgtgttggaaaaaccttgagtgattaaaagttatttcagggaaaggtggtatgtaaatgaggtaatggaaaaatttcgagtattattagaacatgtagagcagagtttctccacctcagtgctattgacatttggggctggatcattctttttcactttgggct

SEQ ID NO: 455010 - DNA, 443 bp, Homo Sapiens
  misc_feature (199)..(245): n is a, c, g, or t
agcccaaagtgaaaaggcagaaaatttttatttgttttaggatagacaagacctctgtatttgtagtctgaaaagaaagactcaatagcgaaggtgaagatggaagagagaaagataactgatgagagtgaggtactggatactagagaatgcaatgaagaagaaaactgatccatgtggatcctggaagtcatcagannnnnnnnnnnnnnnnnnnnnnnnnnnnnnnnnnnnnnnnnnnnnnnggggagagaacagatggtaaggactttttgaaaaatcagaagctgtgcaaaaatggcaaaacaatggtctagagggacagtgaatgactagaactacaatgattgctcccctcgtccaaggagttgcagagtattcaaccaatgaaaacagaaataatagcattcattacagaaaaagccgtgttttcactttgggct

SEQ ID NO: 455011 - DNA, 268 bp, Homo Sapiens
  misc_feature (79)..(79): n is a, c, g, or t
ctctgttgttcagtataactcatgttggttttattaaatataaaatgctgcctggtcaaggaatctatgtttttcacanataatttcatagacatagtattaggggaaaatgtaaataattatttattttgaaagaaaccatttcatgtaacaccaagattcactttcttctgtattctgcatacctgaaatagtacaggaaacatggtggcccgccaaaaataatgatactatttctttccatttctatatattttcactttgggct

SEQ ID NO: 455012 - DNA, 510 bp, Homo Sapiens
tgaaaaaccgtggcgtatataccatgtgggtattattctatctttcagagggctcttagacacttgatagcagataaactttttacttaaccaggttagtatgatgatgtagttatgcctagtgtgccattaaagcgtaaagaaaggccacttatctagtaagggagttaggaagttttctggagaacttgtagtttgaagtgtatttctttatattatgaatgaagagttcagtccttgtccaatttattttgtgcattgctgctttttacccatatttgggtcactcttcattcattgaaaaggttttgtaccaagatcactgtgttcttctttacctgtacgctatttctgctagtgaccctgacgttattgggtataatcgaactgtcctttcaatttcttaatagtctcacttcttattagattttcttttacttgccttatctacctcctcccatggttatactctacagcttttcacttttcatttttcttttcacttgggct

SEQ ID NO: 455013 - DNA, 599 bp, Homo Sapiens
agaaagaggtagaatattgttgtttcctctaatctctgactggtcttaactctcttagtgctgtttcaggttcgttatagaaacaacaaattgcctctatgcatagaagggatacatatctctaggattttattaaaattaatttccacatacattttggaagaaaaaacatctgcaaaagatttatttcattttatatcactgttaatttggaatagaagataacttcctttctggaaagtgcaactatcatttctcattttatagggagaggtcagcttttttgtattctttactgtattgtagctcatagcaattaccgtcatttgttgaaaggttatgttttgcagacaccatactcacatttcacatatattatgttatataatatataacgtgaagaagaattaccacagggtcagtagatgataaaaataagataggagtaagacaatctttcaaggtagatgctatattctccagtttacataggagagaaactgaggctgagaaccttccccaagctgggattcaaacttaagtctgcccaactctaagactttagtggttttccctaccccagacttttcacttgggct

SEQ ID NO: 455014 - DNA, 421 bp, Homo Sapiens
  misc_feature (150)..(170): n is a, c, g, or t
ctaccatacccagccccaaactctaactttatagtacagtggggaaaatgtctgcttatcttaattatggataaatgggcacttagtctctacaatgttggcatacatgctctccctcaaactgatggcataatgattttatatatatannnnnnnnnnnnnnnnnnnnnatatatataccattaaaaggtgggctaatgtggctttccactacagctcttaccagatttttttattttcagtgtgatttggctggaatattaataacagttggttgacatgtattcacaattgcatgacttctctttggaggctggtaggttgagtattgttctttttatccatcctttcccctcccctaaatgtcagtctttctgcttttaggattatatttgaattttcactttgggctggtaccgag

SEQ ID NO: 455015 - DNA, 539 bp, Homo Sapiens
gtgcatattgtatttttccaaaataacagaccattttaaataatctatttcatcagttaaatatgccaggctggctttttttctgtgtctaatcttcttgctcaattcttcctttcctatagcgacttgaggagattatgaaaagaaccaggagaacagaagctacagataaggtattgacatggccgttttctaactacttttgtatgcttttatctttttcattttcacttgtaacactaatttttaaaagtcctctttttttcttcttcgtagaaaaccagtgatcagagaaacggtgatgtagccaagggagctctcactggaggaacaggtatttctgtcaatgaactcaaaccaatttatatataaaatgtttaaattgactctccaggggtgaagatattcaggaattgatggagggaaaaaagatccagtgcttacagactcacagaagcttaggggtctgtcatcgagtccttccttcctcttatgtaaaactgtctagtgtttctaccagttacttttcactttgggct

SEQ ID NO: 455016 - DNA, 530 bp, Homo Sapiens
  misc_feature (430)..(441): n is a, c, g, or t
cagttgtttaaattttactcaacaactagtttgacccgtttggaatggacatgggtagtgagtgaaaggacctatttctgtcgtataggaaggacatctgaaccagtgagttgtccccccggattgggatggaggggtgtgcctgttgtgtgtattgtgactgtgtgtgctccagagctctagggttttgtcatatcaccctgacacacatggtgcttatgttgactgttgaggatgttgaatatggagggataccgtttatccttaataaatcccccttgttaagttctggggtgatgaaaattaattggccttgtaaaccgtgaaaaccttgggtctccagcccccttagataccttgtttgtctactgagaagtatatatccggtcttgaatgtccaccctgaccttttaccatatggattctaggnnnnnnnnnnnncaacataaagtgtatggaattttaaagcttcacttaatgaaatttgctttgttgaagttctgttttgctttcgaatctgctaacttgca

SEQ ID NO: 455017 - DNA, 470 bp, Homo Sapiens
  misc_feature (424)..(424): n is a, c, g, or t
agggtgcaagagccacatttacaaacaacaaacttgatctttaaaaatgtttttaaaactctctgagtctcagtgacttcatttgtaaatgagagtgattcatctagatgactctaaggtctctttcaggtcccaggggacgtgatctaagttaggagtgggaacatgggagtggctgcttctccttggctaagcccatgcagactattgtgcccaggactggaataaaggtcctttttgctgcatcacccaggcaacactcccagccttactcaggagtggtgaacattttctgctctggacatagaataggtaggttcattcctgggtcttttcactttaggattctctttaggttcaaggatgcagattttcttcaatttgggacacacctggcatcacgttgggtcaaattttgctgccngttttctaggggttttcttcttcagttttcatccctggccttcccc

SEQ ID NO: 455018 - DNA, 613 bp, Homo Sapiens
agcccaaagtgaaacattaaacacaaatctacctttagatcctctgaggtcaaaaatgtagccagtaagagctcgctagtgaccacaccctgatgcaaatcttaccatggaggaaatataattaatcttgctagtagggatgtttaattatagtacacggggcagcttctccacttccctttgcatattttatgatggtcttcatgaataaattaaatcaagctgaaataactgtatgatttattccccaattttcacccctttgtctctgtctcaagaaatctgagggcaatatttacaaaaacttaattttcactaagaggctgatcacaaccatttaattttttgttctttttaaatcagtaccctgttcagccttgagaaataatcctcaactctcagaccaggttatctgggagacactaatttcaactcctggatgcagcaggacttgaggctcgggtctcccagtgttccaggcactgtcctaggcctagccaatcagtgtattcgatacgtaatttaaagatggtcatgaaatcctgcttggtcaattgaaagatatccctgtcttttacactgttgaggaaatggtgctttttcactttgggct

SEQ ID NO: 455019 - DNA, 741 bp, Homo Sapiens
attgaatgtgtgtacattttctcttctagctctgacatggcatttagggttagcagaatgtattaaatagtaattttcaaactacacagtagcttccttccttgtgagaggcaagaaagaagtctgagtggatagtactcactttccaaggcccccacctctagaatggctttatttttatctgttttctatattgggtttcaaaaaagattttatttgaagaaatacttctgctgctacaaagtttgaaagttactattttaattattctgctctctgtaactgaaagaatccctttattttggttattcattaaaatataatagaaggcagtcagattttatcccagagatgtattcctgagtgtcttgatatagtgtattcatgttttatatgtgttgaccactatattgtcattggagggacatagatgtaaatgagtttggcgtgtgtcaaaggggtttaaaggggtgtggattgaatgaatggtacgtgcgaagtatatgctgattatagaaccactcgatctctgcattccaaattgtaaaactgactcaactggagaaattataaccaagaggtttgtggtagaaatgtaataagtatagaaaagccaaaagaaaagagaaactgctttagtttctgtttagagaaagctgctgttaatatttttggatagtagcctttcggcattcagatattttctacttacatatgcatatttttgaaacaaaagtaggc

SEQ ID NO: 455020 - DNA, 436 bp, Homo Sapiens
tgtatatctcattctgcaagtcaccttctcaactctactttgtctcattcagggctagattttggtctacatgcacttcaatcaattcctgtctgcacatgccctggacagagtaggaagtaggcagtgtaaacaaaagatcactgtttcttgtgatcaaacaatgaaagggtttttattcactgctggcctcatctggagagcagcttcatgtgctgctgtccactgcagcccaccaccaggacatgcccaggtcacagttagccaagagcagtgttcctgcacatggagtgacttgagctggacaacctgactgtgaagaacctagaagccacagaaggtaaacaactccagcttcagtattaggggttatggaggggaaagagggaggcatgttggttgcagaatgagacttaacagcagggggtcctctaga

SEQ ID NO: 455021 - DNA, 147 bp, Homo Sapiens
gtacctggaaatatggtacttgcccgccttctggctgcattcaccttatgattattctaatagggattctaaaggtgtagaaatcctattagaaatctgttgccttctgacccacctatttatgggtctgggttctcgatggtgtca

SEQ ID NO: 455022 - DNA, 456 bp, Homo Sapiens
tgaccatcgagaaaataaatcaaaataaattttaatctaagttaaattcaaattaagcatagacattcagcattactgcacagaatagtaaaacttaataaatattgtgagaggtgatatgctctccaatagtaagggttctggagacagcccaacttcattttctacttccctcaattaatagatatgtgagcccaggcaagacagccaataatacctctttgtatcaattccttcatctgtgaaatggggaaagagtacctgccatataattattgcaaggattcagtaagttaaaatctgcctaattgtgcctggcacaacttaagcgtttgtggtttttaattactaattatggtattttttccccccactaaaaggcaatggttttttggagacgcagtctggtcctgtcacccaggcggtagtgcatgggcccgatctcgaggggtgtca

SEQ ID NO: 455023 - DNA, 621 bp, Homo Sapiens
  misc_feature (545)..(554): n is a, c, g, or t
  misc_feature (598)..(598): n is a, c, g, or t
tgacaaccatcgagatttttacagcagaccaagacgctaagttcaaacttggggttcaaaaccgtgctttttatacagctaaagcacaaaaagttttagtgaaaatattcaaatgcggtcgtttctccagagtttttaagtgctatttcaagaagcagcccccaatgtgtcaattgtattattacactcgatttgtattatactcgatttgtctaagacattgttaatgagagagaggcatataaccattaagtgccaggactacccctcatagcacttaacaccatctcccatacatagtaaatactgtgcctgtaaatacctgttgattctaaaattctatcttggttgtgcaattagctttctatgataggggtaaaggtgcatcaatttctccaagtattcttgaaataaaatggagaaaaatgtgtgtgctctcaggttgaaggagtataaatgaacagttgcttcagagtaagtttcatggaagatgtcacctggactcttgggaccacttcacttccttcatatcccttcattctccnnnnnnnnnnctctaaccatttttcatgatgatgccatctctaactgcttcccnattctctgttctcgatggtgtca

SEQ ID NO: 455024 - DNA, 558 bp, Homo Sapiens
acacccatcgagaactagggacatccagagagtaaattatttaaaaataatgtgaaataataatttattccagcttcaagtccaatcttctcttttctgctaaaaataaaaatgaacaaataatttacaaggacataaagaggaaacatgaaaacagaaattaatattgagaaaacacttcccagtaggtattaactaatccttagctgtagcagttagaaaagcacactcctaaaagattcatttcttacaggtacttctgctttttaaatttattccgaacacccaacagaaacaaaaacaaaataatgttgtttttagttccttaagctaacaaaggtttttctcaggttacattttattatgctgtttgtgatcacgggcataaaattacctttcaaaacaagaaaattcaagaacaatccagggaaaaatacaagtttaatgctatagtaaatttagaatccaatctatcgtctctagtgaaagagataccagtgtccttggcatgattacttgagaagctagcagaggttaatgcaaatctcgattgggtgt

SEQ ID NO: 455025 - DNA, 425 bp, Homo Sapiens
  misc_feature (44)..(76): n is a, c, g, or t
tgacaccctcgagacagcctaagcaacacagtgagacccagtgnnnnnnnnnnnnnnnnnnnnnnnnnnnnnnnnngagttttaagaagattatctacctaaaacacagttataattatattaattccttccataaatgatttccatggttcccatctctcgagggtaggatccaaaatagttttcgatgatactagccttcctttcttgctgactcacgtgaggtataatatgctatattcctatatttcttttgtgtatacaccaccatgtagcttatctctgggctttttgttatgttggctccttggtctaaaatgccccagctccacctgccccatcttctacttgctagttactcctattcttgaacttgattcacataagcatccaccagcctaagcaacacagtgagacccagtgtt

SEQ ID NO: 455026 - DNA, 551 bp, Homo Sapiens
gccgtaaccatcgagactatatagttttcccttcatatgcaacagaataagtggcatacctggtaaaactggatccacatgtgtatctaatatggtttcaccctggagatcacagagaatcctcccgtcttcctcaaggaggggaagtagagttggctaagcaaggggaaggttcttttgcaggagaaacatgggaaccagattgagtgctttcaccctgttggagtattgcctcagctgcatcggcttagttttgtcactcaatagagcccatctgttttgcaagcaaacagatgaatttgagactagtacatttacaaccaaaaggtgtgagttatctgtagctgtaacagtatagtcacagggcatgtttaatctcgggacaaaagctctgactcgggtaatttttttgctaggaaactccaaagcgtgttggtagataagaactataagaatgtgagatattgtcattattttctaagcccaagaattaatttcatcaccctttggaaactttaactttctttatattttatctctcgagtgtgtca

SEQ ID NO: 455027 - DNA, 747 bp, Homo Sapiens
tcatgttgctgctccgttttgggaggtcccatgactagcttgttctacctattcttcctggatctctcactatattatactgaggactctatcagtatcaacccatgtggagagaggacagcaccctctgaagctcctcagtctggggattcagcactgcccacagtagtagagtcacagaggctgactcccccctaaggaaactatagagcagtgtgcaaattgcatatgaaggtggcaccactacccctatgtcaggcaggggagcacagtgctttgacttgtttactcaagagaggggatgatggtgctgagctctgctccccagagctttcctggggcccattgtcataataacttgtatgtgggtgatgggccgcctcatctgcgagggctataatatccatggtgctccttggttgcacaatggaggttcccctagccttggcaaggtatccattgccgggtttgaactcatgaccttaacctcattaacatcatcagtcacctgagccaacgcgcagagagggggatgctgggagctctctcagtagctattgtgaccatcatctatatcttcagacttagcccttgttgagtcccaccctgttcccctatccaagccacccgccgggacagatggaggtaggggctcccctacatgccggaaggttctcttcctccaactaacctagtttacttttcctttttttctgcttcccttcccaccaaatctcatgggtgtca

SEQ ID NO: 455028 - DNA, 356 bp, Homo Sapiens
cgagctcggtaacctgacaacccctcgagagagccttcccaactttcttctgtctccgttaatgattgctccacccgtttccgtgcctgtaagtttaacctccacacaacgtagttccaatgtttgtgctgtctgtggtatcatccctgtcttgtgctgtgccctgtggtttctgagtcacactcgggctgaagtctttttccccgtgtgaactcctgtgtgctgacatgttgccccagctgcctatgtctctgtgtacgtgcctaggaaggcctccctttctgattttcttaacttacgcttctcgtaaccagaatgcaaggatctcgaatgggttagggatccttagatcgacc

SEQ ID NO: 455029 - DNA, 682 bp, Homo Sapiens
tgacaccatcgagatgcaaggttccctgccagttcactgactcttgattttctttgatttgccagctctttgactgaattaactccatcagaaaacatacttattagtagttgaagtggaaccatgatatctaactccgataatacatgaagccacagtaaagcttgctcctgcacagaggaggggtatcctgtaaaccgacaactaataaaaccaaacatctcctccattgagaaaggcagaggacagagttcaatgtcaaacattttgcttaatacttccctgaattcttttaactgattatctgggacttctgttctgatggcttccagccattccggcataatacactcccagacagattgattgatcacattataggggatcaggcagaggattcggttgagaccttccttcagctgagtcactgtgctacaggacttatcccagtagccaccaaccctggcaaattccatgggtttaggaagaaggcacatgaccatgacatcgaagcgaacatcacatacggtcttcagccatttggtgacaaactgaggcttcagcttttccccccagacttcccacttcatcatccatcatatacgccgtggagtgaaacccctgaaacaccatggccccccgccgggcccagctttctgtaggcgtgttctcgatggtgtca

SEQ ID NO: 455030 - DNA, 149 bp, Homo Sapiens
acctgacaccccgtcgagataaatgaagcctccaatatcattttaaaaaaagccttttcccataaaatagttgtaaatgtttggaattgccaatctgtaaaataaatttaagaactccggagaccttattctaagtataaatttcgctt

SEQ ID NO: 455031 - DNA, 331 bp, Homo Sapiens
ccaactctggtttctcctgatacttcagtacatgggttccttttttaatgtgaaaagaccagcagagtagatataaacacagatcaagggcaattggctggaggagaccagaatattccaaaaaaataaaatcaatgttttcaaactttaagtagtaaaatcaattaaggaaacaagggccttagctaaagacctttctaaagtaactattctcttgagtagatttgctacattactttttggcaccttccccctaataagaatccctggagaaaactacctcttactttcatcaattgtttattcacaactctctctcgatgggtgttca

SEQ ID NO: 455032 - DNA, 681 bp, Homo Sapiens
  misc_feature (541)..(549): n is a, c, g, or t
tgacacccacgagacccaagtttcagaatttgctgcagccttgctgccaaatcacagtaaaagctgaaaaggcttttgtggttagttacgtgtgatacaagaaatcgatgtgtctgagagaagtaggatttctctttttgagggggaaaaatacagcaaggggaaatgttttattaacaataaatatgcggcttaccatatctgtagggcacagatttggttagtagtattttgaaggcaggataaaggaagatcctaaaatctctgtgctgtgtagcttccattcgagctgcacatgttaaaaacattctaggatccacacagtttaaacaaggtggctggcttaggaaatgcttctccccattccttggcatccccacaaccctattctcctactttctcttatgtatctggactggcttttaaaagatatttagtgaaatttaattttctagggaaactccactttgtccaaagtgtagtattcctcaaggatagctttgctggtcggcaaatctcagttgagtgtatttgtggtttnnnnnnnnntctttctgaatagaaataccaagagtgataaagtttaacattttattttttaaaaagctttacgctgtgtaaaatgtgggttgacttcatgtttctaaactttgtcttttagaatgactctcgatggtgtca

SEQ ID NO: 455033 - DNA, 382 bp, Homo Sapiens
gcatacttggttttccgtaccaccagtactatgagctggttatccacttcatgtggcatcataagcatccccaagtgaccatacatatagattgcccggccgtgaaaccgtttagatgcccaccatagctttcttttcaacatctttctaagattaccctgtactatgttcttttgttcccagtttgtacttgcctccgagttctcacatatggaaaggatacacactttgttgaaaccagaactttatgttatcccagtttttggatagccctgggctcccattatctcagagctctgagtcctctactccataccccttgagatttatgtgttctgaggcttttgtcttctagctacttacttcattctcgatgggttca

SEQ ID NO: 455034 - DNA, 243 bp, Homo Sapiens
taacttttccacccgggagtagagaattgttgaagaacaatgttacttcccttggtctagctcagaatcctgaaaacccgagtagaaagctagacaccttagtaacctcagagggtctcttagagaaattggaatttaccaaaaatacccttcaggcagcaacaccggtacaccagtgtaacctcgaggccacagacccgagcgaaataatctccgtgttgggtaatagctttcgtcgagaaa

SEQ ID NO: 455035 - DNA, 286 bp, Homo Sapiens
cttttttccaagtttggtccgtaataccaattttgcccaaaaaatttttttcttcctaaaatgtgtaacttttgccgaggttaccgtatgctcaagtaaagaatgtggtaaaatacactttcctgtgagaagcccgtatttgaaccaatacatgtcttactttctgaaaatttcttgcttagttgataatttcctttaaatatctgcttgttaggataaataagaagaagattaaacatatttatctaacacccagcatgatgtggtggtctgtctcgatgggtca

SEQ ID NO: 455036 - DNA, 486 bp, Homo Sapiens
tgacccatcgagacttaaatgccaaatggtatgtattttatatattgggtgttttttaaaaaaccgtttttgagttacaattcacatgccataaaattcaccccttcaaagcatacagttcaatggtttttattatattcatagagctacaatcaattttaaaccatgttcattacacaaaaaaagaaaccctggacgccctccagccttgggcaactatgattctactttctgtgtttacggatttgtctgtctggacattttcctatcaatggcttcacttggaatctgaggattgacagagggactggctggcagacaatgtttcttttcacaagtagaagaggacctgttttggtcaattacttgccattcccaagggctactcgattcgagcaagtttctaagacgacagtattaagtttttcactaattcgatacaggacacgaggacaggctggtcagttgacctgtgttttgatttca

SEQ ID NO: 455037 - DNA, 208 bp, Homo Sapiens
tgtgtaagttgatgggaccaaattaggaaacccagactcagaatttaagtgtttgtatagatgcttggaagcgaaatttatacttagaattaatgtctcctgagtcttaaattattttaccagattgccaatttcaaacatttacaactattttatgggaaaatgctttttttaaatgatatttgaggcttcatttatctcgatgtgt

SEQ ID NO: 455038 - DNA, 156 bp, Homo Sapiens
ctaaccatacaggtgtaatgtccattatctaaaaaccccagtccgctttgatttcggatcatgtgcttcccattctctactgtgcagatgtcaggtaaacaggtcatcgcatgcactgcttcattgtttgttccagtcttcttttctcgtgggtgt

SEQ ID NO: 455039 - DNA, 486 bp, Homo Sapiens
  misc_feature (372)..(431): n is a, c, g, or t
ttgggaggggataaacacatccaaatggtagcagaccatgatcttactggttagaaccaacacccacactcggaacttacctttcctcaaacggtttatggcttggcagaagaacccaattgggagtttccctgtgaggataacaaatgcctatagtctaaagagtgggtataggatggctactgggcttagttctatatgattactatttgggggcctgttggcccagtgccctctattgggcttactggtcttggactccatagccttcagagacccattaaacaaactcattccaaaatccttccaagctcccatattctggggatatgtaactttctttcttttttttgggagacaggttctcactcnnnnnnnnnnnnnnnnnnnnnnnnnnnnnnnnnnnnnnnnnnnnnnnnnnnnnnnnnnnngttcaagcaattcttatgcctcagcctcctgaatagctgggaatacagttgtgcc

SEQ ID NO: 455040 - DNA, 646 bp, Homo Sapiens
ctagaggatccccagactagccgtacacactgcctctgctaggcccacagcctggcttgcaggacttgtccagaagtcccctgccctgaggataggcagaactagaaagaaaggggccttctctgtgtgggccacaaggcccaggggcaaaagcagctgggggaggtgagaaccagtgagagcacagcaccagatagagaaaggcctgcctctggaaggggcacgctcatggactttctctcttgctaaaaaacatttggaacaaaaggaaccgtaacatactcgggtttcattatttacagtcgacttgtccttatgacgccctagcacgtttccgacagttactgaaacactgacacaggagctctgggggccgagctgcggctcccgcctgtgctcaccttgtgggggaaggtcgaagcggacttgcccatcatattgcatggtgctgtgcaacttgctgtcacaggcctcgcacaggttgaggggcccccggcggagcagatgatgagcagtcggcgtggtgacataccttggggtggggaaaaaagcctacaggaggtccaggagatccaccaaatccctcgacccgggaccagcgctgcagggctttatattgaactgccctccatctctcgaggggtgc

SEQ ID NO: 455041 - DNA, 487 bp, Homo Sapiens
accctactttttcaccgggggtcattactcatgggtattaggtgcccccaggagagaatggggaaatgatgcctcctgcctctcccagcatctgaggagggttaatgtaacagagtgttgaaagtcctttgcagacagaagcactatattgtgatagggccttaatattgtcttctcagactgtcaagtcattcctgtcccaaggatctgggacagcttttatgcatatttcattttttctaaaacacttacctttcatataccttcagttttattcctgcatcttagaaagataactccagaatgactaaagaaaacatggtccaccaaggtggcatgtcagaaatgaccattcctagagttcccctgagaggctgattttcaaagaagttctccccaaagagcaacagaattgagatctatatcttaagggagatgtgaagtcctcttggcataatggccattatgccctgtggaaagtaggtat

SEQ ID NO: 455042 - DNA, 203 bp, Homo Sapiens
tccactacacacccaaaaggagaaactacggctttatcatttaagcaggttaatggtgttacagcacagaagtagtcagccaggttaaaatctcagcttggcagtggataaatcatgattacggtaaaagtgctgagatccttctttttataacctatttcaggtttctttttattctagcactctcgatgggttgtcagggt

SEQ ID NO: 455043 - DNA, 477 bp, Homo Sapiens
cacttttcacagtggtctcctgttgtgttcggctggcagtgcacacagtatcctggagccggtccaaacactcgttggaattgccattacagtcgcagggcacacattctcccgacagggtggtgaaagaatccagcattgcttttcgagtcattcagtggaaagcctctcgtgctctgtggagaaggcctttcacagttaggtccagcataattttcgttacaaatgcaccgaacagctccatttttcctatagcaggattctgcgaaattggccaagtggggcaggggaacaggggcacggctgtcagacttggggtgctcccttgatggcagtttccgatataaccatccagacacttttcacagtgctctcctgttgtgttccgctggcagtgcacacagtatcctgagccgtccaaacactcgttggaattgccattacagtcgcagggcacacattctctcgatggtgtca

SEQ ID NO: 455044 - DNA, 534 bp, Homo Sapiens
tgacacccacgagatggtgaccccagtccggcaagttgcgtcagcctccatcaagttggagaaccctctgccctactcggtgaccttctccacagaatgccagatgcccgacatcgccctgccctcccagtttgtggtgcctgccaactccgagcccacctgacgagttcccctcactccagctccagctgacttccttcttcaggctggtcatttgtgttggtttcaatgtctagttatcctgaaaaatgtggccatggatctcctggtacatgtatcctcccaatgcgcataggcatacgttgttccacagcatatgcctaggagtagaaccacaggtcatagagtgtgcatagctttcactttagtaggtaattgccaattagtgatgagagttcctaatgttcaacgtcttcaccaacccttggtactgtcggtttttttaaggttactaatctgataaactgctaactcctcgtggacttaatttccctttttacaaacagattgatttcagttgggtcatattatatc

SEQ ID NO: 455045 - DNA, 571 bp, Homo Sapiens
gccggctggatcacttgagctcaggattttgagaggagagcaagctatattcttttaaaagtgtgtacagatgtttttgctattttgtgttatttcattttgtatttcattcatccattttgtggacgtgtagataaaacgcggtggtccaaaagcatgacagatgtcccctttgcgtttctccttattgttcgcatggacaataactgacagagtagtcctagttgctgttgttttgatctagtcttggggctggggttgtatattattctttcaagtgtgtataaatattgtgccacctttttatacttcattttatacttgtttccttgtatggatgcatacatacttaatgaaaattgaggttcagagtatgacaaatctcttttcccttttccttactgcctatttaggcaatagctaatagagtagtttgttttgttttggggtgtgggggagagtggagtatgtacttaatgtatataaataaacttgctactacattgtattactaatttggttcacactgtgtccttctcatggatgtgaaagtaccaatgaaatgtggaga

SEQ ID NO: 455046 - DNA, 551 bp, Homo Sapiens
gcgacttttgaagcattttgcttaaaatattccatcagtgatctggagtacttcatagcatggtccttctttagcttaaacattctcaaatagaggagtgataaacatcggtagcatagtactgctagctttttgtccccatccgaagccaagggacttgcaaagttcttcagcctcattgcatacctgaggagctccacagtctcagagtacatggtgtatggggactttgcttccagagggtcgcgttccatggcattgccacattcagtgaaggagagggcggcatcagcataattcacagctttgccaaatttctcgaacagtgcatcagctttgtgcttcagcttcttagcttcttgcatgtaataatcagcattgtgaaccgagtcatcaaaagtgagcttgggtctccggacattagtgctgctgctggatagaaggggcagagccgcccaggacgtcatctccaggtgactgctatccatgaggccagtagtgatggtagaggtgatggtggaaatggtagtggtagtctcgaatgggtgtca

SEQ ID NO: 455047 - DNA, 571 bp, Homo Sapiens
tagacactcacgagactaatttaatatttgctcttgtgatttttaaaggctaaagcagtagctgcagaatcgaatgcaaccttctttaatataagtgctgcaagtttaacttcaaaatacgtgagtgctctgtttccaatattgtcgtattttaagttactgtctaaatgttactgtgttaactgtaaatggtaatatttcatgaaaatatttttctaggagcttatctattgtatctattatttacatatgatgaatatctatcttcagagtagaaagttatgtacatttgtgttgtcaaatactgtattagtttactggggccatgtaataaaataccgtaaactggctggcttgaacatcagcaatttattgtctcacagttgtggaaggtagaagtctaagatcagtcaaaatgttggcagggttgcttcctcctgagggctgtgagggaaaatgtatgttgtgtgcctctctcctggcttctggtggcttgctggcaatcttttgtattccttggcttgtagatgcatccctcctatctctgtctttatctttatgtgacattctc

SEQ ID NO: 455048 - DNA, 450 bp, Homo Sapiens
  misc_feature (411)..(411): n is a, c, g, or t
  misc_feature (432)..(432): n is a, c, g, or t
ctggctaaagcagtagctgcagaatcgaatgcaaccttctttaatataagtgctgcaagtttaacttcaaaatacgtgggagaaggagagaaattggtgagggctctttttgctgtggctccgagaacttcaaccttcctataatttttatagatgaagttgatagccttttgtgtgaaagaagagaaggggagcacgatgctagtagacgcctaaaaactgaatttcctaatagaatttgatggtgtacagtctgctggagatgacagagtacttgtaatgggtgcaactaataggccacaagagcttgatgaggctgttctcaggcgtttcatcaaacgggtatatgtgtctttaccaaatgaggagacaagactacttttgcttaaaaatctgttatgtaaacaaggnagtccattgaccccaaaaagnactagcacaacttgctag

SEQ ID NO: 455049 - DNA, 566 bp, Homo Sapiens
taccacagtctgtacttgggcatactgtaccctctgcaaaagttacacattttaggaagaacgtaatttttttggcaaaatttgtatgtactgaccaaactttgagaaaaatgttattctatgcttgtagaaaagttattttagtggaaggtgttgataattaagtggaagtagttgtatgctttgagaagcataccttttttctttcatcaatggaactttaaaaagtttctcactcacccacctgtttcctaaacagatcagtgcattgttgatgacatcacttacaatgtgaacgacacattccacaagcgtcatgaagaggggcacatgctgaactgtacatgcttcggtcagggtcggggcaggtggaagtgtgatcccgtcggtgagtagccctatttccctagatgagtttgcacagggggaatggttagcaagtttcagataagaaaagctatgtgaaatcacatgactgaagttggctccagactttgatcagttgcttgcaaagaactttgcaaagtcttctctctaatactggaccacaatatctcgaggtgtca

SEQ ID NO: 455050 - DNA, 634 bp, Homo Sapiens
agtctctgaatcctggcattaggttcgacgggattacacactgtccacctgccccgaccctgatcgaagcatgtacagttcagcatgtgcccctcttcatgacgcttgtggaatgtgtcgttcacattgtaagtgatgtcatcaacaatgcactgatctcgaagctgcgagtaggcaatgcatgtccattccccacgaccattcccaacacacgtgcacctcatcatgtgacccatgtcatgctgcttatcccactgatctccaatgcggtacatgaccccttcattggttgtgcagatttcctcgtgggcagccatggggcagaacccaaacttctggtcggcatcatagttctgtgtggtcccacaccacttcatgttgtctcttctgccctcagaagtgcaatcagtgtaattgtggttgttgtataggaaggggaagtggcacaaggcaccattggaatttcctcctcgagtctgaaccaaaacagtgtggtctgtgcagaaagagtatttctggtcctgctcataattcgaagttgtgctgcaccaaagatgtccgtcctgtcgcccttctgtggtgcaggagtagaacgtcctgccattccaagttgcgtgtgccaagttgcgtgtga

SEQ ID NO: 455051 - DNA, 1087 bp, Homo Sapiens
aacaaccccggacaaacatccagtggagcagaacctctcctgcctcgggagttggtttgtacttgttatggaggaagccgaggttttaactgcgagagtaaacctgaagctgaagagacttgctttgacaagtacactgggaacacttaccgagtgggtgacacttatgagcgtcctaaagactccatgatctgggactgtacctgcatcggggttgggcgagggagaataagctgtacatcgcaaaccgctgcactgaagggggtcagtcctacaagattggtgacacctggaggagaccacatgagactggtggttacatgttagagtgtgtgtgtcttggtaatggaaacaggagaatggacctgcgaagcccatagctgagaagtgttttgatcatgctgctgggacttcctatgtggtcggagaaacgtgggagaagccctaccaaggctggatgatggtagattgtacttgcctgggagaaggcagcggacgcatcacttgcacttctagaaatagatgcaacgatcaggacacaaggacatcctatagaattggagacacctggagcaagaaggataatcgaggaaacctgctccagtgcatctgcacaggcaacggccgaggagagtggaagtgtgagaggcacacctctgtgcagaccacatcgagcggatctggccccttcaccgatgttcgtgcagctgtttaccaaccgcagcctcacccccagcctcctccctatggccactgtgtcacagacagtggtgtggtctactctgtggggatgcagtggctgaagacacaaggaaataagcaaatgctttgcacgtgcctgggcaacggagtcagctgccaagagacagctgtaacccagacttacggtggcaactcaaatggagagccatgtgtcttaccattcacctacaatggcaggacgttctactcctgcaccacagaagggcgacaggacggacatctttggtgcagcacaacttcgaattatgaggcggagcagaaatactctttctgcgcagaccacactgttttggttcagaactcgaggaggaaattcaatggtgct

SEQ ID NO: 455052 - DNA, 441 bp, Homo Sapiens
aagtaatccatgccctgtgcagtctgtcgtgcaatatctataagtttgatcatctcaaatttggtctcaatgatatggagatggtgatacaagctggagccctcacaccactgggtaacaatagccagttgtggctttgtggaatagcccatgaagagtaggatattcacatgtcgtgttttcctgaatactcctacttcatttttgaaggcttgtaactgctgaggtgtaggtgctgtcacattccacattttcactgccacatcaccatgccactttcccttgtagactgttcccaatgatccagatcccattctttgtccccctgtaatctgcccatcaggaatctccccatcatcactcgagtcccgtctacccagtgttttcattcgattcctgtcttctgaggatgaagatgacttcctttctcatgggtggtca

SEQ ID NO: 455053 - DNA, 389 bp, Homo Sapiens
ggatcgagctcggtacctgcgaacgtgttatccttctgttggtcacacattcctctcatggagagtaagcccttgccacatcatttattatactcccatggaggacaaagcacctggtccctgttgttgatgtttgaataaggtaactgtccagtcatcaattcatacagaacaattccaaatgcatatacatctgactgaaagctgtatggatttttatcttgcattctgatgacttctggtgccatccacaaaatggatccagacaactgttcaaactgatgggacccactccatcgagatttcactgtagccagaccaaaatcacctatttttactgtgaggtcttcatgaagaaatatattattactcttgaggtctctgtggat

SEQ ID NO: 455054 - DNA, 440 bp, Homo Sapiens
cggtaacctgacaaccatcgagaataagttttcttgtttgtagagataaccacccaataaatattactaacccaaaacatactctcgggggtcagctgtcttggtgttgaaacagtgctgagaattaactgtgctgacaggtcctatctctcattggcacttttaaagctgacatcctgttacatggataccaaagatggtaattttaaaggaaattttgggggcagtgatgtgaatagtctttaataagagctggcatggtattgcctgttgtcaaagatgacccaagggtaagagtttattagtgcattttctcctaaactgaaagtgacagggcatgcttaaggcttttttgttgctgtttgttacaaatgaaaacttcattgcagaattttcatgctgaagagtattgatctatgttttcccacagccagaagaat

SEQ ID NO: 455055 - DNA, 284 bp, Homo Sapiens
ccatttttttcgctccctttgtttctcctctaatattctactacttcctttactcttgatatatttaacataacgctgatatactagaaaaattcaaatgccatgctgcatgctggaaaatgtgtgtgattagctatagtcactcaattataccccttctgatatttttacatacctcactatgaagtacttcctgtgtgtgtatgtgtttcttggcagttatagcatgtgacagtgtaaaatcactggtctgacaaatgactgtatatttctcgatggtgtca

SEQ ID NO: 455056 - DNA, 596 bp, Homo Sapiens
ccctgccacatgtaggctgatatctgggtacagtagtgtaggctggtagtttccaagcctatcagactcaactcctgtttttagaacactttgtgatacccctttactatgcagaaataaaattcatgggtaacatagttaatgtaggctgccgacacacagaattctgaaatggaaggcagagtagtatcctaactgtaacatcaggggaaagtgataggaaagaaacagaataaagtcatacgtttaggtgtgtcagtgcttctggactgactcgtgaggacagcacagcgggatccgtactggcctgtgtgggcaagggctgagcacagggctgggtccaggcctctcagctggccttgccgtcagcaacatggcttcctgagaggctcagcagctccccacccagttccaagcagaagagtgtgcccttgcctcagcttacactattgtagtcccagagaattcagtgtgcattacaactgtgcctgtctgttttgtggctatttataaaacagaattgcttctaatctcatatcattgtaagtagtggtttttgcctacacaagtgtgtagcgggcattcagagtctcgat

SEQ ID NO: 455057 - DNA, 622 bp, Homo Sapiens
caccgtctccaaaccccctcattcatcttgctctactacttgctatctttatttgatacagattttgaaaatgctactaaaatacaagtaggatattgggaaaatgtagtgataatgcaagcacataaacagcaaaaagaaaagaaactgtaaagagatacacacacaccctctcttcagttatttgattctctaatggggaaatgctttcttgtattgaacaattttaaaatttccctccatcctgtacttaagtcttccactgatctggaaaaactctgggaactcttttgttacctcatgtgaaattgcttgctctaggtttctattatataaggtattctgtttcaaagataagaatggtatcatgtcataagaagaggcaagcatttctagacattgaaaggaattttgatcacaagtaaatttctcttttttcaaagctaccatgtacacaacagctactcaatctatgatacttgatttgattttgccccatttacagttacaacaacgtcaggcatataaaataaaatcataatatttactgcagtatttattacaacaatctcattatactttggccacatggagaggattgggttgaacatagcctggtttt

SEQ ID NO: 455058 - DNA, 400 bp, Homo Sapiens
cccagaaaagggggaaaaaatcaatttgggttttaaacagagccaccaagtagcaccgatcagtgttgataattagcctcactatcataagccatgaagtcctgtttttatttatttatttgggggacagagaatcttcctgcctcttgagtaagtgtggcctgttaagtctgaattagctgtcatcacagaagaattaatgtcggagtgcagactttctagtggggaagggaagaactaaacgagacagatcttagccaagccttgagtgataaatgaggaccaagtggaccattcatctcctgcgaggagagtggacagaggcactaaggcagttttgcggaagacgtgtcagcaaatgtgatcattttgtaccttttctgggagtgaggtccgagca

SEQ ID NO: 455059 - DNA, 495 bp, Homo Sapiens
ggatcccctgaaacccatcgagacacagtgagaaataagggtctaaccaattggtctggggcacccccgaccccggccaattgacaccaaaattgattttcaccaatactatcaatagaagtgactaataaatgtggcatcatgtcctgcctgtttatcccatgacaattagtatagtcgagcgtaacattggcttccgttcccttatagtagcaacatgtaggagtttcatttaaagtgaggataattttgaccttacagagtttctccctacccctatctaccattgccacttgtggattgtcattttgccatgactttcttttaaaaaatatcaataagctctatacttcagtaatgtaagtttgaatttcatcctggctgcataagtcactttccattttgacaaagtctagaaatatttttctccatctccttgaatatgggtaatggatacctattgtggggcccactctcaatctcgatgggtttcac

SEQ ID NO: 455060 - DNA, 448 bp, Homo Sapiens
aatgggacagctgaagcttggctggtccttactgtaacagagaacatggagagaccagcctgcaagggaatgtgggacaactcctgtccagaccaatgcatggttttagggatacgactaaaatgaagacaaattctagcttttgagatcagtgatatgatggggaagactttaaagggaatggaggatgagactgaaagaaatgaaagcttgttagtgcaaaggcaaaagatgtatttgaaatatcctccacacctgtaaaaatttcccagcttatccctaagaaatggttctcaacctttagtggtgctttagattcacttggatgtgcttttaaaccctgcccccagagtctgtgattcattacgtctgggatggggcctgagattgtgtttttctaccaagttcccagattactgtggcactgccctgtggaaaggggtaccga

SEQ ID NO: 455061 - DNA, 635 bp, Homo Sapiens
gatatgtgatggaagcatgagtttgagataatataagattgaaatgagatacgtgtatgattagcaaatagcaggtgttagtaaatgggaattctcctcccatgtgtcttcaagtctatatcacccttagagttacctaaattggattatacttggtttgatactatgaggtattaggaactaacctcactttaaacaatcgggtggctaagtttttatattctgtaaattttgaggaatgtctgaagttttagacatgggctgattttaggagagagattgttgtactgagtgaagcttaaaactcagattttggttagcgtaaatagattttacatcgtggattttaatctaacatttcatgtatacattttggtgtgttgaaatagttgacatatttgtaaattttaatgtctcattatatttcactacattgatgtttcatgatttgtggtgtatggtcttgagaaagtagcctttagagtagatacaatattgaatttgacttctaaaaaatcttataagaagttttcaaaatgtaccccagagtatactggtataataaatccttatgaaatcatgcacaccagtctatgacagtcatcaatcatagccactcttgtttcccctgtgaa

SEQ ID NO: 455062 - DNA, 597 bp, Homo Sapiens
aatgggcagattattcagctcctttttgaatagaatgtgaagattacttgagtatcaatttatcaagaatttatttttcagaactggatatgtattttatctgtataggtatgccataatttatttaatcattctcatagccatttaggttgattgctttctttgccttagcagcaagtaattttcacctaagtcattgcacacattcacacgtaggaatatgcatgttggctaagttactaaaaattagtgttgttgagctacagtctgtgttgtaattttgataagcattgccaaattgctcttcatagtttttatatcaattcagctctcattggcagtgtatatacgtaagaatgagaatttcaccacccctggccagcacaagtactgtcaagttttatcttggtcagactgataggcaaaaatggaatattgcagttttgatttaatttttctcatatgtattaggtattgaacatctttctgtttgtatttcctactttaagaactttgttcatattcttcacccatttttcttagtggctgaaaactgcacagatcttgtttcctttcatttcttcggagcccggtgga

SEQ ID NO: 455063 - DNA, 455 bp, Homo Sapiens
  misc_feature (325)..(363): n is a, c, g, or t
tggttttggtgcagtaggctggctgcagttggcactgcggtgaggtcctggggaatctaccatttgatgcatgtgctaatgcactctagaactccagtactggctttgaaaattacaaggagtgtctagaaaaggttaatctgcgcacatacacatttgcagttgtttgtgtttacaatggggttattatacagactttaagtgagcaaagcgtgtctgcgaaagcaactagaatacggagcacagaactaacaatttttaatttatggctggatgaaatcagattagattgtatgtacagccttcaaaagcttatttgatttcnnnnnnnnnnnnnnnnnnnnnnnnnnnnnnnnnnnnnnngttgtttagagaaaaatttggataatgcaacaccacagtttatacaatgatatttctctggagaagctttcaaattaatcagtcctatgcct

SEQ ID NO: 455064 - DNA, 572 bp, Homo Sapiens
gccgctcccgatttccacaggatgtggttttggtgaagtagtggggctgcagttggcactgcggtgaggtcctggggaatctaccatttgatgcatgtgctaatgcactctagaactccagtactggctttgaaaattacaaggagtgtctagaaaaggttaatctgcgcacatacacatttgcagttgtttgtgtttacaatggggttattatacagactttaagtgagcaaagcgtgtctgcgaaagcaactagaatacggagcacagaactaacaatttttaatttatggctggataaaatcagattagattgtatgtacagccttcaaaagcttatttgatttcttggtcaggtgtggtggctcatgcctgtaatcccagccagttgtttagagaaaaatttggataatgcaacaccacagtttatacaatgatatttctctggagaagctttcaaattaatcagtcctatgcctgcattttatagatagggaaatggagctctccctcctgggtggacacatgtaatgtacatcaggtcatgcccctgtggaaagtaggaccggctc

SEQ ID NO: 455065 - DNA, 466 bp, Homo Sapiens
ttttccacagggcgttgtgtatttagactgtgatattctgtgcactgctttgcttgaagtgagtgatggctgcgactaagaaggcagcaagtggggagtgggagtttggggaggtggaaaagggtttctgtgagacaatattggtttgtctggtctttgggcctgggctacacacatgccctttgacacttatggttaaagtgtttactttccgaatggtgcccagagctatgttcagtgtgtcctgagtcactgttgaatttttaaaatttggtagtctctgtgctgtccagaatttcttagatgtgttttgaatactgagggctctcagtatcaggtggcatccacgctggtcattgatgttgacagggatgaaatctcacttaaaaccctctaatttcctagttcaaggactcttccttattcctcttctctctgtggagtaggggatccttagagtcaccca

SEQ ID NO: 455066 - DNA, 552 bp, Homo Sapiens
agctaaaactcaaaactttattctgtcatcctttatatacttttttattgatgatcatgagccttattaattggattcgtcacctttccctgtggccaaaactttgaaagtagaattttgagttttattctttactatatcattttactctaaaatatgttcaaatagatttttccacactgtgtagtactgtactgtgtaaagaacgtttgtaactaggtcaacatacactgtttctaggcaccactaaggaaataactgtgttatacccataatagacaattaccagagtaacaggattaaaatgactcattaggcctttgattggggtgctctgtgctacaggtagtgccaacatcacgagggctactgaagactcacgttgcgaaagtttccttgagaggtcagaagtcactctttcaaaatacgaagactctttcaaaaaacagatgagtgagtgcattggatcttgagaaaatggaatatggcccttctttctctctgatgaatgaacatgcagtttgagtagtctgcatcctgcctgtgtaaata

SEQ ID NO: 455067 - DNA, 696 bp, Homo Sapiens
tactttccacagggagggtctttgtgccaccagcacacaggatttcctgacagcattaaagcttgtctgctctggagttgctgagacgcgagcaggattttattcttaacgttactggttttcttagcagatctttgaataacctttttttgttactcattttcaacatttatgcttagtgttatatctttattagcctgatttacaagattagaatttacaactctcaatatgagattatttttggcatatttcttatttgaaggagttattcactgtcatacacattgctccaggtaaagctggagctgctttcttggccctgtttaatgttgagctggcacaggtggacggtcgtaaagactagcacagtgttgacatcacagtctgtgctgaagcaggaatcacggagccatgctgactctggggtttcagataactgactagctgtgtgatcttgggcagttacttaacctgtctgtgcctcattttccttaactgtgaaatgagtgtcagactttctttagggttgttgtgaagattaattaagcaagctaaacatggaaggtgcttaaaggagtgccaggcacgttctgagtgctaagcaccggtttgttttctgtgtcctccttggctgtactctgccacaccctgtgaaaagtagcctgtggaaaagtaggtaccgagctcgatccg

SEQ ID NO: 455068 - DNA, 462 bp, Homo Sapiens
actaacaaattagtttaaacataaaatttcagaaaactattttcatttttattactgtactcaagcagtaaatcttagctgacaaataccagtttggattcagaaatcatgacatcaaataacatttgtaatgtatgtaacacatacaccataaatgatacagagatacagtaagatgattccttgatagaaaactatttcatttttcatttaggtttttatttgacattacttttaaagtaaatatgtttataccaagattaactcagtagaaggtaccaaaatggtaaaactatgcctgttgtcctcaatagccatcctatttagttttctagtgttccaatcttttaaaatactttatgttgataagacacatacacttttgaatgtatgattcagaacaattatagcctaacattttgaatatggtttctccttcaataaatacctgtggtaccagta

SEQ ID NO: 455069 - DNA, 596 bp, Homo Sapiens
tactttcacaggtcactggcttgcaagctctgggtgcagttccttttagtcgcactgttgaagtgtgttaactaaatctgagcagacgtgaatctggtcacgtgactacctgggataactgtccgtttattattcaaacacatcatttcctgagattcttagcttgatgtttaaaatcatctctcttgctaggaaattaataaacatactgcatctgacaccaattatgtccacacctacaatcctgatgtcaaacaaacagccccacaacatctagacactagcgaacgttgtatactaacgacacaggtgcgaaacgaggcaactcactacagcttattgacttacactttgacagacatacaaacatatactgtgggaacacatcggcaattgacggaacaattgctgtacttgtgaatcacattcattccacttacgagctccatgatctccaagtagtaccagaatcgaaaagaagttatagcatttaaaggtttaatttaaatttaggtccttcaacagcaagttcaatgatttatcatactgatagaattctaattctcttacaatgttgacatctcacacaccatttc

SEQ ID NO: 455070 - DNA, 830 bp, Homo Sapiens
  misc_feature (75)..(107): n is a, c, g, or t
aggaggaaatcaccatactggtgggacgataagaaaagtgctatataaacactcagagagaaatacagagtgtannnnnnnnnnnnnnnnnnnnnnnnnnnnnnnnnctcataatttatgtattgaagagatgtgagatattatcaattcaaatttcctcttgcactagaggctgggtgacattaagctcaccagctagttagtaaccaagccaggccttgaaactggtctgttcattttaaataataattagcattaattgaaattctcatgtgcagtctggttttctaattttcccaacaaccctaggaggcagttactgtcgttactgcattttgcagacaaggaaactgaggcgtagggacttgtctcaggtcatatagccagtaagaggtgaagctagtgcagtatgtttagtcctcatcctacactaccaattattttccaggcactcaaatttgtaaatgcccagagtatttgggctgttctaataagctgcagttttcagaggcattgtgtaagaatctgaagatttcttatttatctcctattgttgctctatgtaaatataatacaggacatcatcctaaaaagtatctttctttaaaggtgaacaaagggaagataaatacgaaaatgaggaagaaagaaaatcaggagaggataaaatcacaaaaggttagggaaggagaaacttttaaggagaatggagtgtttcatagtgtcaagtaccacagaaaggtcaagtaagatcagagctgaaaatttaccgttggatttggcaattaggaggtgactggtgaccttgacaactgcaatttcagtgtagc

SEQ ID NO: 455071 - DNA, 468 bp, Homo Sapiens
  misc_feature (128)..(243): n is a, c, g, or t
tggattaacccggagtttaatttttctagcagtgttcatgggtgggaacaaagcagtaaaacaaacacatacaaaaataaatggaggtcaaggacctataatactaaatgagctagcaccatttcatnnnnnnnnnnnnnnnnnnnnnnnnnnnnnnnnnnnnnnnnnnnnnnnnnnnnnnnnnnnnnnnnnnnnnnnnnnnnnnnnnnnnnnnnnnnnnnnnnnnnnnnnnnnnnnnnnnnntataaaaccaaataaaagtaagtaaagtgcttagcagagtgtgtaaaacacaaatttgtgctcggtaagtgttagttattatcatcttattgtttcctgaaaggcctccagctatgcttgttaagaaaggcttttattaagtgtatttaaagatactaatgattaaagtaatgagagtcaacacagtcaatatttattgagtgcttactttgagccagtcatcta

SEQ ID NO: 455072 - DNA, 670 bp, Homo Sapiens
tagcatgaaaaaactagacttcctccttacaaaatgccaactgacttacgtttaaaagaagttcaaaagttgcattaattttaaaaatcagaggattaaataatctggtctttaaaatcatacacccttgatgtaagtttgaatcaggaaaataaaaggaagcaataaaaatctagcatatgttgcttctttaagggtctactgtctttaggatatgcatagaagttgcttatgattaatatcacatctagccatgacacagctatattacaaaatataatttccaactgggagcacacacaaggaaactaacttcaactgcaatacgtaaaatgataaagcgtttatatagtctttacagaggcaaagctgttgcaaatgctagaaaatgtgtcatattaacaaacagctttcaatgtatctagtgcatgaaatcaaagagaaggatcaaaattatttccaaacatgccctttctaataaatttatattcttacacaaggattagaataggaaaattgcaacctgcatgacaggtgcattttctgagtaaacgaaatgtatacaagcacaatgtatcaaagtagtagaatcacagtagtagtgaaggctagttaatatgtaaaaacaacaatcagccgggcgccatggcttgtgcctgtaatcccagca

SEQ ID NO: 455073 - DNA, 505 bp, Homo Sapiens
aagatgatcgagctcggtaccttttcacaggtactttgagccgtgaaatccttcagggttccttttgctacttcagttatttctttggcatgctccagtttctgcattaagtctgcttctataaactgaaggtctggcggtgtttctagatttttagttaattctttcagatcattaactttggaatgcagttcttccaatctcaatgctttgtttttaacttcagactcaaattctttaagcagttcttcagctctgaggtggttatccaggttgctgatgttttctgccatctgtggaacgcagttgtttgaccatccctcaatctcatctctagttgacagtacatcatcccaaatggacaggcttactctcagcctatccatgttttcttcaagtttctctgatacatccagccatttgtccacggtgctctccgtgtctgttttcaccaagctgaaatcactactgtgaattttcttcagctcagataacgagtgttttc

SEQ ID NO: 455074 - DNA, 520 bp, Homo Sapiens
tacttttccacagggtactttccacaggggtatgagggtagaggtacttccttaggttagaggaaaactttctcactttcatcttctccttttaaagatttcctgcttgtcctccacctcactatggacaattttatcctcctcttacccttgctccatgatggagttatattttagtttctcactagacaaaaaagctgctatttggcccaagggatgaggatggagtttatttaatatccttataattctgttgttatctaatgattcttgttccaaatccccctaaatttccattttgagacaggagaacttatggcactctgtattagtcagcgaggcctgtcatacagaataccatggacttatgggtggcttaacagaaatttattttctcacagttctggaggctggaagtccaagatgaatatgcttacagggttagttactagtaaggctactctccttggcttgcagacctcttgctgtgtcttcacatggcctttccctgtggaaagta

SEQ ID NO: 455075 - DNA, 265 bp, Homo Sapiens
ttggtgagtgtggggtggcgctgggcatcccacggcaaccaagggacagccccgttagagttaatcactccggcttcacagatggaggaactgagtcttggaaaggggagactggaggaggccacccagcaggtgagtgttggatggagctcaaacccaggcagcaagtcaccagaggcagctggagccactcactggcctacagtgcggggacacaccgtggtacccaaggatgcgtcaaaggcaggagtaagacaagcaggtt

SEQ ID NO: 455076 - DNA, 901 bp, Homo Sapiens
  misc_feature (17)..(17): n is a, c, g, or t
tcctacttttcacaggntacttttctacaggctacttttccacagcggtacttccacaggggggggaaaggatttgatgacctggaaggtctttacacgttaaagttcaatgattctagctccagtttcatggatttaataagacagcctctcttcctagctccttttagaaatggatctttgaaagccttttgttttatgttctatttaaaatagcaattagctttgcatcgcaggtactttacagtgcaccatgtgtattattcttgtggaatattagttcaccagatgatagcccacaattctagttacatatgaagtggtggtgtggtgaaataacattgcagctcctcactaaaccaaaaactgcagcaagcttgtcgcagagagaccctcattttcccagctgtcaacctgactgatattttaatttttttgccctgtagaaaacttcagtctctgtatccaatagataaatgagtgaacccccaggaaatgcagcagaatgtttctgtttgccaatgcaatgaatgcagaagctaataaatgtctacttctatcaggaggaggcgtgtaatgagtaaatgatgagagaaagaattcagggaaacaaatgatcaattcagtctaagatgacaaacaatttcctaataacttggcctctagttggagagagggcttcaccaggcaaagagaatgcctgttgaaactaagcctagcacaaggccatttacattcagctgctgatggatttggtctggttacatttgggtcacactgagcaataaggcgacgttcagacacagcgtggttattgcagacttttctttgccctgtaatgtctatgagtgtgtactaggaaaaggaatcatttcagagcctactcacagtattcaccccc

SEQ ID NO: 455077 - DNA, 522 bp, Homo Sapiens
  misc_feature (258)..(258): n is a, c, g, or t
  misc_feature (412)..(412): n is a, c, g, or t
  misc_feature (453)..(453): n is a, c, g, or t
  misc_feature (460)..(460): n is a, c, g, or t
  misc_feature (492)..(492): n is a, c, g, or t
  misc_feature (505)..(505): n is a, c, g, or t
gggaaaccaaccaaccgaaaaaagataaaccacttcctgctgatattgggccactcaagcttagcttttcagtttttaaataatccatagtcattgcacctcttgacctgaaagagtaatggttttcttcatagtgtccttgtggcttcaaagtattgatatctactttcccctaaaagcaaagcagctcctttacatcttcccagaaatacagcctcatttctgggaacccatacatttctactggccactgccttntgttgtttttaatacccgcttatttaggatatagggaaggagtttgggaagccttatcatctgggacttctagggaacagccttcaccaaggcagttgggctttcaaggggataggcattggatgcagagcttttggatgttgggctggggctntccctttaccccacaaggagccagttcccctccgggggggnccacagngggtgttcagaacagcccaacattgggttggnttttagttgcccnttttgaaacaggcagtt

SEQ ID NO: 455078 - DNA, 331 bp, Homo Sapiens
cttttccacagtctctggtagagatggtatttcagatccagtttaggatgctcattgctattgcgttggtcattatttctagattttgggacggagctttaaaaaaatacaaacattgcacagacatatttaatggaagactatatttctgagcctatattgatattcccaatacaaattcagggtcctgggggctttacatagtctcctctatatgatgtctgtgtctcctgcagctcggaatcctgcttctcaagacacaggagaatgggatggaatatccatcccttaatcactcacttgttttattcctctttaggatttagcattt

SEQ ID NO: 455079 - DNA, 404 bp, Homo Sapiens
attatttctagtgaagaaaatttgagaaaggtacacaaacaaaggtaagagggcagctaaaaatgtactttatttaatagccaggaaacttttgggatcgccatgcaacttctattatacgactgctaataaacttaggcaaaggacaaaaatagtttcagtattttcatgtatgcgacagagatccaggaatctgtagagaccagaaacagaactctgcaatgggaaacctaatgagctttgtgatcatctgagtcttcatctaaagctgaaagactattcaagctttgtgtccgaaggactctctgcaactcacaacattgagaactaacaccatctttcccgtaaacatctccttcaggcgttctgaatgttagtaaatggcccaccactgtgagacgtca

SEQ ID NO: 455080 - DNA, 435 bp, Homo Sapiens
aaactaagtcatcagtagaccatcatgccttaatggcagtgtcattgtctcggtcttatcaaggcccccctgcaagtgaaattgttcagctcctctaagagtagtatttatcaatcatgcctcattgttggattaatatatatttatataatcgtcatccaatttgataggtctgggttgggacatgaaatatataatttttaccagaacctgaaagatttccataatcaggaaaatttagtcaaaatttggaaacactactccaagaggatatgtaactcctgaacttaaccttgggtccagggaacagcttcccaagccaacttccagtaggagccagagggcattgaagtagttgtccatatggtcctttgtcttgttttctggtgtctttacatgctgtaaatcctcatggttccctttatttattattta

SEQ ID NO: 455081 - DNA, 553 bp, Homo Sapiens
  misc_feature (242)..(299): n is a, c, g, or t
  misc_feature (344)..(401): n is a, c, g, or t
tactttgcacagggagtgctaagggatgctgcctcgggtgtcccacgaggaacatgttatcatccaggttcggaagtgtcttagctcaattatttatagcctcaggcaggaattctatgcattagcaggcatgaagaatgcaccgcaaaatgatgatgaattcggaatactggaggtactaagtttcgctcagaagtgaagaaagagaggaaaatcaatatgaaagtcagtttgtctgtccnnnnnnnnnnnnnnnnnnnnnnnnnnnnnnnnnnnnnnnnnnnnnnnnnnnnnnnnnnactaatgaaaaggaaatcataatgatccctacaatattaaaagannnnnnnnnnnnnnnnnnnnnnnnnnnnnnnnnnnnnnnnnnnnnnnnnnnnnnnnnncaattgtggctgttattacttctacaatcttcctaccttttgcatgtcattgagtcatcatcttcaaattgtgcgtgctcttctttgacatgtttcttggggccctgccttccttccccccagccttatgccttcccaggccttgtcacttc

SEQ ID NO: 455082 - DNA, 689 bp, Homo Sapiens
tacttatccacagggtacttttccacagggtacttttccacagggtacttttccacagggtacttttccacagggtacttttcacacgggaagaagagttgcccacgttctcggggggatgaatgtgagcatcagccactgggtgaagtgacaaggcctgggaaggcataaggctgggtggaaggaaggcaggggcccaagaaacatttcaaagaagagcacgcacaatttgaagatgatgactcaatgacatgcaaaaggtaggaagattgtagaagtaataacagccacaattgacatttatagagtgtttactaagtgtctggcccttttctacacgtttgcacatattaatcttttaatattgtagggatcattatgatttccttttcattagtggaacctgagaccagagagggtaagtagcctgcttgaggtcacacagtagggaggtggggacagacaaactgactttcatattgattttcctctctttcttcattctgagcaaaattagtacctccagtattccaaattcatcatcattttgcggtgcattttcatgcctgtaatgatagaattcctgcctgaggctataaataattgagctaagacacttccaaacctggatgataacatgttcctcgtagacaccccagcagcatcccttagcactacctgtgaaagta

SEQ ID NO: 455083 - DNA, 626 bp, Homo Sapiens
  misc_feature (571)..(571): n is a, c, g, or t
  misc_feature (579)..(579): n is a, c, g, or t
  misc_feature (601)..(601): n is a, c, g, or t
tccatcgagctcggtacctacttttccacaggtgacaacaagagtcttcagaatcagattcttaatgtggtcaatcaccccatcatacatttctacagcagggcttaaaaggcacaaccctcaaccccaccgcctaagaccaaagcctccaatgcacctcctagttagcaagtccacaatcttacataggccaatctctatgtcagtctgtctctgtgcttcgccagagtgtctagagcagcactcctcaaatgtcaatgtgtgtaagtcagctgaggatcttgttaagtgcattttctgacacagcgggtctggggtagggctcgaggctctgtatttctaacggactcccagaggatgtccatgctgccagtctgaggaccacactgggggtagcaaatgtcaggactccactgcaacagcatctgatggcttttctttggtcaagtcatcctggaacaagtttctagaatgattccaccctggcccccctagagtccagcccacacagcataagccctacaacttgacttataatggcagaaacttgcatttctaataaaagcccaantctacaangaaaatgccttgtggaaagtanggtacgagctcgaatcgtatctggc

SEQ ID NO: 455084 - DNA, 202 bp, Homo Sapiens
gagccggtccctactttccacagggggaatatccacccgtccctcatctgcgtctgttttggggattatctacagctcagtagcttaagaatttagagcagccagcctttctatgcctaaagttattcactggtttatttgggtagagtctcagcccagaactggacattgcttccatcagcaacactaaggggagcttgaa

SEQ ID NO: 455085 - DNA, 501 bp, Homo Sapiens
tacttttcacagggcatgtttgctcagattctttgtaatttatttattgatagtcttccctccacccgtgactaggctgctatcttcttttcagccctggatggtgccttaagcccagtttgcctggcactaataaataaccagagtgccacctgtcccaaatgagggaggtcccaaagtgggtagcctgctactgtgaaaaggctggctaggagtttgtgcccagggtacctgtggaacaaacctccgacagcacagtgctgatgaacagtcactctcatttgatatctcttttggccaagtcactgagcagagtttttaggtgggatggttgtcctctctttttgcccctgtctctggctgttctcaaggatatttctccctggctcacagtttttacactggaaaagtgagattgaggtggacaatcagctttctcaccatcttgggttcctggcgggagtcctgttcctgcctcaacccctgtggaaaaggggatcc

SEQ ID NO: 455086 - DNA, 565 bp, Homo Sapiens
tgggtgatctaaggatccctatgccaagggggggcaagtgtcctctccattttagcccagagggctggtgagtggctgattgggaccttctgattcagaagctttactttgctcctccaagccaggtacttgtgcttgatgagaagaaagatgtgtgtggcatcccctgagatggtttccttctcgtttctacaaagtaggtaggccttggtagaaactgctgtttctcagtagttggaccattttatagccagattcttcccactctggaatttggctacaaaaggtagcaaattgtttaccaaggtttgtagcagtatcgcttctcaccagagtgaataagaaatgaaagcgtgagccaccgtgcccagccatttttctcttacataaaagttgtagagacagtgctgggagttctcatgtacccttcccatagttttctctgatgttaatatcttacataaccatggtacagtgatcaaaaccaagaaattaacattggtacatactattaagctaaacttaaattttatttgaatgccctgtgggaaagtacctgtgggaa

SEQ ID NO: 455087 - DNA, 405 bp, Homo Sapiens
ctgttgtgctgtacagatgttttacatttttaagtaaacatatgtgttaggggagaaacccctgtgaacattttacagtatcacttagctatttataatatccccagaaggaggtgaggaaggtaaaatattggtggggagaaacctgaggaatgttatatgtgctccatctaccaaacatctggatgattaggagacattttttaacctcttatttagtcatttttgtgtcctataagcccagtctccatgtattagtgtgaaatctgagaagtgagtctggattttttggggccttctggccccttgctggtaataatactgacagacattgattgaatgcatgctgtaggccatttgctccagttaatgcttgcaataacgctggagataggcagtctttcg

SEQ ID NO: 455088 - DNA, 508 bp, Homo Sapiens
  misc_feature (457)..(457): n is a, c, g, or t
cttttcgaggtggctagaataattacgtaaggcggttccatgtctagttctgtaagcaaaagggtctgttctgagatggatggcagaatcagggctaaggcaagaggtgtccgggatggtggagatatttggggcaggagaagtggctggctcattctttacctgcatttattctgcaaatgctctgctgtggggttgggtttaattaaaatttaggagcaaggggccctgaggatcttttcttttccagaaatctagtgtggttgggagttcatcccgtcctggatggtccaggagggagcagagctttcaccatcaggattaataactgcccccacagtggggagaggagctcccactcctgcaggcctctgagggctcagatttgtcagaacacaggctaagctaagcttagtattacacctagggcttgtctcttgttcctctcaattactgnggcaaatgtaaattttatgatagctcatcaaccacttttcttcctcctcta

SEQ ID NO: 455089 - DNA, 370 bp, Homo Sapiens
gtttctttcaagacttttacacacaggttgcctccagatcacaaggctcttactcctcttttgttcttggctactttataacatccacttagacctcacttccttcaggacacctaggttagacctatgcctgtgtgcttccctgtagatcttgtttatcccatgggaggaacttactggatccctctgcaagtgggcccttttgtatgagagaagtttggaagaaaagtttaaagggtcctcccggtcttgcattttgccttcagtcctcccgccgaccaatcctgaaagattcctctctgtagggcttccttctgaagatcctggggctgaagcctgatattttcagagaatcagcgtagatctctgg

SEQ ID NO: 455090 - DNA, 612 bp, Homo Sapiens
agatatgctcattttgatttggaataaagctgcctggccaaaagatggcttgtggctagaagaggaaggacaaataagaaaacataaatggttcaaatagcactctatgtacaaagacatgaaaaggtgaaagtttcttaatttcaactttttgttagaaattagtacgtcacatatagtcctccagggagcgctctgaggctgttactagtcctttagttaataaagcgagaaggccctgtaacttagcctataggattttagcgctgacgcctccgaacccacccaggctttcgcctcggaaaggcacggaagaggccccatgttaatacccgcagtctaggacacggagtcatcctcagggccctgtcacccgtgagtgagattacagtcattatactgcgggggcgggcgtcattatactgtggaaggtggtgctgcgggaactgtacagagacctagccgggtgttcctgccctgcggatggcagcggagaaccctggggggcgtttttagcctgcggatcgcctggtgctgctggagccgcgcttgaagacctagctgagtgtcctcccctgcggaagcctgcggaggacctgggcggactcttta

SEQ ID NO: 455091 - DNA, 625 bp, Homo Sapiens
tacttccacagggcaggagaatgtttaaagtcctttttccaagacctgttcaggttaaccgtaaagtccacctagacatcaattaacaaggatctcccttaacatgcataggaaaatccactgatgaaatatgaagattagccaataaaatccacataacattccaaggactggaaatgtaatcatctcacaacatctacttgaatcactcaaatgtctagaatattgctttatacagacagaaaaaaggtctgaattcttggtactgggttagcaagcaaatttaaacaaactaaaatattctcatggttagaaatcactcttaattttccagatattacctctgcctaaaaaaataatcgataagatccacaccatctttggaactgatgatctaaatgaccttagtaaactgctctcactcaaaagactgtcatgtcccagataacttatggatggctcaaaggtaggcacaatcatgtctcatggggtctcactacatatgtgctggttttccagggtctatttactaccagtggatggatgctaccagccaagcaccaaaggaatagccattttattaaaaaatacgatatttatagatgactgtccaattcatttcctc

SEQ ID NO: 455092 - DNA, 600 bp, Homo Sapiens
tatttccacagggtggaaatgagtgcttatcaaacgttgaatatagactgtagaaatcatttgttactgacacgtttttcctcaactctatgtatttatgtagcacttattactatagtgtctagatatcttgacaaatgtgtcatgccaacataaaacactatagtctctggccaagcctatggaaatccatatggcacactgaactattcaaaagcaaacacaaaagtaaatcaccctgtgtgatcaggcattgaatattatccttagcttatcacggtatgaatttctctttgcatgcctgtcccaaacactcatggagtaaatatgtgccatggaaattactagtattggtcctgactcatagtatatgaccaataaatggtaactactactattaatgataactactaatatggttgccattacctgaacaaactccttgaagagattattttggtaaaatcaagattcagctaaatctgcagggatttttttcttatgtctttaattttaataagcttataatatcctctaggtaattgattataaagacgattttctttaacttggttaccattttttacagtattttttcgt

SEQ ID NO: 455093 - DNA, 725 bp, Homo Sapiens
agtatatcgagctcggtcctactttccacagggacagaggacagggaagaaaagtgattccaaagttttaaatcttagggaactgaaccgaagctgatgggcaagtagcatatggaaacaaatgaggagaatgatttcaaccagggtaggtcctaggtaaaaaaagttggggaagcttatacattttagggtttacgactgcctctcagaggatcaaactggccttgcacgttcttccttccctcttgcagctgctgtgaacacagcccttctgctgctctgcggagctgcccctcctacgttattcctgctgtttgctctctcctcaggattggagatacccagtacaccttgctccttcttttccttgaggctttataactttacataagggggacaagtttacctaacaacacagggaagagtctaatattaagaaatatgcaaagttcttttagtcgtggatgctggtctatcactcctgcaacccttttgagagtaacggaaagctctgttgagtctcaacttttctttcagtgggcagggctcaccaagtctctctcccggcgtagggcaggttgaccccttccatgagccacggaagaggcaatctgagcagcaaaaggtgcttctcccttagaagtggggaatataaatgctcaccctggaccccagaggaagcgcctccttgggccattttcttgtacatagcctgtggaaaagta

SEQ ID NO: 455094 - DNA, 493 bp, Homo Sapiens
tacttttccacggggggagttatggaggaaaatagccagtaaatcagtcaatcaatcaaagtaataaaataagattgcagaaatgctattcaaagaattaaaacacagtcatatgagtaaatatgacccatatgagtaaatatgaccttttgattacttcacttcgtgcggatcagggaagactttctaaggaagtgataggcaattcagcaatgtgactacctggagaagagcattccaagatcaaaggtcacccaaggccaagatggtcaagtgacaagtggttggagagttcagggaatagaaagaagacaaatatgcctgaagcagtgggttgagggagaaggctatggaaaaaaactcaagagtctgagtgctattaaaatcctttgaccagggtcatgacatattttttgcaaaacgactttggctacaaactttgttttcctctgatactgattcttataacttcagctattatccctgtgaaata

SEQ ID NO: 455095 - DNA, 542 bp, Homo Sapiens
tacttttcacagggattgtttgtacatgtgatgacgtttctgtgtttccacgatgggcttatttaccttggaaaagcccagatgcaagagagtccactttccttttccttccacctcccagtcacaggcatctgttttacatattggaattgtatttacttctcttgtcttctgtgtcacattaaagatgttctgtttgcactcacctgtgctcttccatttttacatatcaatccaaataaaactcaataaccaattctgatttcaaaatttttacctttttgaaaattaaccttatttcctttcttttcaaaatgacttcacatctttttcacttgaaattttgcatataattaaatccaaaccacacttacttctctatgtaaccaaactctatatactcatgtacctcatatgtactgtgttatatggttaagttgtttgataatatttttattaattcgttataaataatatgaaggtggaaccagtatattttgtatacctttcctcatgatctctagttcccgcctgtgaaagta

SEQ ID NO: 455096 - DNA, 418 bp, Homo Sapiens
tacttttgcacaggtctggctcaagaagactgtcagagtaggggcaagtcccagagcagagctcacagctttgaaggaaactccaaaccctaccggcatttcccttcccctgcagtgggaaggaaatgaggaggggctcactgggctgggggtgcagagtgggaaagggaagggaacctctgccaccagagctgcactccctccttggcttgactggggctgtcaggggtcaggtggagagttaggaaaccttgctggagggaccaggccttgctcacatgcaccccattgtagcagggagatttgcctggccgtcaaactggcaaacagagcagccttgctggagaagcaccagctccatgcctttcggcttcttcccattatagatttattattagatgatttgctgattcctgtg

SEQ ID NO: 455097 - DNA, 734 bp, Homo Sapiens
ttctcacaggtctgacaggcttaccgcatactgtactgcactcaacagtgggacaaagcaaggggcatgaaccagaagctgcacacaccatctctgctcacccttactggccagtcacatggccatacctggttgcataagatgctgaaaaatgtaacttgtattcagccagccatgtgcccagctaaaattttttattcagtgaagaagaggaagacaggtactggaagataaccagcaatctctcccacccccacgcttgtctttttcaaacagaagcagcccaatctggcaaaagtaccgatccttagatctggagacaaaactcaacaacgggcttctctgacttttgtcagacatcttgcacatcacatgtagatagagccagagactgtaacgcatcattgtcagcgggaagaagatacaagcttggagatatgcatcagaatgactacccatgcaaattcttgaattttcacctgagggaggtgttggaggaataaattgttctacgggacaaaatcaggtgtaatatcaaaattccatgtacccactctagttgactgaatacagtgaagcatttccagtacaacaatataggaaaacttcaaataaaggggtattctctaaattccactaaatacatcatctttggcctgaaactatcttgttaagctacttgttgagactcttcactctagatatgcttggtgctgcctttgcattcaagtcct

SEQ ID NO: 455098 - DNA, 462 bp, Homo Sapiens
tattttccacagggcagggatgggaatcatgagaggggttaaaaagcagctaggattgagaagcagtattctaggagttgcagtatctagtatgactaccacatctaggttaatttagctactacagatgagcttgttctgagctgacagccattctcaacaaggaactactttcgctcaagagcttacagtccactggcaaagacagacttgaaagaccagtcatcagatcacagtgaagtaagtgccaacagaaagattaaacatcttctgaggagagagcaagtaatggctggttaagttagggaaggctcgtcaggggaaattatacttgaacgaggtctggagggaatcatccagcccaaaggatgaggggcaaaagacgttttcttagaaacatacattcattctttaaaatattttaattacctatgcatactgatacataactcctgtgaagta

SEQ ID NO: 455099 - DNA, 612 bp, Homo Sapiens
tacttttccaggggggagtttgtattgtggatcattaaaagataagatggggtagaaaaaataggatcagatcatgaagcacatgaaaggttaagtacatgattttagttaactttgatccaaagagtgtggaagtgctgctacttgtggtttctgagtgaagggagatataataaatgtgataattttggaaaattaatttagttgtagtatataaatgtgattgaaggtaaatggagcttggagatagaaaaaccaattaggagtctgttgtagtaattcataagattgaaagccttgattaaagtcaatagagagataaacttggagaatactttaaagggagattcttttttaaaaccagcccccaccgttttataattttacaagttgaagaagaattaagatgtggttgcaaaattttaggaagcgaaattaaataaatggtggtggtagtcatttaagtggcaaggttacaaaagggagctattttgtgagaaagaataatgtttatgttcttttacgttgaatgtaactggtggttggacatccagtagacagttttttgtttgagaatttgttacagtcatttcctgtggaaagtaggtccgc

SEQ ID NO: 455100 - DNA, 533 bp, Homo Sapiens
tacttttccacagggcttacttttccacagggcttgctgtccttttatttttgtcatctcaggtctcatcattgtcatcgtggttgtcttttctgaggtgaacgctcccttgtttattttttcttcctgtcatttgcaatgtgaatcatgctgtctttgttggggttattgttctattgctttatagatttgttcattccagttttattctcagacacacaacttctgcttagatagttcagagttcccataatcctgtcttagaaaaaggctgtggtcttagggaagtggaatgcaatttcaatttagaaaatggttggaagcaaatgctcccaagaagctcaaatttcagggtgcttttaaacaaagttcaagagaattctcaggcctctctgctgattgaattgtctttcttggctaatctatttactcaatcaatgtcagatagtgcaagggtaattttgagtttgggataaggattaaacgatcaatccatgtcctgttttccctgtggaaaagtaggtaccgagccc

SEQ ID NO: 455101 - DNA, 167 bp, Homo Sapiens
gtagatcaaggaatagcagtgatcccacagcagggtacacgctggcactgagaaagaagaagggcttccccacatagagggagttgtgttgagtgtgtatgttctatggaaatagaaatcattattcagccgcagattctacattcttttatattcctgtggtacag

SEQ ID NO: 455102 - DNA, 538 bp, Homo Sapiens
  misc_feature (197)..(229): n is a, c, g, or t
agaggctgtcagtacagtggttagagcccaaagcttacagtcgtctagctgggcaacaagcttcgccagttacaagttgtgagaccttactgtgcttcagttttctcacctataaaatacagacaataaactacctcataaaattgtaatgaggattcagataatgcatgtacagcactgttaatagctctattaannnnnnnnnnnnnnnnnnnnnnnnnnnnnnnnnatatcagcatgatatgctggtgtcattaacatgtggaagacccagttttggaagggaaaatataaaatttcaaacaactaagctggaggtggcttctaagtatctatttttagagaaataaaaatgaaagatagaagcaaaaaaattagataaaagaaatacctataaaaatcaagataaacctaattaagtcataggcctggatgacctaaattatttatgaaatttttctcattcataaattctgataataaaaatatttctttgtgtaatgattttatagaacttctatttaccctgtggaaagta

SEQ ID NO: 455103 - DNA, 737 bp, Homo Sapiens
tacttttcacagggcaaaggtgatcacttgcctttaaatcaagttaatcaaagtggaatttagtttaatgtctttcgtagctcatagcttagggggaagatgctgtgtgtttgagacattcacatagctgcatatatcatctccttgcagacatagctgggaattattttgctgcacacattagtgaaatataccaacttgaaatgtttgtgctaaccgagtgacctgttttctgtgtcatcatgtgtgtaattctcttatgtctgagtaaaaggctgagatgaaggtctgtgtctctggatacccgtggggttgctaggaaatgattttcgaagtgctctgtggtgatgcagcaggttgaactttttttgtgaagtgttgtcatggaaaccaagtgcatcattgccttgtctgactaatttatcttttaatgataaaaatttgtaatccagggttaacaaatataaataatacaaatgcaataaaaaaccaataactgtaaagggaatactgctgtaagtagcgaatcctttgaattggaagatgtcacaggagtattgtgtgattcatgttggtaagggcttggcagtgtggggagctaatcagtttgttttccttcttgtcattggagtagggaaaccatgatttcactctgtggcttagtgctgtgggcttttattactgacctcggctcctgagcttataagtaaagaggaaggcgctgcacaccctggaaa

SEQ ID NO: 455104 - DNA, 669 bp, Homo Sapiens
ggccctactttccacagggctagaaatctataatggaaacggagttaataattggtatatagaattacatttcattaaacttacacataatcttaaatactaaaatgtgtattagaacaaaatgagaagctgtgttctgtagaaatttcctgtcaagatgtctagacttgtaattatgaattctatttctatggttggaaataaacaggtataatcaagaaattatcgcacctcaaggtgaaaaggtatacaagtgatttagagcttagtcaaaatttcagttgaatttcttcctatattaaaaaaataataattccctcttctttcccaccttccttttatcctaaatctacataacccaatgacagggactagtagacaaacagatctgtcacctttgcaccctctataaacctttatcactggagcatgtgcataaaaacgtccttggctcctgctctgaaactcaaaggacagctgcctttctgccaatgccaggatgttaccaacacttcttagcctgagtccctttcctctaccccgaaggctccttgactcctacagaagtctgcctctttccctaggtgtttaagttactattattgctctgttaggtggataatgccatgtgctagtttctcttatccctcatccctcccctgtgaagta

SEQ ID NO: 455105 - DNA, 470 bp, Homo Sapiens
tcgagctcggtaccttttcacaggtggagtctcagcatgcacagtcctctttactatgggtggaaaacagcttgaggttagacaccagccaagttttgcttttaagtttcagtttcagaagaacatctgagaaaaaacgaccaagtgaagccttttctggtttcacacctagtaagtccttgatacttaggccagcatcccattcttgctgaatctgaaataggcaacacctaactatacaggctctcatctacttccgaaggctaatcctccaggggcaagccagcagacgtgggcaagtggtgataacatccctgagacagagggactacaagcttcactatcatttctgagtgagttttaattttcagatgatgttagtattgtttggcttcttatagtagtcttttggttcagtacctgctaattgcttattgtttattattaatattatagactatatttttata

SEQ ID NO: 455106 - DNA, 949 bp, Homo Sapiens
  misc_feature (159)..(357): n is a, c, g, or t
gggtgcaatcatatatttatctgtattgaatgtcatcctgttagctttggtctctttgcaaactgttaggctctttttgtcactcagttctgcgtttaaattagtacccacctcagtcagtagtcatagtaacttggtaagtatcatagccccttagcnnnnnnnnnnnnnnnnnnnnnnnnnnnnnnnnnnnnnnnnnnnnnnnnnnnnnnnnnnnnnnnnnnnnnnnnnnnnnnnnnnnnnnnnnnnnnnnnnnnnnnnnnnnnnnnnnnnnnnnnnnnnnnnnnnnnnnnnnnnnnnnnnnnnnnnnnnnnnnnnnnnnnnnnnnnnnnnnnnnnnnnnnnnnnnnnnnnnnnnatccctacttttcacagggggtggaatcatatatttatctgtattgaatgtcatcctgttaggtttggtctctttgcaaactgttaggctctttttgtcactcagttctgcgtttaaattagtacccacctcagtcagtagtcatagtaacttggtaagtatcatagctccttagctgtattagtcagtagggctgccataacaaaataccacagactgggtgacttaaaggacatttattttttcatagttgtggaggttgagaagtccaagatcagggtgctggccagtgcagttcctattgaggagtctcttcctggtttgtagataactgccttcctgctgtgtcctcacatggcagagagagctctggtgtctcttcctcttgtaaaaacactagccctattggatgagaaccttacacgaaccctattggataaaagccttacactagccctgttggataagagccctacactagccctgttggataagagccctacactagccctgttgataagagccctacactaacctacactagccctgttggataagagccctacactaaccctgtgcctgtggaaaagta

SEQ ID NO: 455107 - DNA, 552 bp, Homo Sapiens
  misc_feature (44)..(130): n is a, c, g, or t
  misc_feature (147)..(155): n is a, c, g, or t
tactttccacagggcctttggggggttaggggtgaggggagtgnnnnnnnnnnnnnnnnnnnnnnnnnnnnnnnnnnnnnnnnnnnnnnnnnnnnnnnnnnnnnnnnnnnnnnnnnnnnnnnnnnnnnnnacttttttttaagaagnnnnnnnnngtggggagggttacaagtcaagaatgtagctcctgaatggaagacagggcaaggatggtgtgatgtcacagtgaaggagcagcagggggacaacaatggaaaacaaaaatctggccaagatagtttgactggtgtatgccaaaggttttccccaccttttattgaaaaggaaattgtaaaagtgttgtttcttgaacagctaaataattatcataatcacataatgcatggcaatagttgctaagggtttggtcacttgcaactagtcctttcattacctttaaaaagtccgaggattaaagaacacttcctggctatgccatatggaggacttgatgaacctctaatttgatgatcactcgaacccagattctggtgcctaccctgtggaaaaggg

SEQ ID NO: 455108 - DNA, 700 bp, Homo Sapiens
tacttttccacaggatttatagctcgtgctgggcccatgcccgagggtgcgtctgtggggagagaaagggctggggacagggatgtaggacttttcttgttggtcctgagcagaaaagttttgacatcaccatctcttacctccctacctaagccttaaagtagaattccggctggaaaatggttttgtgaatttaaattgttttcaagcaaggggagataggcgaaatcattctctctccctaattaggaggatggatggagctgaggactccccgggagggaactggaaggaagatttcactgggggtcagcagggcagctcaatctatgaaaaaatgccaaatagttgatgtttattaggaaaaactgctccctgctatatacccttcataaggctagttaattcccccgtgagcacatgcattctgaatctctgtatttcagagaaaatacccaaagcttgcacccacaccaccttccaaaacaggattaaagagatgtcctcctgagccatgttgagattggtttagaaatctcttgagttttaagactgtttaaaaacggttctggcttggagactggtttccctttggaaaccagtgtctggtggaagctggtatttttataactctaggctctctatcagatcctgtgttaccatggttgctaaggggaacactggcttcccctggaaagta

SEQ ID NO: 455109 - DNA, 721 bp, Homo Sapiens
tacttttcccaccgggggagtctgccccatacatctgctttatttgttaatacatgtgaggttgtaggcaaataccctaagtgctatgttctgtgatagtggtataactaaatgtaacttcaatgtgccttagatattagatgccatggtatcaaaattaatatcctgttataaaaaatagggaagcaaaaatgtttgcatatgatacctagcctggctgcacatagcagatacttaatatccatataatattgaataaagctgaaattaccagtttcttaactatccttatgtcactttcttgcagtttcttccatttggtatgctatttctgacctcattttttgtttttcgccaaaaaattaccacatattactcatattttaatgaaatgcttaccatgcctagatgtattgttcagccttctactgttagaacttctttcgttaatttaaaagtatctttagttttctcagtattcatgtttatcttcaaaatgtctattgttgttgcttattaaatgagtcagagctcttcactgatactcagagatctccttaatcttaactgaagattactgctatttttattttcctattcctttgtgccctgtgagccagtcagactgctttttccgctatagtctaattaatgttcccatgttatgctgccttttgtgcctttgctctcacttttcttatcctctgtgaaacagtaggta

SEQ ID NO: 455110 - DNA, 560 bp, Homo Sapiens
tacttttccacagggattattagactagatttaaatacttgttgacaatttaaattattaccaaaatttaatgcattttaatgagggaaaatgattaaactgatgggaatgtaatatattgggggattaggaattctgcagtgcttcatggagagtagatcaaacacaacaaaaatattggcattaacgagaattcagtactaaaaagactgttgggaaaaatgtttggaattaaaaccaattcaatttagttcaatcaacatttcttgagtgctttttgtttacagattaactatgataaattttggagagagagataaacctgcatgagtttgtaggttgccaaaaatacttaaaactaataatgttaacaatccagcaatgcattttcaactccatttgagaaattaaattttgttttatttatttcctttaaaaatgccaaagtaacaggaaaatagaatagtataatgaacacccttatggtcttcagacactctaattgttacaatttttctacatttatatccccactccccccagcccgtgttggaaaagtt

SEQ ID NO: 455111 - DNA, 541 bp, Homo Sapiens
ccaatgctgttcaatggcccccacaatttctagagtaatggtcaagctcctaagtgtcacactgaaggcttccttgtgacttggccagttttctctcttctccacaacctgtatacatgtgagcaggcacacacacatagggaccatactaccaggggacctctgaacacatcaggcagttccactcctccataccttttctcctcttcttgctttcttctagctatacatcacattgtctttctgtaagacctcctctggaaactgttctcagaatgacgagtctaactgagataaccttttccttttcatatcctagcgtgcctgtgactaaatacctctgtcatgacatccaccatgttgtaggcatgtgtttttatgtgtttgtctgtttctctgcctgagactgtatattcccttatttgattttgtatgaccagcaactagatctatctctagcacctaacagacactcaataagtatttgttgaggccaggtacaatattggcttgcctgtattcctcagcactttgagaggcc

SEQ ID NO: 455112 - DNA, 494 bp, Homo Sapiens
tacttccacagggggccgaggtatatcaagtcctttcaggagggtcagaagacatgtacgaactgctgctaatacttactttccggtgcttgtccagacagccagtcatatgccaccaacctatatcttggccagtgggtgggcagtttgtccgtgatcctccttggaacatgcagagagcagagtgggagagcttgaggcttctgttccttatttctaagaccacgtgtgtgtataatgtaatccacctgtctttcctgtaccactcgtgtggtacaacggactccgaaattagaggaatctacttgaaagaataaagaaacaaaactcatagaattcaggcacttaccatgtgccaaactgttctaaatgtttagtgctttaagtaatttacccccaaaccctctgaggacagaactacgactgaaactctgattttacaggtgacaacccgaagctcagagaggtacagccacttgcccaaggtcacacag

SEQ ID NO: 455113 - DNA, 360 bp, Homo Sapiens
tcttgcttggactgatgggtgaacattcaaggtgctcattcagatgcagggctggcactgtccaatctttgttcactgccacgtgtcagattccaagcactttgtaaataccagctctcattttatcttcaaggcaaccctgcaatgctgtgggctctcattatccccactttccgtatggggacagtgagggggagcagctttctcaccctctcagagctggtaaatggtcgaggccaggcagcctggttctgagggcctgcacttgacccctggttgctttggtttttaaatttttaaaacattaattagttgctgcccgacttcagctggcacactcagcacactcctagtgcagta

SEQ ID NO: 455114 - DNA, 421 bp, Homo Sapiens
attccagaagctggtctgggccccagggcatctgcttttcacatgaagacaggcatgtatctggattcgtgaacctaagcccacaaccagaatcaaacatgggttccccagatgccaactctctcttccagggttctccagactcaggttcatgttcacttctctggacaccactttagcaaatacgcaaatcaacaaataataacaaacaaaacccagaactactgggtggaatcctgtcttagaattgatctgtctttcagaaataaccaggtcaccgagtgcgtagcatctgtgtggatgcattgagcagtggcatgtgctgtggctcctggcatttctgactctcctttgcctccttccctgcccagctgcttcattctgctctgcagcttccattcgcaacactgtggaaaagcta

SEQ ID NO: 455115 - DNA, 500 bp, Homo Sapiens
  misc_feature (463)..(463): n is a, c, g, or t
tacttttccacagggaaatgatgcataagaaatgatgcaaaggatctgagcagaacactgcccctccccaccccctgaatgtgtgagtgctgagttacggccttcagtatccaagctctctgtttgacagtagatatattgtcagatgcactgtgctgcttagttttgagtgcagtgtgattttctgaaagggcaatgagatgatggatgtagcatgctcagcgctgacctggcccatagtgatcactcaataactgttaacagctatggctgctattcctactgatggataaccatctaataagacagaaaacatggggctaagagcagggtctaacggagtcttaatggcttattacagcctgccaaagtgccagctacatacacatggcatccagtgcggatgaaacaatctataaaaccaagggtctttcttatagcaccttttttactggaagctaancacgatgagagcccctgtggaaagtaggtaccgagcc

SEQ ID NO: 455116 - DNA, 536 bp, Homo Sapiens
  misc_feature (127)..(127): n is a, c, g, or t
  misc_feature (143)..(143): n is a, c, g, or t
  misc_feature (151)..(151): n is a, c, g, or t
  misc_feature (158)..(158): n is a, c, g, or t
  misc_feature (166)..(166): n is a, c, g, or t
  misc_feature (180)..(180): n is a, c, g, or t
  misc_feature (193)..(193): n is a, c, g, or t
  misc_feature (202)..(202): n is a, c, g, or t
  misc_feature (260)..(260): n is a, c, g, or t
  misc_feature (269)..(269): n is a, c, g, or t
  misc_feature (284)..(284): n is a, c, g, or t
  misc_feature (312)..(312): n is a, c, g, or t
ggtcctacttttcacaggcaagtgaatgaatacctggctatgtgttacaatcaaaattagaaaggcttcaactcattattgggagactgttgcaacactccaagagggagttatgtaataataaagngtttgaagtaggctgngtgatagntgaaaantggaaagngaataagttgattnttaagattttacntgtgtaagngtaaaattctgttaaaattgactttcttaaatgcaccagaaacattgtcttaaatagntgggacacnttatagaatgggttntatagattgttatatgttttaagatccntggtagaatatcgttaatcgtgtgtggaaaattcctgtgtaaaaatttttatttttctgcagtgaagggatttattttagttatagcatcacttgttttcctatgaaagtataatataaaaattatatcaagttgtagaggaataaaatttcactttttgctttttatcatcttttaagtttataatacaccaattgaaggtgttttaactaccctgtgaagta

SEQ ID NO: 455117 - DNA, 741 bp, Homo Sapiens
  misc_feature (17)..(17): n is a, c, g, or t
cttttcacaggtattgntggttaagataaacttcccataatgacattatccacagattcaaaaagtagtttatcttaaacaacttctgtgacattttaaaatgatgtggcttagaaaattgctaggttatctaaaatggctctattgatgatgtaaatgtagcacatgaagagcttgaataaaatagacttttgaagtgtgcaaatggaaagaacagtccttctaaataattatttcccctcccttttattgacgtatacatacagaacagatatcatgtcgtaagtgtattgcttagtgaattactccaaagttggatatacctggttaaccaccacctgaatgaaaaaaacagaacactgcttcatatggagaagcccctcctgcccctcctggtcattgtcctttccatccctcccacaggtagtcactgagttctaataccacagagtcttttgactttcttttgagccttatgtaattagaatcacaaaagatgtattcttttgcctgacttttatacttagtattgtttttgaaattcatcttgagtgtaactgcgatttgttcattttcattgcttagtgaattattccaaagttggatatacctggttaaccaccacccgaatgaaaaaaacagtttttggcgtgagccactgtgccccactgttcaagttttcattgattgctgcctacatatagttgttcaacagctattgattccccctgtcctgtgaaa

SEQ ID NO: 455118 - DNA, 512 bp, Homo Sapiens
  misc_feature (494)..(494): n is a, c, g, or t
tacttttcacagggaaaaaagatgtttgaaaataaatacgtagtccaaaatcttctagtggcccaattgttcagaatctatgcaggattatgaaagtcttactttcaaatcacgtgacctggaattccatccctcagtaacaatttggttgcaactttctcaactttctcctgaaagacttctttgatgccccaccactcccctcaaccccacatcctcatcctctgcaccaacattgactgtgttgctctctttctcccaaccactcgttgactccatttttccatacttattgtttatatggctttcctgcatttcatttggaaattttccaagggcagggacttgtcttagtctgttcaggctgctagaacaaaatactatcaactagatagcttatacgtgacagaaatttatttctcacagttctggagactgggaagtccaagatcaagataccaacagatttgatgtctggtaaggacctgcatttnggtttcataggtggcact

SEQ ID NO: 455119 - DNA, 514 bp, Homo Sapiens
acttttcacaggggaagcgttttcctttgtgaatactgggactacattcctgagcctttggatataccaatgcagactgctgcctttccttctctagaaagtcagccaagcataacaccaagagttgattagaattttactgcccctgattcacagaccttcgcttttcctcttctccctagcttccctttgcttagcaacaggaatgtggcaagcactgtactgccaacagatttctcttttgctctcctattgaaaagaacttaaggatataagacagcccataagacatcacacattttactaaattagattttttttactctgaatatgagaggcttcctctggccacaagattttcacaatatttctagttgaaactgacttaatcatataacaacatctgggtccctgttatctagtgaaattagcagaatgtcagcagccagcaaagtgccaatgcatctttcaactacaactctgccccctttcccccaaaccctgtggaaaagta

SEQ ID NO: 455120 - DNA, 301 bp, Homo Sapiens
cttccaggtgacgtctggaaaaactgatacttaattcttgaatcatgtgaacaaaggtgaggcattacatgaaaataaccaatataagtaaacccctgtgggtgtgaaactgcatggcagggagattaaaagcagtgttgtattattaaatgggaaaatctactacaaaaagtaacaggagatatattggaaaggtaaatggatgtaaggaggccagaatttggaaagtctaaaggtaatgtttagaagcttgaatatgttatgtaacaaagggaaagccggatcgggcaccggtggctca

SEQ ID NO: 455121 - DNA, 638 bp, Homo Sapiens
  misc_feature (383)..(417): n is a, c, g, or t
tacttttcacagggtcagcagttactctgtatgtggaatcccctcatcctgaatggtaagaaacttggcagattttaagcttcaagagttcagcaggtttcagagactttatttcctttagccttataacagagcccttgcatccacccattattagtgtgggcataaatgttcacagttctctgctgttttcacattgattttcaataaatcctgtgggttctgttgttttcatggctttaacttgctgcattgcttccctctgtttcttctgcacacatgctgatagtgtgtagattgaccattggtggtgtgctctctctcatttctgctttgaggttaatgaggatgacattttgactgagttttgttttatttaatcnnnnnnnnnnnnnnnnnnnnnnnnnnnnnnnnnnntaaatggtatccatgtgattttaattttgctatcaagttagtcttttcattttatgtaaggatttctgaatgtcccaaagctatgttgcaaccaccactgctatcttacgtgaatttcccaatcattttcattttataagtaaataaaatatagcataatagatgacaccttgatgctcttcctttttgatcctttccccctgtggaaataggggatcctc

SEQ ID NO: 455122 - DNA, 706 bp, Homo Sapiens
  misc_feature (343)..(455): n is a, c, g, or t
acgaataaatgaataaaaaaactatggtacatacacacaatgggatattatccaaccacaaaaatgctgtcatttgtaatgacatggatataaatggatatacctggaggacattacattaagtgaagtaagtcagttatagaaagacaaatatctcatgttctcatcccatatctgagagctaaaaaatactgccctcaggacatgggacaggtagtggggagagggaaataaagaggggctggctaatgagtataaaaatacagttaattagaaggaataagatacagtatttggttccacaataggacaacagggccgggcgtggtggctcacacccatnnnnnnnnnnnnnnnnnnnnnnnnnnnnnnnnnnnnnnnnnnnnnnnnnnnnnnnnnnnnnnnnnnnnnnnnnnnnnnnnnnnnnnnnnnnnnnnnnnnnnnnnnnnnnnnnntgtctcaaaaacaaacaaacaaaaactatccttagattaagacatggacgtggtgtacatgattgcttttgctgcatcttgccacctattttcagcgagggccagaataggaagccactggatggaattctttgctgagcttcgcagctgttcagaacacgttctttacataatgccttttaaagaaatgaggttctagggagaagcctctgtgtcaggactaattatgcttcctgtgaaagctcggagca

SEQ ID NO: 455123 - DNA, 459 bp, Homo Sapiens
cataatggcccagggcttagtttttggagtacttttgcactttatctatgttctgggcaagagttcttaatcctgcattcaaattagaatcatatagggagcttctaaaggatgctgataccttggacccactccattccaaatgaatcataatcgctgatttgtattttatttcctaatccctttgccctaaagatctttctccaaatatccagaggccagggttgagaaccccagttgccagtgacctcatccactatacattctgcaccttgaaaactcacaaaacatatctcaagctgcagaccggggttttgcaatccagaatcccgtatccagacacttcactgcaaatcacgaatgcgtacagataatggttatgtcaaattcaatatattccaaagccagagcatgacttatccttcccccgtgaagtaggggatctgatagagtcgacct

SEQ ID NO: 455124 - DNA, 587 bp, Homo Sapiens
  misc_feature (321)..(446): n is a, c, g, or t
tacttttccacatggtgccacactaatggccatgcagcccatcttcaggggcactgttgcctttgagttgtacagtgcacaccctgaataaccatgcacagagtccagtatccactgtggggttctagtgggtaaatagcttgacttcggtttgagggcactgcgtggctcacgctgtctacagatgaaataagcagccaccagctgctcccaggcattctctgttgatatgtaggctttgtgggattaaagtccttttatctgttttatctcattatccattcccatgtcccaggtcagtgttctcgaacttgtgtgcannnnnnnnnnnnnnnnnnnnnnnnnnnnnnnnnnnnnnnnnnnnnnnnnnnnnnnnnnnnnnnnnnnnnnnnnnnnnnnnnnnnnnnnnnnnnnnnnnnnnnnnnnnnnnnnnnnnnnnnnnnnnnactgggctaggccctccttcaagaaccaccatcctaggaaatctttcatggtagcctgtgcagtgggagtcaggagaccaggagtcaagtcccttccctgcctgttattagtgacattaatataggcatatcttctcactt

SEQ ID NO: 455125 - DNA, 643 bp, Homo Sapiens
  misc_feature (213)..(338): n is a, c, g, or t
tacttttccacaggtataaaagcaaaggtttccattgccaattgataaagaaagaaaactaagcctcagagaggtgagaagatatgcctatattaatgtcactaataacaggcagggaagggacttgactcctggtctcctgactcccactgcacaggctaccatgaaagatttcctaggatggtggttcttgaaggagggcctggcccagtnnnnnnnnnnnnnnnnnnnnnnnnnnnnnnnnnnnnnnnnnnnnnnnnnnnnnnnnnnnnnnnnnnnnnnnnnnnnnnnnnnnnnnnnnnnnnnnnnnnnnnnnnnnnnnnnnnnnnnnnnnnnnntgcacacaagttcgagaacactgacctgggacatgggaatggataatgagataaaacagataaaaggactttaatcccacaaagcctacatatcaacagagaatgcctgggagcagctggtggctgcttatttcatctgtagacagcgtgagccacgcagtgccctcaaaccgaagtcaagctatttacccactagaaccccacagtggatactggactctgtgcatggttattcagggtgtgcactgtacaactcaaaggcaacagtgcccctgaagatgggctgcatggccattagtggtggc

SEQ ID NO: 455126 - DNA, 644 bp, Homo Sapiens
  misc_feature (214)..(339): n is a, c, g, or t
tactttccacagggtaataaaagcaaaggtttccattgccaattgataaagaaagaaaactaagcctcagagaggtgagaagatacgcctatattaatgtcactaataacaggcagggaagggacttgactcctggtctcctgactcccactgcacaggctaccatgaaagatttcctaggatggtggttcttgaaggagggcctggcccagtnnnnnnnnnnnnnnnnnnnnnnnnnnnnnnnnnnnnnnnnnnnnnnnnnnnnnnnnnnnnnnnnnnnnnnnnnnnnnnnnnnnnnnnnnnnnnnnnnnnnnnnnnnnnnnnnnnnnnnnnnnnnnntgcacacaagttcgagaacactgacctgggacatgggaatggataatgagataagacagataaaaggactttaatcccacaaagcctacatatcaacagagaatgcctgggagcagctggtggctgcttatttcatctgtagacagcgtgagccacgcagtgccctcaaaccgaagtcaagctatttacccactagaaccccacagtggatactggactctgtgcatggttattcagggtgtgcactgtacaactcaaaggcaacagtgcccctgaagatgggctgcatggccattagtggtggc

SEQ ID NO: 455127 - DNA, 562 bp, Homo Sapiens
  misc_feature (465)..(465): n is a, c, g, or t
cctactttccacaggggactgtgactcctgtgcttcgacccaactcataggaggtgttgactctcatacccgaagccaggacttgtgtggcactaggaaacttttttctgaacattttcaagtgtgtgattgggaagtatgactttgcccagcatctgagtgtttggactctcctttctaggcctagagcacagttgaaattgtgacatacggggaccaagcacctaagcaatgtataacaccttctttggcagtgcgacaaagggcacttttacatatcactgggaccagcacccagctgatgtgaaatcttggcctgaactctgcctacagagcattgcggcttttatctagattcatcatgtaagtgatgtgacttccttctattgccttggccctgcacttatggtgcattgtgacacataactgggtactgcacccaggtgatgtgagtcttttttggtngggtgggggggttctgtcaataggaagctttgtaacatatcactaggctcagcacctaggtgaagtttcttctctcttgcctggcctgtgaaaagta

SEQ ID NO: 455128 - DNA, 691 bp, Homo Sapiens
cacaggatatcacaaataaagagaaagccttggggaaatagcagccctgggtaaaaagtctttgtgtggcaccagcgaattcaggtttgctccctttccagcaatcccctgataggctgagcacagccttgtgatacggcagggatgtgggagtaccactttctgatgtgacgcctttccctgtctcaagactgtacacaaaccaccctagtcatcaaggcaataattaacttcattttgatgttgcctaattaccatgtttacttttcacactatcatcacatattggcttatttttaaaaatattgttattagtggtaacagatataataaataaaatctgaatacttgggagagacggagctgcaggagacaatgcctatttttagagaggcagcctgacatagggaaaagagaacagagtttgtattcaacaataaaatctgagttcaaattttgacttggccatcattttctcatctgataaataagaataatgatactcaccttttaaagttgttggctggattaaataagatgctttgtgtaatattcttaacctagtttgcagcacatagcaggttctccttaaatggcaactgtagtgacagtgatgatggctaataaaagaatggctagttaagtcagtttttaggagcaaaggtgctttgaaaacccccctgtgaaagta

SEQ ID NO: 455129 - DNA, 575 bp, Homo Sapiens
tgattgcaatccacgaggacaattttttctgttaagttactatatggtttgaacaaagaaaactaggcatcttttatgtaaaacctgggagtgattagtggaaggacagtgatgaattacctcccatccttttattcttcacctccctaaatccctggatctccccagcatgtcacagggtctctgagttcagtgaagaaacaaaattcagtgtaccatcaacaaaggtttagcatgaaagagaccaaagcacactattgattcacttctgctttgaacaaatgattcattaaaaacaatgttctttaaaggaattgtaaatgttgtgactgcatttgtccttattttaggcatctgggtttgcacttaaagtgtcctaaaatggaagcagtaacaatgaaagattaagaggtctgtatgtctagtttttgttttagaaactaattggcaggaagaacagcctaatgtaggtattgcccagagatgaggttggtgcttcactgcatcagagttcaagtgactcaaagaaaaacttgcccaaaggccttgtagtcatgccctgtggaaagtaggta

SEQ ID NO: 455130 - DNA, 531 bp, Homo Sapiens
tactttttccaacaggggaagaaaccaggggagctaattacctaatggtggaataacatgggggaggaaattttgatgggaggttttccagcacccttcaattcccttcacttatttcacattctgcctagcttccccaactttctgaatgcctggcccaccctgccttatggagagatagagttatgcattactaggaaacagggaaaggaatccttagcccctgaccacaggagatcatgggctggagagctacataaagtagaaaatatgcctctcctctccaaaacaaggagttcaatgaataaaggagagtcgcagatggatgctgattctgcagggaccgtaactgaagaaggaagtctggggggcatagaaccgagagctcagcatcagttccccacaatggccctcttctttgaactacaaatccttttcatctgtccagtcccttctctctgttcgtgcttacaaagattcaggtatcagaaattgattcttctgagagattgtgttcaaaactttgaagac

SEQ ID NO: 455131 - DNA, 596 bp, Homo Sapiens
  misc_feature (186)..(223): n is a, c, g, or t
tacttttcaggcacctccctgttttctttctttccccctttcccatcccagatttcttgctttagcctttgtctatcagtctcttttctccagtttgtaaggagaaccaggaaccccaagagcagaaggcacagtgctgagtaacagtgtgggaggtttccctgccatcttcccacccgtcattcnnnnnnnnnnnnnnnnnnnnnnnnnnnnnnnnnnnnnngttctaccctagtgaatacaacctttgtcctggagaccccagctagtctaagaaaacttcctaggctgagctctcttgggaatctaagataaagaactgagatcctgggaagaagggaactgcctcctcttctttctgcaagcccaaagccctcgggactgggcaggcaatgataccacccactttgctacagtgataacagaccctgtgacaagataatgggaagtgtcactgacattagctgggcatttaggcattctttcaggtaatcttcctctgaccttatgaggaaaagactattatttatccccactttgtagatgagaaaataggattgagagattaagtaacatggacaacgtcacagagctag

SEQ ID NO: 455132 - DNA, 555 bp, Homo Sapiens
gagctcggtacctttccacagggcccagagccattaaatactgccttccgggcatttcagagcccgctgcttctatttttctattctcagtctgtcagagagaccagtaagtaccagaattttgacttcccagagcctaggagagtgtatggcatatgacaggtgtttattaatgtgtgttcgtgggaagaacaaattgtgtcgctttcattgtctttcaatacagtgaagatcagttcctctcctgggccccacttcatagaaatatgcattcctgacttcacaaatggaactgcccaagaatccccactcatgttttctccccggagcttcccctgcacccacattctctgcattggttaggaatatcctcataggcgcaacactcctgaatagcagaccttacacttgtaccccgacaggcctccttgttccctgaagctaaccctgggcctggctttggggtttgcagccggatttgtcatcttctgtctgccagtttcactgacttggttattccaaggaatccctgggaaaagtacctgtggaaaagta

SEQ ID NO: 455133 - DNA, 653 bp, Homo Sapiens
tatgcctgaatccagcaccctttttccgctttcaaaatggaatggggttggctggcagcctgcatctttgccaacatgcaaatgatgcactttggggtttcacagggtattaaccccatgttctccaatccctgattagggaggtaagtacactgaaccagctgtgcttctagaagagaaactaggtgggtgggtgagagtgtttattttccaaaagcgtttgcagcatggggtcatttagatagctggcacagagaaaacacacattccctcagtgaggtgtgcatggaggtttttaaggacagtacatttgcagtgaggtacaacattcacactcttcaaatgcaaaatatttatgtatatttttggtgatggagctgttcatttgttctagtgatatttactagcctggaatgaagagccctgttatgtatcatgcttgtactgtgttagccagtttcgctcttccaacaccacaaattacaagctgatacatggttgggagtggatccttttcccagcctctcccctttggttcataacaacagctgctggtgattgagctatggccaggattggggctcgatgctttatcttcctcatgatatgcagtctcaccacaatcctatgaggtaggtgccggcattatcccc

SEQ ID NO: 455134 - DNA, 668 bp, Homo Sapiens
tacttcacagggcagaaagatgtacagagagttggcttgttttacttgcaacgagtcagtgtcacagaatttcaagataatgttctaaaaagtccagaataacccccgctgcctaggctgggtcacagacgtcttagaatcagatctacgctgcttttgttgtccaacaggaagacagaatttaaacttgagaattaaaaagttaatcatattcaaagccaaatacttcgagaggtctgtatacaaaaaatggaaggcaaactcccaaagaaactgatacactgttcagtgctcatggtcagattttaacttaagttttaaagcatttcctcaaatcgggttatataataaaaactcctaattagtcagaaataaggaaacctctcgcactgtatagagagctcttctggccatccagtactcagaattaattgcaatgaattagaatgaagaggcaccattaacttttggtggaaaacatcggctcataaattgagactctagcagaaaaagaaccatacaagttaaatgaaactagaccgataagaaaaggaagaaattgttactggcgtttaaaaaacataacttgaacttaactaacaatttctgcagctgtttgtaaccactaactgcagattctgttagacaatatcctccctgtgaaagta

SEQ ID NO: 455135 - DNA, 545 bp, Homo Sapiens
aaagaaaaggtgcctgtgtcgcaaaagcctttacaacgttcgtgtatctagccttcccacagcattattcacctgtcagcctttcctctagtgtgggaattccctctacaggaagttttttcctaacccactttagagaccctgaactctctatgggaagaccttgaccaccatgactagaggtcttgttagatgaatttataactcataagttactgacacatttctcctttgtagatgccccttccctagtatgccgcataaacacaccttcctgattttgggtatatgtaggtattctaggcaagaacattctatatttcagggacacagaaagcagaagtagcttacgtttttaataagaagtacctccctatatctcttattacaacccaaatttcattgttaatatcttcctgccctcaggatttccttctttaactgatttgatccagatattgacagaagagtaagatgattgtcagagagtgtctaacaatcaggagatctgaagaacaattattctaacttccttctggggaagc

SEQ ID NO: 455136 - DNA, 503 bp, Homo Sapiens
  misc_feature (77)..(85): n is a, c, g, or t
  misc_feature (300)..(342): n is a, c, g, or t
  misc_feature (352)..(419): n is a, c, g, or t
tacttttccacaggaagggttatctccaaggccaaaatgtaaacatatgcaaatctcaggtaagaggaacaggtgannnnnnnnnaagtacaagagagattaaaaattttccacccagttatcatggattatgtggcaatctgtttccttatataaagagttactaaatgtaactgtgaagttttaaaaccacaagagtgtcctcaggaagtagatgaacaaggttaaactagagaagacagaaacagaaaagcaatgattcaggaaggtaagagagaggtcagagaattcattcactcnnnnnnnnnnnnnnnnnnnnnnnnnnnnnnnnnnnnnnnnnnnggagacagannnnnnnnnnnnnnnnnnnnnnnnnnnnnnnnnnnnnnnnnnnnnnnnnnnnnnnnnnnnnnnnnnnntgttcaagacattcttgtgcctcactttccgagtagctgggattacaaatgtgcacctccatgcccggcacatttttttgtgta

SEQ ID NO: 455137 - DNA, 427 bp, Homo Sapiens
  misc_feature (94)..(161): n is a, c, g, or t
  misc_feature (172)..(213): n is a, c, g, or t
ccaccagggtacaccaaaaaatgtgccgggcatggaggtgcacatttgtaatcccagctactcggaaagtgaggcaccagaatgtcttgaacannnnnnnnnnnnnnnnnnnnnnnnnnnnnnnnnnnnnnnnnnnnnnnnnnnnnnnnnnnnnnnnnnnntctgtctcccnnnnnnnnnnnnnnnnnnnnnnnnnnnnnnnnnnnnnnnnnngagtgaatgaattctctgacctctctcttaccttcctgaatcattgcttttctgtttctgtcttctctagtttaaccttgttcatctacttcctgaggacactcttgtggttttaaaacttcacagttacatttagtaactctttatataaggaaacagattgccacataatccatgataactgggtggaaaatttttaatctctcttgtactt

SEQ ID NO: 455138 - DNA, 365 bp, Homo Sapiens
tggccaagtgagactctgtctcccaaatagataaataaataaataacaggaaaacagaaaaataatgagtgaatgaattctctgacctctctcttaccttcctgaatcattgcttttctgtttctgtcttctctagtttaaccttgttcatctacttcctgaggacactcttgtggttttaaaacttcacagttacatttagtaactctttatataaggaaacagattgccacataatccatgataactgggtggaaaatttttaatctctcttgtacttaacacacacatcacctgttcctcttacctgagattgcatatgtttacattttggccttggagataaccctttccctgtgaaagta

SEQ ID NO: 455139 - DNA, 469 bp, Homo Sapiens
  misc_feature (85)..(152): n is a, c, g, or t
  misc_feature (162)..(203): n is a, c, g, or t
  misc_feature (418)..(427): n is a, c, g, or t
tacacaaaaaaatgtgccgggcatggaggtgcacatttgtaatcccagctactcggaaagtgaggcacaggaatgtcttgaacannnnnnnnnnnnnnnnnnnnnnnnnnnnnnnnnnnnnnnnnnnnnnnnnnnnnnnnnnnnnnnnnnnntctgtctccnnnnnnnnnnnnnnnnnnnnnnnnnnnnnnnnnnnnnnnnnngagtgaatgaattctctgacctctctcttaccttcctgaatcattgcttttctgtttctgtcttctctagtttaaccttgttcatctacttcctgaggacactcttgtggttttaaaacttcacagttacatttagtaactctttatatcaggaaacagattgccacattatccatgataactgggtggaaaatttttaatctctcttgtacttnnnnnnnnnntcacctgttcctcttacctgagattgcatatgtttacttgac

SEQ ID NO: 455140 - DNA, 592 bp, Homo Sapiens
  misc_feature (519)..(527): n is a, c, g, or t
tacttttcacaggggaaaaacggtggtttttaaccaagcacgagtattggaatcacagcagagctgttgttcccaacacagacacagttgcacgactcctggatgtgccgtatctggggtggggccagcatctgtgtttttaaatcgcatcccacatggtcctgatgcccaccaaagtgggaaaactggacctgtcaattatcagagttggaggaaagcctgcaacccttcttaagagtttaattgaattggttggccattgtgaaacctaagagaagaaaacggagctcctttttcaggagggcacaaaaagaaaccttggagacttagagaaacagaggcagaacaagagcctcacagttcaataacgtgataggaacaacctggaacatcggtggttttcaccaaatgtcaatatcagataatttccttttgaattttgtcttgcctgcatccatgtttcccaatgggtgttgtcatgctgtagctaccaattagtgtcagatgactctctagaannnnnnnnnctgagtattccatcttaattttaaaattgtaactgtttgctctttggattaaccctgtgaaagta

SEQ ID NO: 455141 - DNA, 711 bp, Homo Sapiens
  misc_feature (464)..(506): n is a, c, g, or t
tttcacaggggacttctgtcagcttttatttaagctgttacattctgaaaatggatattaacagatgtatgcacttgattaaatatggtactcttattcatcttaattggtgatttctgtcctatgtataataccatttttacatagagatagataaattttaattattatacagcaagatatgatatctggaaattctcacctcttggtttggtaacacactttcctggctgttatctattttgaatggttgtgtctctgtttctttctattgctccttgttttccttctgtgccttaaattaatatgaaagccaaggttctgacctctcttctttctgaatccctaacacaacctgagctgtggcaccacattctaattgcctgaacatgttcacatctatttccagctagctgcctaatcaaccttctatttgtacttcagtcttctgcattcattacctnnnnnnnnnnnnnnnnnnnnnnnnnnnnnnnnnnnnnnnnnnnacctccctcatgcgatttaattgtaccaatagtatctgagtcagctggaggcaaaacagcaaccatcttaggttcatttctcgtccttcatcaagctgtaaccttacacagctcttacgatgatgacatcgtcacaattagcacatgtgttcatgacgtgcttgtgttcacttacatgcccatgtaattcatcctgtggaaagta

SEQ ID NO: 455142 - DNA, 539 bp, Homo Sapiens
ccccttttccaccgggcacaccacctagggcatagtcagtctcctgatcattctctacaccctgttgagctgggattgcttcactttcttatgcaaagatcttgagtagcttcctgtactttattaaataaaccttcattccctaccctggactcaaggccctccataatttggcagttggtgacctttccaactcatgtgtcactgcaactaccactgtctcctgccctccaaccacataggactgttcactatttctctaatatatcctatcctctcgttgtcctggtaacatggttcattccacatgggatccttcctccccttccctctctttctgcataaccaaaccctacatgtcctgaaatatctactatacatgtttcctccttaatgaaacttcctcattctccccacaagaattaatattcctacttggtgacactccccactgccacaatttactcatgtctcttctgccattacactagagtgaagacttacctcccacttctagatgtaaatatgcctgtggtaag

SEQ ID NO: 455143 - DNA, 511 bp, Homo Sapiens
  misc_feature (385)..(393): n is a, c, g, or t
tacccactttccacaggcttcccttcccagatgattactcctttctttcaatagcgaagtcttataatttacaacctattcattggcaaatacctaatggtgtttaacatgtataattagaaagcacatcatatatatttcagccttactgaaaagacatctggcctctcactgatgttaggagctcttggggaaaagggcccatgttagactttgtgtccttctaaagttctagtcctgtttctggcacatggtaggtattcagtaaaaatcctctcacatatatccaactctgtctgtctgtctgtctatctatctatcgtatctatccatatatctcaaaccaataagaggtctatccttaaattctcaccaggaatcatgnnnnnnnnncctacctcttgtatacaagtagtatttgtttgaaaggactttatgtcatgatgtcacataccctcacttctatgtagaatgacatcctatgtttcaataaattttcgcctggaaaata

SEQ ID NO: 455144 - DNA, 310 bp, Homo Sapiens
ggctcggccctacttttcacaggtctacatgtatgaaaaaaataataggcttacctacactaaaggctttaatagatatatacatgctgtttgctcaagtaaattaacgtagctataatcctcttactagcatgaatgactctctaaaataagtaactcacccccatccaactaaaaattcaccttcataagaattaagacatcccactgggtacctctgtgaaaatgttgcttatgatatattttcgattttcgactgtgttccttagcagtgtgcagctgaggcgtatctagttcaggtatgaaatta

SEQ ID NO: 455145 - DNA, 608 bp, Homo Sapiens
gtacttttcacagggcactttttaaaagcgtgttgtggaaccaggctgctctggaactctttgggagccgacctttccaaagagccagcccccagtctctgagtcacgctcagctccgttggagcaccccttcccgctgggatgtgtttttcccatgcagcctttttccctcgggaaggagaagtccagtctcccctcctgttgattgttttcttcttggttcaggaagtatactcaggggaaagggaaaatcatgtaaaagaaaaaaggggcgttcttttgttgcagtctcagtttgactcatgagttagaactggattaacgtgagagcctaacttctctccactcgacgaagatcgtgagcaatagaacatccgagaatgaataagtgacgtctgcagatttatttgtgggggaagtcaggtttattcttgtccgtctcaattcaggaggctgggcgtaatgactaaagctatgctcactttatatctgtccatttgtttaaaacaccagactttccattcttcattgtcgtttcgtgtgaatcgagattcctaggatacggtttgttgtagctggaagctcgccttttcttcccctgtggaata

SEQ ID NO: 455146 - DNA, 711 bp, Homo Sapiens
ctcccctagttccacagggagagggaggtgtcgttagtcatctccacagcaatattccaggaccattaagtttttagaagaaataaagtgtgacccaacaatattatatacagccaagatacagttcaaaaattaaggcaaaaggaaatgttctccattatgaaagaaatcagagaacacaagtcctaagaacttattattgaaaaaagtgaataaaattcagccaatttaagaggaacaatgaacttactggaatagctgtggtaaaaagactaatagtgagcagctaacgaatttaaatacaaaacaaatgcctacacaactatgaggattatgtttacataagagaatgtcactacctgaaaaaatagaaatgtcttcaaaaacaaacaaccctgtcagggcgcggtggctcacacctgtaaccccagcactttggaattttctagctgttctcctcattcttaagaggtattcccttcctgcctttagatgctcaagtgttagaccatgatcctcagaacaactgcagtgtcctggcaaccatgactgcaaaagccaaaaaaatcacatgaaagtcaacaatgctctgccacagctgaattggctactgttaaattaaccaatcttagaaaagcctagcatctgatcttacatgaagtaataaatttccaattgcttcagccactctgatttgccctgtggaaagta

SEQ ID NO: 455147 - DNA, 537 bp, Homo Sapiens
tattttccacaggtatagtttataggactcttttgctgaagataattctggactatatagctgagatataaaatgtggaataaaaatatcttatttcttaccacttcatttataataaatgattaaaacagttttggcagataaattctacaccaggatatctaaatcacataataagccttaatggaatctttgtttcttactgacatcaatggtgctacttatgtgaaaggaaattgggatctctgtatagattccaggaaatctgaacacacacactcatttgtctttctactctgcctttgctaatccttgatattctactccccaaaggaagtctcaccataggcctgtgtagactttagttcatgcctgcgtgtgtatgtgttgtcatttttagggacatatttgcaatctaatgtgatttgagtctatgtcagtttaattgtccccatttctttttacctttgttctgtttgccctcagataactttaggagtcatcattcacctttctctttacactcttcatcttccc

SEQ ID NO: 455148 - DNA, 545 bp, Homo Sapiens
gtatattttataggactctttgcctgaagataattctggactatatagctgagatataagatctggagtaaaaatatcttatttcttaccacttcatttataataaatgattaaaacagttttggcagaaaaattctacaccaggatatctaaatcacataataagccttaatggaatctttgtttcttactgacatcaatgatgctacttatgtgaaaggaaattgggatcactggattgactctaggagaaagagaagctatgcatgccgcaaacacctgcacaccaccattcatcctgcccaggctgctgctgagtggagctcaggcttgcaagtttgtggatcagtgtgccccacaaagcgtgcttatctctgcctcaccccctagggggagtggggataggggtagtggaaagtaggtagccagcccctactctctgctgttcccactccaaaatgtacatatttgtcaaaaccttccagattccttctgagtggaggatgtggcagtatcaccttctgtctaccctgccctgtggaaaa

SEQ ID NO: 455149 - DNA, 539 bp, Homo Sapiens
  misc_feature (15)..(15): n is a, c, g, or t
  misc_feature (380)..(404): n is a, c, g, or t
tacttttcacagggncatcctctgctggtgggcttttcagcctcaggtttgttgtcccgtggttgcaaaatggctgccacagctctagtcatctcaactgtattcaaaactggaagcaggagcaaaagactgtctttctggagaaactctgtctttgtattctggaaggaaaactttccctgaaagtctcactgagcagaacctgtctgtacacttcagtttttactatttgcacaactgtggttactctaactgcaagaaaggctgggaaagtgagtgtctgataaaggagataggaatgcctctggcttagttcaattattttaaggctattttgaccacaactcacagtccaaaatatgtttctttgtgtcgcagtnnnnnnnnnnnnnnnnnnnnnnnnnttattgaaaccaatttctcaaatactcactcttaccatgtatgatacacgttaatgtcttccattccattccattccatgcattttaattatttaaagcagttcctggtcacaactgctaattgatttcacaatt

SEQ ID NO: 455150 - DNA, 564 bp, Homo Sapiens
tacttttccacaggtctgccgttcctagctcaggtccttatcatctttcatattgattattgtagtaacctaactgatctcccttattccagtctgtactccactttgtaacccaggaagaaatataaaatagtaattaagtttaagtgtgccagaaatagatgtcctgattttgagcttcagtcatagattagtcacttagtgtcttcaagtctaagttttctgagtttcctgtgaaatcgatatatattcttcagcacagtgcctcgcacatagaattagtaaaaatatgttaacgaggattatttatctttctgtcagatctcagcacaatgtagtataatcacatgtgcacttgttttatttttccatgtagaccatgaacttcattggggtggacactgaatcttactgattttttagtatacaacaattacccaggaaactaacagtatggtaaccgtaacaggatgtgataaatatttatcaggtactattagatagattttatttaccagacatttgtgaatattcttctcaatgctgatcccctgtggacaagta

SEQ ID NO: 455151 - DNA, 582 bp, Homo Sapiens
cagcgtcatcagtatatgaccccagatgtcttgcactcctggcttctgctgatagaggagaaagggcttaagaccctgaagtgttaaatttataggaaaatttccccaaaaggtaagcacaataaaaagtcaacaggaggtacgggctgaagtatgacttcctgcaatgtgtaatttcaagttcccatacagataactcctctgaggactctgaggaacatgtgttcttaccttgtcctgattctcctatacatcttcttgggagagaactgtgcaacttaaaggctaccttattttgtactgtgaatgtctctggagctccttgggaaaaaagttatctgatttagctactatgtgccttttgaaagatcacgggctatgtcacgacgacagcagtctcaccctgtgccagatagacactccaaactgaaaatgtatacaaattttcacttttggctctagtgatacttgttgtacttgctatagaaccatataaagattgtttatcaaaaggaaacactgaaacttaaagacaataggatactggaaggacacgccagtggaatattgctatcctgtgta

SEQ ID NO: 455152 - DNA, 213 bp, Homo Sapiens
taatatattctttgtgagaattttaacatattcttgcatgataaccttacttctaatactgaagaattttttgaaacttgtgttgttgcctgatctggtttttaaaatgtgttcaaaataaatagttaaacagagtggataacgtgaaagagtgacttaactgcctctgttatccctcgctgatatctctgtatccctgtggaaagtaggtac

SEQ ID NO: 455153 - DNA, 460 bp, Homo Sapiens
tacttttccacaggtaacacagcaaggaaggactgaggacacatttattaggactctgttataggtaaggcatgccaggagagaagcagatgctcttgtagctgaggcaagacttttatatctgtgtcatttaggagagaacatacaaggatatgatattgctaaaatgagtactaggaggctataagaattcaccaaagaaaaagctcagggaaggttgctacaatcatgacaggcagtagaggattagaagcctgaagataaagtttaatctcatcaagtctaacctccactaccacttttcagatgtggaaactaatgtttaaagtgggaaagtaccttgtccatggtcacacaatgaattagaggtaggactaggactaggaatgtagccctctttctgctacattgggttctatgctcccaaaggtacctgagagcttccctgttcaggtcactg

SEQ ID NO: 455154 - DNA, 719 bp, Homo Sapiens
atgtcaatcgagctcggtacctactttccacagggagggaaactctgagaggaaggaggatggagatttcatgggagacaaagggtggttgagactacaggtttgaacaagcacaggaccctgggtagtctgatgtgaaggacattataaaaacacattatgaaggttttttctgtcacttcaagctgggtcttgttaaacctttgaaaattctctaatacctcatttgtttttgaaagaaatctatagcaacatcattttgtcatgtggtaaatattgctgagcagtcactaaatacctatagtcttttagtttgttcagattacatctaggccatttgtttactctaatagctaatagaatgtacagctgattttggtttaactgtgcgtgcatatttgtaatttttaaccaagaagtggcatatgtccacaaggaacttgttatctctgaaatactcacccatgagagctggattaattttttaagatgtaaatctatgctcatgtagaaataatataacaaggtgatattttgatgatcctctcaaatgattatctaactcttgcctgggcacctgactctgagtcagtatactcttgaatactttccatccttaatcaaatcaggagaaagagatggccatgtaagaaaattggccacggcagggttttataagagttaagcagaagatgaactacacatggccctggaaagta

SEQ ID NO: 455155 - DNA, 517 bp, Homo Sapiens
ttttccacagagggatggtgactttatagatataggggatggtgagttactgactgaggaaatgtgatgctcaggagaaggaggtaacattaaggcaataaataacagtaactccgacagcaatgattatgtttgttcatcaggtcctttcctgcctgcactgtgacaccccaaaagtcacagtgattagctaaaagcagctgaagttttcatggtcccaatcctggagtgaatacttgataagtgtcctcaaacatgagtgctcttgagaggttcaggcaggaattcttccagggcacttcattcctttatgtctatttagtaagtggaccccactgatttagggcttctcatcctaggtagaacgggtgacttttttgttgggtcttcagcagtaagggttagatttggcatcgctgcatccactcagtcacagagggtcactgagagcctatggtggccctgtctttagaatggctcaaaggcttttatgctttccctttctggtaagctctga

SEQ ID NO: 455156 - DNA, 575 bp, Homo Sapiens
cgagctcgtaccctactgttccacagggtaatatatatttctgtgggcattttaaacatgaaaattagcaccaggagtctcagaaaacattaaggtgtttacccgccttgaaacagagattaactcttgtagcttggatttcctagcttcactgatgtgagaacccacatacaccaaatcaccttagaaagggaaatctcagaaagcttgtttcagattcactgtggatgcttacaaggtgaatttagaagctattcctgtatgaaatactgttaatgacacagaactgctggggtgtatcctgcagcttccttcacatactctgtgccccagattgaagacgctgggcttgaattcaggaagcatctttgaggtttctagctctgaacacttgcatttatatgaggataagtaagtggaagggaaacaaaataatgcactggaatctaggggaaaggtattgtttcttttttctttcctaccactaatgtcctgtgctttctctgtgctgatacccacatggaagggtccatatttcacaactcaaacccatgaccatgccctgtggagaagta

SEQ ID NO: 455157 - DNA, 215 bp, Homo Sapiens
cctggtccctactgagttaatttaaatataaggtctttccttctagagtgcaaagtgaaaagacagcaggaagagctaactacacttctactctgctctcatttacgcgcagcgctgctggtagctagcgtgtcaccgcgtcgtgcttctcctgacaccgggacatttacttcaccccctcccccggaataccagtacagcgcccaacgtacggc

SEQ ID NO: 455158 - DNA, 483 bp, Homo Sapiens
tcttttccacagggcttttgtgaaggtcaggtagctatcaggtaacgtgacttgctcagcacatggcatttactgtgtagtagttaccattagtttccactaaatggcgctcagtaaataggggtattttcattctctccagaattattccatagatttagaacaaactgggtgttggtagtatcaagatggatctgccaaaaacaaaggcacacacacactattcctggaactgctccttctacggcttccacactctaaatttccacaagagccgaggtacagccattatgtgctagtcacatggaagagaacatgggtcaggcaatgaatgctcttttctgcctttggattatagagaaattttaatccctagtagcaaaagtggcagaagcagctctgaaaatgatggtaggcaaaactctccatacagcagggagtggaaggtcaagctggtccccctgtgaaaagtaggtccggctg

SEQ ID NO: 455159 - DNA, 476 bp, Homo Sapiens
  misc_feature (248)..(256): n is a, c, g, or t
acttacttttccacaggccagcccatagaaaaaaaatctatagctataaaatataaccagaaagccctttattttcaacctttctagctgaatattaatttcaaatagcagatgtcctaatatattcaagaacactgtccagtagcaatacaaaaacactaaattcttatttcatcatttcataacactgactcagtaacagaacaagtaagaaatcaaactttaatttctactgtgtttaggccagnnnnnnnnntcctttcctccaggattctgtacctcaagtcatcttagatgtttctactgtcataaaaatgttcttcagccacaaatgacattagaattccttattgtgatttccatgtcacccagtggtaaaatagaaactgagctactgggatagataagttaacctaaaaaacagcagccatcaacattacgcctggttgcatcccaggtcaccgagcattggcagt

SEQ ID NO: 455160 - DNA, 748 bp, Homo Sapiens
gtagaggactcccttacttttcacaggggcaatacgttttgatttccagaggcagattctgcagggagagcctccaggaaggaactcctactaagggcagtgagtgcccacgggccagtgtcttcagatagagcaaatgactctgggaaacagcaacggagtcggagtgaaacaaccatggtgctaaagcaaaaaaccccagttgctactatttcccccgcagtttgcaagagacccagaaaggttctgactcagtctcaaacttcctataagtaaacctctaagtaagggctcacacgcaagccctgcaaaactgtgactaggagggaggcactgttctcctgaaccttctaaccctgcaataatcattctttcctttccagggctaaaatattcacacctgtagagctgaattaagctgtgtttcaccgatcacactcttgaccacttaacgctattttcaacatgagaaggggttgatggcccaaatgattttcctcaatggcactattattaacaagccctttgaacctaagtgccattatttagaataacttgtaaggtgcccatatcatggaccacatggagtcatatttccgctaacagaccatgatctaaacaacaaagtagcaagaaccagggtaagggatggaaggttgggacggaaggttcagtaaattgtctaattccactatatagaatgtaaaagatttatcagtatgtcaagtgacgccttaccctgtgagta

SEQ ID NO: 455161 - DNA, 492 bp, Homo Sapiens
  misc_feature (78)..(78): n is a, c, g, or t
ctccgtttctttaaatactattttattccttgaacatgtttataatgatagctatttttcctgaatagaattcatatntgtcttgtttctttgcctatccctaattttatgttgacaaattcacattttagataacatattgtggcagctctggattggatttttctttcctgagagctataattgtttctattattttttgttgtttatttggtgtgtttataagtatttttcctggatttaatttgcagaatctatctctattgtagtatgcagttgctagcatgcctgatgatgtcatctgctgatagatacatatgtgggttgagaaacatatgcaaaatttcggcagttttcaattctgtcctaacttttactttccactgggcccttccaggttccccttgcatatgcacagctttccaggcaatcagtgatggatggaaagtttgggccctctcaagtctcctctgcctttgtgtgagcttgcag

SEQ ID NO: 455162 - DNA, 483 bp, Homo Sapiens
  misc_feature (166)..(312): n is a, c, g, or t
tacttttccacaggtatcactcttgcccaggcgtggagtgcagtggtacaatcatagctcacgtgcaaccgtgagaactctgagctcaagcgaaccctcttttacctcaacattcccaagtagctgggactacaggtgcgtgccaccatgcccagctaatttaacnnnnnnnnnnnnnnnnnnnnnnnnnnnnnnnnnnnnnnnnnnnnnnnnnnnnnnnnnnnnnnnnnnnnnnnnnnnnnnnnnnnnnnnnnnnnnnnnnnnnnnnnnnnnnnnnnnnnnnnnnnnnnnnnnnnnnnnnnnnnnnnnnnnaacaggggttttagttgtaattagaagagaaatgtaatgggtgtgcttattccatctcctatggaactggaaacaacatttggcattgaaaattgttgtcttgataaccttcagggtgttacttctcattttagcagcaatacattttgcttccgtgtgatgaaacatcct

SEQ ID NO: 455163 - DNA, 587 bp, Homo Sapiens
  misc_feature (315)..(413): n is a, c, g, or t
tacttcacaggtactgttcataccactggtaatgcaagaatacaacctccttaataaggctgtgttattgggtgtcaggccacctgggtttgatgccctgaaccactcacctggccaagctatttagacttttgatgctttttgtttccttctctataaaagagggatatgatagtaacctgctgcacagattgttggggaaattcaacgagttaagtcatgaaaatgattagcacagtgttggccatataccaagtgattcagtagtatttatttagtaatttttattatttctgtaattttaactacttacannnnnnnnnnnnnnnnnnnnnnnnnnnnnnnnnnnnnnnnnnnnnnnnnnnnnnnnnnnnnnnnnnnnnnnnnnnnnnnnnnnnnnnnnnnnnnnnnnncaaatcaaaatttacctttccagtaagaaacaaccacagttttgacataatttcaaggtataatcaaaaccaccaaaataacatctcaaactctggtatacttttatcaggtattgcaagggcttgggtataacttctgttataccaaatactatattcttgagattcattata

SEQ ID NO: 455164 - DNA, 419 bp, Homo Sapiens
tcttttccacaggggcattggtccattggtcatttttaagttcatatttttgtggttgaaggggagtccagggcttcctattttgccattttaatgatatcactcctggttctaggttttatatatggtgatattgaagatcagtttgtgattgtaagtgctgagactaaatgagactgttatcatcatcctttgattgtgaccactttattaggactatcgcttttcccttaagcctttttgtttcccagatgaatcccattaattgacttttggggtttaccttttgggtaaatcttcttactccaagactctgtgtctatgtaccatgctgattaatattatactagaaggtggtttgctgttttatttgactacagcttaactaaaaatcttttgactttacctgtggaaagtat

SEQ ID NO: 455165 - DNA, 654 bp, Homo Sapiens
ctgcatctgatacagggttaggcgacaggacattgaagtcatgcagtctgggcttgaaatacaagttggaatctcctgtgactcaggagtgtgtagcataacagaagtaatgtgaggtataaagtatcgttggttggatatgaatcccagctctcttttctggtagctggatgacccaggacaagctattcccatgtcattccctaggcttagtcagattaggactctctgtccatgatattccagtgccagcaagtacagtctatgaatctggatagtaactaaatcagtactgtgaatgaaccaaggtatagtttgaaatgaacctctaagaaagacatagaagcacgcagtgaaccccagaaggcattcccccaaatgcagccccctcaaaaccatctatagggacaaggcactcattcccccagctgctgggaaaaccaattgctcacagctgtgtcctccctgggactcctcccctgaagaagggagctgctttgcccaaggtaatgctgccttccaaagagcagcccacaatcaatgcccacttgatgcattggcttgtcccagttctgaaggggcgtctcagctccagccatggaattggctttggcctctattacaactattgcaccacagttcaactacctcttc

SEQ ID NO: 455166 - DNA, 347 bp, Homo Sapiens
gggtaatattagaccaccacgaagggcagtttagtgacatcggtgggtaatggttaggtaaggtacttgaggggagcattagtatctgctgagcttgagcaactccttgcctctgtccctaatactgcatgcccctaaactatggctgtcataacctctcagtgttcttactgataagctgagaaattttctggctacctggtcggctataatgtgattccagtagtacatatggcttgtctcttcgtggtgctggggaatctaaatgcccaagcaacatatgagtacatattttgcttgtcatatgaagtctgcagaaatattgtagctccagctctgccatcctg

SEQ ID NO: 455167 - DNA, 560 bp, Homo Sapiens
ttaatttggttacatatatcaagagtctttaaaatgtacatatctttgacccagcgtttattgtaaaaaattaactagatccatatataaaggtactggtacatagatatctattataattctatttacaataaaaattaaaaacatatcctatgacttagcatttattatttaaacaataattaactaggacccatatgtagaggaatttatacatagatatccattatatttctttttataacaaaaattaagataaatcggattgttcaataatacagggttgacgttttcttaatttgggattctctaggaaagagtcactgagataaagacccggatgtaagctgctttggagaaagtcagatagaccaaggagaaaaaccaacacaattttcaggaatgagctggttactgctgcaggcaactgtatggggagcccctgcagaaccacatagcatggatcttgtgactgtctcaaccccgggacagggatggcgcagcatttatccaccaactcccaacccccattgtgagagttgtcgtattaaattcccccc

SEQ ID NO: 455168 - DNA, 531 bp, Homo Sapiens
  misc_feature (71)..(99): n is a, c, g, or t
  misc_feature (185)..(200): n is a, c, g, or t
cctttttaccggacacctaagttatcctgccttctttggaagaaaattttgaaaaccccttcttgggcccnnnnnnnnnnnnnnnnnnnnnnnnnnnnngcaaaggaaggatccatgaaattttaaggaaatgtggattaattgcaaaatatggataatacaaaacacagtacaattagatgacnnnnnnnnnnnnnnnnctcagtaacagcataaaatcaaaacttctctaagttccagtttttttcatctctaaaatgagataatattccctaggggattttcaaggatgaaatgaagtcatcaaaagagaatgaaatgccatgggaattgggattccctaaggattgaagggcttccaaagggagtcagaccaccagtgtggacaaagtgctgacatttactgccatctgttgggtgatgagcaaactgtcccactctttaaaacacagaaatacgcctctgaaagatttcttcctcaattcaaaaggcatccttagctcatcactgtttgcatctgctatgcctgtg

SEQ ID NO: 455169 - DNA, 422 bp, Homo Sapiens
cagtacagtttttcttcaagggctccttcataaatatatgcttgtaattaagatccaagttcaaatggaggggttgtcccttggaggacaaagccagagcttgcattctgggttattttatcagtgaaaatgtgcaagtcctatgagctcctgagtccgacactggatcatcattcaagggcctgcccttgggttcttcgctgcatcctggccgatttttgctcctatcttgacttcctggcccagtcctttggtggccagctgcttgatgtctgtgaggattgggtctgaagccccagtcttatctgagcattgctcttagctatttttccagatgcaaatataaaccctcaaaagcttagttttataatgcatttaggaatcattatttttattcctgtggaaaagtaggtaccgagctc

SEQ ID NO: 455170 - DNA, 546 bp, Homo Sapiens
  misc_feature (531)..(531): n is a, c, g, or t
cgtacctacttttcacaggcaggggctaatgacctatgtttatgagaggtataaaagcacaagactacaaaacaaatgtcaatactgtttaattctaatattctttattattaatttccaactaatatgcaaacatgagatctgttttgagccagcaagcaaccttaggcattattcccaagcatatatactatgttactgttcctcaaaatgaactctgcacttcccaggctctgttaactttgttcaagttcttctctctacctggaaggcccttaacccaacctctgccagaggaaatcttacagccatagagcctctgccaaatgctcccagttgggaagcagtttctcctcatcctccacatttagaaccctatctgaggggtatttatgatcttccagctggtctgtttcatgctgtatttatattcatgctgtatttatatatacttgtttatcttccttgactcatgggcaaaccttctgtcttgttcatcttttgtatccatcccatctcctctctaccccntgtggaaagtaggtg

SEQ ID NO: 455171 - DNA, 549 bp, Homo Sapiens
  misc_feature (55)..(89): n is a, c, g, or t
gttagggcaaagaggactcagtgagcataggaagaggaacaagtttctctttgcnnnnnnnnnnnnnnnnnnnnnnnnnnnnnnnnnnncatccaagtctcaaacctcaaacctcaaaccacttcatccaagaagaaacccccacatttgtcatttgcagaagctacagtagagacaatgcaaacaggagctagttctgggtgtgcaaatctgtgacaggtgtgcaaggcacaaccagtccttgcgtgatttcttccaaccgcagactccacgagtgcttatgtacatgagaagacgtgtgtggcccctgggagaagggagcaaccattaggacacaatatttaatgaagtgctaaactgtgcatggctgggtttaaatggtgacctttgagtaaagccagtttgatctcaggacatttccttttcaggaattacttgtatagctacctgatgcagtcaagataaagatctaaatcactgagtaaggcctatgaggcccacgtgctttcaccctgacctctctctaccctcttcccctgtggaaagtag

SEQ ID NO: 455172 - DNA, 957 bp, Homo Sapiens
cagtcgacggatactctcttcgacatatcgaacctgtttctacatcaggctccttgtgttatttatttttgggtcaggaagactgccctgctcattgggaggctggggtggcagagactgctatgtgttcaccaaagcccatttcctccttcacttcttctgctgcaggtggtatggctttgagtcctggtcagtggactgtgggaagaggcgacataagcctcttctaggcctggtccttaaaaccctcctgcaggttcctctgcactctccaaagccccacgcccactggctggacacagaatgttgagcagtggagctttggagagtctccgtcgaacttgatcatatagaaaagctctccaaggcaccagtgagaagaacttgaaatcaaaaacacaattatcactgctgccttggagagtctccgtcgaactagttcgacggagactctcaattatttgtgaaattttaaatgaatagttaccataatcacaaataattgagagtcaacttctttttcccaaaacatacatggaaggtctgtgtgtgtaagctctgattttcaggaaccctatttctggaagcagagtaactggaaatactaagtcaagatctgaaaaccatttgaagttaaccaaaaagcacaggtagtaggattccttgtttttcacagtaggaacgtctgtttataatcttttctttcagagtttttatttagaggatggaaatagaaactcactttttgttatattgtgaaagcatgttctttctttagaggatctcagtggaattttatgttttcatttgttaaaataggaaatgattttgtttcattccttcagttacttggacatgctacttgtacatgtccaattagtatgcccagttagtgtgtaacccttcaaaactgggatttctacttgttgctgcaaagataactaaatgccctgtggg

SEQ ID NO: 455173 - DNA, 510 bp, Homo Sapiens
tacttttccacaggtaggaaaataaatccacaaagtagattatctaattaccatcaaaatgagtcagaagcaaaaaacaccaccctccaacagcctcttaggagtacaccctgttctgctactaaaatactagactcatttccctggtggtgggggggaatgcaggtatagatcagaaatataatccaccttaaaattagtactaatgatcacattatttcacaagaactctgctggatgtacagctcttaacattttattaagccatttgtgtagcccaccacgtttctttgtggtgcttgtcctgtgtggaagattgtaaatcttgggcctgttgcatacttccaagggctttaaagcaatgtgattaacagtacttggcctgctgcttttggcttactttgtatttttagctagatgctattatagtgttgaaaggatatggattctgtctgggatgcatttgttgtcctttcagaacccttcctcccattaacctgtggaaaagta

SEQ ID NO: 455174 - DNA, 634 bp, Homo Sapiens
ttttccatgaagtatgaagtttcacaggttttcactgtcaggtgcagaaaaaatatgtagcttcaaagcatttttgcttctttgctgtgctatactgttaggtcttttatttttttaacagtgttttcaactccactgtaattctttatccttcctcatctctctgtgccagcaccagtgacatctgtttcacacagggatcatttttatcaacaaagcagtttcaccgcaaggatgtactgtaggtttcaagaggctacagatgcctctacttctgcaggaaggtttgtggtcaatattgaatctgaagatctgcgatcttctttggagtgaaatcagagcatgggaagggactcaaatggttgtcatgtgattcatcactttcatgcacggtctgaattgtcagtcttagcccttgctctcaactcctccagccactgtcttgtcttaatcatccctcaactggatcattgtaacagcctttctatttcacagttcagcttttagatgtaaccctgcactcacctcccaccgccttatcatcatcattttcttcagccctcttcactgccaccagagtgattttactaaaccactgatcaaactatatttgtatctctcccctgtgaaagta

SEQ ID NO: 455175 - DNA, 218 bp, Homo Sapiens
tatttcacagggagaaagaaaaacaaacaacaataatcgtggagtagtgatattgacagactgaactaagaaacagtgtggataagaaactttatgctctacagtactgcagtcagcagaataatggtccctctaaaaaaggtaccacaactctatctcttattagtagtgtgatttggggcaatttaaaagccctgatcctcagtttcctcatctgt

SEQ ID NO: 455176 - DNA, 791 bp, Homo Sapiens
  misc_feature (621)..(688): n is a, c, g, or t
  misc_feature (730)..(742): n is a, c, g, or t
tatttcacagggtcgggagtgggacaggcaggggtggtttggaaaaggcaacatttgagtgggaaaacagggatgtatgttctcactttgggctgtggtttcaggcttgaggttggggcccttgccggggacctgccttcttctgcccagaattcccctgcctcctatctctattatttgtattatctatcaatcacaaagtatttaatgagttcttacccggagccaggactgctttgggaagaaagtagaatgaggcatagaaatcatttcgagatatcttgctatgtaattgctcagaaaaaactaacatgcatgaactcgtcaccatggaatgattaactgtacggttttgaaaacagcgtaccatataagttcatagatagaggaaagcagaatgagctggagagtccgagaagactgaagggaagggcagcagagtggcagagagacacagggtgtggggcacggcagctggctttgtgtccccgcggagtgacttcacaactcgtgtcccttagggagtttaatcctttgtgccttgatgccaataattggaaaaatggagatgtaggactaccttataccgtttgaaggagttcaggacaagccacctccaannnnnnnnnnnnnnnnnnnnnnnnnnnnnnnnnnnnnnnnnnnnnnnnnnnnnnnnnnnnnnnnnnnnggtctctgacctcccctgctgctacctaaaaatgggccattnnnnnnnnnnnnncataatttcatttgagaaagtgctgtccctgtggaaagtaggtaccgag

SEQ ID NO: 455177 - DNA, 496 bp, Homo Sapiens
ttttccacagggggattgggtctattcttgcttctcttgctcaatagctgtgaaacctcactctgttcattaatattagagtctccttaacattttgccaagcatagccataattgttaattttattgtgactaagagatacatataaaggagtcccatgccaaatccccttttcctgcaaaaattctactcaacccataatttatccaaggctcttacaactgtccaagtaaaaaatgagtctgaactatgtctgtggaaacagaaaattcttagagataacatacataatttaaaaaaattatgtgggaattaaaggagaagtaaatgcctgcaaatctgctgaggttcccagcttggacaacgaaggacgatgatgctatttacagcaggagagacgagcagaagagttgctctcgagaagacacagcatgttggacatttgaatttgggcatatctgtatgtcagctggagggcctgttgtagacacacttg

SEQ ID NO: 455178 - DNA, 695 bp, Homo Sapiens
tactttccacaggggggaccactcaagaatttttgacagaggaatggcatgatgattttagaccaatcttccaggaagctttcaggacagtgaaccatacggcaaagttgcactgcttttggctacagcctcctagtgtcaaccaagacaaacttttatcaatagcatatgaatatttagtcacttgttcctaacttgaagaagggaaaagaactattgctcagtatcatgaggggaactgggagagtggccttgctgagtccagaagaaaagcctcccttcatttcaatcccaggctctcaacagcagaatcaaaagataagcaaggggagaccatcttctcactcaatactagagcatacttctctcccctcaattcaggctctcctccccgggagggtcaggctttgttctaagcaaacaatctgtctctgagccaggctggtgtaatggttaagaacataggatttggaccaggccaggactatgtgaccttgggcatgttattcaacttctctgtgcttcaggatcctcccctatacaattcagcagagtaggtgatagaaataaaatgcttaactacagtggctattacaaggcctatgacatagtatgagtgcaatatatgacagttattatttttaaactaccaattactgtatattctagttttattccttgaacctgtgtaagta

SEQ ID NO: 455179 - DNA, 489 bp, Homo Sapiens
ggtacctactttccacagggagggattgttaatttttaggcaaaatttaaagtggcgatgggcttggatagttctagcaataaaaaaagttctgcttctagttaccatcttgttgactttccaacctacttggaaagatttcctttggagaggccaaaaacaagtgctgtgtatggagtgtggcctgtggtggtaatttctcatcaactcttgatccactgaggatttaaatcttaggtcttcatgtgctttgagaaaagatgacaagcggaaatagtatgtttgtttcctaaggacacacatgtgatttctgagagctgattgtatgcaatgtggtggtattcttttgcaaataggcttgggaacttggcatcctggattcgaatctgggcaccaccattttccagctcattccttcttattcaactccaccccacctcgaaccccgatttggttttaaagattcacatactattgttttagtaatta

SEQ ID NO: 455180 - DNA, 457 bp, Homo Sapiens
cgagccggtcctactcttcacaggggtacacgaaacctattcaccttcttgtgatgtatatatctttacaagataatttaatcagaggagaaaagttgcatttgcaagtaggtgtggctattattatagctcctcctcatgtcagattcatagagcagcttcttgaaaacttgcttcttttattaaatctcattttttgccacatcttggttcaaggctcttttgattgatggcttgcaaaacaacaggaccaaaacaggttcatttttcttctgtgcagtgaaaaacatttaaattggctcttcattattgttgttctgcctcaaagaagaaactcagaaatttcccacatcaaatggcacagtcgtaacacccaggtttcacagtctcgactaatatttatcgcctaccggtacagtctttcaagactagcagtcgtctcttaaaatcaccctac

SEQ ID NO: 455181 - DNA, 487 bp, Homo Sapiens
gagagaggggatttatatctgctcggtttaggaattggcaagcctacatgcagtattgtgtgttgtgtgacaaagaattccttggtcacagaatagtacgacatgctcagaaacattacaaagatggaatttatagttgccccatatgtgcaaagaactttaattctaaagaaacttttgtccctcatgtcacactgcatgttaaacaatctagtaaagagagactagcagctatgaaaccattaagaagattgggaaggcctccaaagatcacaactaccaatgaaaatcagaagactaatactgtggctaaacaggagcagcgacctataaaaaagaatagtctctattcaacagattttatagtgtttaatgacaatgatggttcagatgatgagaatgatgacaaagataaatcctatgagccagaagtgattccagtccagaaaccagtacctgttaatgaatttaattgtcctgtggagta

SEQ ID NO: 455182 - DNA, 565 bp, Homo Sapiens
ctttttccacaggggaggtgaccatttcacccttggtctacctgggaggccccaggctctcggtgaagacccctgcttttgtggggaatggagtgatgcagcactggaacatggcaggcaggggagacagtgcgtcttcacgttttcccatgtggagaccaaggcttggagactcagggggtctgttcaaaaccactcgatttgtgggctccatagcaccccagagcacatcccctctccggtggcctagaatgggcagaaggaaaagtgcagagcatgttaaatataagtgaaccccaagtttcttttcaaagaatcaatacgtcagtatgttcagctctcttattctttgattctccattttaaagtttaacttcctggttctcttcgcccccttgcttctagtttcagtaaacaactttcccaacagtcctagtcagtagttcacatctgttcccctggtcacctgcttcatcctgactcatcccagtcacctgttggacctgagtcacccctggtcacctctctgacctaagtcacctttagttacctgttcctaaccgtc

SEQ ID NO: 455183 - DNA, 521 bp, Homo Sapiens
tctagaggtccctactttcacaggggggtttgaagatactcctttttccgggtggtgaatgcacctagctcgggctggcacatagtaggtgcccagtaggtctaagttttttgctcattaccccaggctcccatctgccattccccctgcccctgaacacttgagcggtggaggtgttcctgcctaactagattcccttcacactcagtttggatagcatccatgccagctccaaatgcctttaaagtgtttaagaaactagcagaggattatggaggccaacattcccctatcccttgtttttcccagtctaaaacagaacagtccgtgttaattttaattgcttggatgagctcaaacattgagattttaatgcattttcacagtagctcagacagcataaccacattatcctgctggcagttggttggaatcctcggccaaaacgttgtacttggggacctcagctcataaagccagaacgtggtaatttcctagtgagatgcccctgtggaaaagta

SEQ ID NO: 455184 - DNA, 489 bp, Homo Sapiens
  misc_feature (175)..(175): n is a, c, g, or t
  misc_feature (194)..(194): n is a, c, g, or t
tttggtgctgtggaggctaactgaagctggggactactgtggcatagacaagtggtactcattaaaaataaagaaaagaagaggaggcatatggttgagccttggcatattcttgaataggtgttctagcgtaaacctgtatcaggaatggctggagggctggtgggtgggcccncttatgggcctgttttatntggaaggaactaagggaatttggataattttatctcagacaaagaggtgaaatgcacatttcagagggaaaagtctgtttcaggaaccatgggctagtgtctgagagatgtggtgattctatgcagagtccatctgtgtcttcccaaccactgtaaactgaaacttgagttttatacaaaggaaatgaggcaggcacaatggaagaaccagtggaagctaagagagcgtgagatattgagatgcaaggtgtcagtgttgatggggatcttctacagtgatggccctgtggaagta

SEQ ID NO: 455185 - DNA, 845 bp, Homo Sapiens
tattccacagggggagggtcacattttcgctttttgttttcggattaggccatcacaaagagttagatgttgtcagtgtaatgtttgttttacagaaccacagaagggagggtttggaaactactaatgatttccagttcattagcacctacaagttctcatgcatcctgtttgtttcctccaccaaggaggtgccgagtaatataatgaagccagtatcagtggtgtgctacttgtgtagcagtgcagaaaatgtatttttatttttccttaagaaacagctcttgctaaacttaagagaaatggagctgcacattcctgggaaaaacctatgtgggaaacaaaaactaattagagcagcaaatgtgatgctctcaggtaattgtaaaataattattcccctttagtatcatcaccgtgtaattgttccatccaatatcctcatgctctgaatccagatgtgaagggatggaaaccatctcctcctcctgggaatgtatttttcatttagtgagagctttagactcctcctaaaggacttttaaaagaaaggggaagacattgagggagattttgaacagcttcactctccccatttgttctaaatcatgacagaaagtgattactccaactgtctttatagaaatacaattccagttatgtggctgaaatgccttgtgagcgtatttgagatttacgcattggccgtgccaacctggagttttatgaacagtctcttttatgaactgcagattgtatgttctgtttagatactaaaagtgatgttttaaaatcagctgataatttaaaatgtaatgctaataagtgtgtagccctgtggaata

SEQ ID NO: 455186 - DNA, 546 bp, Homo Sapiens
tactttccacagggaagaggtccagtgagtcaggtgcctgataggacaacgttccgggtcctttggataacaaagggaaacatcccctgggatgtccgactcatgtctcatgaagaggcttgtaacttactctttcaagtaagctcttaagcattgagaacagttgtgagcgccctaaaacatcatttgacccaagctctccaatttatttgaaatcccagaaaagcgaaagtgattcatatgaaacgagcttctgaaaattgagatacattttcatttgctgattattttaatcaggaagcatctcagttaacaccaaccagcaaacgatccatctctattaaggaacaagaccttaaccgatgaatgtgtgcttttgcactgagctattgaatgctggctcattctgctgactcacacactcaacttccctattaacctccaacccatcacttagtaggctcttcttacgggtaaagattggttcttttaccttccaacagtccctggaatagtatgggagtccctatatattttttgtgaaag

SEQ ID NO: 455187 - DNA, 562 bp, Homo Sapiens
tcatcgagctcggtacctacttttcacagggaagaggtaaaacctagggatatggttcctggtctttggactagctgaaagcatttgggacacatagaacttcatatacagcagctcattctctttcttgagaatctatccagaatcatgttgcaggaaacatcaagccatcaaggggaggaaagatggagcaagaaacttgggggaagcagaagacagtccagtacacagtaaggaatggcatggagtaagagattcggaaccaggactctgaaaagttaggtaattttgcagttcctcctttgcatgggtttggcacagaaccaggcaatggtgacttaaaagtcatttagatctagatcataagtttccattgaaacagcctccagagtgcaggggactggatcaatgggggattgagctgggggaaggggaaaatgggaagccaaaagcggagcaattccagagagtcccctgcagtaacactgaagtatctgcagacagcagggtgtataatgactgcatgataaactagctgtttcctttccccctgtgaaagtac

SEQ ID NO: 455188 - DNA, 483 bp, Homo Sapiens
ggggcttttactagttatcaggtaaaatcttagaattctatatcaatagtaaattgactagtttttttaaagtggtattttcattttcaatttaaaaacagaaatgagtctttgggaattataccaactgtgaatttaagtgcatgattatcatttttctcgctcaactccacccttgactctgcccattaatatactgtccatctttcttgaagcccaagtgaaattctaagacatcatcttcagccctttggttatgacattcaccaactcagcaccccgaagcctgtttaactgtaatgtagcattttgtacagcacacttaagttgtgctctggcacacgccttctttcaacccagtaaggacctaagcatgagatgctacctctaaccgacagtgttgttcataataagcacagacaatcgttgtgtccatgcattcatctggctgcccaaacaagatcctgaccccgtgtggaagta

SEQ ID NO: 455189 - DNA, 548 bp, Homo Sapiens
ctactttccacaggggaatttacatcacacacacagacacccatatacagttgtatataagcaatatacactcttaaatatactgttgaatatacatgcaattgctggcatttttctcattttgagtggactggtaaaactttgtcaccaggaccattcctggagtcattgagcgaacagtggcttgtggggagatgctggaaacccacactcttttcctgattgtgcattccctgggaaagctgcttccaattctggctgtgactctgtttacctggttatgtaaagtcggggtgataaaccttcctttaaaccctgccctggcgtttcctgtggagcctggtggaggactggggagaggagtgtgccctctgctggtaacacctgtactgggaggaccttgccgcctcccctgagctgtgtggaagtgtagctcatggaggtgttcggagtgccttcccttgaagaaggaaggaatttcctaggcaaaggattattattcttgtgcgttattttcattttattcctatggccctgatgtaaagtca

SEQ ID NO: 455190 - DNA, 504 bp, Homo Sapiens
cttttccacaggggatgttttgatacagggatgatacggacatctcacatcttatctagaccaagatgtaagatacagacatctcacatattatctagatcaagatgtaagatacagacatctcacatcttatctagaccaaacctcataggcaaagtaacacatttttctatattttctgtacagggttcaaagttagtatcaccaccattgcatccctaatagcttagataactggctgtaaaacagtacctcaaacccatctatcccggtctgcatggagaaaaccaagttttaaagaccaaggaaggcggttactcactgttagagctagcagcttcccataggtgagatgagcagggatgtggtcagtcttggatctcagtgattccatataccaatgctctgcttcggggagtttgcttaaacgcatatatgcttcacccatcatgttgtacaagctctgtggaaaagtacccttggaaaagtaccctgtggaaagta

SEQ ID NO: 455191 - DNA, 513 bp, Homo Sapiens
cttgccagcagggaagccaaagaaacttgattctgaagtgcaatattgaatagaaatatgtaaatcaagtattatataattgaatattgatcaaatgcctttaagcagggccctatgcttagtgaagttcgcttgttcattccaagtgaacatactcattaagcacctgttaagtgctgtgcaccgccttacccaggtgagctgaaacaggtgtggtcactacccgcatggatcttgcagttcagagggggaggactggcacgtcagttggctgcacaagtggatgtgaaacagcaacttgacgaggactcagtggtaaagatagggagtcagaagtgggaaggctgcagcaggacagcacgacactcctgggggatccaccttggaggcactgcatgggatctaggtctttgtgcagaaatcaatggaaaggcattgaagaattttaagcgaggaagtggagcgaccagatttgcatttcagaaagctcactctcagtgtcctgtgaaagta

SEQ ID NO: 455192 - DNA, 335 bp, Homo Sapiens
gttagcgttttccatagttccatgtttctacaaggcataggaacatcagaatcatgtgtgtgtgggtgcttattaaataaaccaattcctggagctcactcccagtgactcccagtctgatgattaggggctcagttaggacctatgtttgcaaaagctcccaggtgatctcatgcagccagcctggctctggctctggctctggctctgggagctgggttgggaactagtctttggtgctattctgctgaaacttcaagttgggctctttgactctgtcttgtattgtcacctttgtattcaggtctgtcttcgcctgtgaaaagtagggcgcg

SEQ ID NO: 455193 - DNA, 497 bp, Homo Sapiens
  misc_feature (320)..(333): n is a, c, g, or t
  misc_feature (460)..(460): n is a, c, g, or t
ggaggacagacctgaataccaatggggaccaaaccagacagagtccaagagccccacttgaagtttcagcaggatagcacccaagactttgtttcccaccccgcttcccgagccagagccacgagccacgagccacggctggctgcatgagatcacctgggagcttttgccaacataggtcctaactgagccccttatcatcagactgggagtcactgggagtgagctcccggaattggtttaatttaataagcacccacacacacatgattttgatgtttctatgccttgtaggaacatgggactatgggaaacgcttnnnnnnnnnnnnnnggcactaaaagaaacctataaatattcactaccatcccaggcatcatgaggacgctccatgtgcactatttacaatacttagaataacctgcaaaggaggcattcattcatgatgatgggctttatncgggatcagagccagcccctgtggaaagtagggccgg

SEQ ID NO: 455194 - DNA, 776 bp, Homo Sapiens
tcgagcggtccttcacggcagatgcttctttaacttgaaattttaccagctgtcatctgttgcagcaccaatggttaaatgaatggaatattgtttattccacggagaaaattatccagcctttagtatataaatacaccttttattttttcacctttatatatgaaagcaatgatatgcacctatcctcatttataactagttgcttgttagttagatgtatcctccatcacactcacacacccctttaataatctggttctcacccttttcactccattgaaactgcccattcttattgcagccaccatctgactgcctgaccatttctcatcgctctcctcctcaatctctctgcactatttggtatgttttatggcacctttccaccatacacatgttcttgaactcctctgtactatcttgcattgcccctccattctgtgtcttctttattagcctgcctttcttcttttgtctgcaactagattacatgctcagatgagtgctctctttcaaactcccttgattcattcattcccataaattgagtacgattggtacctctagggacatgaatctcagatctctatatgtaggactgacatcttacatatatatgcagctgctgcggagtatttcttcctggaagtaccactgcacacctcaaagtccaaagttccaaggcaaaacttactatttccccatggaaatgtacttcttcttttattctcaccctgctgatagattatagcagtcacgtgcactccaagatg

SEQ ID NO: 455195 - DNA, 154 bp, Homo Sapiens
atgatgctgaagatagggaaggatagaacattgagaacataagggactttagagataatcatttgaacctctccattttctcagaaaataaactaaaatttaaaataaatacagtatatttaggaaattgtgttcatttttatacatttaacta

SEQ ID NO: 455196 - DNA, 545 bp, Homo Sapiens
aatgaatgtgatagacaaggttgtcaattcacttttctctgttcttcccttctaaaaataactaaatattttggaaatagttcaacagacaaccataaaaggattctgatggctggaaagaaggcagtgactgactaggcatctcaggacttgaaggctgacactatggtgagttccctggagttttcttttcatcactcacataacccaaactgggcaccacagaagcctgacacacagatctgccgacagcataaacacacactcaaaagtagaagaaaaacttgctttctccagccaaaagacccggaaagaggaagcccaacagagagggtctcccagtggggagccccaatcccttctccatacctggagcagtgacagaccaatccaacctgcagtggcaatgtcagcagaatcctggatctctgggccctccacccagcatcagacattttaccagaccctacatcttctggcctcccccacccactccagtgataacaagtggcccagggaaatgccttctacccctgtggaaagta

SEQ ID NO: 455197 - DNA, 537 bp, Homo Sapiens
  misc_feature (447)..(465): n is a, c, g, or t
tacttttccacaggtaaagaggtggactgtagaaccgcttaccagcattgaatgtcagaagagcaggatttggcaaaggggatgaaatcagatttggatccatgagagaggggcaactctgggacaggccagcggtatctcaaaggctgaaggatctcagaatgtgatctgcggaaagtctgtgaagacagagctctaaggaaggaacagtagccatgggtaaggactacagccatgcactagggtaaggacactcagggaaagtaggcagcatgagatggtcagaagctaacatcagggcctggggtacagtaacatttaggacagggttttcaaactgtgaataggtaatgaaatcaacaagagatctccaccagcatttaaaaatagtataaaaatattaatgtgctttacatataatttgggtaaagatcttttcctgtaccnnnnnnnnnnnnnnnnnnnccaagttttattggaccatccgggggtgttccccaaagggggggattgggccgcgtcttgggcccctttggg

SEQ ID NO: 455198 - DNA, 522 bp, Homo Sapiens
  misc_feature (123)..(239): n is a, c, g, or t
aagtgtgaaattacagctgtgagctacatgcccagccagaagcatccattgaaatataggtgacatactagtaagagatacttgttatcccaccgtcaaaattgatccctaaggaatttttgnnnnnnnnnnnnnnnnnnnnnnnnnnnnnnnnnnnnnnnnnnnnnnnnnnnnnnnnnnnnnnnnnnnnnnnnnnnnnnnnnnnnnnnnnnnnnnnnnnnnnnnnnnnnnnnnnnnnnaggttggaaaaggtccctaaagaattctaatcctcccttccccatcattccagtttgcggacattttttaaaataaaaactaaaggggaaaataaagatgagatcactggttgccttgtaaccagtgttttactgtatttgatttatttggcctgtaggtgttttccatttggggagctaaagaccctgggagctcaggatttcaagccagttcaccaaatctgccaaaaggtcatcccacatgagctgtacttaaaccaggttctattccatgtggaaagta

SEQ ID NO: 455199 - DNA, 516 bp, Homo Sapiens
  misc_feature (181)..(310): n is a, c, g, or t
ctctttagctccccatatggaaaacacctacaggccaaataaatcaaatacagtaaaacactggttacaaggcaaccagtgatctcatctttattttcccctgtagtttttattataaaaaatgtccgcaaactggcaatgatggggaagggaggattagaattctttagggaccttttcnnnnnnnnnnnnnnnnnnnnnnnnnnnnnnnnnnnnnnnnnnnnnnnnnnnnnnnnnnnnnnnnnnnnnnnnnnnnnnnnnnnnnnnnnnnnnnnnnnnnnnnnnnnnnnnnnnnnnnnnnnnnnnnnnnttccttagggattaattttgacggtgggataacaagtatctcttactagtatgtcacctatatttcaatggatgcttctggctgggcatggtggctcacacctgtaatttcagcactccagggatctctgaggtcaggaggactatctggaggccagggagttccagaccagcctggtcaacacaagcaagacccctgtgaaagta

SEQ ID NO: 455200 - DNA, 458 bp, Homo Sapiens
ggttttcacaggcacagtcttgcctaacttctccagcctatcagtgcttctcttctcagacagtttaacattcactttctgtttcatttgtggctattctgttgccccaaatagacttcgagtcctctgagtaccaagaccacatcatctccttctttacagacccttatctacaggcacgcttccaggatcagccctatacaagttttgcctggttgattgggttgagtctctagagtgaggcctgcaagatagcatctatgcgattcagggggtcagggtctctgtgagggaggaagggaagcaccttgtgtgcctgctgaactcctggcagctagcccacccacccaagaccagggaggacttgccagagcaagcaggtagtttggttggcgtttgccatgggcggttgtattttccccctgtgcaaacgtaaccatgtcccggacgaccgtcga

SEQ ID NO: 455201 - DNA, 501 bp, Homo Sapiens
gagtatggattctggtaactgttccttctaagtggatttctggattgctatctgcaggctgtgtgcccattaggatgtactgacagtatcacaagtgctcgagagagaaaaccccgggcgcgcagaagagtgaagtgtgcactggctgagatgcgggagcaggtgttgttggtttctccggagtaagttaccttgagtgagttaaggttaagatatcccaggggtgaggttgagcaggcagttgtgtatgtgaccctggggaaagtctagctgaagatacaaagatgggatgagatcaccaaggagtaagtgtctttagcaaagagaagagaccaaggactgaatctggatacctcaacatttggagtcagagcctgaaaaggatccctcaaaagtgcccaagaagcagcagaatgaggaaagacagcccagggagtgtggcacagctgctcccaggggtgaggttgagcaggcagttgtgtatgtgaccctgtggaaata

SEQ ID NO: 455202 - DNA, 873 bp, Homo Sapiens
gatctcaccatgaagtgtaacgaggaggaaaaatctcttagctctgaggccttttccaaggtttcactgacccatctgcgtagatctgcagtcccagatctttcttcagacctgggcatgaatatttttaaaaagttcaagagccgcaaagaagaccgagagaggaaaggctccattccattccaccacacaggcaagaggaggccacggagaatgggagtgcccttcctgcttcacgaggaccacctggatgtgtcccccacgcgcagcacattctcctttggaagtttctctgggctgggagaagacaggcgaggaattgagaaaggaggctggcaaaccaccattttagggaaattgacccggcgaggcagttcagatgcagccactgagatggagagtctgagcgccaggcattcccactcccatcacaccctggtaagcgacctgccggacccctccaacagccatggagaaaacaccgtcaaggaagtgcgatctcagatctccaccatcacagttgcgaccttcaataccactttggcgtcattcaacgtaggctatgcagactttttcaatgagcatatgaggaaactctgcaaccaggtgcctatcccggagatgccacatgaacctctggcatgtgctaacctacctcgaagcctcacagactcctgcataaactacagctacctagaggacacagaacatattgacgggaccaataactttgtccacaagaatggaatgcttgatctttctgtagttctgaaggctgtttatcttgtccttaatcatgacatcagctctcgtatctgtgacgtggcgctaaacattgtggaatgcttgcttcaacttggtgtgtgccctgtg

SEQ ID NO: 455203 - DNA, 660 bp, Homo Sapiens
agccggccctacttttccacaggtattatttaaagcttgtgagtttgcttagctaatgcactagggtgaggtcaaggtgatccttgcagtctgacttctactaggcatcacttgactcatttgcatcattgtctctcaaaggaacagctcctgcccaggtctgtgggcactcagcatggatttcagtctccctgtgagtgatgggaaagaactaacagaggtaagaatgtaagtggcagccctttcgaaacttctatttttgttcaaacctaatattttccaaaaagtgatttgatttttttgttgtttcaaattataccgtaggctgcaaggttttactgaatctattccattagtgacctactggaacgttcaaagaataaaaatctcacttgctcagtgtttttgatacacagtgacattcagtctgaagtaagtgatatttagggccaagaatcatttcaaatgcttagtatggaaagttgcaatctgggcagaatacactgtatcattttcactgggaagctccaagtattcagcagataacagaactttcagaatttagtttgaggtcaagattttaatgtctgtgtttgatgtgtggcctgtcttccttttctttgatgttttggtatcaatatgcctacacccctgaaagta

SEQ ID NO: 455204 - DNA, 552 bp, Homo Sapiens
  misc_feature (387)..(387): n is a, c, g, or t
cggtaccccagggtatgcctgaatgtgataaaccggcatcacaatcagcgagaatggaaaagagtattcaacaaacagcatttgtacaatcagatacttattaggaaataattgagttattcacctcacatcataacccaaaataaactcctgaagatttaagagttttgtaaaaatagttacacagattcgtgtgtaagtaaagagcaaaaactcagaccacttggattcaagtccctgctctgccatgctgtcctagtgtgagaccagacaggcaggtataaagcaccccctccataagggggctctttccagatgctgacattgttttctagtattaaaattaatctcttttccagtactacctgtacatgagactcaaccacnaggtgaaaccgggggtgatgagtaagtgtcccggctctgcagggtttgacagtccaattgagttgctcatgctgatcccacaaccagacccgccgcagatcaacaagccggcatgaacagctctttaagccaccaccccagtcttccttcagtaactatcctccc

SEQ ID NO: 455205 - DNA, 519 bp, Homo Sapiens
tacttttcacaggtttttttgaagagtcataagggatgcacttgaaggctgtctgatcattccttgacatgggcagaattatggggagcatttgatgaactgagtacccagctaagtcaggcagctgtgggcagtggaaaagaatgatggatgtgagctgggctgggaggcagggaatgggaagcagtcagaggagggaggggctttcttatgctttatttcaccaaatcctcacaagaaacttgcaatggaaattgtattgttcccttttatatgtgaaaaaaacggaggctcctggagactgagagatttgtttgcataggcgatgcatggaagaggcagggtctaaacccaggtagtttgaagcagtgctcttctttacatgctacaatcacatcagccttacccacagcagaccttgcacagtcactgctgacttgaatcttctttgcctttgacgtcgtgtggcattgggcaatcacctaatgtctccgatttgttcctcagcacccagcaccc

SEQ ID NO: 455206 - DNA, 561 bp, Homo Sapiens
ccacagggacttagttttcatcctttgattagcatacgaagtgagtttctttctcatggtacctatttgttgtctctgtagcagttatcttcatgtgccagctctttttctgttgccttatttatgattcgtttctcctctagaccagagtccatgaggaaagcccattcctgccttccacactgttgtatcctcagtgctcctgcctggcaggagatgctcactcatgaatatttgttgggtgcatgtgtaggcagggagcaaaaatgcattcttatctttttgcacatttgagccacctgtctggaggggccatgttggggctgaaagttagcattggttcttattgaagaatcgcagaatgagagctcagaagaggagctacttttaattctaagccacatctcatcgtcagagatgtcgaaacgtgaaaaaagtgtgcatctttgaatagataaaatacagtaagccagcatgtcttaaacagaggttatgttaaattcatttataaaatattggattaaacaaaggtactatggtgggacttcccctgtgaaagta

SEQ ID NO: 455207 - DNA, 431 bp, Homo Sapiens
  misc_feature (118)..(129): n is a, c, g, or t
cttgtggttctttttcaacagtttaattgaaaagaaagacactccatttttttcccttttctttattttcaggttatatttcacactatgtgctgactgtatctacagaagatatttnnnnnnnnnnnngataaactttttttcaaagattttgattccagtggaatctttgctttagatttgtgtgtgtgtttgtgttcgtgaattgtaactccagaagcaatgcctgtacaagctccacaatggacggatttcctctcctgcccaatttgcactcagactttcgacgaaacaattcgaaagcccatcagtttgggttgtggccatactgtctgcaagatgtgcctgaataaactccaccgcaaggcttgcccatttgaccagaccactatcaatacagacattgagctcctccctgtgaaaagtagggt

SEQ ID NO: 455208 - DNA, 814 bp, Homo Sapiens
tacttttccacaggtctatataacgacgagctctgactgcgacaccgtgatgtgtggtgcaaacctgacctggcgtatcgtatggtctttgggtacatgggttacagatcagtgatatcatgtgtcagtcaccgcttcatgtgtggacaggtggcgggaagcatgtcctcctgaggtgggaaggcctgctgtggaagaccctgtctcagaaatttgctgtcttggctgcttctgagctatggcgtcacctctgtggtggcgggagtctcgggtgaatggatcctgctggggtcatgggccatgagccaggccggggtggggtccctgagcgtcacctttcgggtcatgagggtttcctaagggagccgacctgaatccccaccagtgatgaatggtttctctgggaagcaggtttccttggaaatcagtcccaagaaggacaccttccctgaaaccttgcaggggtaacagaggtccaggcaagagagggttctttcaacccaacgcagtgcagatcctagctgagacttggtgcacaggtgagtcctggaggactgcccaggccacatgagggcatccacagggtctccgtggccaggagtcttatacgggagccctctgtccccgaggcttgcagaggggttgggtgtgggtgatctggcttacggagtcaggccgtgaacattcaagggtcgggaaccacccatggccctgaatgggaccgaccctgttgagcaatggccatcctggtggtggcaccttgagcctggtgggggtggcgctgcctcagtgggttagtattaggatctgtaga

SEQ ID NO: 455209 - DNA, 465 bp, Homo Sapiens
tggtaccgtacttttcacagggcgggggaaggagccagttttccgggttttaagtaccccttttgaggctcctataagttacctcttgtctggatgaaggatttggttcctggctaattaaaggctgaggtgaattggtgccctatgcagaggaaggggtggcccatgcttggccaatcagggcactctctctttccatctgagatgtgctggaagcgggagggctgtagggagatttgatcctttgctgctcggcgtggggagatgggatttccccttctggtttagttttaggaagttcgtgttaattggccttaggttccctacccccagacccaggtgtcctccttttgatccagctttgagaagtcagcaccaattggcccccagaccctggtgtttttcctcgattcagcacaaattggccttaagttccagaccctgtaaagtaccctgtgaaaagta

SEQ ID NO: 455210 - DNA, 513 bp, Homo Sapiens
  misc_feature (184)..(192): n is a, c, g, or t
gatctagaggatccctatgtccacagggcctagagagagttccatcaacacgagaaatggagaaaaccaaatggtttgttgctgtatatttagtaagggctttttcacagtggccagaagtaatgttacatttaaattctgcatcccaatcccgcatttcagaaagggacatgcttttttattnnnnnnnnntgtttaaaagtgagttttcatttgagaggctcttcccttttgtatgggtgccccctgcaaggccgggtctagctgagtcgtatttacaggtatagaagtgagttgctgctgaaatgcaccatgttgaaatacactaactgttgtttctgaggggcagtagtcctatatggataaaaatgtccaggcctccatctatggacacctttctacaagtgtccatagctcttatctgtctatgggttccactcagctaaagtacttcctggaccataaagaaagggagacagcgaacacgtaattgttagctgtatttcatgttca

SEQ ID NO: 455211 - DNA, 546 bp, Homo Sapiens
cagacatgaggaatacagggaagaccaggatggagtaaggtgatgtgccacagcctggaggagagaatgcatggtacaactggagaccatttctgctgctgctgaatggttgcttgtgctagcaaacctctcaatttctgtggtttagtttacctattctaaacagtataccccaccccaactgtctcatagggcactggcagcttcaggacgaggctggttatttgcagatgctctcctgtctcctctgtcctcatgtagctgctctccagtgggcaaagcttcaatcctgcctctactctctctggtccctgcccccttactccatatactttgctctcagtgaattgctcagccagatgataataacttgcacaatatagactatgctatctctgtatttaaagatcttgtgtttaatataggcctccccagagtatgcgggaacaagagggagtacagataagggagcttagactttagagtctaataatttttggtgtctatgaaaatatttttttaactttgaattcttttcacctatta

SEQ ID NO: 455212 - DNA, 537 bp, Homo Sapiens
ggatccccttattttccacaggggggcctctctctcctttccccaagggcaccagccttaccaccccaagacctatccttgtgaccgggttcctcctctcggtactctgagcccaggctggtgctcgtcagatagcatcatgggagattacaagggcccagaatgcaggctgcagagttagatccccagaacaggatctcagctgggttccatctttcctcagcggggcaaccggtggccaatgactagctttctggtgcctgagtggctccatctggggattggacgatggtcatagtcccggcttcaaagagtcactggggaggattactggagaaagtgcagggaaggtgctgggaactaaattgctcaaaaaaagtccatcgggccaaagtgcggggattacaggtgtgagccaccatgcccagccttaattcatttctaattcacaaattctaaacaaggggctaggagctaccatagtgtacagggcagctgtagaatcacaggaaatggtcaatgaccctgtggaaacgt

SEQ ID NO: 455213 - DNA, 509 bp, Homo Sapiens
cagactagttgttttaaagcaacctctcgtgatactccaagccgaaagatgtccgaatgggatttaagtaatttctgccttccgcctagggaattggcttgtatggccggtttttccactccctttgtggtatctatatagagataggatatatgactcacctggccaaggtccggagtctggacctttgggtaatgagtaccttgtcctaggaagataaactgagcaccgtgtccctaggacttgcacgatcgaaggatccccttggttggggcttggacctttgcccgctcatctgccaaatcttttaagttgtcctgatcagcccaagctgctatcacctggatcttggttgtttttattattaattatatagaagtattttgccacaggaaatcttttgtcttttttgtgggaccggtcttcagaaatggtcccccgtctctgtagatacctctagtaattggtctccagactccttgccctttaatccagccctgtggaaagta

SEQ ID NO: 455214 - DNA, 310 bp, Homo Sapiens
gctcggtaccctacttttcccccggggatcggagattatatgggagggggcacatgatgacaactgttgttattaaagcctccaccatatgccatatgctatgctaagttcacttattttaacactcacaatagtccaatgtagccagatagtgtgatattctgttttagaaatgagaagacacagctttgaaaggatttgtgatttggtttgctgggcgtttcagtaagttggtgacttatttattgacctcactgtacctaaatattcattcctttgtggtgggatgttcctgtgccctgtggaaata

SEQ ID NO: 455215 - DNA, 516 bp, Homo Sapiens
tattgtgtgtgtgtgtatgagaaccttcacttttagaataatattacattccaaatcaaattctgcctcaaaagagctattcttccacaattttctgcatttctgtacaggttacaaaatgtcacaattcaatggggccaattattagattttcatttaatgggcagttttaatattctcagagaagctgaatagtaataacattttaaaccattgcagttccattgtagagactcacaaccagttcttctctctttgagcacacctagttatatttttgggtatcatttaaattcaggctcccaatctgtagaaaaaatcaatgagttaatgaatagcttcattttgaaaacttttaaaatattttatcctaattataaggcatatctagtgacattaatttggcgaaatcccaaatcatcagattgtgcagaatagcccttaccaaggagtaatttagagcattttcagtttaacaaatgtgctgtttttaggaccagatcatggctttgctta

SEQ ID NO: 455216 - DNA, 564 bp, Homo Sapiens
cacagggcagtgttggtttggtgcagaggagtggttatcgcctgtcggcagatcgtgcactcccagcaggatttgtgcccctgtgctacctatccgactcctctggacaattgcatttgcaacccttgtctataccatcgatctgccatgacttagcaaatatgtcttgtcttgttattgactgttctgtgtttacatgtgtgtcttatattcccttcacaattcaattgccctcttcctgagggtagggagtctctgttaactttacatgcctcctgcagtacctgacacatagtaggtctgttgtttgagaggccagtgcctgaggtggaatttgccttatgacttgcttctaggtcagtggttctcacttgcaccctctgtcaacattataccaggcttgggggtggggtacactctgtccagtgtttactagaaagttccagcagaggtttgaagcatgcccgccccttagcattacagggttgggcttgtggtgaaggcaatggcgggtgtcatttgcagaacccccctgggtgattccagggcatcccctgtgaagta

SEQ ID NO: 455217 - DNA, 342 bp, Homo Sapiens
tgaatgagccggtcctacttttccacaggctatcagccaaactttcctctattcccatccattatacttattctatctcttttccctgaagaatctgatgccttgtggctttccctgccagacttcaaaccactaacgagtacattctagtcgtcaagtaatagatttgctaaatcatttgctaaatattttaggaccattctttattaatggtttccttcaatttctaaaattgacagtttcctacagtatctttatcaccattgacctaattaagtgatttttatcctaagtcacacatagaaatggctactccttacatccttacttgacaacattttt

SEQ ID NO: 455218 - DNA, 672 bp, Homo Sapiens
ccccctactttcacagggtactttccggggtaacgctagggtttatgcttttcacttcatactctcctgtagcccacattcttgtggtttttttccttcatggtatgtagccttctgcaggtttctttttttggtgccttgcagagcaccccaaccacaggcacatctaagcctttttttaggatcttggttggggtaacagtcccaagagcacacagcaacagcagctttaggagagaagcccagctctaagaaagtgaaggggaaacagacttgggccttcccaaggatccatgccataatgtgtcccagaggtgtactggctttttcttccaatcgtgataatcagatttatcccttaatagctaaagtcatgcctctgctggtgacaagaagttaagaatcttaaatctctaaaggacagatgataacccagtgctatcaatgtggtttgggaagaggaagctgtgaaatggccttaagtgtctgataggagatttttttcaggcagcctgcaacactgtggatggtgataatgataaaaaccaattgtaagtaggtagggcttgaagtaaaggaagtctctttctctctaacattagaaggaagtattctgagatcttctttagaatgagccaggcaactactgtttccatgtcctgtggaaaagta

SEQ ID NO: 455219 - DNA, 588 bp, Homo Sapiens
tagatcgagctcggtacctacttttcacagggggaaagccggcattaataaggaccaggaaaactttgcataaaataaataggagatggaatagattgaatttgtatatgctgcttccatttcttcctccattttgtgttgtcttcctaagtcgagttactggcaaagtgggatttgatttgccacaaggactcataccttctgcagcctaggtgatgggcctttcttctttgtgggacgtttgtgtgaccattgatgtttccaggaaggaagaatctgatggaggggctgttaccatgaaatgttgatgattacttggtacaagtagtgcgtgggagacagaatcccaaagtgttgggattacaggcgtgagccaccacactcagctgatttttattctttaataagagcaacccatttcttttatcaacagacttgttttcttagcaaaaagggaggacgtattgatgtcactgctttccattcaactaagttggtatttgtgttcagatttagggattcctgcttgcccgaaccgttcatttatcttttaccttgtaattgtcccaacagacctgtggcaaagta

SEQ ID NO: 455220 - DNA, 736 bp, Homo Sapiens
tacttttccacaggggaatcaatccccttcataggctatgccagtttaagatagagtgtttgtccctttgcagttagaattactgactgacacattggacaatcatttatttgaaggaaggcagagtactcagagtgttaaggatccagctaacatctggcccataaacttgaacagagaaataaaagcgggaatagaatgtgttaactctgtcagtggctatcattccctgtacaagacattattgttagttttgtatagttttctaatctgggctttaacatttcaaggataattttagtggcttctagccatcatgaggaaagaacatgtcttgagaaacatggggaaaattgaaaactgtacagagaatataagtttttggcaatgttgtatgttaacctaatagccttaatggtaccatgataatttctgggtaaggaaagtagaacttatttataaactgttgtgctgcagacattgtgccaaggttaccttatgtggaccaactatcacatgaattcatgaattgattgatttttttccattttgcattgaggaaactgaggctatggagagggtgatttttaacctggaagactctctctaaacctgcccaattagaatggaaccctctcttctgttcttctggaataccttgtgccctcctttaccttagcactaataatgctatgttgatttctgtctgactctttttcctttccctgtgaaagta

SEQ ID NO: 455221 - DNA, 509 bp, Homo Sapiens
  misc_feature (317)..(457): n is a, c, g, or t
cactaaaccgtaccaagtatacattattttgctctctctcattcaaatggttgggaaaatttattgtcttgtcatcacagtttaaagattgtactctacaagggtagcaaacactatcctcgttgaccttcagggttgggactgtgtgacttgtttataaaagtgtataattgtgtgagagagagccaaattatgtatacttggtacggtttagtgttaactgttgggatatcagaaatattaattatactttaagtgtactggccattccttgtggaagaagcacctgtaagcactgtatgtacagtgtaatcctnnnnnnnnnnnnnnnnnnnnnnnnnnnnnnnnnnnnnnnnnnnnnnnnnnnnnnnnnnnnnnnnnnnnnnnnnnnnnnnnnnnnnnnnnnnnnnnnnnnnnnnnnnnnnnnnnnnnnnnnnnnnnnnnnnnnnnnnnnnnncctctgtcctgaaaacaaagttcttaaaatactgtgataccctgtggaaata

SEQ ID NO: 455222 - DNA, 520 bp, Homo Sapiens
  misc_feature (495)..(495): n is a, c, g, or t
tatttccacagggccagaacaggtctacaaaacagagtgctgagctggcagaagcaagataaatcaaatcattcttctccagacatctattaatccacttagtgacattttaaattggcttatactctctgactcttgcccaccaccaaaaccatatcttaaatatttttttgatcacattattttacatgtttacctttttaaaaggttgtggactttgacagaagccttttaaaataccataaaaatgtatcatcattctgcgttgttgttgaaaaatgatagaaggctaaaaatccacacacacaataagtaacagctctttatatgcatctttatacatatatatcattttatttctattaactgggatatacccatataaaattttttgctattaagatgcttgcttatttttcctattcaagtgacaattccaccctgattaattgagggggagtgccgttcttcaccatctgccatcttccagctgtncacctgaatcacagatatcccctgt

SEQ ID NO: 455223 - DNA, 436 bp, Homo Sapiens
accctacttttccaccgggagagcagcacttatttcctgtaccaagtgaattcgtgggatgattcagacccatgttcctcggccctcttcaggacattttggcttactgaggtcttcttgtcgtgttggagaaagggagccagatggggattctgcaccactccagcccccacatgtggggacagacacatagtagatcacccctgaggctttttgtggtaatgtggttactgggaagcctgtggcggtctgtggccaccaacaggctcattgaatttaccccttgtaatctgcacagaacttggacagctcactccccgatgagccaccacatttatacctgcagctatgacctttctcttgagcctcagacccttatatcctcctgagcactggttatttctactttgatatttaaaaggcccctgtggaaata

SEQ ID NO: 455224 - DNA, 396 bp, Homo Sapiens
taccagaaatgttaactgcccatttagaacaatcattcttttagcaatatcaactctgcaagcaatgcagagttaatgcaaaagaccaaaacttacagatcaaagtaggggatagtgtttttcagtcaaaatatttttcttcttatattgaaatataatgtgaaatcagttttttcaagacatgtctttctgaaaattctccattaaatatacctttaacacatctgtactgggacactgttaaacttactatgccaaggaccacttgcatttaaatgaacacttcaagtaaattctgtctatgagagaaaccatataatgatcctaggagaaaatcagacttccccatttagggttaactcatactgaccgtaataatgttaaccaaccatcctg

SEQ ID NO: 455225 - DNA, 444 bp, Homo Sapiens
tacttttccaccggggacatatgtaatatatgcacatggttatatttatatgcaattttaagagtttctggcacattttcttgttctgctttatcagacttaataaatagcatataactaacttgatgataaaatctataaattttgggcagggacctgctaataatatgatgtgctttgatttcccttgggttgcctcagcttctgtgctcactgctgccagccttccagcatcccctaccagtatactcagcagtcctcaggccaggccagtgtgatgaagaagtgtcaggtgacatctggcccagctagaagttttgcatactcagattcccactgtagtgtcttcacccccaaataagagaccgctctgatatcagagtggcatctagtgtcagtgaggcctgatagtgactgagcagacagaatcttctcaccaaccca

SEQ ID NO: 455226 - DNA, 531 bp, Homo Sapiens
tacttccacaggtgatggcaggttttaccattcagctggagtacaaagcgctgtaaccctttttggttaaatatctacttgcttttcctacagtattattttgagttgctgtggctgtaatgtcttgagggaatcgagcttgacagtaatttatagaacaaacagtttttagagactggtgtggcccaattgccctctcaatgttggcactcctgccatgacatttaccatgctgagcatgtgaccgccatctgaataccaaatgccacaggaacctgggaggttgtcacttactcctccctttctctgagtcacctttgcccttcagtcagtcaccaagtcccatcacatgtagctctgtaatgtcacagaagatggatgtctggcctcaaaacacttacaatgctggtacctaaattgggcagccacgacctcccaccaggattattgcagcctgaggggatctttttgaaatgtcaatcaaactatcacttgtctggtttaaagcttttcaaagacttaccccattga

SEQ ID NO: 455227 - DNA, 614 bp, Homo Sapiens
tgatactcttttgcttttgtcttattcttttttgcatccaatatacacagaattcatctaataaaaggactaaacttatagatgaatgagtaattcaaaggcaaacacatcagtttcggattataaattgtatcctaattatccattgtttcatatcacgtgagaatgctgtaaatccacttagccgtttaaattaatactgctggttgatgtatttgggattaatgagagaaagcccatgctggaggattactcagtaagtttggcattgcagaaaaagaatggttttaattggttttcactttctatttctaggatagaattcactacagccatccactcctatggtcaaatgccagagctatataattcaggaattctgtcagcttcaaaactgaaaattccaatattccttttctgactactggcctccattcctagtctttctatttccactacactcgttttagaggtcagtgcaacctctggtcttctgcttctccattcttcacctagcttggactacccggcttgcatggcttcgaattctctcacccggagcctcgatctcctactatcttccttctgaagcgctaatcctccctgtggaaagt

SEQ ID NO: 455228 - DNA, 613 bp, Homo Sapiens
  misc_feature (343)..(368): n is a, c, g, or t
tactttccacagggtaaaggcgtgagaaaaatgcaagataattctaaactggtaaaagctacattacccaaagaatctcagtaccataaacagggaagatgggaatcgtaaaataaaaatattccagaaggaggtgagaacagttggggacctattaatttaaagtgggtggaagaagatggtcacggtcgaaatgtccagcaaggagtggataacttaaaactaagttggagcatcatcctttatgaggggaaaattaaagattaataaatgtttccaaaaggtatataaagacataggaaagtcctcgggaaatgtttccaggcagaaccacaataagggnnnnnnnnnnnnnnnnnnnnnnnnnnacattatatacatagatatatgtcagaaagtatgcatgcatctatatgtccatagaaaacaagtaagaacaaaatactcaaaatttcacttattcagtctacattttgactatatatgaacaaatgaatctttatactgtttatactctttcatttttctatgagcatacataactttttttaacagagtatataacacatgaatttagttatttattttttagccatagtaattagatatgacc

SEQ ID NO: 455229 - DNA, 555 bp, Homo Sapiens
cccccgttttatacaggtatacgtgaatgagtcttgagcctttctgtctgggaatggaggagcatttgctgagtgtttattctgagtgcactgggcggatgtgagaagggaataagccatggtctcttgcctctggcagtttctagcctgtgttaccacataataactcaatgctaagctgtgactgtaagtgctacagggatcgagggaagggagaggtggagtgtgcagcagtggcagctaagaaagcttacacaggaaatggaaccaaccttacagaaagccaagcctagaaccgagttaggctggaaggaatggtgagactattccaggtggggtcagtggtaccaacatgacagaagccacaatgtatttaggggtcaatggacagatgggcctggctggagcagaagatatatgggaaacttggagtgaggaaaggttagaaagcagaatagcatcatggaaggagcatgggacagggaatctggacatatggattctgcttttagttttgctactaactagttttcgatgcaggccctgtggaaagta

SEQ ID NO: 455230 - DNA, 570 bp, Homo Sapiens
tcgagctcggtcctactttccacaggtataccatttacctagagagacaggcattaatcatatgctactcaaataattatagcatttcaattgttaaaaaaatgttatctaggaaacattaactacaacagtatagaacagagacccaatctttggaaggattagtggggaaggagagggtcaggggaggcttccatagcaggagtctttggagctgatttctggaggatgattaccagcttactacattgaagaagggaaagaatcggaagagaattcccaggagaggaaacaccttttgcacttgtcctggggcagagtatatccaaagagctgagagaggagaggctgcttgtgtctggatcacaccaattgaacagtgggaggcaagaaaggccagatgaggctgaagaggggatgcattgcaggttggcttttaagagcttgtaagtcatagtaataatttgggtgtctaaagtttttaaagagattgaaatgacatgataagatgcacattttgaagacaccatgcagtatgcacctgagagactggcttgctgctgacaagag

SEQ ID NO: 455231 - DNA, 687 bp, Homo Sapiens
tacttttccacagggtacttttccagcagggtacttttcacttgggccttacttttccacagggcaggatgtccctagaggcctgcacactgagatgagacagtccagatggcatctgccatccaccctggacagcagtgtcatttctggaagcctccagctttgacagttgatgataacaccatctctcctcacccactcaccccatgaggaagctcagataagctatgcattcctggcaaacacaggcaagttgtgcccagaactggggaaacagggatgaaccaaggagatggcctctggcatgcactcacaggactagcaaccagtctcccacttctcaccaaacccctcttctgaccatgagggatctgcagcccagacactggactgtgttccctgccagcaaaaaggtaccaggggaatgtgtgaagaaggaaaagcatgaatggatgtcccccgtctgcaccccatagcactggagcaaagagaaggatgctctagcagagacacatatgtccccaggactcacctgccgtttcccaactgggattcacctggtgtgcacaggtatgatctcctcccacctgccccatgctacctatgctaaagaattgcaaattccaggagaagctgaatggagaacacaatgaacacctgtctgcacatcatgtagatgtcgccccg

SEQ ID NO: 455232 - DNA, 632 bp, Homo Sapiens
  misc_feature (136)..(190): n is a, c, g, or t
agattatattttagtgtgtaaactggcagtgtggtgtgtatatataaaaaacaaatagcacacatatggtaagtcaggcagaattcatcagatcatcatattattaactgaccgtaaactggaaaactcgctggtnnnnnnnnnnnnnnnnnnnnnnnnnnnnnnnnnnnnnnnnnnnnnnnnnnnnnnngcatgctaacgatttcagaaaccactggagatttcttgggggcagggagaaccctgatcctttcaaattcagactacttagatatatccatgcagcttactctgggctcaattaccatgttgcctggggctcacaaacttgcacagttctttttcacccttgaaaataaaagcaggaggaatctatttgtggagggtctttttgttatttgtggaaagattcctgttgccaccggaaaaccaggtatgaaagtatcaattaggtaagaaaccagtgttaatttcaaggaaccatctaagaaaaacaaatgcctgattttacgatgatttggtattttattatagaagccttgggatggtaacagaggcaaaggtatacagaattgccttattttagcagtgggttcactttgtgagttaaatctatgagtcccccctgtgga

SEQ ID NO: 455233 - DNA, 541 bp, Homo Sapiens
atttttaatacacaagtgaaaatgccacaaaagaatccacctggatttcttctcctgtggtgaattttggatatgagatgcttttgtagccaaatgccatggagaaaatcaattagatctgattttaacaacttactaaatttcacaatataataagggagaaacaaggtgtattaacataaggcactgcaatcaatctactgacaaaggaagaacaatagtattcggatataggtaatattatattgatgtgttcacaaaatattggacaggcaccaagtttttgctaaatggttgaatgcctagctcaaatttattttcaaaacgggaggctacagaaaataatcatttaggggatcttgagatgcttggtcatatctctcaataatcactgtgttgggagggaggaatcttctatcaagtcaaagggaaatgcatggtttggacaactagagttaaggatcctggccttgcacttcctagtggaagattcgcatggaagggcccgaaggtcttcgagtaataccctgtggaacagtag

SEQ ID NO: 455234 - DNA, 581 bp, Homo Sapiens
  misc_feature (45)..(116): n is a, c, g, or t
ggattttggaattgggatgggaagcgccagaaccttctccttttnnnnnnnnnnnnnnnnnnnnnnnnnnnnnnnnnnnnnnnnnnnnnnnnnnnnnnnnnnnnnnnnnnnnnnnnttcctctctagctgcctcaatcacagcatttacctcattgtgctgtggtctgtcatggtttaaccattcactagtgtatgttaaccctaacctgatagcaaggctatcaggttactgtatgtgtatgtaggattgacatacactagttagactaagaaaagaaaggagcttgcccaagttcctttctgggagcagaaagttgagaaattgagagagaacttgagagagttctgagggctctgggcatagccagtcaacttgaaaagagtaggaagtcaccttccgccattctgtgaatcaacctgcagagtgtgtctaaaaaatgaaggagtagactgagagaaaagcagacgcaagggaaaaatgagagcagattgtctgaattcttgttggttttccagttcacagttctcattcttctggaatccttgctggctctttgtcttgaagccctgtgcccaagta

SEQ ID NO: 455235 - DNA, 542 bp, Homo Sapiens
agcccggtacccctattccacaggggtagactaatattacacaggaaggggggaaaagtatacaactgagctagataaagactgctttgcttctggaaatgcaaccctcactcactctcttatttttttcatagccaggaaagatcacttactatcatttccaaatgacaagcctcaacccaatttaattagctttaccttgagatccagagaccaatcctgttctatgtagctttatttgactcctaacatcccttgatctttctattctgtggggtgtttcattatctaaagcaaatatatactacttaaacataaaaaattgtagacattatgaggggtgactcattactggtgtgtaatatcatggtaccagacattactaatatgtaaggagcatgagcagaaagacaccagcctgtgtatagccatagactactatgctttaaattgtttggagattgagtgtctcaagatctagataaatcagcaagatgtaagatgctgaacactgacatcttctttgtgcctgtggaaaagta

SEQ ID NO: 455236 - DNA, 847 bp, Homo Sapiens
  misc_feature (469)..(517): n is a, c, g, or t
aagagcatttgagcctgccgtgcacttgcactgccaggactagcaagcagtgccaaggtttgcctgatcacttgtccccatccttgatggggacaagaaaactaaaggaatttttcttttgatggcaaaagaaaactaaaggaagactgatacattccatatcagatacccatgttgcactctaaattactctcctcagatactttaaacccttcacagctggagttttccattatctaagcacttgtaatatttggaaagaaaaaccataaccaatctcaaaacaaccatgattcactcccccacaaaaaatgaaaaattaatcttaatttttaaaatattttgttcttatacattacagtacacttggaatttcattcaactttctgttttacacggtattactgggtgaacaaaaggctttctggctctgagggtatcttcaaagacgggacttttaccttatacnnnnnnnnnnnnnnnnnnnnnnnnnnnnnnnnnnnnnnnnnnnnnnnnnacagaccagtctactccagaccagttgaatttgagtctctgagtgtgggagtcaggcatcagtatcccgaagtgatgacagtgtgcggccacagttgcgaaccagtggctaacaatgaactagagaggggccttgtcctggtctactccacctgtgagccctgcagagtgcgtgttctccacaaggatactatccgggacaagatgtctatggtttcggtgatgactttgccagatcctctggatcatctaccaagttcaatctgtcgctctcgtgattatttcaattctggtgcacttattaccgactttcagaactgatggataagta

SEQ ID NO: 455237 - DNA, 532 bp, Homo Sapiens
catatggttagttttcagtctaccattttgccatttgttttctattcatcccgtctattcttttctgtcattttttgaatgaaagattttgtaatatttcatcttatctcctcttttagtggagatatacttatttgttctatttttctctgtggctgctctatagtagatacctttaacttacgacattctgccttcaaattatataccacttaatgtataagaatcctatggcgttatgtctccattttcctatcttctgttctttttgctattgtcatacagtttacttttggatatgttagaaaatccataattcaacgttaggcttgtttttatttaaagctttgttcatctgggcctgtagaggagcctttgccctcgggctagttgagctgtgtttataaaggtttcagctgaatggcctgagtttagtaaggtctctttaatcagtcagaaggagaatgcctgtgtaaactctggtagttgtgtttatagttcccaagtagttgcttgttaccctgtggaagta

SEQ ID NO: 455238 - DNA, 512 bp, Homo Sapiens
ggacccctactccacaggggatgggtagatggttggaatgggatttatagtgaatttgattataagagtaatcaacagacgtagctttggttgcatgtttatgctaacagttatggcttctaatctggccatttttgccactgtccctcagataatagggaatagctgctaattttgttattactcaaaagatttgagtgtgttcactcattctgagtcataatttttttcatgttcatatcacgaacacacccaacctttatacgttgagtagttcttaggctttggttctttgatgactaaagctaacaaaatgtagatctgtttgccaagttaggtaagtggttttatgaaagtatatttggcattaggatgagtttgcatttgagagaggaaacaatactcaaattaactactctgagaaatgtttttattcttaatgtttcatcaataatttgttaatgtagatagatttaataggaaaatttcttgcatattagggcctcaccctg

SEQ ID NO: 455239 - DNA, 503 bp, Homo Sapiens
tacttttccacagtacacagaggtgcaaagagaaagacatgagtaaaagcctaagtttgtggtatgtaatgtgttcttaggagacactgagtcgatgagtagattaacctgattactgcagaggcctaatataagaagtgtatatgtgggtgtgacccatttataaagagcttgaaatgccaggctaagatagtttgaaatttatcctgtaggtggtagagaggtgatggataatagaaatatttacattattcattgtgattaaggatagtttaatatatccttttttgttatttctgagttaacatttttaaaggaaacccacttttgaatatgtgtatttcagggagcttaagtacttttttacattagataattatatgacttgccaattgtaacagaagaatttaagtgttttaataatactttatagataatagtaacactctcttagttatgtatccattgtgccttgctaatgttaccattcctgtggaaaagta

SEQ ID NO: 455240 - DNA, 792 bp, Homo Sapiens
tacttacacaggtcatcccgttggaaattaacagcagacgataaatagtatataacttcacttctatctagcttacagtattagtattaatactagcttgtagtattgatagtgttaatcatgactggattcggagagtagtactcatttatttaatttagttatcataattcaagcttgcttgaatgtggttactttcaaataaactaatgttttcccaaatcactgtaattttgcatttaactaatataattggcttttagcatttgaatggaacatgtatatttttaaccttaacagaattaaacccaatatttttaaacagtcatgccactttgatgctaatgttacaacttctatttttatattggaaatttctttatagaacttacagagtttgtggtcaatgaaggcttaggaatggacctgatggcaaagatgaagaagatagacagccaagtgagttcatgatacaactttgggagagactgcacttaggggtggacatggagtagaatccttgatcccccacctcatctgcaactctctcttgcttcctctgccctgacactctggctcttgccattccttgactatcctaagtacacccctccctcaatgcctttatgttttctattcttttttcctagaatgctcttcctctgaatttccaaagattactcctttaactccttcaggtcttttttcagtgtaatgtcatctgtaaagactttcccaaccactttaactataatttacctatcccaaacttgcttctccccgtgaaatagg

SEQ ID NO: 455241 - DNA, 572 bp, Homo Sapiens
tactttccacaggggcagtgacagctggcggtctgtgttgagaagtattctgaggctgtgtcagggtcagcaggagagtatcagatctgccctgggcttggggctgggcatggtgtatatggacagtgtgtttattttctctgctaagcgtttatgcttagattctgccatcatgctttaggtgacttattccctcattctctggtctctttttctggccacacttcagcttatcaacatttaaaaagccatctggctgccatctcttctccctaattcatttctagggtggatttgaccaatctggctggtccagctgtggtctctcctagagcattgtttcctgcaatatcttcccaaatagaggaggaccatttttggatctgcagtctgctaataaaccttccaaattattaacgggtctcttaaaatctggagcccaagctaagtaagcactgtctttcagaagtactctcaatggttcggaggctagcaggactaataatacatcccttgatcctgttaatgcggcttaaaggttgtgttagctttttccctgtggaatcgtaggt

SEQ ID NO: 455242 - DNA, 500 bp, Homo Sapiens
  misc_feature (185)..(267): n is a, c, g, or t
agggatgtattattagtcctgctagcctccgaaccattgagagaacttctgaaagacagtgtttacttagcttgggctccagactttaagagacccgttaataatttggaaggtttattagcagactgcagatccaaaaatggtcctcctctatttgggaagatattgcaggaaacaatgctctnnnnnnnnnnnnnnnnnnnnnnnnnnnnnnnnnnnnnnnnnnnnnnnnnnnnnnnnnnnnnnnnnnnnnnnnnnnnnnnnnnntttttaaatgttgataagctgaagtgtggccggaaaaagagaccagagaatgagggaataagtcacctaaagcatgatggcagaatctaagcataaacgcttagcagagaaaataaacacactgtccatatacaccatgcccagccccaagcccagggcagatctgatactctcctgctgaccctgacacagcctcagaatacttctcaacacagaccgccagctgtcactgc

SEQ ID NO: 455243 - DNA, 470 bp, Homo Sapiens
attactttcaacgaatattttgtgtttctgaaagtccagagagtcacgtaatgtatttattgagcactttctatgttcagggacctactaggtactagggataggtagtggataaggcagacagcacctctgccccactagagcttatattcagctgtagcctcttagtacaatgttaagatgagttggtttgcttcaattcctacagaggccataaaccaggatcctaagaagaggtaaatttgggtaagtgaaagaggggaggctaaagcttagagcatacagctgctgaaagatttaagaactaagcgtgacactgagacaagtaggatggtgcacgaggagaaatacagtttgaggagttgaatacacatgaacacgtgaattgaacctaaaataataatagccaactcctggaaagccctggttatgtggcagtactgttctcatgaattcatatgtatgtaact

SEQ ID NO: 455244 - DNA, 453 bp, Homo Sapiens
cttttccacagggcatatttgttgttgttatttttcctcccccattcattgcccatgaattaatttaagaaacaaggcatcacggaataggctaaatataaaagagtatttgctatgttttttagtgtcaaacactataagaccaaggtactaaactttgaatgagaaaatattctgcagtttctcaggatctcacatgtttgtcatacttcttacagtggtagtatactatttttaatatcacttttatattgccgtgatttttaaacaccaaggtaaattctcacagaaagattgcctggggataggtatgtgtgtgtgggagggaggatctggtgatactcatatggtaatctttttatttcatccattttctctgctttcaaattataaattcaaactataacgtcactctccaccccctcccatctccttcccccctgtggaaagtac

SEQ ID NO: 455245 - DNA, 492 bp, Homo Sapiens
ggttgttgcattttcagtcttacatcgaagtattactgttttgaagatcgttaccatctttattcagagcccttggtgactttaactttgagaagtgacagcattctccagacattcctatctccaagacggacatgtggtgagtgaggcaagagctgggggaatctaccctttctcaataataggaaaagtaattaagggaacacacaaacctgggcacaggaatgaaaatggattgggaggaaattagcccgaggagagtctacaggctaagagtgcaaaggaccattccacccagcagaccctccttctcagttagcctcaggtactttttcaaagccctgcccgccagagggtttgccaagctacaagactgtgaaaatacgtactggttctggagtaatactgtttccgtgacaatatgccatggatctcctaatttttcactagccttatttagtattgctcacatttgttgaagagaatcaatga

SEQ ID NO: 455246 - DNA, 527 bp, Homo Sapiens
tataccacaggcgccacctctgcccagatatcagaggaaaacaaactgcttgaagactttcaggcactaacttaatattcacagtaacttttgaaaataaatatgagttattcgagggaaagtaaaaattagcaataaatgaatgcctgttgtagaaggcttaattgcttcatgcagctataaagaataatctgctctgttatttatttcaaatatttttgagtttgatagttttaatagagccaaacagataatatgcaaccttatacaaaagaaggaatcagtgtgtatagcactggttatgtgctagtcaatattgcagtgttttacatttccttaaatccatttaacaacccactaatagagttgatgatagggatgacaacaaaaatcataacagtgcattttattgcaaactatatgtctagaagaatgctgcacttcagtgattaagattgggacagaagatctacattgccaatgttcaaatcccagtattaatacttaccccttaatttaccctgtgg

SEQ ID NO: 455247 - DNA, 640 bp, Homo Sapiens
  misc_feature (306)..(317): n is a, c, g, or t
attgtagcccttgcttcctttaaatgcttatctttcctgataatcgagggtattatttcccatagacagcctcatgcttctaagacatattagaaactgtctttaacaatcattttccatgaccaagggaattggggataatagaatgtgtagtcactttcaatttgtgtcaaattttctgatgcatttgtaccaccaacattttatcagcttgtcactggaacaaatgaagttgcaaattgcattgacttttttttcatgaaatctttgaaactgtttatttttaacatgccttcccttctgtcnnnnnnnnnnnncccttctatagtgtaacaggctttattttcaactttcagggtctttgtcatttagtgagtacagcagacaggcacaacaattttctgaggcttgaaagttctgagggaagggattcaggcttttagggcgtattaaagctcaatgcagattgaagcaataagcacggagcaatttgatgaactacctgtaggcaggggtggagaatttctgacaccaggaaagccattatgctcctgttaagttcaatagcccagttggcctaaaaggttacgagtgatgtatgttttcattatcccctgtggaaaagtaggtaccgagctcg

SEQ ID NO: 455248 - DNA, 459 bp, Homo Sapiens
ctggtgatagatcaacttctgcttggtttcaactttaatatcatagccaggaaatcagagtgacatctgctctgccaggtgaaagatggaagaatagctccctactcagccctgctgccaccaccaggtgagggattcagaactatgccacttacttctgtgggatggcagggggtgatgtggaatatcagctgcctgcttgactcaactgaaactataagggaactgaacagtttttccattggtacttagctgtagtagggcaaatattgctgaaaagccattcttgcctcttaggtgacccttgtccttgtctgttggctagacaaacaggcttttgtaggggtattttttgtttacgccacctgttggtggttccaggttgaaggctttcttcagtatcctgtccagaatatacaggagataataaggaacccaagtaactcactgccatgtcat

SEQ ID NO: 455249 - DNA, 984 bp, Homo Sapiens
ttttttgatattcaataaatgtttattgagtaaatgttgttaataatttcaaagaaatttttaatgatgaattcaggcagaggatggaccatcatccaacagcaatgttccgcaagaaatccctgactagaaatgacagatatattaaatcgtcccaagttttcttccgactctaagttctgtggccctgggtcccagctgaagattaggagagagggtcttttctctttattccatgttcaacaggattatgaatgatacagcttggtgatgtggagtctagggccctgccttctagacccaatttagctggctacggcaccttgggcaaatagcttcactgtgatggagaaaccatgcctactgcagtaatttacgtcttcatttcttgcctgcttattaacactggtctcctaagtggtttcctgcctctagacacccttatctaattcactccccacactgtggttttagggatcttactaaaacctaccctaatcgtaacattcctctctttgaaactcttccccatagcctacagataaagcctgaactcccttgtaataattaagagacaaggctccagcatcagactctacaagtttagattctgatgctgtttattcccagatgtatctcagtttcctcatctgtaaatttgggataataaatattgctacctcaggtctgtgaaaattaaatatcaagcacagcacctgatctatagacagaaaagttggttgcttcacaaaatgacccgtcccttcctattcaatctcatccctgctacccctaggaactgtttatatgccaagcataattacttacatgcaaagtcctctgcacatgccaagcaatggtccttgtctttgaacatgcttttccctctacctgaaatcccattggcacttcctctgggttgaggttaccttttaccttttgaatccaactctgtgtctcctcttccttccctagttgtcctct

SEQ ID NO: 455250 - DNA, 509 bp, Homo Sapiens
tacttccacaggggggattctctaaccacagctcgcctgaagtattttgcctttccctctggctaacagtttcccctcagcccttggttttttggttgtctgtgccacagactttctctatctgtgaccctccctctcaggaaggattcacaatggctccataccggctcttctttctgccaagtctgtgagtccatggagaacagttgcctacctttctttgacctgctctcagaaggggaagctaaaaggcctctttcatgctgcccgagcaatctggtatttctcaggttagagacgccagaaaaaggtgtcttccaaactcgagcacaacatagccagctcttgacatggccttgagctttctctgtcttgatgtgaaggaggtggcactcttaccccagcgctcctcagcctttattacctgtcacttgtatacccactatatcaacaaggggtcatgtactttagtgatacccactttgaaatttgcattttggtttgcactt

SEQ ID NO: 455251 - DNA, 583 bp, Homo Sapiens
  misc_feature (205)..(214): n is a, c, g, or t
agctcggtacctacttttccacaggacagagattgtcttacccatctacctccaaaggctgtaaaacttggtggaatcctgcattctctaaatcaacttccatacttaattcttacagatactaaaataataggaattggaactgaatattttctcatggctttttcttttcagtcacaagtgaaaggactttttaaaattaaannnnnnnnnncttcaaatactgcaaaagggatgttattgaaaatattttaggtgtttggaaacacttattttgtagtttacaaactggcaccagtgctagatttggccctgagatgtgttttgtttggcccctatgcttttattgttaattaaattaattcctaacttttagaaccaagttatttctgttattgggaggatggaaggatcagactattcctttcagcattattggatttgaattcctgcttgtccagagaagataccctcttggggctcatgtctccagttcactgcattcaccccattccctattgctcctttgtgccgtgaccaagggtttgttgccattcagcaatgggcttaccctgtggaagta

SEQ ID NO: 455252 - DNA, 497 bp, Homo Sapiens
cttttccacagggcctgttagccatcctgattacttttcctctcccacagggtgcctttgaccttaaagttattatttttcctctttgggcatctgttttctcatcagtaaaataacatgaaagtaatctttaagtttctttctagctccaatattctgtgatgccattgtccagaatctctactgaatgggggagcaaattatgtatcacattttttgttataaaaatcaaattggtttattgaacagattctggagaataaaaccttcgttcaagcctcagccttagtggtcatattagtattgtggtctctgtgggtttttaatcaaagaaaactgtggacataggaatggtatcatttgtcagtgtaagctgcaatgaagaaatgcaaggtagaaaaagatgactgacatcattagacccactttgacaagtgtgatattattctcaaagtactcccgggcatctgagttatttttgtctcctgtggaaagta

SEQ ID NO: 455253 - DNA, 645 bp, Homo Sapiens
tactttccacaggggcgggagtgatgtggtaatgacggaattaatcaaagtgagagagcaaagaaagagatagtcgggtagatagtagaagttttccttaatgagctgattcttcttcatcataaaacatttttcttctgggattaagaaaaatagattcttgaaggtgcttggtctggatattttcagaaccgtgtgtggatgttactaatgtagccagaaaacaagataaagtctaaatgaaacaacacactttcagaattactgtgcagattgaaaattgtatccctacgctgatcagatagaggataaataggatcagcccaattatgtagtctccaaaatagtaaactaaaatgtttgaatgttttaagaacttgttattgtctcaaatattatttttaatcattcagtacattcattttaattctgactcataaattgtatgctctttagttagcattccattctgtttgaatctttgtatttgtatttctgaacagtaattgcagtgctaaacaattacgttagttttcaaagacagagatcttctcatgagtaattcaagcacaccaagtgaattatttttacagtgggttaggataatctttgtggtgttgccctagtattcccctgtggaagata

SEQ ID NO: 455254 - DNA, 390 bp, Homo Sapiens
cacagctaccagtttcttcaagacctggctcaaagcctagtccttcctaggggacttctttcctgagtccagaccactgcagttgcccctttatccagtggtcacaaggcatccacacaggctgacagttgctacctgatcatcatcaccagtcatcaagctgttattgcatacttggtatatgaaaggctctatgtcatgttctgtgggggagggagggagagctttgcagaggaagtgggattcaagcagggtcttgaaggctgtgttttaattaaagaggtggaaaagaaggggaataaaataatggacaacattgaagatcacttctactcttcttgttattggctatataattttgagaaaaatcttttaatccctgtgaaagta

SEQ ID NO: 455255 - DNA, 521 bp, Homo Sapiens
tgctttttccacagggtgtcatgactctggagggaggaaaaaggagacatcatggaaaaaaatagatcccgagtattcatttgcgagtagaaaagagagcagttcaagtgaattatataatgcactgccaagactgaaatgaaaatgcataggtcttgagtatttccattggtcatgagataaggggacatttaatgacaggcaacccattttctttactgtgtcctatatattccaactaaagtgtccacatctttggattttctatcagaattcagtaatttcaataaaatggctcaaattatccttatttagaaaatatatttacagttaaaaaattctcatttcaaattcttgcaccaaaagagaaaacctacttgaattactcaagctgatcaggtatgctgaaatgtttctccaggaagtgctattgaaaatatggtcacaactgattctacttactggtctacttagtgttaagtataactgaaatgttctggactctcctacctggataagta

SEQ ID NO: 455256 - DNA, 474 bp, Homo Sapiens
ctttccaggcactaatctgcctccagtttatttttagcagaaatattattgaagtcttttcagtacataattaattttcaaggattgccattaacctcatagtatgagatgggacaagaaaatttttgcatgtaaggtttgagtggaaaataatgatttttaagtagtttgctatgtgtttggtgaggtagggtgttctatggtttttagttttctcagtttgacctaggagtaatgactctcccagccaaacataatccatctttagataatagtggctgtttatatatttaggatgtgtcaacctcctcaaggctgggaagtatcaaggcctaatataatatttggctttcatgttctgggtgtgcaacaagaggaccaacagtcttgttagctaaaatcaacccaaagtattagagtttggacatgaacttggcctgcccatgccagagggaatacccctgtggaaacgta

SEQ ID NO: 455257 - DNA, 532 bp, Homo Sapiens
  misc_feature (154)..(162): n is a, c, g, or t
attttcagagaccatggaaccctttagtatgttcattgtgatggtggttacaagattacatatttgtcccaactcatagacctgtacacccaatacagccaattttattgcattttaacgtttttaaattttataaccaatttacctatttgcnnnnnnnnncaaagacagcaacaacttaggatcccatattaccatcactatttaatgtgatcttagacaaatcacttaatatagagctttggttcccccaatttttaaaatgaaaaatatagtatttatatctcataggtctttataaaaaagttttttaaaggtttcaagatcctgccttttcacattctatttcttctgaaatgtttcttcccatcctctcttccctactttgcttggctaaatgctatttgattttcaggtctcagcttaaacgttattttttcataaaagcttctcctaactcacattttaaatcagggcctcagctatgcctttactgcccagtgtactcttatttcataccctgtgaaaagta

SEQ ID NO: 455258 - DNA, 480 bp, Homo Sapiens
cctacttttccacagggtacagtggaaagagtcaatgagggtatcacaaaagcaaggaagaaaccagaaatgaagcaggtgatggcacgggcattaggattggagctagctagcctcttgcccatgactgagagtcacaaagatgaaaagcccggttggaagtgaccaggctcctaagtcttcagtggggcaagggtcattttgcttccagaaatagttaagggtcccagggagcgtctctccttgtttcatagaagtaacagaaaagatgctaggctaacaaaggcatcctgttctggggaatcacagttacagaaagattaaaggcccctacaagattcagaggaagaggagcaagacttgatctggccaaagaccatcttacagggttccaagcagcttcttacaattgactaagggtattaagaggtttgcagagaggcagtgaggccctgtgaaagtagggatcctctagatcga

SEQ ID NO: 455259 - DNA, 350 bp, Homo Sapiens
cgttttcaagggccaaagaatagattactggattctaagatgtatcatgccatttgtcctccctctcagattttggctgtgttaatcctggatgattactagcactgagggtattgtgttctagttgttgcttataggacacaatggcacacgcacaggcaagactttctttccccaaatatcaaaatgagagtgtatacttttcacagtgtcaatattaattacttgtaatttggtgttcggtgttattttctatattaatttcaacacaatgggatgagtctaatttggaatgataagattcatttgcatttaaattgatattttaagcattccctgtgtgaacagta

SEQ ID NO: 455260 - DNA, 489 bp, Homo Sapiens
tactttcacagggtattattatgaataaaataataaaataaggtactttgacccggaacctggcagccaggcaaagcaaatgttggtgaattcttttttttgccattacaaatggtggttacaaatggtgaacaaatataaatacctgaagttgaataaagctgcattagtagtaagcttaggattttataatttttctttgaagtgataaataatatgtaagttatgtgatgtattacagaaaaaataaaacaaagcatcaattttgattcaaaaatttatgactatcatcaagacatcagttccttttataaattctaattcttacctcataaaacaatatatctattactctggccaattatctttcacttaaacgaagtgcctggttagaaggaaagaggaaagttggtaattttgacttaaattgataaatgtaatatatacttcccatttactgagaggcattgccatcgatatatgggaccc

SEQ ID NO: 455261 - DNA, 454 bp, Homo Sapiens
  misc_feature (149)..(161): n is a, c, g, or t
aggggaaggagaatattcatcctcttttcccatttggtgtcacatgcaattatatggggcccaaagcagatcagcttatatccaggtaagtcaaatagttacaccaaatcttataaaactcaattccctacaatcttagaaaagaggcnnnnnnnnnnnnntgaggaatcaagttattcttcccatcctctatcctcttcataaaccctgcttctaatcacaatattcctcccaggcataaaacaaaaattgcattgcctgcctatggatacaaagaggttcggctgatggtagcaagtgttgggaaggcttggcttacagagcattagcttatccaagcagaacgttctctgttccaataatagaaggcaggaggagtaagaaactgatcattacaaaggttggacaaatcgaaaggctttatggacagatgccctgtggaaagtaggtaccg

SEQ ID NO: 455262 - DNA, 547 bp, Homo Sapiens
taatcgagctcggtacctacttttcacgggccatgcattttccctaaatggggcaacaagaatttcaccttcccacgaaatgattgtaccttttttcagcactctgtttttcatccttcctttaccttctattgctctttattttaccaagctaggaaaaggagacagctaaacatattttagcggcctctgaaacattataggtaaaataaataagctgcacatgggaatcagagacaagggaagatgatgaggtatttacttagtggtatagactttaatatacaccaaggaacaggaagtttggagtgggggtggtggggatgagtgagacgttgaaaagaagagagaaaggaattgaatggagtctactgaatttaccgcaggcactgagataatctgcaaggtaaaagtgttgtttttaatgcagtagaattttttctggtctactgtcaccatatttgtcttgttgctaagcttggccatacacaggctaggccttcctgctcacttgccctcaccccctgtgaaaagtaggaccggctga

SEQ ID NO: 455263 - DNA, 478 bp, Homo Sapiens
  misc_feature (142)..(172): n is a, c, g, or t
tctatttgctaaatgccattggtgtgaattaggttcaaggagacttaagcgtaatcaagtgggatgttaggaactaataggtttcctgagactatgagttgcccttttctccaatgcctatagagttacctctgttcttgannnnnnnnnnnnnnnnnnnnnnnnnnnnnnnatagaatagcttgaatttatgtactttaccagtgatgaaatggcatttctaaagatgtaaccattgaatttggcatatattagttgagccttcctatgtgtgaagcactcaggcaggcctttgggagagaaacctaatgcctaagcctcatcctttatgctctggtctcttctttcctcttcaggctcacattttggtatccctcaccacacatttccccaaggactcacctctaggcttttgtatatgctgcaccctttgcctacagtgcctcttcctctgtggaaaagtagggaccgagctcga

SEQ ID NO: 455264 - DNA, 516 bp, Homo Sapiens
caaggtgttttttattattactttttaaaaatttcctggtctcctatccctgcctccttcaacttttccttttcccatttcttcccattccttaacccatctcttcttctttcattctggctcctccttctctccctgcatttctcttgttacctgtttccccatctctttttattcttagatttattctttgttcttttttctgatgtctttaaccagtaattcagattttaagttaccgggttttcttcctgtagcatttgaactgaagtgatactgagctggaaaaatacgaacatcactgatacagttgttggttttgggatttctcagttttattcgtgtaaaagttcttgcattatgaatgtgtgttcccatccataccaccagctggaaaaagagaaagagaatatgtatttattgttatttttgattgatactttccctttaatagaagcatatacttattttagtggaaatttatgattgattataaattttttccctgtggaaaag

SEQ ID NO: 455265 - DNA, 293 bp, Homo Sapiens
cttttccacagggcccagaacaatagatgcatacagtaggcactccactgttctataaaatgaatgaatgaaggaataacataaacagactgaatgaatagaacgagcagagatagtggtttgggaaaaaatttcctatatatcttcaactgctcataatacaccttaattcatataaaacaaacagaaactgcaaacaccgaacacctatgctatgttaacactatgctaacacatatacatatgaagcaggagcacttcttcatgagctgtcagaggtatgagaccagatt

SEQ ID NO: 455266 - DNA, 511 bp, Homo Sapiens
ctatcgagctcggtacctactttccacagggggttagtttatttgcatcttcctctcattaatttaccacttttatctgactaagataccttaagtttctttattccttggattggtagtatagtgaattgattagggcagggctttgaagccagagagtcctgggttcaaatcctggtgtggactctatctttttggggtaagaacctttaaattctctgactttctagtgtcttttaaatgggtgaaataacccttactttatggaatgttgcaaagatgagagaggatgtatgtaaaatgttaacctattacagagcttgatatggagtagacgaattctaaaattacattgagccattttgcctatagtggtgttagaatagaaaagtatactcatacattagaattgtgcacctagagctaagtgattccagccctgtggaacccgtcaatgccagaatggcatgtaggactagatagatgaatgtcacctgaccctgtggaaaag

SEQ ID NO: 455267 - DNA, 522 bp, Homo Sapiens
acttttccacagggtaaacatgatttaattttgatagccctgactcagagcagaactagacggtaggaaaaactatgtttgagcccatgtaataatctaaaagatgtctattaaaataaatcttattttattctttgaatacattaagaagctgacctgtaatctcactcttgttcttgttcttaaaaccgtcaaatgcacaatgaaactccccaagtgtattaatttgaaccctctggttgtttggattgtggataaacataataagtcaaaatttattctcctctcattaatggaaaactataaaccacttgattgctttgaagaagtaccctccagcaaggtaagtgttaaaccttatcctaggaaaagacaaatactatgtaaacattaacatgcatgccctgtttcgcactggtatgccaattgtcacttccctcttctgttatttaggatagaacaagatgatatccaaatagattatgctggaatattctataatccttttcctgtggaaaagta

SEQ ID NO: 455268 - DNA, 725 bp, Homo Sapiens
tactttccacagggtaagcatcagcttctttcgtacatcatcagagatagaccacagctttgtaaccaagaggaacctaaggtgtctgtggtcagaagcagctcagaggccaatatatatgttaataaaattgttttgttaataatatggggcaaatcaagtttccagaaactcttgagtttctgaaggtagaaatgaaaggctgcactttggtgacctgaggaggaaaatgtgtagaatgcggcaagttggaaaaaaacagattgatggggctagtgatcaaaaaaacagacaagcacctgaacatgatacagtgtctgctactgaggacacagtagagccctcgaggggttcttgtgaggacaagagaggctcatgttggaggtagatacgagtctgtagtgttgcagacagttagctaaggagaaagttgagagaccagttcattcccacacggagaaaaggggtcccattcaataagattttctgtgtctcactccacagaatttctctctcttttaaaagatccgattacccaagcaagttccacagtgcaaatcttagtgcatattatacttttgaaaaggcatttatggttaaacaatattaagaaacactgcatgtttaactttgtttaaaggttaaaaagggggcttcctttaatatcttttttttcgtctactatccttcatgtacagtcctgtggaaagtaggtaccgagccga

SEQ ID NO: 455269 - DNA, 564 bp, Homo Sapiens
tgctgtcatgagctggtagtccctggcggcagcttttagtttaccttacacatgacacaaaggaaaagccaaactggagatagctttgcttgcttgtcatcctttagacagggaacacatcttgcaatgtccttgttatttaatagagatggcactctctgcttttataattcctccattctctgctttaccagcttcactacttatactcattctatcaactgagtcactcatcctacagaattcaagtgcctaccagtagtttattaggctcagagtgattgacatcctatgtcgtcctcctccaccatatatctgttttcccccagcgttgaacaacagcttttattgaagtggcagtgtacagcagcggcagaggtactgcccctgtgtgcccagagtagttctctaccatatatcttgcagagaaattcttttgactcatatttttagatcttacatttttctagaatacctcccttgaatatgtaagaaaaaacttatttccttgaaatatatttaatactcagcttgggcaacatggcgagactccctgtgaaagta

SEQ ID NO: 455270 - DNA, 505 bp, Homo Sapiens
tacttacacaggggggagccgttgacttgtctaagaccataattcatttatttgggccttataatgatattgagatcatctgctccttgcagacagggctatttctttatttctccctcctagcccagtgaatgccttgcacatcatgtgagcttaaccattactggccgatagtgctataagtctggtttgatttttgcttttctgaaaggagctgaagctttaagcattttccctgaccacgtatgtggtcagggctttggaaatatcttggtgtgtgttcttcaaaatgtcggcatttgaagaagtggcgtctcatgggacctctggtctttggatgtcctacatttggggaatgagatgtaaatgtatcctttgctggggccaggtggagaggaatttagtagctacaactcttatttattgattaaactcagctttcgtgcactttccagccagaaacagagctagaaaccttttatcctgtggaaagtaggtaccgacc

SEQ ID NO: 455271 - DNA, 472 bp, Homo Sapiens
tttccacagaagaacttggttggctagagggtataacaggcctcaggctgatggtaggaaaatcccaataaggacaggagtcagaaagagtttggggagtggtctaagctaagtctggagccagctgtacatcaaaggttactagagatgaaagatgctcttacaaatcaaaaacaggatcttgggagcaagcctcaatggaaacacaatgaagaattttaaaatagaacagatccaaaggcttattgtgtagatgggattagaacatttataaagagggattgcaggaaaggaaatagaaattcctgctatgataaaataacatttggtactttccgattaggctgattaggcactttctccattggaacagagcaggtctgtgtgtacacatcatctttctagggtagtggggtcaatgggcctgctgaattctgttagttgatgccctgtggaaagtaggaccgctata

SEQ ID NO: 455272 - DNA, 580 bp, Homo Sapiens
ttccacagcggtatttccacagggggggataactaccccagtgacaccctcctccagatttggttagcttctcccattccagcctagtttagatggaatcatattaagttgctggcattaatttattatgacctacaaaaccatcaatagtgtacagttctcacaactcccttgtacattgcagccctcatcaaaattgttatgaagtaattgatttgaataatgattaatatctgactccctgatggtttataatctttgtggaagtagacaacatatctatcttgtctactgctatttagcacatactaaataccacctagtaaatatttgtttaatgttacttatttaactgcagagatatactttttacattttctacatttaagatgcacacggaatatgcgatgttgtggagaaaagagctatttgccaaatggttacttgttactttatttttctaaggctttgggcataaaatgccattatggaattactattttattacaatggtatctgtagtactttggccctaatgttcttttttggttatgatgctgcactatccctgtggaaagta

SEQ ID NO: 455273 - DNA, 548 bp, Homo Sapiens
gctgttccacagggctaaaacaaaatacatctttgcacatcaacgtacttctatatctattgtcacctttgatggtcacatattattgcatcctatggatgcaactgaaatttacttataagatccattctatgggttctctttaaaataagtgctgtgaaaaacaaagtgcatgtatctctatttcccaagggtattttagtataatggaattgaagggtaacgggcatacgcatttttaaaatatagtacttaccaccaaattatctatttaaaaagtaatcagcaacttaaacttcaggcagcagtataaaaaacatcctcacacattgtggatagaaaacagtttcattcctcttttaatttaaatgcttataccagaaaagcaaaggctttttttcctatttacataagaaacttgtagatctgcaaaaaagtactttgcccccttttacagtttttgattatttgatttgaaagaattccctgtaaaatgaagatgcacttttcaggccgggcgcggtggctcacaccctcctgtgaaagta

SEQ ID NO: 455274 - DNA, 494 bp, Homo Sapiens
ctagaggatcccctacttttcacaggtacatgtgtgttactgtacttaaaatattataccaaattgatgtttatctctccccactaatctataagcttctaagcatagcatataaaacattcaataaaatgaacaacataaacataaaagactggccacattaattttcattattaaattcactatattaacttcagacctgtaaaaatccaagatgttcctgaatattttgcttcttttctgtaataaatgattcaaagtgcattacagctcgtgtgtatgctttggagcgaaaggaagctactgccagagtatcctggggtatgaggtctagaaaacgggttacactctgatagtcttcataatccacagtagatactagatcataaaaaaagttgagtaattaaagacttataagataaaatttaaaagtgtcaatttaagtatttaagttcaatttatttcccctgtgaaagtagaccgagctcgatcct

SEQ ID NO: 455275 - DNA, 308 bp, Homo Sapiens
tcctgtcttgtttgaatatgtaagtacttgtgttagtcactcttaaggattatttagcatttaaatatttaatagaggaatgcagtattaatgtttattggataaaatactagcgatacaaatgtacttgcttagctagtttgtactattgggagtattcgaaaggcaagggacgtactgcctaaaatccacctgaaacgactactagagttggtgaagtatttataaggggacgtcttttattgctcagagttggctggtggctggcagagtaggagaacaatttggatacttaatggtcctgggag

SEQ ID NO: 455276 - DNA, 628 bp, Homo Sapiens
agagtatgaattactggcttttccaagtagtttagagtgcacattttcaagttcttaattgaagttgcttttaggctgttgcttttagaaaagttgcttctatattagatttttgccaaaataataaggagaaatatatttgtaaagggaaagttatatattactgtgtaagatacagtttatcttcaggttaatgcttttgttaccaactcactttgtcccatgtagttattgtaagttccctgtcctttttatctctatttttttcttcaatatgattggatctagagagctgcagtagttttgacaaaccatttttgatttagctggccaataactttattggctctaagacctcgtgtctaaaatttatacctatgactacttctgacttatttcattaagttcttccactgattttattttttctgtctatacacgggacaaccacactcgacctgcgtctcatccactctgttagcttaccactttactactagcggatatcagttatgaccatggtatcggattcgagactactgcgtactccgaatcggttgctcacttactagctattacacaattatgatgcgctctgattgttccaacctccgccctgtggaataga

SEQ ID NO: 455277 - DNA, 502 bp, Homo Sapiens
tattcccacaggccaaggatttgtactaggtttcttattcttacactttgaagggggaatatgagggctaattccttgatccagcagacagcataacttatctcttgtgaggatggggttttatcattcacatagaaaaataaagcttggcacacccaatcctcatctgggccaaacctaggtcaaaagactgaaggcttatgaatggggtctttaggacagataaaacagcagtacttaccatcttttcttttctttgtccctggcttgagggttgtccctccaaacctgcagcattatccctaaaggactgtccgggggaatgtcagagggaatctttttggctccctctttcctttgtgccttaggcctagaatttctgtttctcatcttcagtcagtctctgtgtctgagctttttccctgtgtactcaaccaccccccagcctcactggaggtttcctgcacaccctgagaatcgcttcatccatctatggccattt

SEQ ID NO: 455278 - DNA, 708 bp, Homo Sapiens
tcatgagggtttgcttcacgatttcttcctaggtgagaatgcctgccctttgctcttataatctgaggaaaacttgggttcttttaaatgtttggctcataccctttctttccttggagcttgaatatactgtttcactgtcctcataacagcagtctttatactgtgtatattttgggggaactggaatgtgttgtggcatccctgtctccagtgcaggggcctgggtttctgtttcctgcattgttcatgtgtgaagccacagctgctgttatcctgaaggatacgtgggctggttgtagcatgcttgggtcatgttacctgtagaatcctgagatgaacattgctgcctccagatgaaccataccaggttagcttcttcctccatgctgtgcctatgtgattgatcatgttcttaaaaatatgtatttaaagcttaacctagttaggacattttctgatatttgttattctgcacaaagttgagagtacagttagtgcacctgtccagtcccctcctcacgccagagatactttctcctcccgtgtcggtggagctgttttgtctcctgcttgttttcatctggtgttgtcctttgctgctgcttcgtctggctgtgccgtgtgacgccttcctgtgtattcccctttccatctcctgttacctcttctctcacttttctcatcttctttcgcctgtggaaagta

SEQ ID NO: 455279 - DNA, 533 bp, Homo Sapiens
ggggcaggggaaggaatgaattcggtcaggacggtggctggagaatgtctggagactgggcacagtgctgagaggagcaggctggctgcgtctctcactgtgcctgggacaggcggtgacagagaaatgggattccacatgagagtcagagacacccagtgaagaaacaaaagcagcttacagggtgaaaaggacacagacagacactgacactcagaagaatgttgccaagggaccgccactgtgtatgaactgaaaaggttccctaagaatgcggccaagggactgctgccgtgtacacactgaagacgctccctaagaatgcaactaaaagactacgctgaagacgttccctaggcatgtggctaagaaaccactgccatgtacacattgaatacgttccctaagtatgtggctaaggcaccactgccatgtacacactgaagacgttccctaagtatgtggttgagggactgccggcatatacacactgaagatgttcactaagcaggtgactaagggatcgccgccat

SEQ ID NO: 455280 - DNA, 582 bp, Homo Sapiens
tacttttccacagtagaaagaatattctcaaatttaaatgaaaaaatcaaaaagtcagagaaaataaacgaaaaccatttcattctcttataaagcctaatatattttctgcttaaaactctgtaattagattaaatacacaaatggttaagaaaaaatttacaaaattaaacaaaaaggaagggctaggttatttttctttattactgcgacaatatgacttcatatttttcataattgtagaaaacaacttgcttttcaccactttaaaagaatattgaaatgtaagataatttaaaatgttgcatataaatgtataccctttacttcctatatccacaaatggacattcccaatgctttccagaatttaaagtgttaagaagtttggcatttagaatgtcagcagatatgcctttgatatgatattacattaagcaaataaactcaatgtaataattttcttagttatatttattatgctcaacattttattgttaaacttattttcattgtatacctcttttagctatactttttaattttgtgtgagtgtgtgtgtgccctgtggacaagtagggtc

SEQ ID NO: 455281 - DNA, 745 bp, Homo Sapiens
tcgagtcacccgctgcgaggtggaatcgttggcagcaggcggatctgcacgagtgaaacgctgatccgatccgtggcaggacggcgagccgttcgccgtcctttcaggctatagccccaagtggctcccgggacgagtagatttgtgcttttttcccagggttaggttttataatacatgggcctcaggactaggcacagcattgcattgacttgagcttcagtttctgtacttgtaacatgggggaagcataatcctcgccctgccgtattctacagtaacctctgtaggagtaattaatgttacttgtagacaaagatggaggggggcaatccaagagcttcaaaaattcagtgtcaagtcatattcagaaataaggctaatgatgaaaatatgattatcagctagaaaagcaattgggctctagttgggagaacttgtttctggtcccaaaatactaaacaggactgtggtcttggccaaacgaaatggcctcgtgtcctcaacagtataagaggtcagcctgaatgacctctcaggtcctttgcagctcaaaacactaatgtttctctgaaaaatgaccaacatgcccatgacccagcaaaggcttcaattctcagatccttgggtgggacaatgctgagagatgtcctgtgggactgagcgccaggtgcccacagaggtagtagactcttcattaacactgcctgtgaaagtaggggagtcctctagagtcacctcatga

SEQ ID NO: 455282 - DNA, 719 bp, Homo Sapiens
tacttttccacaggtacagtaagtataataatacataaggctcaaatcctctcctccgctggggggtatggaggcaaagggcagtgcaaggtgcatcaggctttgtctgctcctggtaggcctcctgtcacacaactgctccaaatagtgaagacaatatcataagtaagagccaggaaaagtgcttgtcttggctgtccatcagatgacaatggaataggtgtggaaggctgctgctggccttcaccgtcttcaccactcatagtcagccttcctccgctcctctcagatctttattcccccaactcagctcacaacaaagcaaaaccccaggcatgactccttttctcagctgcccttggcaatcacataatttccatcctctctgcccctggtgggaggggaggagcacacctggccagcctccagcatgaattgcctagtgcttgctcctctgtctccctatcacagctgcaagtaccctgtagattgtagttttctgctgctagactggtttcaaggtcatctctgctaacccaaagcacattccaatgggtttcagtttcttgctgctcctgtgggatccagggcactgttcacaatgctgtctgcatccagctggcgccctgtctcattccagcagctgggaatgctcagctttggaagccaatgaggtgggtggcaaggtgttccatataccatgttgccctgtggaagta

SEQ ID NO: 455283 - DNA, 651 bp, Homo Sapiens
  misc_feature (155)..(200): n is a, c, g, or t
tacttttcacaggcgaaatatgacctatgaaaattaagcgtaagacaatataaggaagggtaagaagggagatccaaagaagaaagcaaatgttaacatgtgaatgttttcactgggagtaatgtttccaaaaaagttttttgaatttgatttannnnnnnnnnnnnnnnnnnnnnnnnnnnnnnnnnnnnnnnnnnnnntcagcaaattaggatattatttcttgcagatgacatttatttgtttcatattacaatatttttatgaatagtaatgatcactaattctaatgaagatgacacggatgaagtgcttggcatatttcaaaatagtacaggtgaaaactggaatctgtaaatggaaacatttataaaccatcctctgtccaatttgttgaagttgaaaagacaaacaatatgacaagactatatataagatgcactaggtgtgggttttggtggatggggggcatagaaaccaaatggaaaactcagggatagacggaacgacctctgatcacagacacgggacccggtgacactattgcacagggttactttgtcttttcccagtgttatagtggctttccaattctcttctctgatctgttttcctcaatatggctccaactcagcggctagcttctcagta

SEQ ID NO: 455284 - DNA, 214 bp, Homo Sapiens
tgattttttcaagctatattcacagcgtgacatacagctttgttatttaaagcattatcaacttcactttaccattgtcatcgtttgtacggattattttctggattctgactgtcatcggctgtctctcccagcctggtttcaaccgcagctcccagtcactgataaaaatacgtgaataagaaccccctgtggaaagtaggaccgagctcga

SEQ ID NO: 455285 - DNA, 546 bp, Homo Sapiens
cacacaagcttgtaggagagcttttggtggtcatctctgtaacgttcctgctgtatcatttccaaaaggtttagagccaactgctgcctagagggaccttcttcatccacagatatacagtcttccaaggcagtagaagatagtatctgcagaattggcatcactagcagcagagaggactttgggattttctgatcctcagtaacagagaggagcttcaaagctagatttaagattggcttctgctgacttgctggagtctgtagaagtagtaaagctattccaattatgaccagttcaacaggaaaatcctccttcagaagttcaacactgtgctctaaaaggtgaattgaagatgaacattcaccagttatctttaagctgacttcactgacacacagcagctgaagactcatctgggtaagctgaattttccagaaaacaggatgacgcaaaaggcttaaacatacttcctcaataaacatcatcgcctctgttgtctgtatcaaatcttttacctgcaaacatggaacccctgtgaaagta

SEQ ID NO: 455286 - DNA, 367 bp, Homo Sapiens
tacttccacagggtctgttttccagcactgtctgtctgcatacatgcccacctgtctgtatgctagactgtgtttatctgtgagtgtgcatcagtgtgcatttgtgcatgtcagggctggtgtctctgtacttgcctattaatgcagggccagggcacatgttgtatccttgtgtgcctgtgcatcagtgctggtgtgtcagtatgtgtccttgtgtctgtagatctgtgtgtacctgcgtcaggacgagcaactgagtttatctgtgtctcattgtggtctgtagtctgcttaacagtgtgtttctgtatgtgtttagtgtgttactgtgggtccatttggtgtgttcctgtgtgtcctggggtag

SEQ ID NO: 455287 - DNA, 523 bp, Homo Sapiens
ttttacatctagcacctagcacactacatgttgctaatgtttttgacacttctctgacagttcttaagatttatataccggacctagttcaattaacaattgatgccattgtttttatacaatttggttgaaattcagattagtagcagtgtaagtaattaccgtgcttatattattttaaagtacagaattcagtgatatttttgaacatttgttttgataattcccagtgaaaataatcaaagtcatcctctttttggtgtaagaacttggggatctaatcatcatttgttcctgaggacctagaattattttctaagaaaggccttattttgcttgcagaaaatctgttagcttcttcttggcaaagataagatggccctctagttagatgaaagccaaaatgatacatccttaccatctgttcatttgatttgtagagaatatggattccgagtatctgtgccagagaatatatccctgaactctctattgtctaactcacatctcctgtggaaaagta

SEQ ID NO: 455288 - DNA, 499 bp, Homo Sapiens
tgtgtttttgttattaaaacagcctagcaagaatatgaggatgaactaaatgagcctctctccaagagaccacatgacagtctttctggctgggagagaaaaaggagttggattggtaatgagatctagcacaaagccaataaacctggtggggtggagggagccagtaggtaggaagaaggaattcagcaataagatactgccaaacccacctatggtccatactaagaaatgtgtgcaagttgaagcaaagtctatagactgcccatcacttgctctgtgataaagagacatcttagctttctagttgatgtctggtgagtgccttccatcaatgctcttggatcagccagaagtgacatgaataattgccccattatttttctgaactttatgaactgctccaaggtgacactcctcaagacagtcataggtctcctcaactagacagtgctgaagtatccatattacactattgctgcctgtggaaagtagggtc

SEQ ID NO: 455289 - DNA, 469 bp, Homo Sapiens
  misc_feature (400)..(429): n is a, c, g, or t
cacagggtttctcaataaaatagaaattaaatgaaagttggaaaagagattgaagatagaaaaataaaggcttttccagaatccataatggcctttggatttttgctacagcactgggctttattgagcaggcccttgaaatttttacttctctggcatacctgacagtggagagtccacgcttttcatttcagaacaaaaggtttttttatgtgtttttctgttcattagagcatttttctccttctaccctctcaatggggacataatttctggctcaaattctctgctttatctttctatactcagggagattgttcctttcccagattttatagtcatcataatattaatcatttcaaaatctggtcaatgctgacttaactatactatcacctcnnnnnnnnnnnnnnnnnnnnnnnnnnnnnntgtccccatgtcattgggacctttataccctgtgaaagta

SEQ ID NO: 455290 - DNA, 422 bp, Homo Sapiens
ttttcagggatttcaagtggctaataagaatttagtagcctgactttcgaatagcccagtaagcctatacacggcattgattttaatgaatacacttctagataactaatagttatcaaactagattacaacactggcttaattttcatctgagggatagagaaaaaatcccgccacctcgtgactatatcattagagctgtgggatatagaggaaaggacgctggatagagggtcagagggctgaggtctaacctagattctgccacatgtcagcagtttgaacatgagaattcaacttctcggggcctttgctttctcatctgtagaatgaggagtggagctggatgatatgttacccaattctcagattaaaacaaaaattatcccacttctctaaatgtccttgaatggaaaatccga

SEQ ID NO: 455291 - DNA, 332 bp, Homo Sapiens
tctcttatgaggtatttcctccagcgatttttctgaccactaatgttattttcaaagtcagtcattctctttttctgtcggatattgaacttttaattaagaaatcgtggtagtttttaatttctgaaaatcttttctatttttagttctataattccatgatatttttcattaaaattatcttctgtctcttccattggttctgcttcagtagacatctctcttatttctgttgcactggtcatctttcttcccatgccccataaatgaatttaacttttcctggcctactcaagctatggtttcctcagcatctgccagcacctgtggac

SEQ ID NO: 455292 - DNA, 635 bp, Homo Sapiens
ttttcacgggttctgctggtttcactttgggcatgttttagacaaaagtggcggactgatgagtttaatacaactggaataccatggcttgtgcatgagggagtaactttttacaggaatgtttattatctttgtcatccgaatccatatgccatgctcagaaaatacaatggatctgtgtcccgagtggaacagaaatagtttttccatgctgaaatgtgttttggtcaccatttgacatttttaagaagcagctctgtgaaatatttttgaaagtggatttatgtattcatattcattcatgtgctgttttttcatctatatattccccatcttattccagaaaggatttaagctggctcatgcatttgttgtatttggaatgtttctttataggtcaaggactagtttcccagtgaattgatttaaagaactgcagtcctctgactcaggcttgaattcacatatgatattggccatttgggatatctctctgttgtatgggcagagtaaacacaagtataaatctgtgacaacattttggatttctcagatcaggtactccatcatctggtttttatcacgtacaaaagaaatacaaggccatttatttccctattaccctgtgaaaagta

SEQ ID NO: 455293 - DNA, 619 bp, Homo Sapiens
tacttttcacaggggacctataatcattttgaggtagggcaataaatgaaagcagtttttaggtagaattaatctaatgggatatttttatatgtcgttggatgggagggagattgaggtaaggagactgagttactgctaccatgtgaaaaagaccaaagtcaagatggaatggaaaggttggatggatgtaagggagattttaaagaagaaccaatagggcttgtggaattattggataagagaggatagaagtctgagataaccctgaggtttcttgcctggaggaatgaagacaggagaaacccaatgattggttgtctttctgaaaaggggaatggtgggctggtgcttcacaggtgagagggctgcactgaggaaggattccttgtactgcctgagctgtgcagtggtgatcagatacaaggagacctctggagaaatgaaacaactggaggcaaaatttgggggaagctttattaacattaggtccctcatgttgcaagatcaacagggttactattttgactttagatatgggcttaatatcctagtgtgttttaaataaagagatattagatgtgttaactacatagttccctaccctccctgtgaaagt

SEQ ID NO: 455294 - DNA, 529 bp, Homo Sapiens
tccctatttccacaggggtatctagaaactcagaaaaggggacatccaatatacctagagattcagaggaaattccaagaggaaataaagttatgctgagttttataagaatcctcttaaaatattggtatcagagctcaggtaccgtttcttcttcatcctgctcccggccttcctgccttttatgaaagagatgttgttcatctgattgttctgagtcaggtacatgggttgagccacgttttactagtgggtgtgataactgagcctgaagtatcagaagccaagcccctctccctaactcacttcctgtccccatgcatgggagactcttcggcttccatctctatgtggtaaatgcactctcaggagaacttctagagcaggacttctcaacctcagcactaccgtttggatagtttctcactgttcatgagtattggggttagggtagggtcctgtgtattgtaagatatttgagcagcgtccctggcctttactcactagatgccaggagccatcaaccttt

SEQ ID NO: 455295 - DNA, 587 bp, Homo Sapiens
aaaactaaattatcattaatgttaaaatttaactgaccatgtatataactgtgtaattgctgctttctcacagaactgtctaggattcattcaacagaccacagaaatgaggtctggcatttaacagactaatgatagaagacataaactggtttatacaagaatatcaaaatacggtcatgtggttcagtgtagctcaagttatgaattagtgccaactcttgctgcagtgtctctcacacaattttatcttggaacttggcgatttaaattgactttcttcactgaaaagagttctttcatgatactcttcgtgaattgctcatatagcagcttaatctctttcatttgctgtctcctaacaatgctaacttgttgccacctcttttgttgctcttgaaatattttaattagtttttcttcctctcctcagtcttctacatgtctatgttgtattcttgaagcaaagtcagcaactgtataggatatctataattccatttctgcattctgtgttctcaaaataacattcagttatgttctcggtgttgatgcaagcttttgtatatacttttgaggcctttatc

SEQ ID NO: 455296 - DNA, 569 bp, Homo Sapiens
atttgcacggtcagtgttatcccgacttcttttattaatttaaagtaagggatctaattattcacagctaaacaacttttctaccaatatttgcaacattaatatcaaccagttcagcaaatttaagtgttaacggaactgctttttaaatcagaaatgtaaactattctacactcttggtagaaaagaaacttgcccacatctgtctttcctaggacatgctattatatagtgctctagggaaaaaatgtaacttaaaattatcaaattttggttgaatttttaaagccttatagattattgaagtccatgctttctttgttcaataaatatcagatgctcttaaggttcttctgtgtaatgatggaagataacattctagagcatattctttatcacatttaatttatctgcagcttactcttacggattacttcgcttaaaatatatttcttttcatatacctcaccacatctctaactctacgtagcgaatctctacccattgtcgctttgctctttttcattcatcagctgcttcctcaatgatctctttcgtctctctcaacc

SEQ ID NO: 455297 - DNA, 516 bp, Homo Sapiens
  misc_feature (199)..(208): n is a, c, g, or t
  misc_feature (306)..(331): n is a, c, g, or t
tacttttcacagggaataagttgtagacatgatacttttcccctgaatacttgaatatgaatcttttaagatgggaatactcttctacacaaccacaataccattatcatacctgagacaattgacattaattagtgttaattagtattatacttcatatccacattttcctaattgttgacaaatgtttttatagtcnnnnnnnnnnaacattaacaaaaaaactagtattctatcaaggttcatattatctttgcttattagtatctctttagtctcttctaactagtataaaactgctgtacnnnnnnnnnnnnnnnnnnnnnnnnnnccaaaaggtcagtccaattgtgttatagactgtctcacattctagattcatctgatctagattaaactatatacgttttagtagtttctttagataaaacatgaattgtgactataaaataatgagactacagtatggctttcagaaatggtaggttactcttgtctatagcactaaggcataac

SEQ ID NO: 455298 - DNA, 153 bp, Homo Sapiens
tgttggatcaggagcaaaagagaagatggtttcaagggcatataggtttgtaggtttggtagggaaagaagatgcttaaaaatgtatgagagatttaattaattaaattgtacatgaagaagtaattgcagtacatgcaacccgtgaaaactg

SEQ ID NO: 455299 - DNA, 639 bp, Homo Sapiens
cgcggtacctattttcacaggatgcagcatagttcagaatgccaaatgcccaatccccttggcttaatgagtcacttgtttctaactaactccaggcctttatttattgctctattataggccttataccacattggttttggttttatgttgtgtccatgtctgtctcttctaattggccatgagcagcagaaggacataaatgacctatttttcagctctctcaccttcaaacctaccactgtgcctgacataaagcagatattcagtaactgagaatgagaaggaaagaaaaggactcagggtaaacctcggttttgtttaagattctgcaaaggggaagaactggctttcaccacccaggcttctgaagtgtgtagagagggttgtgaatccgcactgaccgtgttctcttgcataaataagtccaggcacagtatcttcagtggtgaaaacagaagttacctgccttgagaagcacagtcaccacaacccagtctgcagggaatcagatgtcgtgtgtctttcgtttgcccctcttgatgtgggtccctttaatcatttgttgttggactgtggaggcagtgggggacattgtgttaaaaatcattcttcatcttgggaagcgcagggcgcctg

SEQ ID NO: 455300 - DNA, 522 bp, Homo Sapiens
ttggtggagtcatatagaggatgattagcaggctcctaagagaggaaggtgctggggaggtgagagtggaatgctgggctggaagtgacagtggcgagcacatcaggggaaaagggaaggaagggaatctaggaagtaatgtggccttggtacatcaggaagatgaaaggagtattttctaagggagtagttgaggtagatgaacctactcatgttagaaaaggtgtttctctgggcacagtgggcaggctaggaaaggaggaatcagggctggtgtggaggacagtggggtttagaattaggagagtgggaggcattggagtgcgggtaggagtttatatagtggaagataattccttaatggagtccaagcagatggtggttagggaaggatggaaaggagggaagcctcagccaaggatggcagaggaagaagacaaaaagttcctgggtcctttatggaatccttgagtggattccataaatccactccgctctgatactgcctgcttctagtttctt

SEQ ID NO: 455301 - DNA, 531 bp, Homo Sapiens
  misc_feature (96)..(126): n is a, c, g, or t
  misc_feature (520)..(520): n is a, c, g, or t
caacttctatatattctctttggtaacatacctttctaagtttatatcctacacaaaggtataacgatgcaggtggaggaccttagaaagtataannnnnnnnnnnnnnnnnnnnnnnnnnnnnnnaaaaagagaaagagaaacagagagagagattgaatgtgtttatggtggaacagttaccctattggctaggttggtaataactggaaaagactgagcttcagaatattggaagaagtgaattttgatttctaaaataacctctgtaaaatgtaagtcttcaagggatgggcaacgtctacttggaatgcctttatatacttaagaattcaacctcttcagcttgtatttctgcacggtgtggattaattgatgggaatagataccgaggctggctgttatagaaaatctgccaatctgagtccatggggcccactgaaatccatgtgaatggcagcatcaggataccattttacagctctcttcatcctcctccaactggactatccacactgtncctgtggaata

SEQ ID NO: 455302 - DNA, 525 bp, Homo Sapiens
tactaccacagggatttgcaatattaagcctaaaagcagaaggctcacctttcttgaccgcaaactcatgtgaacaatctcataaacaagaacaagtccacctaagtaaggtactaatggatttaagaaatttctgtaaaggaggataactctgctatttctatattataaacatcaactggaatcaatgatctgtttttcaccctcacgtgttccatctaaagcagagagcaagacaggctagattactttccttcatcagctcttgactttctcttatcttttgtttagtaatctcctcataaacagcctagcaaaatagagaccttcaatccagtaattatctatgtcaccagaaaaagccttgaaacaaacacaaatgaagagggtccttggggaacgtcaatcacctcaactccctcttccgtttctctcaagccaagcttcttttcaccctccttaattgcaagactatttccagctcagacagtggacatcctgcctcaacttttttaatactcattc

SEQ ID NO: 455303 - DNA, 703 bp, Homo Sapiens
  misc_feature (46)..(64): n is a, c, g, or t
cttttccacagggactagatttttatatttgttatctttgttaagnnnnnnnnnnnnnnnnnnnggaactggatgtctttttaattttgagcagatggagaaaataaataatgtatcaatgaccttggtaactaaaggaaatcaaaattatatgttgatttttctttctctctgatttcccagtttcagattgaatgtctgtcttgcaggcagttatttcaaaatccatagtcttttgcctttctcactggcaaaatttgaagcaatctctctcttcaatgtatgatttcacaactaaaattttaaaagagaagggtgaatatcttatccaagacttcattgcatatctagagcaagagtggcaaactttttctgtcaaggactatatagatgatcttttccacaaggtctatgttgcaacttctcaactttgccattctgctaatgcaatctgtagttaataataagactgaacataactgttttcctatataacttcccttaccataacagccagtagggcacctttgcaggtcatattttgctgacccctggtctgtatgttttttaatgctagctctccatggggtcatccttcgttttcattcagtttgcaaaggtgagcattgacagtcagtgacatttcgcagcagtatcagcagatagctgtatattctacagacgtaggccgtggaggaagtag

SEQ ID NO: 455304 - DNA, 752 bp, Homo Sapiens
  misc_feature (131)..(146): n is a, c, g, or t
  misc_feature (148)..(175): n is a, c, g, or t
atgatggagacaggtttaggaaatgaactatggtaggatagataggcagtatcctactaaactaacttggtaattcactaatgactactccaaacgtagaaaaattaattagtgtatcatggatgtattcnnnnnnnnnnnnnnnntnnnnnnnnnnnnnnnnnnnnnnnnnnnnttactcgaaagtattatagctgctttattcaacaaaacatatcacaagatgtgagaagaagaaaattcagatatatttatttctattccagatttcaaagtgcatagaaatttcaggctgagaaaccgttttttcagctttcactcttactagcaaatctaaaggcttttataaaacatgagaacaaagtgcagtttgaaacaccaaggttttcattactgtttcttaagtttttcaaaaagaacaagggtgggaaggaggtagaagagacagggttcaggcgtggggagggatatggcgccacacttattaatcacattaaaaactaagcatgccaacatctggagctaaacaaccagcaaaatcaccacgttcagactcgtattggctaactctatctatcccagcattctcttgggacagcggtttgccctaggctctaccacaagctcggtgaagtacacagcctcaattactagagcgtgcagccacaacgacctggtattaccgggtatctgtcagtcaccacttgagttaacattccataccctaacgactgactccctgtcggaagtat

SEQ ID NO: 455305 - DNA, 473 bp, Homo Sapiens
  misc_feature (458)..(458): n is a, c, g, or t
tactttcacagagtaagtataggataattcagctctatgagtaaccaaatgatcatgaatttcataattctttatattctctttaaaaacataacttcgaacaacacttaagattaaataattgtttagagattttttattggaaaaagaaaatatgactagtcatgttcaaacaaacagtggaaaaagacatactagagggcaccttgaaatcccaaaaacttgcgtgagataaaatttaaatcagtatctttaggccttatgatctcagttatagaaattatgccaatgacatttcactggtaattttactaaagcactccctgttttctaaaggagttttaaagctaaataattttaaatatttttaaatggaaaaagaaaagctgcaagtgggtaccaacaatgagacccagctgggtgatattattgcagaaacatctagctgctccttagcncctgtgaaaagtagg

SEQ ID NO: 455306 - DNA, 601 bp, Homo Sapiens
cttttccaccgggtacttttgcacagggctgcacactttgtgtgttcctcttagtcttatgtgtaggagattttacatacatgtttgctgcttgatgataattgcagatacctcatttgtttcccactctcctctctggagagttaccaggtacccaggataatttgtggcgtcctcaggatgtagtctcctcctctggcccccttgtagtctgatcctgtgaacccctctccgttcttcagccactgccctttccagctgcatttgtacagcagcctcttcactggtctctgccctgtctccattctgcacactgcagcgggatgaacctttgttgttgttaccagcttaatttagatgtaatttgcatacagttcagccatttaaagtgtacacttgagtggcttttagtatatttacagttatgcaccagcaccgtaatcaattttaaaacactttgatcacccagagaaactctgagtccattagcaattctccctattccctcttccctcttagcctctgggcaccactgatcttccttctctccctgtggaaagtaggggatctctagagtggaactggaagaatggaagttggc

SEQ ID NO: 455307 - DNA, 175 bp, Homo Sapiens
tacttttcacagggcttccgataatccatgctatactgcctccttccagaaatttaactggttccatccaagttatggaatgcttttttatgattgttgttgctgttatatcagtcaagactgcatgataagatgattgcagccatcttatttgatactcccactgtgaaaagta

SEQ ID NO: 455308 - DNA, 478 bp, Homo Sapiens
gctccgtaccctacttttccaccgggccctgagttccatctgtgctatccaggagccactttggatactttagatatttggtgatcacaacacagaagtttttaaatttaccaattataacaattcagtccaacaagagtgaaactcagtcctcaataaataaataaataaataaagcaaattctcatgaagcaaatggtaataatcttaatttattggaagggccacaagaaagggggaaaagaacaacttaaaaaaaactttttctaccaacattaacttgtcctaacaatcaacttatttttgctttaatggttcctcctcttctcaaatggggctatgaaaagcttaattaaattaagataatgagctgatggcttctgcctaaatatctttaaattcaaagtacagtgtttttgtatttccttaaaattatagcttttagcaaaagtattaactggataaccctgtggaaaag

SEQ ID NO: 455309 - DNA, 431 bp, Homo Sapiens
aaaagggctcaacacataaaccttatgctaaaatggaaggcgtgagaacttggttggagttaggagaagcattttaattattatttttctatagtctctgtgaccttaggcaagttacctaacttcccctgacattgtttccttatcattaatttctgacgtacctatgactcatctaagttagcattgtgcctgaagctgagatgattatttccttgatttttagaaattcactaaaatgttatgtggatgtttaagtacaagcatctgaaaattatactttacatgtctatattctgtcttttcaaaaaatggcataacacaagaagaccatccaaatatgtacataattccacaccaggtaataggaaagattttaaaaatctgaatatttacaaagtattttggcatttacagttttcagttgcaca

SEQ ID NO: 455310 - DNA, 439 bp, Homo Sapiens
cgagctcggtaccctacttttccaccggggcagcatgctagttcctcgatattaagaagcaaaatcctgatattaccgtggattttaaaacagatatatgctacttatatccactgttattgggatttggtccccgatgccccagattccttttcttgtaacattgctatgtgattgcataaggtcagatgggaggacttcccttctcaaggaagcaatcatttttataaaatattgttaacttatatgtctacctccactagtttctttctttcccgccatctctgtttctttatccatctctgtagctgcatctgtgtagccattcatccaagccaatcatctgtcagggagttttggccactgtaataggaagccaaggacatacgtgcttcccccatccaggtactgttaagaaattgctgatagttgttagctg

SEQ ID NO: 455311 - DNA, 401 bp, Homo Sapiens
ggatgttggaagatggagaaggaaagatagagaaacagaagaaaggcatgggacgctgcagataaatgcaaccaaattaacatttcctcccaaagtaccatgattcttaacatttacatctaagcactaacttatctgcacttaagggttgtgaaaactctagcctccatagcaaaaaatttagtataatagctcaactccatataattttattatttccaataaaaaccaaatgttaagtatattactaaataggattgagtttttatgtttatgtaagactcttcgcatccattagactcacccatctattaactgccttttctaccctggcccccagtataaaaaggatgatatgattaccgttatctccagacatctacaccaacctgtggaaagta

SEQ ID NO: 455312 - DNA, 505 bp, Homo Sapiens
  misc_feature (233)..(325): n is a, c, g, or t
tacttcacagggatgagcaggcttctatttaaaagggttataacctattataaccctttgtgttgtcattacaaagttgatctatgctagcagcatatagatgtaagctagttccaattttatctcaggaaaggaacagagcatactggttatacaccacctctatctagcacgtgaattagctcatatggatgagcaaatagggaaatgatgtcagcacaaagtggaaatcnnnnnnnnnnnnnnnnnnnnnnnnnnnnnnnnnnnnnnnnnnnnnnnnnnnnnnnnnnnnnnnnnnnnnnnnnnnnnnnnnnnnnnnnnnnnncccatttttaagtcacagtagtcacatttcaagtgatcattagccacatgtgactacggtactaaatagcagatacagaacatttccctcagtgacgaaaattctggtgggatagcattggggggacactaactaaatatatcccaagaagtgaagagtcccctgtggaaacgtagggcg

SEQ ID NO: 455313 - DNA, 428 bp, Homo Sapiens
tactttcacagtggctatttcttctgcagcctatactggtgtggtaggtgctggggctgggcggtctggattcccaaactccatctatgtgcaccaaggtgacaagagatacaggcagccattccttgagcaaagtcaactcttccagtcaattacagaaaatggttagcaacatcctaaaggaaacgtggccgtcaaatttaagtgtgtatgagaatcaccagagggcttgtcaaaaatgcacccatttcccttttcactttaatttcagtgaataagagtggggagcatggagtgtctgagcaaacaggcaggaaaaatagtgctgaactaagatctgatattcagtgggttactgtggagcctgggaaacccacatttaacaagctcttcagacaatttggctggctagatgatctggtaggtta

SEQ ID NO: 455314 - DNA, 513 bp, Homo Sapiens
  misc_feature (353)..(389): n is a, c, g, or t
cttttccacagggggggagtatgcgatccccaggggagaaggtgatagggagaaaaatttctgtttgaaggattgcaccatgaattaaggagtcccaggatgttggtgtataggatttgtggagagacgaggtgaaagatgaagaggaaaggtgactcataaattcatgcagctccacaaatgccactctatactttgaattctatttttctggaggtgactatgggattcatatgcctaccttcttgtcagtggttatcagaaaaaaatagaggcagattcatgcccagaacaaaccatgagatttagcatgcatgcttacttgcttgtgtcttaatgtctgatgaaactannnnnnnnnnnnnnnnnnnnnnnnnnnnnnnnnnnnngaaagtataggtctatgtgatttaatttttggagtattttccaaaatccccttttcattttccaaattcacttggatagcatataaatttaactcagggagaatttagtcccggtggaacagta

SEQ ID NO: 455315 - DNA, 482 bp, Homo Sapiens
tacttttccacagggtacttttccacagggccacagctgcctctgcagggctgaagaaaggaagacaaaaaaagtcaggcttcatacttcgaaggaaagggctgaaatggcaagaccaagtgaggctttaaaggaaattaagtgtaggtctggcaaaaagggtacgaagagctctgctcaccctgtggccaccccaggcctgggtaattacttcacgtggattagacctatgcttcacggcccaacaagaggctttaaaagagcccatgctttaggctacagaccctcgaataagctcactctcgttgagccttttctttttggctgtgggtccaaggagaaatggttggctcctttgagtcctttcctccctaaggtgcttatgtaatactaagagatcaaatgaggtaagaagcactgagcaactgagagagaaggcaaaaacacttgcttttaggataaatctgtacctatccctgtgg

SEQ ID NO: 455316 - DNA, 447 bp, Homo Sapiens
tatttcccacagtgggaggaattcaattcttgtgagccgggaagcaaagttgccttcactgtcatcatcaggggggtgatttgtaagatttttgggcttgaattaatttcttgccaaagttgtctacaggagtgtccattgtgggatttgttgtcttctctttcacccttctaacattaaaaggaacttactgaaaaagttctcagactggattttgctaaattgtgtctgctttggaatctttgtccatcagtcaagtctctatgactattggatagtgcttttacctctgtgtggtcaaaattttggaagaagtaagagaaatatctttcattccaaagaacaaaagaggaccattagtcagagcatctttatttttcataaaaagaaaagtcagttagattgatcattcatgattatttataatatatcagatatccttggggg

SEQ ID NO: 455317 - DNA, 574 bp, Homo Sapiens
aacacttcaggttatcctggaccttggccgaaggcgtcattagggtcctgagctttcccttccatgctgcctcagttgcttattctttttcttcctaccccctccatatagcctgttctcaggggtttgatcctggcatcctctgggtctagttcaggcccacagcaaccttatttgctacttactcctacgtctgtattcttgtttctcgtatctccccccaactcctatccttaatgttccccatctgttttaaccgaagtcatcattaccactccttcttcctgccaaagcatgaaaccaaagtgtgaaacttcaagcccagccctttctcttgaacttaggctctgcactgcaagtctgcagctggtggtgtcgggtcctggccaacccagctgatgggctgctcccagactccacttcctgtgtcctggcctgttggcatctttgttccctccactatgttgtgccctccgcgacacccccttggcggtcacgagctccagtcacccggcctgctaggtcattatggtcactgtcaacattgcacggttggggagagtacagcaaagac

SEQ ID NO: 455318 - DNA, 534 bp, Homo Sapiens
tttccacagggaggagaaacaattaacaattcaaaacattatataattgggcgtcttttattacaattctttatctactaagaaacctgcttggagttaggaacggaatctctcttgcttgtttatttatctagagcccttgatgttgtgttttagaggtttcgcaaatatttgctgagtttgatggtgagagaaagtctgaatgcagagatctggatgagcatctaatgaatgtgaagaattagggttgagataaccaagaatgttccttgggttagaccaatggttttcaaccaggtacgattttgtatcccccgggcctggccatgtttggacacatttttgctcgtcacaactggtggcagctattgctgacatctagtgaggataggctagggatgtttgctaaacatcctgcaaggcacagggcaatccccataacaaggaggtatctggctccagatgtcagtggtgctgcttttgggaacgctgtgttagaattaagctgggctatcccaagccctgtgaaagtac

SEQ ID NO: 455319 - DNA, 500 bp, Homo Sapiens
  misc_feature (364)..(412): n is a, c, g, or t
tactttcacagggattttcttatagcttcctttaaaatctggactgtttacaggactttctttgtcttttgtgacattgacacgtttgaaaatacaatacccctgagattgtgtgatctgactgtgccactactaataatagtgagccactactaataaaggttattttaagtctttttctgtccttcatttaaacttgtcatgggggaaaaaacaaatacttaaatcatctcagctttttagcctttccattttacaaccaaagttatagaatgaattttcttggtaatttaatacatatttagtgcatctgtaaagacaatgttgcaatctagattttctgatttatattatgatcatgtgnnnnnnnnnnnnnnnnnnnnnnnnnnnnnnnnnnnnnnnnnnnnnnnnnaaagctacacatttgaagtttgatcagcatcttgagtgaattttttcatttttataaatctgtcttccttcctggtagcattctgcca

SEQ ID NO: 455320 - DNA, 482 bp, Homo Sapiens
taattttccacaaggttgtgatcactcaaatcttgaccaaagtcagatatagggccaaatattttagaacaagatagggccccgctttggtaactgaaaaaaaacgaaactcagcttcttgaagctttgactgatttgcccttctggctacactgcctttgacacctgagcctacttataaccaattcctatagcaaccactgtgggagcctaggacaatggaggaccatcctggtttcaccagatcactactaggggaaccagggggcctgccttcccacactcaagactgcctggacatgaacatatcctctgcctgaattccaaagcccgccacaaactacacctgactctctaaccacctctctccaagatcaccttttgctgcaacttggtagttttcatccacagcttcctgcacacactgggcattgttatcattcctggacccacctcacgactgtttcctccctgtgaaagta

SEQ ID NO: 455321 - DNA, 467 bp, Homo Sapiens
ccctactttccacaggggactggtcttaaaatttagctttcccaagtcacgtcttttacgaatacacacgcataccctctgttgtggacggtaggcctagcacagtccagtgaaggacggacctggtgtgtgaagcaagtcccatgccctaggattaggaaaccctcacctaaccgtggtgtcccttggtgtctctgcaccttagtctaattttcaatcttccactagccagagatcaagtcttgatgctatccagttgaaacctagtctcccgtgaaaccttttcaaggtgggggggtttccggaggacactggtgtgcagaaaagccaagtctctggcaaacatgaggtagttcaataggctgggtcctccatatagttgctcttcgtggttagaaaaacaaccagaagtattcctgctatgcaggcctggagcttctggccggacttatcccgggggaaacgta

SEQ ID NO: 455322 - DNA, 569 bp, Homo Sapiens
cttttccacagggacaagggacactaggaggaatgggtggaggacaggcacagcactgaggctcccagctagatgtatgaccggggtttggggtgaaggggccagaggtgagaatagatagttgaggatttgtggggttctgggttatgtccagggtaagcgaacactttcagtaagctagtaggtgggtggacagaaaggcctccaagagctcatcttcaagagatctctgtgtctcagctgctcatccacctctgtagaacatccctgcagatcactcacccaacaaattccattgattcaaatcctaaggtatccaactctgggttgtggaggccacaaaaaatattttccccatcttcactgtggacagaaaagttcaagctttggattctaactgatctcattttaaataaacctcagctctctcgtctactagctgtaaggccctggacttcagtttccttagctgtaccatggggatgctcacttccacaaatgttggaggtgaggtgagataatgctggtgaagccagcacacacggttcccctgtgaaaagggggatcct

SEQ ID NO: 455323 - DNA, 466 bp, Homo Sapiens
ttagggctttgcagtggtagaaaggagtatattttgctcgctatgaaaaagaattttcaaataattgttttacaagataagcagctgagatttcaaagctgggcttgcttttgtacccccacaccacatttcagggatctaggattcttacagtgtggtaggactaccaatgatgattccaaacatttgatgagatttcctgaagaccttgggcgagcagcactccctctcaagctcagcctggctcccgtgcttgcaatcgagagactgacacttgagaactggcctgaccaatgtgctctttgcatttgtcaccatgaaagggaatggaaattgggtacacatccgtgggcagaatggcaatcttcaaagcccaagcttcgcaaggcagcaatgcagtatccaatgagctatctcacagagctaccccacagatatcaagaacgtgtaatgggatagtttaata

SEQ ID NO: 455324 - DNA, 146 bp, Homo Sapiens
caatcgaagagaaatagtcttcttatgttttcatatttacacttctttttttcaggaggaagacctgaacatcttttccctgtcctttatttcccacacatcaggttggcagctgctgtgctttatttttgcccggtggaaaagta

SEQ ID NO: 455325 - DNA, 625 bp, Homo Sapiens
gctttgccactgttatagatgaagacataaggccgacggacgacaacaaaatgtttagcccagttactgtaaagaggctccttgaaatgaaggtatcctttcttagagaccactgagcttggtctaatttcttcaatatctggaacaagattgagaaattcgttttttcctgctcgggccaaatatggtgtttccacagctgggacaatctgaaactgttcaaattctgggcagggactagaggcccgggaattggcttctggggtcttctgatccggagagttgctcctagagtctaccagagagggacaggtggaggagggagtgagggtggcactgctgaaactggactcagagggatcccgtccaattggagagatatcagacaacttacagtcactgacgctgccgtgcacctggctgaattctctgttgaaagtgtgggtgagaagttgcaggcacttggtagccagctctttctctcggtccaccaggctttcgatgtctcctgaatcatagccactgctctcgctaggtgtgatggcgctttcaaaggtagtggttgagatctgagaggagatactggtggaggtgctgagggtcccactgctgaggctggggataa

SEQ ID NO: 455326 - DNA, 699 bp, Homo Sapiens
  misc_feature (67)..(67): n is a, c, g, or t
actttctgccatctgtgcaagccaagaatgtccttctctccatctttcctacctccatcttaaaccntccttccaaaataactgccagcttcctttcttatttggtcctccaaaattgactgtcacaggggaatgagaaaatgttctaagctacaagattcccgtttccttaaagtgatatcctgtcctagtgaaccagtcaggtaacaggttctgctgcatttgttttaaatttcccctcctgcttttcagagctggtgctgaacaggccacacccctaaagacaaaggagagaaaacacggttttctcatcctctaccatcaggtacccaacaggaataggccctgaagtgattcagactagcaaatgttatggcagatggtcaggacgcaggttaccacatccagggacttcacttttgccttttaaaaattcacagccgtaacttgtgctcaggacttcccctttagctggctgctccctgggattttctcctgctttagagttttgtttcatttttttattgtcttgatttcccagtagcagccttgccctaaagcttgactgagtttatggctcctaaggagctttcctaagactcttgactatttttcttcccccttcagtcaagtgtttttacagttaagaattaatttgtaactgcatacatgccctgccagtctgtccctgtggaagta

SEQ ID NO: 455327 - DNA, 166 bp, Homo Sapiens
tactttttcacagggctggaatgccatccaccccatcttgctctctacctgttgggctttgaattgaaaaaacctgtcagtactaccaacctacaagatcccggagtgttaggttgccctcaggacaagccttcacgccaattctaaacattcttggagaaaggaa

SEQ ID NO: 455328 - DNA, 777 bp, Homo Sapiens
  misc_feature (634)..(659): n is a, c, g, or t
atcggctaaggtacattgctgactgctatagactcagtgttcaaggagaaaaaaatcttcagagacttagaaaactctttgcaatattttggtcaggctgatcgtacttgatactcagtgctagaaatgatgctttggattagtagtttccacattctgaatttataggaacactgagtcaccacagccttttttcttgtaaaggtttaagtgatatcagatatagcaactctacacggaaagcccttgggaatatgaaaatactctctctcaagagcaagggctcttccgtgccccttttctgcctctgtatgtagcctgagcaccagggtagagattgcttttgaaagtttgccccatgtaatctatttcctggctacctaagagaacagccgttttcttcatgaaagcacaaagaggggaaagaggctgctgctgttccagtgggaagttatgtctagccccagaaggcctggtggctgggtcagctcaagcactttcttcatgcactggaggctcaggaggcattgggttgctttgctttttctatggaattagggagcctattgaaattctagtgcacccctccttttgtttgtcaccaagtcacatggttctgtcttcagtatcctannnnnnnnnnnnnnnnnnnnnnnnnnctgaggaacaaattggccatttaaataaagttcttttctagtgagtaaagaggtttctcagagccagaaatcactgaaaagagagtctgtcgacctgccctgtgaaaagtggaccggc

SEQ ID NO: 455329 - DNA, 607 bp, Homo Sapiens
gcccctagattaacaggtgaatattttgcactttaagccctctgcaagttaggatcagagggaaggacaaagctgactgtcattttgtttccctcacaaaggtacagactagcctagaaacggcactctttatcacttaataatcctgaaaaaatgttcccagatttcaaggctggatacatatctgcttactactagaggtcatgttccaattagaacaaaagccttgtgatgtgtaacatttttggggaaaagccttgttctgctatcattcaatagctacttgatcaaaaatataaatgtcagattgctcccagagattctgccaatagctcttccttctaatattcatcactgccaaatagctggcttataatgcaatactaatatgtaactggatatatatggagggaagagttactcattagtacagcaggaagtaaggcatgcggggagtttgtcccacactatgggaagagcaggattgatgagagccaagttgagatggtggctgacttcactgtctctcatctagacttctgctaatgtcaatgcctaattgtaccaccagcaacaatacctgtatcacctgggccgagctcgattt

SEQ ID NO: 455330 - DNA, 469 bp, Homo Sapiens
ggtcctacttttcacaggggctgtgacccagaagagttagaatcacaatttcttcatgctacagagaggaaactgaggcctagatgtcatttgggacccttcacaaccattttgaagccctgtttgagtccctgggaaaagtagggaatgtgcggtttgggggaatgatgggaatttgtgggaatgtgcgttttaggggaatgatgatccatcgctagcaagttttccaagggggctgtgacccagaagagttaagaatcacaatttcttcatgctacagagaggaaactgaggcctagatgtcatttgggacccttcacaaccattttgaagccctgtttgagtccctgggatatgtgagctgtttctatgcataatggatattcggggttaacaacagtcccctgcttggcttctattctgaatccttttctttcaccatggggtgcctgaagggtggccagaagga

SEQ ID NO: 455331 - DNA, 1591 bp, Homo Sapiens
tgcatgtttgaggtcgatctaaggatcccccttatgttctgaccacctcaggatctcttactagaatgccaagaaagtattatgaaatctaacgaagtaaagttcaagtttaaaaaaacgaagcaagaacaaaagagcactaccggtgtacccaccattcccttctcctagtaatctgcaatgcaatcacaatgcccaaactagacctgccatttctcacacacagatttaggaatgaccaacttgtaccctcccagcgtttagcacaacacaatgacacccttaatttgacaatctgcttcctctaatatatccccagtctaaggcatttaaaattaaacagctcttcaacgccccaagttatttcatcaggctaagaacttctccgagaaacgcacaagaaggcaggcaaacaggtgggtaggtgagaggtcacggggctccatctgcaagctccatctacaaggcatcaatctgcgttgtggcatcaacgttaaaatgttctacagcttagggatcttcttgaagcaaggttccaagcacaaaactagtatgaccggaggctcaatttagaagatgcagcatctgaaaacctttaccccaggaaaggaggggtgcctgctggcattcatgggctctggaacaagcatttattcaaagctgatggcccctcgagccggatgcatctgctgtggactttttaagattgccccccataagctcatctgcaaactttaaatggtagcctcctgaatacagggcttcctgagcaaggcctggaaacagaacattggagaacttcctcctcctaagcctctggaaattcaatctgcaggcatcaattgaggcgggctctctcctccagggtctcccctcctgcaatgctaggactcacactggccagggactccatgtctcccggttccatctgctcgccatgaggaacactatagtaacaaaccacggtccatgaagcatttttgtaactttcagctggatggctgcaggcccacccaagggtgcacattcactccccaccctctctgcaggcaagcaacaccgatccgccccaccccagcctcagcgggaaggcctctcttcctccaccattaccaacaataccgactccaacagccactcggcttactgtcccgggcttaccagatctcagccatcattaagctattaaaagggacagtgattctccaactccagaacatctctggtatagaattaaagaatataaatgagagcacaggtacaagtgtcatggacatggagcgctgtaatgttaacctcttaccttcacatgctcctatagacatatacaggcataggcaccccatacagctagggccatgcacacatgtacaccccaaagctggcctcacccctgcctaccccatccaaggaatggcaagcacgaagctctgctgttgtcctcttgagcaaaagccaaggccctggcctctccatctaggtgtgtgtagatgacgtgggagcaccagttctctatgtcttgtctgagcttcctttcatatcccatgaggctgtatatttccttcccagcacctgtcgggctagtcgagag

SEQ ID NO: 455332 - DNA, 693 bp, Homo Sapiens
atcgactcgtcccagtaagaggtagagggtacaggacagagaccaacttgcacagtactttacaggtgatgcccaggctagtgccagatctaagaggaaacaccaacacaggaagggatgtgtgcaggattcacaagggtttttttacccctgggagaaactaagtggtgtggtttcgctgaatagattttgctaagtacttaagcactgcagatgctccagtaatatgcccataagttcctttccaatttcaattactgggaaaatatacatatggacaatagatggatgccacaataaaaggctggcagcctaaccctcacatgaatttttccctacctctatttagggtgacagtggagggcctctggtttgctttgagaaggacaaatacattttacaaggagtcacttcttggggtcttggctgtgcacgccccaataagcctggtgtctatgttcgtgtttcaaggtttgttacttggattgagggagtgatgagaaataattaattggacgggagacagagtgacgcactgactcacctagaggctggaacgtgggtagggatttagcatgctggaaataactggcagtaatcaaacgaagacactgtccccagctaccagctacgccaaacctcggcattttttgtgttattttctgactgctggattctgccctgtgaaagtca

SEQ ID NO: 455333 - DNA, 546 bp, Homo Sapiens
tattccacagggtcttcaatcttttcccaaccagcaggcagttctagttcactgtccagctcctcggtgtgtaccccttcatcatcttcacactcttccagtggcttctgctgcttgtttaggcaccgagggtctaaccaagatgttgttttcgtgttatggtctataaaatagacttctccattttcagtataggccatctcccagttttcaggtagaggacctaaattatcctctgcagaaagaggtaggtattgagggaacttctgagaagggtccgtgatgggagcagcgatgatgctactattcacaggtggtaatgctgtttcttggagagtgtgctcctcttgttcaccagaatcggctgtaaagctgctgttcatttcaggaacgtcatcctcctcctcattctccgcgtggactatgccagcattttgcatatcattgtaggacttggttcgcttcggggtcgactgcttagagccagactgaaggctgtgcaaggcatccgtcgtgatcactttcccccctgtggaaaagactcgc

SEQ ID NO: 455334 - DNA, 654 bp, Homo Sapiens
agtgttcagtattagaattatttataatagcaaaaatgtggaaacatctgacatgtcaatggcatgaaagtggtttaataaagtcagtcatgatggaataccaggcagccattacaagtcaagctacagacaaataatgacctcaaaaaatgttcacaaaatagtagtacaccaagacaaaagtgcattttcaatatgatcatctgaaaaatacagtattctctttgcaaaaatgtagatgtacttacaaatgcattgtaaaagtctggaaggatttataccagaatattatcaatattttcatcttattttaaaatttcctaaatatctgaaatattcttcagagaacctcaattcctttgtaatcagaaaaattagttaaaatattaaaagcaggcaagtaatatcaacaagatgatacactaggagatcccagctcttgtctccccaacaaaagcaagaatttaacagctacttgccaacaaaaatagctctgagaatactccagagtacagtgaagaagctgcaggaacccattaaagcacccccaaaccaaggacagctgtatataaaagtgttggaagcgttttatctgcatcacctcatcttctatcctggcacagcttggcaacaaaggggacctgtggaaaagta

SEQ ID NO: 455335 - DNA, 285 bp, Homo Sapiens
ttttttttcttgctttaatattcaatgaacttgtttccccacccagaagtcaactaccgtcatttcgtctgtaatctctattaacaaagcctctaagatacagggtatccaggaagatacgtaccccagatttagtaaaaatatcatttcccctcttccacggcttttaaaaaaactacgatggtaggtaatctaaggggttgactgttatttggagagtataagggactaaggcacggacattgtactcccaggctatgccacatgaccctgtgaaaggtacga

SEQ ID NO: 455336 - DNA, 454 bp, Homo Sapiens
gctctctatttttgtctctgatttggtgtcactgacaacagccctgttctttttcccccctttctaatgcgttgtatctgtatagcacttagtcctccctctttctgttctctcattttatctgccatgcttttcatgtctccagtctgtatttgtgatctagactagaatggaattttgtctgtctatatcagtctgtcatggtgtgtttgactgtctctcggagctatgtgtatctccctctcacatgcctgtcagtaggacaccattgtctaaattgtgtgtgtctagtctgtctgacagtgtgtgagtttgtgactaaggatcagcctgagggtctgagtgtgactgtgggtgcttgactgagttgattcttagtgactagctttatccatatgccacttctctccgtctgtcccacagcgtaaccctgtggaaagtacctgtggggtca

SEQ ID NO: 455337 - DNA, 549 bp, Homo Sapiens
  misc_feature (538)..(538): n is a, c, g, or t
gtcttcagccccatgtctcaccccatccctcctattccgatccccaggcctctccttgaggccacagggcatctctgctgaccactctgtggcctcccctctgcaggcatgtggttttaggatccccctccctgctcacttttccatcagttccattcctgcataaataggttgctagctcttgcttactgttctcttctgtattctgtgttcatggttgtattaatataactttcattcctctgctcctattttcatggggtttcatgagggaagaaacaggctcatgtgttcagtataccatcttgatccataaaccccatttgagttatctcacaggttgcttagggggcttgctgctctgactggtttgtgaacgtgccctgagtccagctgggactgcagcaacatccatcctgttgagctgtggtctgctaagtgattttgtgtaatgctgtgccaagtgcaggagagggatacatagcatggctaagctctgcttgaatgccatgattagttattaccttccttccttccncctgttacgtc

SEQ ID NO: 455338 - DNA, 943 bp, Homo Sapiens
cgacgccgcccggcaggtactttccacagggggaacatttagaaagttatgaggctgagatctccactagaccatgccttgcattagctccagatagcccagataatgatctcagagctggtcagtttggaatttctgccagaaagccattcaccactctgggtgaggtggctccagtatgggtaccggattctcaggctccaaattgcatgaaatgtgaagccaggtttacattcaccaaaaggaggcatcactgcagagcatgtgggaaggttttctgtgcttcctgctgtagcctgaaatgtaaactgttatacatggacagaaaggaagctagagtgtgtgtaatctgccattcagtgctaatgaatgctcaagcctgggagaacatgatgagtgcctcaagccagagccctaaccctaacaatcctgctgaatactgttctactatccctcccttgcagcaagctcaggcctcaggagctctgagctctccacctcccactgtgatggtacctgtgggagttttaaagcaccctggagcagaagtggctcagcccagagagcagaggcgagtttggtttgctgatgggatctggcccaattggagaagttgctgatgcagccaaattaacaatggatggaacttcctctgcaggaaccctggctggtcacacgacccagtcaagccagtaactaccagcctgctaccagcagagacggatattttgctagtctctgggagtataactcaggttggaattcctgttggaagtgcaatgaatgctgtattcctgaagatggccttgctcccattgctcatgctccactggtgtaaaaggagactatgctgtggaagagaaaccatcacagatttcagtaatgcagcagttggaggatggtgtgcctgacccacttgtagttgtttttaatgcgaatgtgt

SEQ ID NO: 455339 - DNA, 505 bp, Homo Sapiens
  misc_feature (206)..(433): n is a, c, g, or t
tacttttcacaggcttggttttcatctataaaagagtctcagactgcaaagtgctgtacttcttgaagcacttgtgaaaactgactttaaacttaacaaaaaataactgtgagaaagagtggatagggagaaatttagatgaatagttgattgagactatatttatttttaataataacaccaataataactaaaatatagcatannnnnnnnnnnnnnnnnnnnnnnnnnnnnnnnnnnnnnnnnnnnnnnnnnnnnnnnnnnnnnnnnnnnnnnnnnnnnnnnnnnnnnnnnnnnnnnnnnnnnnnnnnnnnnnnnnnnnnnnnnnnnnnnnnnnnnnnnnnnnnnnnnnnnnnnnnnnnnnnnnnnnnnnnnnnnnnnnnnnnnnnnnnnnnnnnnnnnnnnnnnnnnnnnnnnnnnnnnnnnnnnnnnnatctgctgttaagtgtacctgcttctctgcctggcacatgtcgcagatgaatataaagtgtcctccccctgt

SEQ ID NO: 455340 - DNA, 457 bp, Homo Sapiens
catattgtctctgtttctgtgagtcgttcaccatctgttcctgaatccctgttacatagattctcacctcctacaagctgttgttccaatgttaccttctcagtaaggccttctctggacattctaaaattgcgtcacctctattcctcttcccttcttcatttttctccgcgatacttcttcctctataacatattatatattctttcttgtttatcttattctgtagtttaccagctaacaatgtaagctccatgaggtcagggatttttatctgcattgttttctgctatttccctgctgcctaaaacggagtctgatacatagtaggtgctttgtagcattggtttaatgaatgttgaatatgtagaatatgtcccaactcctcagtgtggcatttcacatgtcctttattttctccccaacctgtcacctgtggaaaagtaggtaccgagcg

SEQ ID NO: 455341 - DNA, 839 bp, Homo Sapiens
gtcgacggcgcgcggtgcaggttacttgtcctagggtactatgccacaggggacaatgaaagttcactaacttcagaaataagtgtaaaaaagtctcaaacacaaaggattcactgcactactggacttgaaacttttctatcccttctttcccctttcctatttcaagccttagcaatcatctacaaatagtaggataatctttttttctgactgaatggattcatttttggaatggggagagggacaaactatttttcaaagcagcattacccaactggttagactaagtcatgtaccaaagcaatagcttttctgaaagaactaatctttatatgaccctaaagaaagatttaaaatgaaagaattgaacattattattgtagaagaccaatcatgtatggacgatctggtcctagtgtaaaacttcatttgtaaacaatccatagagtcttcatttaaaggtaagatttaaggcacaccaaacatgataggggcatgaaaaataaagtatagagggtacatttcttatcttagacttctatatgcaccttgtagcaaaaggtactttgatatacaactcttacagagtcagcttctttaagctctacccctggctccactccctgtcccaagagctcacactgaatcaagttaggtacacttttctagtgtgacattttctgattccatcacgaaacatacatcattgaacgaggcgccttcataatgcaaaaggagtaaacagaagataggtgttaaaaaggagaaattcatcatctctacctcacggcattagaactgtaagctgtatagcaaaagcacacaccgaagctccg

SEQ ID NO: 455342 - DNA, 614 bp, Homo Sapiens
tacttttcagggaattctactcatcttaaaaacatatatagatattgatctgcggagaaatatatctctgttatttcaaggtctgtggattacataatggtcaactctgattgatttactgattgattcaaaaaattttaaagcaaaactaaaaatattgcagctatgttggttttaaccattctaaactctgatgaaatttgctttctgtttggtttgtgactaggaagctaaacattatttattagtaatgaaaatttctggtgtctaaaaaaattcaagaggaaaaccattagattctattacaattaaatctgttaagatttaattgcaaatatgtagatagtgcaaatatgtcttagggtacaatttttgttctcattaagttacccattttacattttgagaacactaacagatgaaatacttgtcaaagagaagatctaagatggtttaaagaaaatattaaatgaaatcaaacttacttgtcaagctccatagcacaacttacaagtcataaatcgcactctgtatgacagctacgggagggatctcaaaagaaaaccctctgtcttctgagaagctccggaaggtccaacacgttgcctgtcttt

SEQ ID NO: 455343 - DNA, 565 bp, Homo Sapiens
  misc_feature (13)..(13): n is a, c, g, or t
tacttttccacanggatatttaaggatgaagaatgaccctttagactggtaagcacctcacaggatgcacttcacctccccagcctccgtggtgggaggaggcaccactgttcccgcaactcttggaaagatgttgctcagcttctcgtggagcctggactctgatgacgctgagatgttcaggcttttgccatgcacttagggcagcctgacttctcttttgaaactttcacaagtatgattatgcagtaaaaagcttgaagttctcttttccttccttctcccattgcgccagtcagcaaagctgtcagtcttaccctcaaactgcatcctggatccttccatctctggccttctccctgctcccaccctagtccatgccattgtcatctcttgcctggaccacatcagcagctcctgagtgccactgctgttgctgttgttgccctaaattccactcctcttctggcaaccttggtaatcttgttaaaacaaattctaacacagtttgcctcgagctctccagtgactgcctattctgacttcctcacccggccaagcctcc

SEQ ID NO: 455344 - DNA, 941 bp, Homo Sapiens
  misc_feature (34)..(34): n is a, c, g, or t
tcgtaccagaccctgagtaaagttcctcagatangtctacctgaggctctaggggcctgcagcacttcctgttgagctcttagcttctccaggttcttgttgctacaggcttgagaacccagagcatcaaagatctcaagttggtgtttggctccttcaaccttcttttcaatattcttaaagctttcctggaactccctgagcctctgagtcatttcttcgagtgaccctgttttggcctgcagctcttctgtaacagcatccatgttctggttgatcccagccttctcatcccggattccatcctcatctgcttctgaagaattgatcagaatgtcagcagcactattcaatatttccagcagggagcggcgcttctccacctcattcagcatagcctttgatcttaggagactggactctagctgcactggatccagagtgactcgcaactcagacatcttagctttacaatcttctatccatggcacaaggtcttccacatgccactgatatttctgagctttctgcatacaatccttgagcctggattgtctgtctgcagtttttttactaagctcttcccaatggtttttgagctcaaccaactggttttgtagagtccttttctcttctccaggaggtacagaaagaagtagagattccccttcagccacaatcacctcataggagccactgtgttgattaagacttttctgaaactcttcattctcctgtagctgagactgtagccgctccaattttgcagaaattgggcagttttttgcttgctggctttgtttatcatccaaccaggtcctcaactcatcaaacatttgctggaactgctgggtgctggcaagagctgcctggagtctgttaatgcgatcggctgcaaggtcttctaaaccttggagaggcaggcaactgtctccaaagct

SEQ ID NO: 455345 - DNA, 508 bp, Homo Sapiens
tacttttcacagggaagcagctacctgatttcttactttctctctccttatcatggagaatacagaaacattgtctgaaagggctctaaagaaggaactaccaaaacctgacttgaaatgccatttcttttaaccttccaaatcctaaatgtttccttcaaggcatcttaataaacttatttgcttctggttttgggagttcataagagagaatagaacaaaatacaggacatcaaatattagccatttcccattttattttatttttctatgtaggttcatgttccatgttcatttatttaagaaatacatttttattggtaagcttatagagctacacttatggaatttttaagtaggtaaataaatggttaagacaaaatagtgttatagccttcattctctgaataggccatctttgactcataaaattacccttactgtttattataacttcagaagtaatttatagttctgaacctatagtatcttttaccctgtggaaaag

SEQ ID NO: 455346 - DNA, 480 bp, Homo Sapiens
ttacttttccacaggtagaaatgccataagggaagccccgtggtgaccgtggttttaagccttttgtcgtcttcgtaaggagcataccctggtttatctctagaggctcatgaaccatctgtctctgccaggcagcctcatctgtctttttggaggatgcctgagctttggaactgcaaagaaatgcgcctttttatgcctcctgacagtgactctcaggactcgtgaaagctatgactgagcgtcagtccgaattcacaaatttcaagcggatccggattgctatggggacctggaacgtgaacggaggaaagcagttccggagcaacgtgctcaggacggcggagctgacagactggctgctcgactcgccccagctctcgggagctaccgactcccaggcgtgagggcagtgactttgggggagacaaaatccaattgcacctaacctgacatgtcacgcttgaccctttatgtggc

SEQ ID NO: 455347 - DNA, 457 bp, Homo Sapiens
tactccacagggaagaaggcaaatgatgacttagtattattatgaaactattctgatctcacagactccatgaaaggagtctattctctaggattccacagactacactttgaaaactgctaggctactctaacacacttgtttaataggtaacctaccaattcatatttatttccaagtttaatgcaaactacttgacagcaaatctctcttctttgtacttcgctttaataccccgcaacgatttgaatgtgtcccccagaagttcatctgttggatacttggtgcccaatgcaggcgtgttaagaggcgagacctttaggaagtgcttgagccattctcagattaatgggttattcagagaaggggctagttagcacaagagtgggtctgtaataaaagccaatgtggctgtctctcgttagtcccctcaccatgtgatgcctgtggaaaagta

SEQ ID NO: 455348 - DNA, 973 bp, Homo Sapiens
ggtgcggcgagggttacttttccacgggcgctctcagggctgagcggtgccaatgttgtgacctgcaatcagatccacgtatagcaatagtcttaatatcaatgagataagccaatttcttattatcttctgttcctcgctgacacctctcattaatacgaacactgatgaggtgggggttcatgaattcagtgcgtacagaacccagggtgtcattattcccatattccaccagggttagctctccggcattgaagatcatgcatacattctcattttcaaagaaatacttctcattgccaccagatccttgccaggctatctcactaagccgattagtgttcaggtcccccagcagcagtgtttctgatgtgtgagccaccaagtaacgttcctttcctaggattttcacctcttccacctcatagccatagtgtgacttgagcaccactcgggttcctgatgacaggttcttcacaatcacctggctaggtcccacatacgtcaactcaaacttgttcttgtaaatactccttcggaggcagcagtcaaactgttccaccccaccacatagtgtgcccacacagagccgtgagccatcccgcttccaggccaaggcagtgatggtgtataaattggtaatctccttgggctttgcctcttcccagatgcttcttcgagggatccagttgaacacccgaagcctgtcataacttcctagcacaacagactggcccccaggacttgatacagctgtggtgaactcccgctcctgagggtcacggctataatcaaaagtttgtagcatgtgaccttcttttccataggctacaattttccgatcacagcctgcagccacgatgctattggttgcccatgccaaggcatagggtggacacgggtggttaaccaacttcccctgtgactctccagagccttcatcatcaaagaaatacctaacgatggtaccatc

SEQ ID NO: 455349 - DNA, 357 bp, Homo Sapiens
ttttccacagggaaacagtgtatagaaattccccaacttattgaaattaattgattctagaatcacctccctcaatttttgggggacagggagtagtgtcacatcattctatattagtgcataagaaaatgctcctctattgtcaaaatttcatttcctaaaaaagaccactttgagttatgctaggcctatctgcaaaaaaaggtgcggtatgactcagaatcatttttgagaccaattatatttgctgctggaagacctcacataattgttgctgttagtggcaggaatatcttacatttttaagtttcacagtctgagttgcctgagagacgataagataccatattacgtggt

SEQ ID NO: 455350 - DNA, 629 bp, Homo Sapiens
tgacactgtaaaggaattataacatctattagaatgacccggttctatggtcttagcaggtaccacagccatcctatcatgtcagtcccttataatttataaaaatagaactcctgccatcctaacaacctttgaaagccacttgttctgcaattctgctcctgtgtttcacctgcatccctgatcgtctccagcagccctgattcctacacaggaagaggctccacagaacttcaaggtgagtgttatatataaatacatgaacagcaagagagagagatcactgatatacaaaagaaaagaaagctctagagcttttgaagggcagtgtgggactttcccactccaccctacaatgtctacagatgccagaactgtggcagggagctctgggtcctttaatccagccagaaaggccacctctcagtcctaagacctcaggagagccaggcctctgcctgcctacctccacaacacaggcaggtggacgcactcaaagtgcttactcttgatctgtgaggattaatgagctaatttctacagagccctttaagctgattggcccaaacgcaactaaataagccccatcattaaccacgggcagatcccctgtagaaggtaccgagctc

SEQ ID NO: 455351 - DNA, 335 bp, Homo Sapiens
ggggaactgatcagaagacacaaaggaagcaaagaacagcagaatggaaagagacagggcatgagcgatctgtccagaaaggggcagtcggggagccctctgaggaggcagcctcaaatggtggtgcttcaaggagagcgagggtgtgtttccaatttttaaaatagctgtgctatgttttctcgtaataacagtatcgtccccaatatttaaagaaagtcagaaaatggaaggaaaaaaattgttttcctctggttctacccccaatcacaatttactctaaatgtgaaggattattgctttccattccctgtgaaagtaggtaccgagctcga

SEQ ID NO: 455352 - DNA, 511 bp, Homo Sapiens
tgatcgagctggtactacttttcacaggggatgtatgcgaggcagagatctttggttttctggtgaagttcattttggttaagttaatcaatgtcccttctaaatcagagctcatattattccctctctctgatgccagccaggccccagtttgagagacctgaaatgcagaagagctgcacttttttatttttcttacccctcttctctggtcctgattcctccattgttggggcaaaaaggagggattagagaaaagaggcaaaagccatttgcacgattagcactattaattctctctctgtcctctgcaggttagttcctctctctgtcctctgcatgttagttcctctctgtttcctctgcgtagttcttccctgtgccccttgcatattagttcctctctgtgccccctgcatattagttcctctctctgtcctctgcatattagttcctctctgtgtcctctgcatagttcttcctgtgcccctgatattagttccccctgaaa

SEQ ID NO: 455353 - DNA, 469 bp, Homo Sapiens
tacgtccacagagacattcactcattctctggaagctgaatggaattctttgtcctcttcaaaaaattaaaactcttggtgacaatcaatctgttggagatgtttcactttctccactggagaaaattaaaattacctggattatcaaaacagttatgtttctctaaagtctgagactgatagtcctaaatttggtgtctttgattatagactggacttataaaatatagactggacttacagactttgattatagactggtcttattatgacctataaaaaacgctgtcttcagatgacaaatcccaactaagcatcattgaaaacaagcaaaaaaagggaactatattgtggttttggctattcctaatcctatctgactcaggctagcgtaaggtagcattgtgtcttcttttatacaactgtgctattagcagtaatgagtactgattccagacacctgtggaaa

SEQ ID NO: 455354 - DNA, 519 bp, Homo Sapiens
tacttccacagggagaaataatactgttcttcgggtaatacaggagggatttttactccctttttctcatcgtttatgaccagaattctgagtggcattggaatttgtgttgcatgaccagctctgtgatacttggatgtgttagacttctgaatgactgtattcactataacatcagcatccattaaaaaatcactctttcaactgcttgtacagttagagttctaaaaagagagtgaggaccaattaagtatatagctactgcaaaagtaatcattgtaaaggctgtttgaatgggttcagctaaaggtttgcatgaaatacgccatttaagcaagtgtagggttaactcaaggaagcttaattgatcagcaggtatttattgaacacttactgtgtgtctaatgctcagattagtatgtaagagccattgctgttaaggagacatggcttatatttatgaaacaacttgaggttaattgtgtgctgaattctgggcactgcctgaaaggggatcct

SEQ ID NO: 455355 - DNA, 555 bp, Homo Sapiens
tactttccacagggggaattgaatcagtcctgtctgattttgatgatgacaccggtctgatagaagtctggataatcctgctggagcagctgacagcggctgtgtccaattgtccacggcagcaccaaccaccaactctggatttactctttgagctgttgagagatgtgacgaaaacaccaggaccagggtttggtatctatgcagtggttcacctcctccttcctgtgatgtccgtttggctccgccggagccataaagaccattcctactgggatatggcctctgccaatttcaagcacgctattggtctgtcctgtgagctggtggtggagcacattcaaagctttctacattcagatatcaggtacgagagcatgatcaataccatgctgaaggacctctttgagttgctggtcgcctgtgtggccaagcccactgaaaccatctccagagtgggctgctcctgtattagatacgtccttgtgacagcgggccctgtgttcactgaggagatgtggaggcttgcctgctgtgccctgtggacacgtcgta

SEQ ID NO: 455356 - DNA, 472 bp, Homo Sapiens
ttgatcgagctcggtacctacttttcacaggacttctagtacataggattactttgctttctggaaaggctatatcaaatttcacttccccaggagcatacgtgagaatcaccgcccactgattagtaccatctaaacattttgccaattttgtacacaaaatatcctcttttcttatttcactttttattgccttggtctcatgtgaggctaaaattttcccttgtgttaattagctaatggtattttctaatctgtggattgtctcttcataccctttgccaagcttcctgtcacaatgttcctgttatgagtttatactaaatcttcataatgaggatagaaaaaatctagttctgatgttttctgtttgtcctttaatgttgtttctgatatttctgatatttttatgttcatagcatttaaatgtttataaagtcaaatcaatcttctttttccccctgtggaaata

SEQ ID NO: 455357 - DNA, 454 bp, Homo Sapiens
ctgatgatcgagctcggtaccacttttccacagtgtatccttttctcctagtgaccccggcaccaggtccacttgtccctgacttcagtgtgatatggccgccccacctgaacccatctctccctcccaccagcacactgggctccctcttcggcagcaggcagcattgcttccccagaatacatcccaacatcaaccacgctgtgcatctgctgcttagtctcatacttggtggtggcttccctttccttccataacccacttatctcttggacagatccccaatcacgttacttgtcccattttcacctgtccatacatttttaaaatatatatttgatttccttcttgcggggcctggagcccctcagcccctctgatgctgccccacaaatgacctgaactccttgaagttcacacctgagctgatgcatccacagccctgggaaaagta

SEQ ID NO: 455358 - DNA, 383 bp, Homo Sapiens
ggttatttagcagactaccctgtggtttgaggtaatttcccccaggagggccaatggggactttgaagtatttatgcctctttaaaaacttaagtatccttaaaacagggagggacaataaatgcagcagacaccaagacattatggtccatagaaaggttaagcctggatggaaactagtaaagttgttaaccaacgaccacactagaaatggagtctgagtcattgaacttgacgggtggattcttggatcaagaattttggggagggaaggctatgtcccaaattcactgcaacttcattattgtggcttgtgagggtctgcaaaagtgactgaatctttgtcactggacctctttcacattaatgtccctgtggaagta

SEQ ID NO: 455359 - DNA, 572 bp, Homo Sapiens
atgatcatcgagctcgtacctacttttcacagtgttctctgcaaagcatacatggtcttttcccctcggagtggttgatctactgctgttggctgctaactcttttccatcaattttgatggtatgtatgtcgcgaggccttgatggaacctgaaactgggtactgctgggttcagtattctctctgaatccctgcttagataaaagcacattttctgtcatgtcagtggtaggaagtggatggtagctgtcgtaagtttctgacagaggttccagggcaagtgagacctggagttctccaagtttcttagacgttgatgaaacaatggtaaaaaatccattgatttgatgggttggagaaagttgagctagtccattgatctgaactctaccaattggaagaccatcaagtttggtgattacttccagcaccagcacagccatatctgttagataagaggtaaactgttttggagcacaacgaatagcgtaacgtgtagttgttctcacagcttttggttcagtctgcaatgcatccctgggacaaaagagggttcccccctgtgaaagta

SEQ ID NO: 455360 - DNA, 540 bp, Homo Sapiens
ggcacatttctgtgacattttctctgtttttccattttatccttgacctatgagcattttatacagatggtccaaagaacaccatttgggggccactgctgtaatcaggtgatgaaaacggccccaagaacagagcacagtctctttagcaaaggcccagcagggccagggtgaccatgttctcaccatcaatgtgcagacatccacctgcagcatcctcacatcccaacatcaaacagtggctctttatagcttgattctaatgccctttgatcttcataatcattgtaaagctctctggccccaagatctaacatcgccactctagctacatcctgcaactgttcacctctcctgcctcctcatccctctaaacttctcttcacaacctcatgtttccttcttgctttaccttcctgctcagcctggaccttacagtcaccttcttcttgtaatgtgctcctaaactctttcttcccttccttcaaccacacccacctggaaaatctccataccccatttgggccgacggggaggggt

SEQ ID NO: 455361 - DNA, 535 bp, Homo Sapiens
  misc_feature (467)..(467): n is a, c, g, or t
tcttcacaggactcctgcttctttgttcatggtcctattttctgaccattgtcataatatttctgggtgattgaagagggcactttccataggaaccacatgggtaagtgagtaatcatgtagccacccaaattttactaaagtagatttttctctttaaaaggattgctgatttggaagagggtaaacaacaaaacaaatgtagctcttctggcaagaggcatttcttagggctaattcaacatggttaattcataatgatttttcctaacccagttctcattgttatcatgtctagttgaaaatggatttaaagaatattcacaaagaagaaaataactcagaaactatgtggcatgaggagactgtgagggggttatgggcacagttggtgtgctctgctttgtataacctgcttgggcgatagcaaaggcaagggggttaaaatgactgccccacactatgangcttaggatctttcttttcccagcacgatactctgtcaatagccctgtggaaagtagggaccgagctc

SEQ ID NO: 455362 - DNA, 409 bp, Homo Sapiens
tcggtacctacttttccacaggggaaggaggagggtgcttcattctgctgcagtattcgaggctcacctggctgcaagggctgagggaatcaatatcttggcatacctataatacatcttggcaaaccagtgtataattatatacaccaaatgtaaggggaagagacatgaaatgtgggaattattagtggatttactttgattaattcctctgcgtaagcatctattttgaagccgttaagaaaattcagataaaacatgtgaaacttaaaaatactaaatagttaagtctcttaattgcctgtcttctagcagtcaggcagttgagtcaggaatgagatggagtgaccgtttttacttaacgctttataaaatgtatttgtcggttttttagattaagtatatttta

SEQ ID NO: 455363 - DNA, 509 bp, Homo Sapiens
tacttttccacagggctgatctgtagtttagcaacagttttcaaaagacaagctgatagccactaataatttacatgaggggccttggattctaacagaaacaaaatttaaccttctaaatgctgcacaaggtgcaggaaaattaggaggaaattatgagtgatgaataaatatctacaaacagatcacaaagtttctggggctaaaatacccctacaaatttgttaaacatagtttatagttatggggtaattaagtctctgcatacagtttggaattcatctgccaggaatggagtggaatatttctgtggttttccatattgaggctggttatctttccaggattatctccaaaaatgttctgtgctccagacaaattaaccttcatgttctgacagtggtattttctgttgggcattgagcaatctatgtgtagcactgttgcctgaggagctctttgacactaccacaggcgcgtatggagacacatcttctgaaaatggtgta

SEQ ID NO: 455364 - DNA, 537 bp, Homo Sapiens
ccaacagggacactgttattaatgtggaaatatgttattaacgtgggagtatgttattaacatgggagtcatcccagaagaaacggagtgcagagacagtcgacctatttctcgtcatccgtatctcagtacatggcaaggcaaacactgattgaaatatatttggctctcatttgcttgtaattaatatttttcattacaatgatagatttatctatttggtttaattgttttctcagcttgccaaatcattttgagatgggcaatatggcagcacaagatatctagacatatcatcacacattactgatttgagaattcattgggatatgagaaatgaagagcaaattacatagattttgcagtgacttcttcccagagaccaaggaaagggagttcttcgcactgaaatcagtgttgcgggttccatattaaatgaagcgtaggaataagcctgtcacaacctgcgatgtattgttcattcctctacccaggtatacgacagcctcacttgggtggtgccaattcaacacacgc

SEQ ID NO: 455365 - DNA, 457 bp, Homo Sapiens
aataaaacctttttaaaaataagcccgaaaagtgaaatgacctctaagaaatactgtgagaatattgcacagtgtcttggatccctcatcctgtgagaatattgcacagtgtcttggatccctcatcctgtgagaatggcaactccgcagacccaactctatgactgcaaagcttgagtcaggacaaagtgagacagatttattgatgactcagggagggagaagaggcgcgttccagacagagggcctgtttgggaaagaggtacactccactcccaggaagctggcgcttattccaagagatgggacaggcaggggcgcggagtggaagtgggtagcctgagataagagcagctctttccagacttggtgaggcagcagaagcgctggacgagatgtggacatgaccagaggcaccgggcctccgtttgggcagccaggagtgatttccctgtgt

SEQ ID NO: 455366 - DNA, 387 bp, Homo Sapiens
ggtacctactttccacagcggggaaagaaaaagagtttttatcttagctattcccagcaaaagtttcagttgcatctcagggtctctacttaggtcataaactcattggagaaccaaccactgaatcccgggtcatgatgtgttcccatggcttaggcttgggctgtatactcagtctttgagatcatgtatgaaggggtggagtccagagagaaatgggggtaattattgggagaatggtgaacagaggctgggatgcaaaaataacaggtgttcagtataccttatcagataaaattgactgacgatgttattttcattttgtatgtgaagacacacttgaaaaagctacagaaatttctcaagagctgcagccctgtggaaata

SEQ ID NO: 455367 - DNA, 234 bp, Homo Sapiens
acgggataaaggaaatggtaacataaggtgatggggtgaatgtgtggctaaagatgatagtagcttttagcttttttagctaaaaaaaactaaagatgacagcacaattattacatctcttctttgtgtacccttttacagcttaaaacatgcttccagatagcttgtctcgttcagtgctctttagtgagatagggagcgcataccatcttcacataggtaccgagccgattc

SEQ ID NO: 455368 - DNA, 595 bp, Homo Sapiens
cgggtacttttcacatggactgacatgttgtgcctgactagaaggaaaggaatgaaaataaatgtgggtttgggggaaggggaggcatggaggaaggcctacgtaggccaatttgtccatgcgcctggttgggtatttctagacttcttttcttccctcgagagctgtgggcatgtgaataagcagagggtcttaatgctgagaagaggtagacagcctgtgatggcaaagggtcattatctcggaagtcctccacattgattatcattgaatgtgtccttggagaaacagtcaatacaaaagaacatggtcactgtcctaaaggacatacatcctaaaggacaactaaagaagtcttaatgatatatacaatttatatatcaggatttagtgtggtgtgtcctaagtcagagggatgggatagaatgggcaaattcttcaccgaaaacagataccatcttccagggctccaagaaacataatggccaggctgattagtttagattcatgtgtgtggaaaggaaagcattgttttgaaaagttcttgctgggcgtggtgctcacccctgtggaaagtaggtaccgagctcgatga

SEQ ID NO: 455369 - DNA, 501 bp, Homo Sapiens
atgagaaaaaaacagctccttggtggtgtaattagtagtttaagtagctttgtctgcaatgatgctagagtaatctgcggtctttcatcatgttcaaggagaatgcacgaaaccactcagctcactataattgcaaatagcccttaatgaatatatatttgctttggctcctctgctctattttacatcaattcttgtgattttccaagtcataaaatgccccagatgcctttcactaaggcattttcacctggataaaaagatgtaaacagattagaccatttctaggtgagttatccaggaaacaggggtgatacaagtggattatctattttccgatctggaaaagtaggagtgatatagaagagaatcaatagttctctacaatgaaatcttagccttggagaagtgtttggtgaggggggtgaagatgggggaagtggcattgcgagagatgcagttactcgctgatgccttgcatggtatcacatgatgtcccct

SEQ ID NO: 455370 - DNA, 557 bp, Homo Sapiens
tcggtacctacttttccacacggcttctagaaagtcatggggctgccaacaagatgcacatcctttaggcaacttctgaggcaatgtggaaatggaagcggctgagctggaaggactattccagtagtaaacttttacctccaaacagcctaccaaccccagacctcctttggctctcccagtgctcagtatgtgacaatgccaaatcatatgagacagttatatatgtataactccctaaatgcactggcaggaatatactttatctctccagggacccttttaggcaagcatcatgtctcccacgccatgtcgaatgcttaagccttttaacaggcatgcagaatctgatggatttgcattaacctggtattttctgcaagtcagctgaaaatggactggacactcgaggggaggagaggcactaacacaaaattaaattaactaggacgtttatcaagtcgaactttagtcaacttaggcagcttacatagggaagggaggaaacatccatttatctcctttcctccagcatagcctcttttcctcattaacat

SEQ ID NO: 455371 - DNA, 616 bp, Homo Sapiens
tttataatgagtcacacttcagtgcaagacatacaaagtagaaccatgtaggaactttattccaatggaagtaataggagctacaaacttatgagggaagcagataagaaaattcaccattacattagactcatataggtgccacaagaagggtatctggagcaggagatggaggtccagcgtaaagtaatgtcagctaaatattttgggaacactcttcaagaatttccaactcaaatgcttccatgaaagcattaaaaactattccatccctctggatgccccaaaagagtttgcataattgtacataacacaaaaataatcttatactgaggttatatttatgacaagttttgtatctatttctaaacggtacgttcttccagcagactgatttaacactcttcgggtcacagacgttttaaaaaatctttttcataattatttggcaaatttatacctatctactctttagggacttttgtacaagctccctcacaaaaatcttctaaagttataagtttattgcacccatttacatagaaggaaactaaaaattaacagctatgtaaggcatctatgtttacctagctagtagacagcccctgtggaagta

SEQ ID NO: 455372 - DNA, 395 bp, Homo Sapiens
aaggcaaatatgagtgcttcatgtcagataacggaaacaattcaaaacggtacatgtagaatcagcaactgttttgaaaaagtacacagggaaaaatcacggaaaagaaaaacaacaaaatgcttttctagctggtcgttttccctctttctgtttctctctattttctgaagttgacagcatgcatatgctacttttataatcgaggagacaaatttaaaaattttaaacgttgtagagcattttcctattctataggctcaggaaccctgttgcctgcaccactgcttatccaatgtccctgacaacagaccgaacctcgtaggatcaatagcagacgcttgtcactcctataactgttataccctgatgtcaatgggctgctgattactaag

SEQ ID NO: 455373 - DNA, 431 bp, Homo Sapiens
caggaggagggagtatgtaaatatcacataagccaattctgatttcccacagaacaatatattaataaaggattatgttcctggccatggaactgatatacaaaattttatagaactgaccacaaaatcaaactcaggcagctatcaagggtacacccataatctgtacatcacaaaattttctaactagtatatgaataattaagcagggccacacagtaatgaaatattacaatgcatgatgtaatacaatatccttagtctcatatttctgccttacaaaagcaatcagttattttttaacagctttattgaggtatacttgacttatgataaactgcacatatttcaagtgtacctaatgtgataagttttgacatgtttatacacccttgaaaccatcaccacaatcaagtaaatgaatttttcat

SEQ ID NO: 455374 - DNA, 520 bp, Homo Sapiens
taaaatattctcccagttttcatgcacagacagattggaattactgttataatggaaaatggagaataaccacccacatttaatatggttattggttttgttgcttgatatttattgctactattcatgatagcccaggcaaggtcagatcatgtatttttattttacactgtatagttgattcttctcaatcccactagatcagactctttgggatactaggattggcctatttgatggtgagctcactacatccatttagatgttgtgtccatgcaatcattttagttctcctagtttctacctatcacgttgtcattttcccttctttatcatcctgggtagctgagaccccacataaatatataccagaaaaatgttgtggtcttttctaaactctctgaggcatctgttgtcaatgtgatgttgttttttgtttccagtccaaaatatatcaaagtaaaatttaactccacttttgctaagtattcatcttgccttgagtactaagattccaaaa

SEQ ID NO: 455375 - DNA, 556 bp, Homo Sapiens
tactttcacagggggaccttttagatttagtcttttgggcagagctggaatatttgtgggagtgagcccttctttctcaagcctaggattggactttacattcattgtcttgttcctatcatgatgaatttcttgagagagacaaactgtcttcttaaagaagagactggaggagagatcacagtcctcctgccttttctgacctcacccctctctccttcccacttgtccgtcagcatctcggctgctctttctgggagctgaaccaaggaagagaacctctgctgtgctgtcgttaataggctgagcactcaggacagctgtgaggcagaaatgtggctgggccattgctctgctgcccatcataggtcaggtctctgtctttaccacatcactggctcctgcaagggtatgtagacaactggtcaacatgacagcttggtgtaaagcagaggtgttgacagttaacctggagattcaggctgtatagacagtcaacggaggccatttagcacaggaaaagtagggatccttagatcacctcagcatgcaggtg

SEQ ID NO: 455376 - DNA, 436 bp, Homo Sapiens
tgcggtacctactttccacaggaggatagtgagtggctcttattggagcagggatgtgctctggaatattaagccacctctgatgacatgtgtcctggtgctctgtgatcaagatgcctgttgtgtatgtggagtgtattattgtggcttttcttgttctctctttttaaatttatttcaaggcacaagccctttgtgatggaggatgtctagcttgaacatgctggtaatgtgacactatcctcagctccccttggccctgggttcataggaggcaagtgtttctaaatttctcgcccagtgagttgttgcatgttatttttaaccattaatattgtgtgtctattggaatgagaaacagaaggttgaatgggaaatagattcagtgacaagcagacaaaaagcttggttctgagaaatgttcttcactgagttg

SEQ ID NO: 455377 - DNA, 675 bp, Homo Sapiens
  misc_feature (618)..(618): n is a, c, g, or t
acctactttccacagggcagatgcaacgactgccatcatcaagttacttgaagaaatctgtaatcttggaagggaccccaaatacatctgtcagaagccatcaatccagaaggcagatggcactgccactgctcctcccccaaggtctaatcatgccgcagaagaagcctctagtgaggatgaggaggaagaggaagtacaggccatgcagagctttaattctacccagcaaaatgaaactgagcctaatcagcaggttgttggtacagaggaacgtattcctattcccctcatggattacatccttaatgtgatgaaatttgtggaatctattctgagcaacaatacaacagatgaccactgccaggaatttgtgaatcagaaaggactgttgcctttggttaccattttgggtcttcccaatctgcccattgactttcccacatctgctgcctgtcaggctgttgcaggtgtctgcaaatccatattgacactgtcacatgaacccaaagtccttcaagagggtctccttcagttggactccatcctctcctccctggagcccttacaccgccccattgaatccctggggggcttcagtgttgttggcggaggaangggttgcgcaggcaatgttgctggatggttaccctctcagcccagggcacaacttgg

SEQ ID NO: 455378 - DNA, 557 bp, Homo Sapiens
cacaggactcacgtatcaaggaaaaaactttgcacacaaaaatgaatattcaaatacacactatgggaccgggaacagcatttctactgaaatggcatatggcagctatttaaagctaacacatttatgactagtatcaacccttattgcttgcgcatattaaagcagaaacaaatgccacagttcccaaactacacatttggccaacattcccagcaaccatttctccaacatctgtgtgtccctgtggagccataaatttatacatcgaatattatttgcccaagaaactggccgcagattctaaccattaccggaattacttttatgaaggatgacttctagagcacaccataatactgctatacatcttaaatgcattttttaaacacagaaaaataaagcttgtttgcaaaccatatggctgattgaattaattctcaattccctaatgacaatttgtatctgttttgtccctccaaaaatggccatagacattttaacatgaaaagaaaagatgtggctgtgccagtcataagcacagatggtaaacacat

SEQ ID NO: 455379 - DNA, 541 bp, Homo Sapiens
gaggatccctacttttccacggggaaaatacatagtttctgcctagtagaggttctcctggaccttgttctgatcatccttgtactaatttttatcattatgattattactgatttcttgctaaggaagaagttttggaagctattggtggaggttcagtcagattgggtgctgcattggtttgatcggatttattttgggtagggatcaatagttcttaaaatttaagtatagttcttgtaactactccagtgtcttagagttgtgtgtttggtttgggttgatattagaatatggagttctgctttcaccaaatactagctatattcgttttacttactctcaccaatctgcccttcttgacaaggactcctcaggcacaatcaggtaaaaactagagtacaaaggcatttgtgatattttgtgatacatgctttctaagattaggatacaaattcatgggaaatgagagacatctatgtgaacttttgactaatttagaaagtagaggcaatcaggccaggcatccctcagtcttttg

SEQ ID NO: 455380 - DNA, 526 bp, Homo Sapiens
tacttttccagaggcttcgttatatacagcacagcatttttttacagcattttattttatgtgcacatttatttttgccactttttaaaggaaatatgtgcaagaatataatgagacggtatatgaataaagattgcagcattaaaaatacatataaaggccaccatgactgcaatttttcatgagtgagaatttggtgagaatagtttacatgctctcctcaatgtttctaaagacacaacactgaatggaagtaatatggacccacagatcagcactcaatgtagcatatcttagaacagctttttccttactcccaggatacacagctgctgcccatattcccctctggggtacagttatgtcagacttgaaagaaaaacccaattcctgctctgccctggtccttttatatccagacgtatagagcattggggaaaaaaagtatgctttcagtatacaggcttcttattaacaaggaatatttataaacactgtgacctcctgattcctccctgtgaaagta

SEQ ID NO: 455381 - DNA, 913 bp, Homo Sapiens
ggctcggtactacttttcacagggggaggaaagagatattattatctgggggctgatgcaggagtaccaccactggagaagcaccaaacaggtagatccaggcagacggattatatgcagccttgcaaaaggtttttggttctcacaggtgacacaaagtagcagaaagctaagaggacgtgaagaggcattcagaactagtcatctcattggcaacttgtatgagacagggactagagcagatggcccatctcccttctccctcccaatgtccagacactgtggaagactctagggatagagcagaaacctagtgtagggccacaaagggaagctctgcattagaaactaaattaagctacggagcacttaagaatatttctacttcatttgagtttgtggactaagacttatgcccacaatagctcttatattctccttactttggttaaggattatatcaaatccatcaccccttgaaaaagctttataagagatgcgatgcattttaagtactttgggaaatctgacagaaaaaattaatgcagagtcatatagctctcacctttcttcttcaggattatttaattgtggctggaagtcctgaggctctgtacttgtaagcactttcagtacaaagggtgacactttgattaaggcagttgaatataatggttaagtacatgaattttgatgctgtcagaaataattgttgtaaacagaagcttgcctaaattcatatctagggtccacccctttcatatgctgtgggaccttggggtatctgtgcctcaatgccacatgtatcacagaaataaaacaggggcagtaacagttcctatctcacatcattgttataaagattgggtgcacgtttgcaaatgctcagaatataggaaactagatgtaaatg

SEQ ID NO: 455382 - DNA, 369 bp, Homo Sapiens
atgtgtatcaatggattcactggatgccaccttagaggctgtctaccgcaacaacaattaacagtttcaaacaagtttttctctaataataaaagtaagaaatctcattactgaaaatttggaaacaaatttgtaaaaaagaagaaaaagccatctatagttctactatctaggaaacccagttaatattctgaagtatcacactaacttttaaaccaaatttttatatagttgaaataatagctgcatatctcgttttcaattattattatgtctctgaaaatgccacattattgcaatatatgtatcattgcttatccttctctaattgttgaatattttgaatgttactttttaggtaccggctca

SEQ ID NO: 455383 - DNA, 433 bp, Homo Sapiens
  misc_feature (63)..(75): n is a, c, g, or t
cacactctcagttgcttacaccactttcctgttctaaataaagtaactgtcttaatttttttnnnnnnnnnnnnnggccaaatgaattgcatcatgtgaaaagtacagcattacatttgctgtctatatttaatcattaaggaaattaaatactatatttaatccatgtcaagataaataattaaaacaggcccatttttattatttacaattaggccctatttggctaatgggaaataactcaaaagtcagagaagttatttctttagttttcctaattcttccaaaagacaataactaaactttattatatcaaattttgactatggttatagttcctcaggaatacctgggctctcctaattagtagcactataaagattacttcccatataatggttcagaattgatacctattacctcatcagatgcc

SEQ ID NO: 455384 - DNA, 221 bp, Homo Sapiens
aaagggtgtaatcatgaggttagaatgagggttagtgccagtcctcctatcacatactcagatgttctccagtagtagaattaaaacagcaagttactctagcagatgttttcaaattagctaaaaccgtgtcaccagagtaaagcagcaaagctggaaatgtgcccagagagaccttcccacaagccgcctgagggagccatttaaatgtctctgaagcc

SEQ ID NO: 455385 - DNA, 599 bp, Homo Sapiens
  misc_feature (526)..(534): n is a, c, g, or t
tacttccacagggagaacttatttcaataactgagaaagaagaactaagacaataacacaataggtaatatacaatttctgaagtattcttgacatggataattttgtagacccttgagtttttttaaaataaatataaggaaacgggaaaaaattcatcttccaatacccactggaaaagaaaataccgaatatatatttatgccaaaataaaactttatcaacattttctggcagagctcataaaaattaattatttaatgccagtgtacactcccacaaataaagataaactcttcagtgccaacactacatcaatgagaaatcaattaatcaagaaaggcttttaaacaaagatcagataaggttatgtcacaggacatatactaagcacagagaaattgctgaagaaagtgcctctgttttgatagcaggcttttattctcaatctttggcaatgacgtactaacgtaaaaatgggcttgtccttgtttattggcatttgctatatttgaccttaggcttnnnnnnnnncactcacccatatacctgaaatctaatggcatataaagtggatggctgtcaaagctcataatccc

SEQ ID NO: 455386 - DNA, 636 bp, Homo Sapiens
tacttttcacaggggtttgaattttagtaacattgttgtcaaatcaattattttctagtgtaagctacccacagtggaagaatgtatgcagttagctgagacagcccgtgcagatgacaatatatttgaaactgtaaaattacttgttaagtcaagaacctgaaaaagcccttcctattggtattagctttgttaaagaatacatcagtagctcagactggactttggataccatataccctgttcttgacctactgagctatattcgtactgaaaaattactcttgcatacgtgtactgaagctcgaaatgagttgctgatattatgtggttacattggtgcattactggctatcagaagacagtaccaaagcattgttccagcactttatgagtacacaagtcagctattaaaacgtcgggaggtgtcagtacctttaaaaattgaatatctttctgaggaattggatgcatggagaacttgcacacagtccaccaacagatcattagaagactctccgtatacacccccttctgattcacaaagaatgatttatgcaactttattaaagagactaaaagaagagtcactgaaaggaattattggaccagattatgtgactggactccaatctt

SEQ ID NO: 455387 - DNA, 466 bp, Homo Sapiens
actatgttacacagctctcccaggagcagcaattctgaaggtgtcagtattgttaggcccactgcagactagagaattgagtctcaaagaaaggtcagagaacccaagtggggtccctagcatgctagagtgcagatttccgacctttcaaaccttgtgataccctgttatttgtttacttagtattcctgtcctttccttacctcctccctgcatacaactgtccccaaaagtggctcatatcatgatactttttcatgttaatttaatttcacactgtttcttgagatagctggtgataccctgtgcctgagcatcacagaaggtttataggagaaggcattagacctcataacatctgtctgccctaatctcttcatcaaagcttttaacaagctaccatcacagacaatcctttctcaatggatggaaaatatttccagaacaatattcaagcactccattt

SEQ ID NO: 455388 - DNA, 519 bp, Homo Sapiens
gtcttcagggctgcaaaggaagcaaccaagacaatgctggcatcaagatttagcccggccttaggtcctgactcctcctgtggcttgcatcaccctgtcgcaccctgggctttgctcaccccgaacctgcctagaaccacatcacaatcgcagcctcagcagctggcaaacgagggcagggctcagagccacacatgctcagggagttgcagggtgacccagattctaggaaatgccatttggaatgacaatggactccattccttctgagctaggcaccaagagaaaagtagaggcatttttcttctgcaatagtttcttcttcacacagtgcggactcttggaagccacaagctacctataaaccagtgcacagcactgccaggtagaatggcccacctccttctcatggggacgagcgggaccccagcaaaaggggtctcagtggtttaccatgctactgcatcactgcctgggcacaaataaccacttctctaccccactgtggaaagtaggtac

SEQ ID NO: 455389 - DNA, 530 bp, Homo Sapiens
tatggacaactccatctcactgtctaatttgacccaattttccattttgcttaataagcacattacagtgaatcactgatctattatccaaggaattatgaagcttatgggttatcttccattgcacctgccttaatcagcgtagtgccttgggtattatggtcactttatcctttaataaaagaattgttaatatcttcatctgcaattccaagcaatttgcaaaattgggttagctggcttttatatgggacttattacaaactcagttacttaatgtgatgttttcagcaataatttctgtgtttccaacaccctcaaattaatattttatttaaacaaattgtcagtatttaaagtggtaaaattcatttagggagataaatggaaatgtgggattttgttctaaagttactttcatgctatatctgatactattgtattggctgtttatttttttaatttacaaaactaaactaataggaactatagtgctataacctgtggaaagtaggaccgagctcgatcga

SEQ ID NO: 455390 - DNA, 537 bp, Homo Sapiens
tacttcacaggggagaaccataattctgacaatctatcctcatgaagaaattgaagttgaagagacattcattattaaacttcatcttgtgaaaggagaagctaaattagactccagagctaaagatgttacattaaccatacaagagtttggtgacccaaatggagttgttcagtttgctcctgaaactttgtctaagaagacttattcagagcctctggctctggaagggcccctgctcattaccttctttgtcagaagagtcaagggcacctttggagagattatggtttactgggaattaagtagtgagtttgacattactgaagactttctttccaccagtggatttttcaccattgctgatggagagagtgaagctagctttgatgttcatttgctaccagatgaggtacctgagatagaggaagattatgtgatccagcttgtttctgtagagggaggagccgaactggatctggagaagagtatcacatggttctctgttatgcaagatgaccgacatggagtattgcc

SEQ ID NO: 455391 - DNA, 526 bp, Homo Sapiens
acaggtacttttcccagggtgtagttatcgcttttttagagtctaagttctttcttctcatgccatcggattcaataaaaggatggcggcactggccgaggtgagtgagccccaaacgcctaggcttgctggccacagtctatgctgctttaaactttcaggttatttcttttattactctgagattgcaaacctaacccacaggccgtatatggccttatgatgtgccttttattttattttataacacaaatggtctttttaaaaatttgttgcttagttgccagcatttaaaacttgggagatctcacatttaaaatatccccatttctagcttcccttgaaagtccgagagttctggcaaccctgggccagaattactgcacagtgataacccactgcggtagccactcagtttatacgaggtgtgtgagtgtgtgttctccagcttgccatattctccaccaattcctattatccttcacccctgcacttatttacagtacctacatggcccctgtggaaa

SEQ ID NO: 455392 - DNA, 518 bp, Homo Sapiens
  misc_feature (11)..(11): n is a, c, g, or t
  misc_feature (58)..(58): n is a, c, g, or t
tatgtggggtngaaaaagaaatggttaaagtaaaaatttccaacagttcccataaaangttgaagccagcctcaaaccttaaaagaaagagaaaaacttgccaagattggatctgtgaagtgtcctgaaatcctgccctcccccaacatgaagtccaggtccccacattaatacattttaagttgccttggccttggtttaattgcctgattttccttttcctgatgggggcccatgatgatttttgcccatgaatcctaaggacccaaaagggtcttgtttagatagacacttcctctcttttgattacaggggacctgccagaggagataagatgataagtcttgacctggctggttagaagggttctgtgtgtggatctctgggcatcacttttcactgcagaatcgcagggaagggctgtgaaagggaagggcttctcgaaagggaagggctttctccttattatccctctttgcatatctgtcatgattctctgacctggaccgagccattca

SEQ ID NO: 455393 - DNA, 226 bp, Homo Sapiens
ggatcgagctcggtacctacttttcacagggaatagaaatgacctgcttctatgagaatattgcattttcccatataccaagatccaccttcagctatggacatagtcttgttatcagcttttctagagaaggaagtaggtaagaaatgcttagattatgagagagaatgttgaggactgggaatagtttcaggtgtgaatttcctcctcatttacgtccctgtgg

SEQ ID NO: 455394 - DNA, 715 bp, Homo Sapiens
  misc_feature (392)..(406): n is a, c, g, or t
gaaatattaggtgaacgcaaaaagtgaggccagctgaaccaagccatgtaatatacacaccttccacatagatcagtcacctcagttgacttgtatgtgagccacatttgtgtccatctgatgttacagcattcactctctttgcctccacttctcaataactcacaatctgtaaactgactgaggcccgcttccacagagcaagcttcaggcctttttcaaggtaaagtatcacagttacttgtatttcttaaccatttctcgtgtgtagagctttactaccattttcactagattgttttgtgtgtgtgtgtcactgacaacatttttcagtgttgtgccctaattccatttttcctcacaaatggtgggtttttgcatagcaagatgcnnnnnnnnnnnnnnnaaggaacacatatgtccgtaactgcaaatgaacccagaaaagtgaggacgagttgggaggggaggttggtatgatataaagactttgacctatgttctgtaggcaatgcttgtgattatttgggagcaatacttgcaatattcttggatattttggagcctggtgattcttagcattaccttgtggcgcttttcagttccttggacctcctcctcctgctctcttctgcctttctgtctccttcagagcattcctgttgtgcgtgcctgcttttatcttcctgtggaaaagtaggtaccgagctcgaca

SEQ ID NO: 455395 - DNA, 215 bp, Homo Sapiens
tacttttccacaggaggtagtaatatttgatgggaacttcagctcctcctgactcaggtgaccctggtgacatttcagaacattgggccggagaattcacttaatgactgagaaattagaaggagaaacaaaagcacgtcgctacaatgctcggagctcagaaagggctcatgtaggcaaattctgcaagataggaaagaaaggactcttttttt

SEQ ID NO: 455396 - DNA, 464 bp, Homo Sapiens
cagggcgtccttcctccatgtgattttagttaagcacatcttttgtcatgatgtcctcggttgtgtattgtgtgtcttcgtgccttcgcgtactacaaaatgtataagaagttcctgctcctcccaagttgctttcagcatgtggaattttatacatatatcatttgtttacttccaaaactttttagttgcctgttcttcagttacgccagcatatcctttatttctttcgtattggcacagttctctatgtaagcaatttgagagggaagcaaaggggaaaagtttgagttagctgttctctgtcctagaatttccctgcattaatcttgtccttgaaaatatatataatactggtcccttaaactccatgaggctttgtctcattatgtattgttcttttggtaccctttcccacttaacttacctttgctcctaagtcctataaatacgcctgtggaaaa

SEQ ID NO: 455397 - DNA, 658 bp, Homo Sapiens
aaacatggtgcttagattttcagcccaagtattattttatcttagagttggaaattctcaagaagcctttgcaaagccccacaaagggaaaacttgatgtgttcaggcctcagatgccgttctgatgagctctttggagagatacggagggggaaagtggaacgttgtgaaatcaaaccaacaattacaatgtctcggaacatcaacgtggttggaaattattgattcaagtcacgctctccaccaggccactgtctgtgagcagtgttctttaaaaagaattatacagccacttactaagtatctataagtcagatttatttccagctactcccatatgtgtcctctccgccccaaatggctggccgtcctccctgctcttggcttagcctcatttctgtggctttgctgaagctgctttcttgccaagtaggccgtgcctgttctccagtctagggacatccgacgcagcattcaaatccttcctgagtcctcctttctcacgtcttggtctctccttgttcagaggtgcaagtttggtcttcccaattacatatcactgaaggtgaaccacagtctccccttttcttccatcccttaattcccagcaaagtttaacgaagaagaaagagcttcagatcagtgtagtcaaaacccc

SEQ ID NO: 455398 - DNA, 455 bp, Homo Sapiens
ttctggtgctgaagctcatgtcagctccattggacagtgttattctgggctcttctcactgtagaggactggagcagaaagggttccttggaaacctgtgctgggaagccctgtttggtctaaggctaagctttggttaactctgggctccagccctttcttcctttaaatagctgatgcacggccagcaggtctccattctcatcctctctttctattctgtttctttggttcagaaatactcttctgctttttttggacgaactcaatggcccgatgttagatattgggtatttttcaatcttctgttttctgacccttccaagaaagtttgaggaagaacatgtactgctttcacgttcatttcgcccattcagatgtcttggcttgaaccttatgactccgtatcaaagtcctcacaacctgtctcagatccctgtggaaagtaggaccag

SEQ ID NO: 455399 - DNA, 492 bp, Homo Sapiens
gaatatttggtgtccatatcaccctttctggtgctgaagctcatgtcagctccattggacagtgttattctgggctcttctcactgtagaggactggagcagaaagggttccttggaaacctgtgctgggaagccctgtttggtctaaggctaagctttggttaactctgggctccagccctttcttcctttaaatagctgatgcacggccagcaggtctccattctcatcctctctttctattctgtttctttggttcagaaatactcttctgctttttttggacgaactcaatggcccgatgttagatattgggtatttttcaatcttctgttttctgacccttccaagaaagtttgaggaagaacatgtactgctttcacgttcatttcgcccattcagatgtcttggcttgaaccttatgactccggagtcttagtcagtcacgacctgtttcagatacctgctggaatatacgggagcctctagagt

SEQ ID NO: 455400 - DNA, 604 bp, Homo Sapiens
tacctactttcacaggacacaagcagctcctctttccatttgtagagaaactaggctagctactttgattaagtatgaacgtacctctatactggatggaatctggacttacaattggcgaatgtgtatagcatattcaacccatagacagctttccgcactgttcatctatatatgtccaaagaattacttgagaccatgtccacaaagaactaacttgcctctgtaaagtctttgaaggggaagttttagagaacaatgaagacccaggaggatgatatggggtgcaggtagaaatatagaatgaatcatggctttttaagatacatggttacttttccctgttgcaagttaggtctgagtagccaaaagtcggctttggcaaaaggcatctccatttcagtgatcagctaccaccaggcagaactctaaatagaattctcagtttcatgttttccctttgtcaaattaaatggcctccatgaaagagaagtaccattctctcaggcttctgacagtatccctttcgtggaggccagaaacgagagggtagcaatcaaagaataagcattaaaattatatcctggctttagataatctgata

SEQ ID NO: 455401 - DNA, 570 bp, Homo Sapiens
tttcacagtggagaaggagtcacttttgggcaatagagagtcaagggatacaagcctgacccaaggactatgacccagcatggaatcaggactgagtagtcagaagggcctctgacctgcctccagggatgcatgttcctgaccctagtgagtatgagccacaataagaggtcaagcaaaacccaagagaagttgcactgcagtccacaagggctttccagagttgacagagacaacaggaaatgctggcatagcatagcattttcgttctggtgaggagagtgggactcagaagcctgggtggatctggagattgagggcaagtggcacatgtcacatggtggcagccccagactgtgttcacagacacatgtgagagagcctcagaggactccaggacattggactggaattcaagatacactttctgtgatgctaatcaggccaaatctgtaccagtgccctcaattatggtttggctcctcagtgcagccatttcccttgagttagaggtgaatggtggagggtgagggtggagagcagggactaaggttcaactcagaagtggac

SEQ ID NO: 455402 - DNA, 236 bp, Homo Sapiens
agtgaaattgctcagagtctgagagacagaagcaaaatcaggacaaaaacttcaatttcctaatgctcagggctggctggtagtgctcactaaacccactaaacctgggttttaaaaacttgcctgattgtgagtacatctgagccagggtgtgggaatctatatattttgcaattgtccaggtaattcttaggatcaaagaagttttggacatacttgtcagtggtatggctcca

SEQ ID NO: 455403 - DNA, 525 bp, Homo Sapiens
  misc_feature (477)..(477): n is a, c, g, or t
tacttttcccgggccatcacctcatcgtcaagtgcctgcttaaagacggggcggcgggggcagaggacgctctgctgcactcaagatgctgatacatttctcaagcatgccggcttgtgtgtctccggttaaagtttccttcccattttctgtgcagatgttaaaagattgactcctttccttttttcagggtataggtgctcagctgggataggtgagagttaaattttctcatgatgctggtgccaagaaatagcaccttgaaaagagaaagaaatcaagacatgatctccagggagctgtcgtttggagcacattcccgagagctctccctgggccgggaggctgcgtggtgtcgttcccctcagcagcatgcttcgggtggagcctcctgccctgttcagatatgttagataaaaacaccttgacagtgccagcccgtctttaattttcacaccatctcaagtaaaatatgtnttgaaatgaaaacattttgcattttattttaagcttatttttggggct

SEQ ID NO: 455404 - DNA, 716 bp, Homo Sapiens
tacttaccacagtggctccaaagaccacttggaattgcctcacccagaagatcagaaccctactttctgggcagatacatgggatcctctatatatctggttcactagaccaatctcactgatcaccattcagtgagagttgcaaagatacggagaaatggaattaaagctatcaaaataagaaaattcctgatcaaaagttttcaactacttatctacaggaaaagttattttatgtgtagtaaactaaattcatttacaatgtctttgtgagttattaatcatccgccagtgggaggcaggcaacaggagaaacaggctgtgtatctgagagtgggaccccttaagagtgcaaaggagaaggggagaggagagaaggtgacaatatgttgcagtttcattattacaatttacaacagcctacacatgtttaatcctgattttcttctcttcacaaatcagttctcctgtatgactttccacagagcagaaaatgactatacctgaacactaaaaatttaaattttccatctttgcatagcatctatgcaggcaaaagtttcacagaatctcaggaattagaggctgggcaatgaaaggaagcagaaggcttgtcagtgacagctgtaagccttgctctcttagctagattttctccatcagtcaacttggagcagaatgagtgtgatctactgctaatctcccctgtgaaagta

SEQ ID NO: 455405 - DNA, 552 bp, Homo Sapiens
tctccagctggggacttggttctatactatgcaggtgaaaaccttctaagaatgaaaaaatcacatcatcctaggggacaaacccacccacatcataactcagccagctctgctgtgcttttctcaccatttggcccactttatctattcctgtgagaaagcacatgacaaatctacttgctccaggccccattcaacagtaacagaacagacctgaccctgggagctctggtctggaagaaagaatcctgttcctgctcaggatcctttggaatcctacagccctagataattcctcaatgcagggtaatcaaagtcataaatcacaatcctcgtccactctagactgggcctctggaaggcagaagtggaaggggcactccctctactgtttacatctgggtctagatcccagcaggagggctggcgaacagagcgcaggccacctgtccaccacatgcacctaactctttgcttgtgccaaggcagtggcattcgcttaaggacataggtcagcccactagcagctgtggcaatcccctgtggaaagta

SEQ ID NO: 455406 - DNA, 115 bp, Homo Sapiens
tacttttccacaggtaaggaaaagaaggtttatttctagtggagcaatttcctgcacataaaaacaacaaagaaaagatctaggttcgctgtgctatatcgaccgctggtaattt

SEQ ID NO: 455407 - DNA, 382 bp, Homo Sapiens
agactggaaattaagtgaaaagggaaaggttaggatgtaacttcagttttacagtgacttttaatgtgctttgtatctcaccctttgagggaaaggggtggtcacatccaactttaaacaacaaagatgaaataaatctacaaccaggtttgttacaaatgtaactaagagctctgtattttgaagatgctcaacagatgtgagttgaaccaagaacgtcatacttggaattgtcgttagttttgtttgttatgttatgactatttgagtcatgtagtggctcatttaaaaggggctgctccgtggggattgtgcatatacaccatttgttgtagtggttgtggcaactagtgtaaatagatctgtatttttgttttctata

SEQ ID NO: 455408 - DNA, 473 bp, Homo Sapiens
tacttttcacagggggatggtgactgcaaacttttctctaagtaaaatattcaatacatgaacatgtttactacattaacctttattcttctcattttagactgggaaacctcacttcttttgattttttccaaaggtattattattattaatctttttatatcacttttttggccctcaacaggttctgtattttctaatgcctgtggaagctaaccctaaagggaaagtagaatgagatccatggtgagattaatgacaaaacaatgaaatactcaggttttctgataatcttgcttatagctatttgcatgtggcttgttgtctcaagaccagagccatgctgctgtttacccaggataagtcacaatttaccataaataactatcattttaaaacaattcacctttttctggcttaggataattacagttttaccactgtttgtccgatcttctgacttctatccttga

SEQ ID NO: 455409 - DNA, 275 bp, Homo Sapiens
tgtgtgtcgcagtcgatttgtagtaagttgggcgccgtgcgtcaatgttgtttttagtcaagttcagtggtaatgtgttatggcgttcatcctagtatgcatatggtaaaggttgtttgaaatgtgaagagcagagcagtggaattacctgcgctttaaggccagcgtagggaagcagagaaagtttagtgtctttttaagtttctcaccgtactattaggaaccctcctctctctctctccctccttccccagactctgcctgtggataaagta

SEQ ID NO: 455410 - DNA, 514 bp, Homo Sapiens
  misc_feature (62)..(75): n is a, c, g, or t
cgagctcggtaccctacttttcccccgggctgatgctgccaatgtctccataaggccacttnnnnnnnnnnnnnnttttgactggtgctactataatacagtaaaatgtaatgcttatttttgtcactttaatttcataatcactgattaaatcagcaaaattttataaaatagagtctagaaattgtgtcttacagtaattctgtaaaaaattcttttaaaggtttttagtcagaaaaatccaatatgtattcctattttaatgatgacattaatccaaagaaattaaaattaaaaagtgataagaactgggaagtgaaattttatgactacttaaaaatttgttaaaaagtttgtgaaacatgcctaatttggaattaaaataggccagaatatctttgaatatgtttacttataaatgttcaggttactcttgcctttataaacccataatcctactcccatgacgagtattttacactaactggactcatgacttatcctgtgaaaagta

SEQ ID NO: 455411 - DNA, 510 bp, Homo Sapiens
tgatggctggctccgttttcacaggggtattggcttttcagcagtttcatcagccactcggatatgctatggaatcagtgttagttttttcaggagccagaaaacacactgccaccttatggtagtgacaagggatggtgggatccgtagagtcagcatgactttccaaaaggttgaggaaaagagaaggattcaagcagatgcctcaatatcttgagagtgtgcccttggagggaagatgcttgacccctcactggtcaacttactccagtttcctgctgggaaggaggaccaggagtgtggcacccttgcagactttgggagggtgctgagggctcactgcccaggcaatgccaatgctattgccgatcttttccatttataggtgaggagttagaggctgggcaagttaacctacttgctcaaggtcacgcgggttataaataatgaagctggacttgaaacccaggttcttgaactctgggcactctcccccaggacgctccctga

SEQ ID NO: 455412 - DNA, 552 bp, Homo Sapiens
ttttccacaggagtagtttttgttcttaatggggttaaatgtccaggataggaaagcttactgttttgttgttgctttaattgcattggcttgggagtgaacccatctccctttcttattgacctcacatttttttaagtggataatgttatgacaagtttgataaaaatgatgcttctgactttctggagacaggaatcaattaccaagaagagataacatttctctccattgagccattaaaaataaaattcacaggcttctagaccttacggctttttgaatctttttaggttgacataatttgcctgtgattctttctggattatttatttgtatgtttggttttatctcctgaattttagattacaaataatccttccttagattttgaccatttttaggacagcattcctgaaagcatttaattctcacagcatttgttattgttttttagaaattaattaattaattctcctggctcagaataagacataatttgtgtgtcacaggtgttgatccctttccctgtgaaaagtaggtaccggctca

SEQ ID NO: 455413 - DNA, 345 bp, Homo Sapiens
cttttccacaggggttcagtcctacctggcccatattttgcttgtttagcaattcagacatataaatattgcttggattactatggatctgataaagctttacttgaacagtgaattcaataattttgactcttcacgtactgcagattttatttaatggcagcttgttaatggttggtaggaggggacagatggttggatgtgttggcataagtcatacataatatagcatagtcaaattcagataagtatcacacaaattaataaaagcttttattgttgtgttgtttattttgctttttttccccatagatagattctgtttgtaagcagtttttgtaggtt

SEQ ID NO: 455414 - DNA, 439 bp, Homo Sapiens
ttccacagggggaaaaagccatggaaaggagagaaagcaggccaacctgtagactgaagtgtgttcttctgactgcaagttagtgttagaaggaacatggtaggaaccctgagacctacaagcagagggtcttggtcaaggctccagggcccatcttccacctctgtttgcactggctgtgcccccgatccagcttctgatcctcagataaaacaggtgaagtaagctgtaattagaggtggagccactgtgtggtctacatagctctaccattaggtgatgatctggggtaaagttgggaaatgtttcatggatttgagcctgtgaggttaaaagagtttctgggtgctgtcgtgctcctgggctgtggtccagttggtgatgagcacctgaatgcccgcatgcctcacatatctactcaccagcatcctgtgaaata

SEQ ID NO: 455415 - DNA, 479 bp, Homo Sapiens
tacttttcacaggggtgacttttgctaaggctattacttttttctagttccagctccatcactgtacctgtttctcagtatgtgatgttgcagagctcctcttccattttcattttatttcttctttctttctcttaaatgttggtggtaccttctcagccctttcactgtttgctttccttgtatgataacgtcacctcccagggttccaaccctgacctcattttcctaaactttgggcccgatttttaccagcccaggggatataactaccctgatgctgatgtgctttaggcaacatcagactcaatctgtcaaaaaataagtttttcttttcctccagcttgttctctttgtattcctttttgttcagttataacctcatgcatctggtaaatcttattgggaaacactgaatccttctaactgttcccatttttcaccccatccattttgttagtcctgccctgtgaaaagta

SEQ ID NO: 455416 - DNA, 460 bp, Homo Sapiens
gtccaaccacagtgccaagtcctaacttcttgccagactctttatgcactaaacctggaacaataccaattcctagcttctttcctgaatctttgcttagcagtcctactgtagtgatagttcctggctttttgcctaagtttttattaatgaataccgctgtagtgccagttcccagttttttcacagagtccttattgaccaatcctactgctgcattaaacactggctttttcccaggatctttagttaccaatccaactgctgtgctgatggttggcttttttattaagtccttatgtattattccagctacagagccaacacctgctttcctgatcaaatccttgctaaccaatcctgctgtagtgccagttcctaacttcttcggttttgtcttggaagacttggaaggaggacaggtagcaatcagctgtgccaacttttctgttacactcct

SEQ ID NO: 455417 - DNA, 688 bp, Homo Sapiens
tacttttcccaggtgaggtaacaagagatcagggtctggctgaaatctcctctccccgttcgcactcctgggctgagtgccactcggcaaggcgtgagccattttgcatgatgaaatccacattacagatttcttctgacacctgatgactaacaaggtctgaaaacaacaagacacctctaggcgctgcatcctcctcctcctcttcagtgtttatggaacacctcctaggtattgggtgggtgttttgtgccaaggatgcaagcaaaacattagagacaaaaggaggaatagaatatgccaaaggccaaggagggtatgaactagtggttcccagagtttgagcttttatgagcagctaaaagtgagagctttattaactaggatcagacattgataattaggtcaaaggataaaagaggttcagcctaacagtggcctaaacaagacagaaaataaaagtttatctctatcatgagagtccacagtccagagtctcactgagtaagggaaaggtgagggtgagcgctttgctgcccttcctgtgatattctcaaaggaaagacgggggagaaagaggagactcacacaatccattctccaccccgcagctgcagcctgcgtactctttgaaatatgtcattcagatcgttatcctgcttctcatcttcctgtggaaaagtagggt

SEQ ID NO: 455418 - DNA, 635 bp, Homo Sapiens
caccctcagtcgcttagagatccccactttccacaggaagctaagatgcagagaattttggtgaattcccaaaagccaaacagcccttagccagcagactggacattgcagggaagtctagaccagggtttctgcgttcaacctctgtggttcagggaatggaccgggcattcagctgagctgtctccggaaagaagaaagaaataggcaggaggttctctctgctcacttatcatgtgtgcttatgaggaaatgacaaggaccttttaagtctgtagctgaaggtaagcatattcctctgaaagatggagggaatgctggcctcaccatggggtgatggggatcatgtggtcaacagggaaggtttgaatattcagaacaagagggaagaattattggggttttgaccctgaggaagcacgtgggtgggtccgttctgcaggtcgagaggtgacccgaggtaagatctggggtagctcttccatagcgagggggtatggagcagccacaggcacagacacggggagctgagatgtggcaaggagtagctcagcagaaactttcctccgatagcttctagtcttttagtgcaatgggaatcgaagtcatctactgagaaaggatgggagaggaga

SEQ ID NO: 455419 - DNA, 435 bp, Homo Sapiens
tttaaggcaggtgattgacttgatttggtggctacttttatactagctggttaacgagctattttcttcattagtttcaggcatgtgagcttaatgaagcattggacctcccaaattacaaggaaaatacacatatagcttgtgtggtaggttcaaaggagttagtgaacaaacacagtagggccacaaattattgttaaagacatgaatgcatgaaagtgtatctatgtccaaatggactctctgcaaccatactgttccacctgaaaattagtagataggaattcagcaaatgcttggacaggggatactctcagaagtattctgactaaatagcatggtttcatttcatatcactaaagtaatttcttctcaaattgactctggactaaatcttatgatacctacttgttctgattgtacttagccacctgc

SEQ ID NO: 455420 - DNA, 677 bp, Homo Sapiens
ctggagaggtgggggcgggactgcttccaggcacagggatctcctccactgagggaggaactggagagatgggctccatcccaggcctgccgctgtcttgacagtgcttgctgcagagaaatctgcccctccttatctagagccgtgttcatgatgacggagaccccggtggtagtgctgttctgtttggggagcgcattattaaagtgctgttttagtttacctgtcacctcagcttgcatgttattctcctgggaggcatcatctgacacccaggggtgactcaggatttgtcccgcggtacaccgagcttcaacatttacctgaagcatttgactgattaattccttggcagagtccgtgatgttatcccagtagggggccggaaactccagcttcccagccaagatctggtcgaagagatcttcctggagattgttctcacttcggaatggtgggaatccacagagaagtatgtatgtgatcacaccagctgcccaaatgtccaccttcaggccatagccagtttcagcaatgatttctggagccacataagtgggtgtgccacagactgtgtataaagggccttctaccacagtcgcaagcccaaagtctcccagtttcaaagacttggttccatcaggatattcacacaccccctgtggtaagtagggccg

SEQ ID NO: 455421 - DNA, 664 bp, Homo Sapiens
  misc_feature (441)..(483): n is a, c, g, or t
ttccagtttatgaatgaaagcaagtgaaccttaaagcagcatttaaaaaaattgttgatggatgaaggcttattagaagatataaatataaaaatcttgctcttgttaactttcttttttggatttctgtgccccagcctccttcgcatttgtgtgcctgatgtgaggtgcatacgccctggagctgcacagctgtgtttggcttcagctttgtacgcatctgtctatgtgacccttttgacctcttggagccctggttttcatgcctgtaagatatggcttacaggaagaatcagagagtcatgtttgtaaagtgtctcacatggcccagcacatagtaggggttcaaataaaatgattttcctttctttccaatctcaccttcagccactttactttcgagtgttgcctggacactatattgccaagactgtgtgcttnnnnnnnnnnnnnnnnnnnnnnnnnnnnnnnnnnnnnnnnnnntgtcctggaaatcccaccattacttcaaggtctggtccaagtaaaggtgttcctcagagccccactgccccaatgccaaagagcactctgatgaagtctattctccctatcaatgatgatatctcttgtggaacttatgctgcttaatcagagataatagtttccatgtctgccatcctcc

SEQ ID NO: 455422 - DNA, 457 bp, Homo Sapiens
cttttccacaggggatccaagccctgagatgttctttctcagctgtcagtgcggcccaggactttctgtggggatgctcagacagcaggggccggaggacttttagccaccacctcccatggccagtcttcacaaattacctttggctaatttgactgtctctcctcctggggtctaggacttcaaacatgtacagaagcgattgcagaattaagacaagacacttccacaatatatttcttgtatcactggctcagaaaaagactcattcaaatcctgtatcaaagccacgtgtgagaatcttgagaaagcatcagctgactgacttgacaagggaggaagcaaccaaaaattctgcgcttcttcagtatctgagtatgatattttgcttcaacatccctcttagatgaagttattgattgaaaatcatttaagttgccctgtgaaaagtaggtcc

SEQ ID NO: 455423 - DNA, 195 bp, Homo Sapiens
ctgcctcagaagtgaacaagaaagacagagacacacagaaacatggagagccactgagagaccgataatgaaggagtcaggcctactcttcccaatggttatgctaccacttctgacacttgggtggaagagaggtgagaatgagacagaacaagcaggccagaggtccttgagcagtgaagtgggtcctagccc

SEQ ID NO: 455424 - DNA, 553 bp, Homo Sapiens
tacatacttttcacagggggtaatcctagagtacatatctgtgggtggttcttgacaagtgtgtaaggcctgggacatctggctttgaggcagttctttctccaggttttatttatgcgaatccactcatctggcaggaatgatttgttggtgtgaaatcaggtgttggcccagcatcctgcacatgttccatccacatggcagtgatggtcattgcacaccagtgcttggtctcccaagttctggagagtgtttttatttcactgccatctaatttatccagaaagttcaagtagcgtattttctgtagattcttataatttcaagattaccaggtccctgtgtgaactctcagaccacatcctgttgcctttctctgtcattctattgttttctctcccaggagggctgggtggtagggtatttattaatttattgccccatatactaatgagttccttcctagaactccttacaactctcggtccatggcctgttgtccatctttgctgtcccaggggtgctggtaggtagagtatataatgatctcttc

SEQ ID NO: 455425 - DNA, 694 bp, Homo Sapiens
tacttttccacgggactgtaaatgccgtgatgaagttaaagtatggattgtcaatatccactcctctgatttcagaacgtcttgcataaagaagaaattttttcatttcatagcaggtcttcttgtctgaagaaagcttcatcaagtgggggcacgcacaggcagcactcctattgtgattgattagacacatgtgagagcaggggcctttgccatcattagctgcacaaggattgggagcctgtggctggcgactgggatggtatatctgaaggtcaaatggctgtgcactggttttctgaatcacactgacattctgccctgtccacttattggctttggacaatgtgttggtcctccagtctgtccagtagacttcactcccatatagagacacagcaaagggatgggaaaggtattcatgacctcggatgatttctatcatgtttgttccatcatagagggctgaataaatagcatctgacctggcgtctgtccacactatccttttctcaaagtggtccacagttagtccattaggccaagcccccagttttcatgtctttatagatggtttttctcccagcaccactcatagaggcagattcaatgcgaggaaaatttgcatcccagtctgtccagaaaagattccatatctgggtccaaagcaatgccctccgcaactgtacgtcgg

SEQ ID NO: 455426 - DNA, 455 bp, Homo Sapiens
ctttacaaggaaacttttgtaaaggcaatgctttctctttctcctcagaaaaaatttctggtccttgagctgacattttgaaaagtaatatatgtctatagaagtggggacaatacaaccaatatatattttcatggttaatgtcaatgcttttctaccagccatctattttgaacttagggagatctcagaatttgaggcttctgaaactgctctgggtttcatcaggggaagtagcacgttaccagatcagccacatttaccaccaatacctatattagccaccgtatgtaaaaatttgctttgggggagatgaaatggaccttgatagtgaaaggaagagatacataacacaagggaacgagaaaatagtaaaaagattagtagagttaaataaaagcgtatgtcaatgtgtgtctttcaggataacttgaagggtaacccctgtgaaaata

SEQ ID NO: 455427 - DNA, 526 bp, Homo Sapiens
ttttccacaggtactttttcacagggcacttcaattgtcttttctagcgacttagtttaggggaagggaattttccccaccatatcagacttctccaggcaggccttcatctcatgaagacttttttctcttttatttggacgttctgatatccggattccttttggtcctgtcaacacagatgtgtgtgtgtctgtaccaaagatccccatattgatattaaatctccttctaaacccgtgcctttgttttaaattgctgcccagacttggaggcaatgtaatctgaagaacgtagtttccttttttagtcccatctgcttccatgtgcaaatgtttaaatacatttccaggtttcttttaaaagcacatatcctttgacaccatgcaccacattttataggcctgaacccttgatgccttgtaaaagcgagtctttgcaaggttatgtttatcatttcctaatgtgctgctcgttttctgtaactttgcagctaacactgaccttcctccccctgtgggaagta

SEQ ID NO: 455428 - DNA, 363 bp, Homo Sapiens
  misc_feature (201)..(210): n is a, c, g, or t
ctgtgagctccgcccccttctcagagcattactgtgtgagctccgccacctgccagagcatttctctgtgagctccgcccccttccagagcattactgtgtgagctccgccccctgtcagagcattactgtgtgcgctccgccccctgccagagcattactgtgtgagctccgccccctgccagagcattactgtgtgagnnnnnnnnnntgacagagtattacagttcgagccccgccccaggccaaagaatactagcatgaactcccacccctgccaaagcattactagtgtgagccccgcccccagtcattactgtgtgagctccgccacctgtcatatcattactgtgtgagctgcgcc

SEQ ID NO: 455429 - DNA, 523 bp, Homo Sapiens
tacttttccacaggtatatatagacatggcttggtgagtagaccacatgctagagatgagaattaactgtctcataccactgtggcccgttgtaataggaaaacagaatacttatcattttcttatgagaaagtattatcagctttcccctttttattttcttgctcatctccccctcttaccatgaattcttggagagcatggatctgtatctttctgtatacatcacacattacttatgtgctcagagaatgtttcctaatgaatgttcaataggtatggagagattatgttcatgtaatcctgcatctcaaccctaaactcaattgctctataaagagcaatttctcctagaggcaattttcattactcacatttgataaaatctctatcattcattaggggatataatctacatagctttacttgtggttaaaatggacccctatctggaactggatgaacacaggaaagaaacgtgttgcccaggcaacagagctgatttgtttgccctgtggaaaag

SEQ ID NO: 455430 - DNA, 424 bp, Homo Sapiens
cttttccacagggcagaaaggagctgggggaacgcccaggccagagcctttgttgggcttctgtgggaaaggccagacagggccagggaaacatctgaggattggctattttggataattctggggggccctggggcagagggccgtccctcgttgtctggttcctagctctgggtgatttagggtaggagacatattggctctgtgtgtgagagttagataaggaggtggttcagagaatgggctctgggtggctggggagacggaaacagctttggctgtgcgtgagtttgaccctgtgattagactaatggatgccaaatagatgaatacagaatctcagaacacacagaacgctctcttagcagtatctactttttgtatattcttttattattttcctgtggcaagtcaggtaccgacc

SEQ ID NO: 455431 - DNA, 513 bp, Homo Sapiens
ggtcgtacttttcacagggagactaactagtttattatcaagagacatatttcaaagtccagagaatataaaacatattcagacccagtttagccttactccagagttgagctacttctcaccttctagatgtttatcaaagaagtgtttagcttcatgatttaaaattcaataaaaacttgcaatacaagattccggttgatgttgtttggctatgtccccacccgaatctcatattgaattgtagtacccataatctccacatgttgtgggagggacccagtgggaggtaatcagggatttcctccacgctattcgcatgatagtaagttctcatgagatctgatggttttataaggggcttcccccttcgctctgctctcattcttcttcttgccaccacgtgaagaaggacatgcttgtttccctttccaccatgattataagttccctgattccttcctagcctgtggatacgtcaggggtccttagagtcgaccgctacacgcggtt

SEQ ID NO: 455432 - DNA, 410 bp, Homo Sapiens
gtgtgagccactttacctggcccataaatatattataactaaaatttgctctttaactgtttactgaaagtacgggttgtcatccttttattttctataggccaacacgtttagtgctactaggagacaaaaataataaagtaatactgataggtaaaaatgctatatttaaaattcctaacaatttgcatcatcacaatttaacgttgttcatataatttcttaggggaaaatgaagcagacagaagtttatttaaaagttatacccttgtgcattgaaaatctgtctaccatatatcagtttcttttcttgttctagttcaaggtggtaaacataattaagctttattgagtatcttgccacagaatgaatcatgaatggttacgtttactatgattttatcaatgat

SEQ ID NO: 455433 - DNA, 555 bp, Homo Sapiens
  misc_feature (58)..(222): n is a, c, g, or t
tctgagtgtctctttggctctgtttctggaaccactttcattcaaggaggaatgattnnnnnnnnnnnnnnnnnnnnnnnnnnnnnnnnnnnnnnnnnnnnnnnnnnnnnnnnnnnnnnnnnnnnnnnnnnnnnnnnnnnnnnnnnnnnnnnnnnnnnnnnnnnnnnnnnnnnnnnnnnnnnnnnnnnnnnnnnnnnnnnnnnnnnnnnnnnnnnnnnnnnncaaagcctggaaatcaggattcaaaaccaggtcatctgattccaaagctcacacgcttcatcaacacattacctgcacccccttaaatgaaggcatcaatgcaggattttccatttcctcgtgtttttaaagcatcaccttctgaatatgtatccacctcatcaatgtggcagggaacaacaacaacaagctcctaacaaacagagacaataccaactttgggggccagtagtggttttggagtaaccgataatgcaaataatgcttccatcaagattgagtgcctctaagcaacaggaatactggttaaaccccagtactgtgggtccctgc

SEQ ID NO: 455434 - DNA, 461 bp, Homo Sapiens
acttttacttttccacagggacattaatatgttcttgatactgaagtctcatgtcctggatacctgaacattgtttgggaagggtgggcagtattcagccatccagtaataaatatctcaaaggtaccaaatccaaaacccaagttttgatttctgtagtccctagtgtttcacagttcagtaatttgaactgtccagttgcccagactaaaaccttggagtcttcttgatgtatctcttgatttatcagtgaatccagttagctctactttcaaaatatactcatgacctgactacccttcactacctcctgtgctaccaccttggtaaaaactaccatcgtttataaaatagcctctcaaccagctttcctgcttctactaccctatgtccatcccagtcagaatgttcctttgagatacaagtcaggtcgtcgtttcactccctgtgaaagtatgagc

SEQ ID NO: 455435 - DNA, 622 bp, Homo Sapiens
tacttttccacaggcttcagcttgactgatcctgggatggcacctgaaggaggggctttgcctgtgccgcctttaccctccaattgttctgtacttagtgactctacacatcagtcagggacttgctcagcttcaggtgcaatgatcccacccacttacgttgtactattcccagtcacctccatctgtcgctgcccatttctctatgtgcaattgatataagaggtgaaagccccaaggccagttctcagaatgctctgacccactctcttcccctggctgtacagtccactgtgtccactgcattagagtacatttactactcccaggataaactgctgcatcctggtccttcccctgctttttctaggtttctggaggtagtaattctatattcataggaaagcagacagctttgaatttctgcttttgcatttggaagtggtcatttcctctcctccatctgggccttccactatttaaagactcatgctgacagtggtgagaaaaatgttgagtaattccatgagtcaagaagtggtcactagcaccattgatattctctgggcagggccatgtccgtgttcaaaagtttgatgtacatctcctgcaatatgttcct

SEQ ID NO: 455436 - DNA, 533 bp, Homo Sapiens
aatgcaactgttttatttaattcccactgctcactacattgtaagttgatgttcaccgcactttttaaaatttctaatatctagaacacaagtactcgataaatatttgttgaataaataacaatataaacttccagtgcctagaatcatgcagagaactgggattatataacaactgttaaaactggtaacactgcatatttctctttctaaaaatagtaaggctgtggtagtagaattctcttaagtagcttataaggacagtgagattctttcaaatggggccgggggtggaatgatctatctctatgaagactgtatatgtgtatgcacacatgtgtggatgtgtgagtgcccatgtgcacacgtatgtatggtgtatagagagaaaacctgaactaaacttatacaccttttgctgaaatcagagagtatcaaaggagacatactacattgtttcctcatgaatattacgatgtcatcaaaatgactctcatttatagggaccaacgtttttctcctgtggaaaagta

SEQ ID NO: 455437 - DNA, 879 bp, Homo Sapiens
  misc_feature (193)..(213): n is a, c, g, or t
  misc_feature (414)..(414): n is a, c, g, or t
  misc_feature (438)..(438): n is a, c, g, or t
attgtattacatagtagtaaggtatgttaatagtataatagtactatagatagtacaatataatacagcaacagtataatatagttagtaaggtattatgtatcaccaagattttttttcattggaaaggtgtaaaagacaaatgggtggtggaggcaggggagtcttttgtccaaccaaagtcagttaaagnnnnnnnnnnnnnnnnnnnnncctgagttatagagcaggataatctgagtttggacttctcgctgagaatgcttggcatgaaacagtagggatgagccttcttcaccatgactgtctttaggggaatccactaggctgctttaatgctgctctttatgcttctctatttataatgaagtgctgtgagaccctgttagcagagatagtattgttttttgtttncaatatccaactggtactttttcntctacaatggaaaaatgttttgtccctaatatatatcacctcgtctctggttttattgttgaaaaccacctgacttgcgctccttttcttttcaacattttttattaagaaaatatttggaaggaagcaataatactaaattgcagaattacaaaagggcagcttatacagctaaattttaagatactctgagggacagagaaataaagccactgatgctgggtaagaaaaatgtgtgacaatggaagtatgcaatgtgatttacttggctggctaccatgtaggaggaataaattctataatcttgccaaaacctaagggaaatgtgaattgaatagcaataaataaccttattggaaacagttgaatgtgatatactgtatcctctagccttaatacatgaaaatttctcattgattgcagcatcagactcaagtagaa

SEQ ID NO: 455438 - DNA, 420 bp, Homo Sapiens
  misc_feature (15)..(15): n is a, c, g, or t
tacttttccacaggnccagtatttccctggtaccaaaaccagacaaagacgcaacaaaaaaagaaaactacaggccagtatctttgaacagagatgcaaaatccttaaaccaaattcaactacatatttaaaagatcattcattgtaatcaagtgggattcatcccagggatgcaaggatggttcaacatactctgatatggtttgtgtttgtgtccctgcccaaatcttacatttaattgtaatccccagtgttggaggaggggcctggtggaacgtgattggatcataggagtggagttctcatgaatggtttagccccatctccccttgctactatatagttagtgagttctcatgagatctgattgtttaaacctccctgctctctgtctctctcctactctggccatgtgtgttc

SEQ ID NO: 455439 - DNA, 153 bp, Homo Sapiens
gaaggagaaagggacgcagagatacagagggagaacacgcatgatgacaggggcagatactggaggaatgtgcctataagccaaacaaaactaaggattgctgctgacaccggaaactaaaagaaaggtatgcctgttccaatactgttctct

SEQ ID NO: 455440 - DNA, 607 bp, Homo Sapiens
tacttttcacaggggtgttgccccaatgtggctctatgtaccacagtacctgggcttggggtactgcatgttcccccgctagccagccccacccatcataaacactacaggccagccagggggcgggtgtgctgtgggtcttacagcatcctttttcaaagcttgccatgttgcctcacagacatcggccatgggaccccaggtctccagccatgtccagttctctgcagatactgaatgtatgtgccaaggcaagccatctgcagctgctgttggaagggcagtgcggatccagcagatggaaacttggtcacctcagcgtaggtgtgggcccagtccaaatgcagttagagcatgttaacctacagttgaaatgacagagcaggtacaggtactaacagaggtaaatcatatccctcaggcaaaatacaggctaatctttcatccctggataacaatgcagccaccaagggcttttgctctgggtgatggtaccacacctcaactccccatggttcctttgagtcctgtatctgtgccaaagtcacaggagagctcataataggccaaacagacagtgcacatgtcccccagaggagagttcctt

SEQ ID NO: 455441 - DNA, 338 bp, Homo Sapiens
  misc_feature (70)..(130): n is a, c, g, or t
tgttttaattcccagccactgaaaccaacatagaagttattgctcagataaataaacctagtctaccagnnnnnnnnnnnnnnnnnnnnnnnnnnnnnnnnnnnnnnnnnnnnnnnnnnnnnnnnnnnnntaaaaatttccccaatgtggtaacagagtaaacaagggagagcttcctcaaatgaggatttactggaatttctggtgggtgcccttttgggcactggaagtgagttggactcttaagctggtaaatcccagagagaggtaaaattttaatgctgtacatgaaaaggtgcaagcttcaatgccttccaaattggtgggaacccctgcaa

SEQ ID NO: 455442 - DNA, 697 bp, Homo Sapiens
  misc_feature (329)..(371): n is a, c, g, or t
tcaggattcttttgaagaataagattaaattatcttattaaaatttgttgacactttttgtattttttccttaagagctatttgtggttgttgtggtttgaaaagctgactgttttttttgcaggggttcccaccaatttggaaggcattgaagcttgcaccttttcatgtacagcattaaaattttacctctctctgggatttaccagcttaagagtccaactcacttccagtgcccaaaagggcacccaccagaaattccagtaaatcctcatttgaggaagctctcccttgtttactctgttaccacattggggaaatttttaagnnnnnnnnnnnnnnnnnnnnnnnnnnnnnnnnnnnnnnnnnnntccacttttcttcttcctggtagactaggtttatttatctgagcaataacttctatgttggtttcagtggctggaattaaaacaaaacaaaacaaacttccaaacagtgtgttggtgctttagcgattgattgatgtacagaacacaaatgtctagtttctagtgtcactgatgaactagtgatgtagaaaagagacttctctgtaagtaattgccacagctgtattttggctttctccctgtcccttcctttctcccctattttttggtagcttgtatcaaatgttacagtttatattgtggaataaatccttcgtcctaacata

SEQ ID NO: 455443 - DNA, 424 bp, Homo Sapiens
ttttccacaggggtggatgagaagggcaagaccactcaggtggtgtccgcagacagcacgattcagatgctgttctacatggagaagagggaggcactggtggtggtcacagagaacctccggctgtccctgtacacggtgcctcctgagggcaaagcagaagaagtgatgaaggtcaagctgagcgggaaaaccggccgccgggcagacatcgctttgattgaaggcagccttctcgtgatggccgtcggggaggctgccctcagattctgggacatagaacgaggagagaattatatactgagtccagatgagaagtttggctttgagaaaggagagaatatgaactgtgtgtgttactgtaaagtcaaaggtcttctggccgctggtaccggcagagggcgagtagcccctgtggaaagta

SEQ ID NO: 455444 - DNA, 425 bp, Homo Sapiens
cttagctttcctgtctcatccatctcctaactagggatagaatgattgcatttcctagttactcacattattccaatttactccacagggacttcacacatgattacgttcccgaatagaagttggcccatgttagacttacaagaattttcatgattattgaaaacatttcttacaattaaatattattttgtcagatgatcagagctcactataaaactagccttattcatggaaaacatgtggggctcttactatagactctaaaagtcaggtaatactttgcaggagtgatgggggtgttgagtaagatgcaggaagaaaatgcaggaatctaaataacaaagaatcttggaacagacgtgcatttgagtcactttgtacttttcagcatatgtctttcttgccacccaccccctgtgaac

SEQ ID NO: 455445 - DNA, 431 bp, Homo Sapiens
  misc_feature (365)..(377): n is a, c, g, or t
tacttttccacaggacagatacagataatttctacataagattccatagcatcttgggttgattctcatgaagacataagctcatgaggaaacacaaaaacaaacaaacaagaaaacaatgccattaagagcattgagaaattatacaaaggaaaaagaagaaaactaaacagcacaagcatcttctaggaaagaagaactggaggaggcagactattacattggcactcacactcaatttcctgagaacctttatatgagttaagtacagtctcttcttagagtcttatcttagaagaaccagtagtttggggcagatttagagcctttagtgtaagcaaagctgactgattaaattggtaagnnnnnnnnnnnnnaaattaccaggggtcgatatagcacagggaacctagatcttttcttggtggttt

SEQ ID NO: 455446 - DNA, 533 bp, Homo Sapiens
ggatgatgtgtgatgtatccttttgtttataaaggtaaataatcgacaaatacagactgcctgtctagattcaggaatagtcaaagactttaagacaaactcagtgatgtttggctctgagcctcacacattttgcttactaaaactacaacctcttctctcaacctaggcatctcatttgcccttataccccaagaggctctttctgtcatgaatcgtcgttctctgtagcttttgctcttgccctcatgctttggtttcattttcagtgttctactttatcactttcaaagttggagaacgattaccatactgaagtgatttcagatttcctggccaaatacagattatctagcattcaagagaccacagttcttaaactcttgctctccacccccatccccaagagaatcttcgattttgagtaatgtaggacaatttcatcatgaattgtttgaagggacattttagtggcacatcttcatgctattctgggaatactatttccaacctttcttccctgtgaaacgtag

SEQ ID NO: 455447 - DNA, 519 bp, Homo Sapiens
tcactctatcccactggcatagtgagtgtgtgaacaggggaacaagatgtgttttacagtcagtttcatccacattcaagcatttcttttccagattttcaacataagaagttttgttgtttttgttgatattttgggtagtggtggccaatgtctgttgcctctctcctgtatctctgcccctagaggcccctgggacacagatagaaaggaagcagcttccccaaggacttggacagcagacaagctggctaggggagcagggggcaggtggtgaaacaggggagaagctcatttctatgacccatcagggaagctgaacaaaatctagaaatgtcaccaggataactgcatagggagatacagcatccttgacagctctataactattatgcagaaaatagcaacagcagaatcaactaaggttgtaaaggaacattgaaaccattatgaatggagatctaaaagaagtgatcagaaaagcactacaggatttggcaagcaccctgtggaaacgta

SEQ ID NO: 455448 - DNA, 500 bp, Homo Sapiens
tacttttccacaggtaattaagacctgaaatgcagaggttttcagatggttcttgtccaggatggaatacatggttatttcctgaaatcttcgttgcattattttccctcacactggtagataatcagaaagattaccacacctccatgcataggatgctgggttattaatctggggaagaaattttttctctcccttttatttgcttaaatccagaggtagatataaaccaccgccacctcactctttacaaaaatcctatttaaaaatatttttaaatggcataaataattatatttttaacatttaaaatctaagtaatgcagataagacaaaaattctcaccactcttgctacccctcatctactctgctgcccagagtaaactgttgctacctatttgtgtgaccttcctgagttttcttgtttacacacatacgtgtctacactaagataagccttcacacaagtaacaccatccctgtgaaatagggatcctt

SEQ ID NO: 455449 - DNA, 640 bp, Homo Sapiens
ccgacaataagccagttggcatcacttaccagcaccccactgtatctaaccacttagatgttcccagcacctggcattaacctgaaacagaggtgatacttagcaaatgtatattcaagacaagatttgtcaatttacaagtacataaatatatgaaaacatgaactaatgaatacaaggaagcccagaatgtccctaaacaccatctctgcctatttatttggaggaaaggttcaaaaaagggtggaaactctgacctgatacccatggaatgtggaatgactttgccactgtcctttgagtgttgcctgagcccctttgcccaggtcagtgttccagaacagacaattcaataagtacagtgtcaagtttccccaagggcatgtggatggcctctacataactttcaattaacacgtaattggcaagattgttctagattcatggggccttggttgtgttcctttagtggtgcatgcggcttatataagctgagtggcctgtctttgagaaatgtccagaccttgaagggaaaattttcctcttttccatcactagcttgtttgctgcggtgaggatatttctggttcattggactgagtcggtctctctattttggcccatgtaccctgtgaaagta

SEQ ID NO: 455450 - DNA, 499 bp, Homo Sapiens
  misc_feature (447)..(455): n is a, c, g, or t
gagtaatcatttgtttccccaggggattattcaggattcaattgccattcaatccgtgtctctggttaccaagcagtaactgatataactgatttaattccattgcacatcgaagaaattatagtttaacccactagttagcctatgctgtctttattatgattaaatgcacaaatattattttacattaagacatattgacagcagctcctggactccatttacactttggaagaactctgttggtaacctgtgatcccctggctataataagtccctgaaccctgaagacctcttagttgcgaacagtatgtcatctgtgattttacagttaacttctcacacatggaaatgactcaagaagtgtcttcagaggttattaagaggattccatagttatacaataaaagtacatcctactcaagtttctccctccttcctcagccnnnnnnnnnctgagccccttcttgagatctccccttccctggaaagtagggga

SEQ ID NO: 455451 - DNA, 611 bp, Homo Sapiens
gatccctacttacacaggctttgatagtcagatgtctgttcacattcaaaaggtgggatctggaatgaagccaaagcgagggctgaggcagagcctttccgaaggacctgttgatagatgtctagtaggcagtccagcttggattctatggactgtacctgtttttcaaccttgaccacccgaccgagcatactgagatcgtctgtggtctcatgttctgctgttattttctctcggctcttcttatctgatgtgatttgcccttttccaagaatttgatcaacacgtgtttgaaggcttttaattctacacaacatgtccagatgaccagcagaatattgttcaatgacatcttttacatcatatggacgtaatgtttccttaaacttccgttttgcaacatgaaatttcataattctgatagctcgaatgacagttttaagtggtggggtgaggtcttccactgatacatcacactggcatcctttttcatcatatacatcatcagtgccaagggctgtgtcagcatctatcactggttttggctgagaacttttgaggcgcagcgagggccggaagcgggttcggtcgttgaacctgtggaaaagtta

SEQ ID NO: 455452 - DNA, 537 bp, Homo Sapiens
gatgcgtcgacagatgccaaatacaaagcagctattttttccatgttataatacagattgcccttaacagtttttctgtcgttcgcttgcagtatggaaatagcagttgaaatgagatgggaaacttggtaactttggtttcccaaatgaatcttatgggtaaaagggccaaggtcaggttgaggggacatattggtcaccttcggctagataatacctcattccgcagtaacagacaactccaaaaatctcagtggcttaccacagcaaaggtttatgtctcattcacactacatccactgagggtttgctgtgcctgttctctgccatctgtgccgaaggaacagccgccgtctgggatgtgctggcctcacgtcagcaggataacagcaatggcaggaccacgtgcaggctcttaaagccttacatgattcaccttcactcacatttcattggccaccgcaagtcaagtggttatttgtgacatcactggggcaggaagagtgacaatatcaatgcatatctgatttggagaga

SEQ ID NO: 455453 - DNA, 214 bp, Homo Sapiens
tacttttccagggaatcttagtatttaataaagatgcaaaagaactctgtttagatactgagccttagctgctagtgcgttattccacagtgctttaattaacatggatgccaagtacagtgtctgttcagtatgaacacttggctcaagagctgagaccagattaagtagatgtctaagtggtacgggatccaaattcttgatgagtgaagga

SEQ ID NO: 455454 - DNA, 450 bp, Homo Sapiens
tacttttcccgggtaagcaatttatttaacttcaggcctcagtttccttatctgtaaaatggacataatcgtaaggcctacttcatgagactaatgtaaggattaaatgaaataagggaagcaggttgcttaacatagtgcctgacacatagaaagctttttttaaaatgttagaaagtagagataatatttttcatcttcataccaattctatggcgcagagaggttaaactgcgagcccaaatgtgcacaacaaggagcactggtcagcccagagcccccatcagcgcaccgatgcttccccttccctcccagaagcacagaaagggcggctggcctgcaggatttggcagagcttggctgaggagccacagcagacgggtagcaaaaaggcaccaacatgggtggaaagagaatgtccagtttctatgagatccctaacgccgtcct

SEQ ID NO: 455455 - DNA, 456 bp, Homo Sapiens
  misc_feature (231)..(231): n is a, c, g, or t
gggtagggagcatctgttgccagaaagcaagaaagcacttaaagaatgatgtggacatgtcaaagggacacagaagccagcctggatgagatcccactggccctaactgtccacaaggacaatttgagcaaggatgtcaacaatttaagagcagattataaaccactgaataaaacagaaaaatacaacgaattgaaacggacattgatggcagacaggatattaacatanattttaaagtatctctccaaggaatgcttctgaatgatgaaggggaaaagaataactgtacagtggaaaagcctggtaaaacccaccttagtgaccaaagtgaattgtaaccatagtggcacaaaaggacatgcatatgtcccacttgtagtggcattcaacgagaacagcagcatcccttgcatgatgtatccagccaatatacactgtaccctgtgcagaata

SEQ ID NO: 455456 - DNA, 614 bp, Homo Sapiens
aaaaatccacacagcttctcttggtttctctggcccgaaaatccaacgttggtccaagaaggctctggcgtgtgccaggcactcgctgatcatctggtcttagggggtcgcctctaagccatttgatcccgttccaggaacgaaaaaggcagcggtgatgactgcttcttttatcgtctccctccagccatgcaggacggtctccttttccctgttctcctgagcctaccctcttatgggaaattctcagtcttcctttccaaaggacagcccgctaggctacctcatagaaacctgcaaacctcaggcctcaggcaagatatcacgccctaagcgccttgtctattttttcaattcagtctgtccacagtaccaactagataacgggtccaaatggcccgcaaatggaacattcgactttacagttttacctgacttaagcaattatttccgacgactggagaaatggggagagattccttatgtccttctgtccaggcctttttgcactcagatcacagcccgacctctgctgttcttgcttacctgtattcatccatcacattattacaaccttgatcgcgtttctcctaccaaccctacctcttcttcct

SEQ ID NO: 455457 - DNA, 308 bp, Homo Sapiens
atggattagaagactcatccctagttatgatttcaaatctccctagtatatctatagtattagtgaattctaagtcaactcccaagcaagaccttttgtagatatagacaagattgttgtaaaatttagatgaaaaggcaaagtagctttgaaacaaaaaattggaagactcatcttacttgattttaagatttactgtaaaggtacaagaattgagatactgtgacacaagatggtgtgacacaagacggtaaccacgtagattggtgaaaaagagtccagaattaaaccctcacaaatacagtcaa

SEQ ID NO: 455458 - DNA, 461 bp, Homo Sapiens
tacttttccacaggaaggaggacaggcctgacctcaggacaaagctttcaagcctgacacaggcaaagaaaatagtcatcgtagcatcgtggggagatacgggttgagtgatataataaacctcttttaaggaactttctgattttttccgcatatttactttacgtacctcaacccagggggcattctttcaccaaaggagtattgcttcaaattgaataaatgcacacacaaaaaaatcacaggcagctctactggatggtgagatatggctgccttgtcatgagaggagttaactgagtctcattgagacctggatggccatccctgctcctcaaaccagaaggcactccaaaggctggagatgtcttgcaaacttgggaaatatttgagcagcagaaacacatctctcccagttggagtctcaaccttctgatccaccccagcaccctggaaaagta

SEQ ID NO: 455459 - DNA, 536 bp, Homo Sapiens
tacttttccacgaggtcagtgtggtgcttccagcttccacctttgtcccagcatgcccggaaacagcctcaccggctccctctatggtaccagcagaagctgaacagctcccttctcttacagggatgagtctctgcctggtggagacttgtccagcatacttctaggttctgatactccaaactttgtcttttctctctccagctctagggatgattgctggtttctgcagtgactagttctatgctatctccacattcctttttgtgcagaaaagagttaatacagcaggccccgctgctattcttagaaagacctgtttgctacgttggcttttggctggcatgtgggaacttggatttcgggagagtctccatcattcctaaaactgagaagactgcctaagctctttgtacaaaccatatggtttatgctgaatacctgctttcctcctggagtctggaattttggtatgtgctagacagagagtgactagcccccagtagaaacctgggtgctgagtctctaacaagctt

SEQ ID NO: 455460 - DNA, 155 bp, Homo Sapiens
tctgaaggcagaaaaatatagccaatatgttgatgttttcctaatactaccaccttggtgggcataaggtctctaagtcatggtaaaatatgtcacaattttaccaaacatgttgccaccacctaatgggggtgtcaaagtcctagctcttctgt

SEQ ID NO: 455461 - DNA, 502 bp, Homo Sapiens
gtcggtactacttttcacaggggaggtagctgacctgaaaatagccccttcctctctccttccttccctaccttctccccaggcagccatttgcccaggcactattagtcctgatctctcatttgagggaaggatgaagaaagggagcagggagggaagatctatttttttccccaggctgttggggaagggagggtgaagctgctctctctgagttgattgatgttgcgcttggggatctaaattctctgatgtaattacactgtgtgctccgtgagataaggagattaatcagtccattacgcaggggctgttttacccgcagattgaacagagacgtcggacaccaccaggtcctagccagccagccagtctgctccagttataggcaggtggctggcctctgggcagattggctatcttctccaaataggaacaacttctgttgctatcactactaactagtcttgttttgagcctctctgagattccagcatacagc

SEQ ID NO: 455462 - DNA, 634 bp, Homo Sapiens
tacttttccacaggcaaaatgctgtaattgcttcttagctcatcttcttgcccctggcttttccccttctagtctcatattgacctctactgccagatcaattttcctcaaatccagccgcagcctgttacttcaaagctagtaatgcctgcttcatcacatccctctgtaaattccagactgccatatctgaccttaatccccaacgccaagcctattttcagctgctctattacatttgctctgttcctgaaagactagtactcctccaccttcaccatacagctgacaatcccatctctgtcttaccaaattctcggcctaaaataccctccttcttctactctgccaacctcaaactggttttctcagtcagatttaaatcattcaaagtacatcttaggaccacatattccagcctttttccaaattctcacgattctacatctgccccttcattcaatactttattaagctcctactctaatgtcaggcactgcctgagaaagagaaacaaagctttctcacctgcagcttatattccaaaactacagttaatataatacataatacgtcatggcggtgataagcacaatggagagaaagaaggcgataaggattacggatagagatt

SEQ ID NO: 455463 - DNA, 135 bp, Homo Sapiens
tgagttgggtcttgaggcatgcataggagtttccaggtgggatgcagttgctggagctggaccatgcagatccagctctggagctcacagtaatgttcataaacaaatggttttgagccttacgtgagccaggcc

SEQ ID NO: 455464 - DNA, 388 bp, Homo Sapiens
cttttccacagggggaaaaggtggactctcctgcctagcatttgttctcatgtactttcaattcatttaatggcaaattgttcttttcctaggagagttggcttcctttcttctgacttctgtatcattcattgattcattcttttaaataaatgcttattgattctgtacaagattcctagcacaaaaataaacaaataaataagtgcttattgagtgtgttctaggtattgtgctaggtgctggagctacaatggtgagttagatatagtccctgcttttatggagcttacagtctacagtgagggacggataaataaacaaacagttataatgtgttaaggatttgatcctatgggaacataatagaagggatatttaaatcagg

SEQ ID NO: 455465 - DNA, 629 bp, Homo Sapiens
tacttttccacaggctcggcttgtgcttgtacatctgattccaagatgtgttgcacatcttttcagatgaccttcagcaaaatccattttattttcttgtctttctggagtgtgactttgtaagaggatgtgattcctgtgttttcagagtcaagattcctttttgcagagaaatgtgatgttgtgaagatccaggaacagactgtctcacccactttgttctttgtctctttccttttgtgtttatatcttccctttcgcaactcacaaatccttggccactgactctttagtgcctgtctctgtgtctcgtaccttcgctgtcagcagaggggactctctggcaggctccccagtaaaccggtccccttctcgctgcagtgggttgaatcgctctgagtctccaaaccgagagcgcagtgactttgggggcagcaacacccagctgtacagcagcagcaacaacctctacatgcctgactactcagtccacatcctcagcgatgtgcagtttgtgaaggtaactcccccaggaaggttatcctctccctcccagtgggcagtgttggctggctgagcgggacaagaagactacccccattcctagaagggatgtgtcaccattcccc

SEQ ID NO: 455466 - DNA, 560 bp, Homo Sapiens
tacttttccacaggtctctggttatcggaagtgttcgtgttgccttttgatgggatccttgatagtttctcctaaaggatgtatttgggtcagctcatgtggcctggtagggaagtgctgattgagtccttatcggctgaattaggtcagtggcctaggagaaaggaaaactggttcttagggcagctcttgcattccattttgaattttttgagctcctcccaaagacagactactgtctaagcctagcctgctcaggctgctcttggagctgcaagaatgttttgtgttgcaagccacttgctccagagaccatctttcaccatctctggagcatccagagagcattttcattatctccttgggtctctcagtttctgcccttcttctggcctgtccctagtcccaggatctgtcctgaaatactccttttccccaaagcacatgatgctgattgtcttatctcttttctcaacagttcataagagaaatctaataagcatcttttccaaaactggcacagaattctggactatgattctactcttacttacacttca

SEQ ID NO: 455467 - DNA, 438 bp, Homo Sapiens
tacttttccacaggaatttaataaataaacacaaccgtggaggtagtgagtatggttctccatgtgcatgatgaagagactgagggtcagagtgacagtgtgatttgcccatggctacatagcttggagtggccaggccaggctcatcccagagccctgttcctaaccactctgttcagttgcactcacgtgccagaaatgtcttgtgtatttctacctcacttatcaggaaccatcagaaaatccagtatagaacacgttctgtgaaggagaacgtaaagcctctgtgctcaaagaactttgagggtgtttgtggaggtgtggacagcctccaggagtgtcccagccatcacagatcacatccgacaccaggctgttaggccggtgcccagaccacacatccatggcagagctaacggggagaggcttccgatcgag

SEQ ID NO: 455468 - DNA, 443 bp, Homo Sapiens
tacttcacaggggatgatgttgaatctcactccaagtaaaaggcaaagtaaatccccgtgccctgtgaagtttggtggatttgtccccagttatttctctgatcatatatgctactacacttctccttgctgatctgctccggcaccctggtcctcttgctgcttgtcaaatatgctaggcctgctcctacctcagggccttcgcatctgttctttcctctgcctggaattcttttatctccagatgtctatatgacctttcacttttattgattctctactcattgaagtcttcacattttttgattcttaacttatctaaatcttcctggactactctttataaaattccaactccacacgtcccctctctctccaacactccctactcactttctatgatttatttttctccattataaacactcttatatttttgcatt

SEQ ID NO: 455469 - DNA, 471 bp, Homo Sapiens
ttttccaggggaattccaggctaatcatttttttctttcagcacatgaaagatgcttcactgtcttctggcctccatagtttctgctgagaggtcagctgccaattggatcatcctattgtccttttctttggtagatgtttcagatttgctttttatttttggttttcaacagtttggctgtgaggcaccttggctgaccttctttgtatttatcctgcttggtgttggttgagtatcttgaatctattaatggatgtctttcaccaaatttgggaaatactcagcgtttattttctcaaatagttctactgccctattctcccttttctccccttctaggactctgattatatgtacagtattagctaaaagattcctgagtatctgttaatttttacttcaatcttttttctttagtcctcattggataatttccactgatctgtcttcatattcacttgttttttct

SEQ ID NO: 455470 - DNA, 681 bp, Homo Sapiens
tacttttccacaggccagtggagtgatctggacccaacacagaaagagttctatggagaatatgtcttggaagaagactgtggaattgttgtctctctgtcatttccaatccccagacctgatgagatctcccaggttagagaggaagagccttgggtcccagatatccaagagcctcaggagactcaagagccagaaatcctgagttttacctacacaggagataggagtaaagatgaggaagagtgtctggagcaggaagatctgagtttggaggatatacacaggcctgttttgggagaaccagaaattcaccagactccagattgggaaatagtctttgaggacaatccaggtagacttaatgaaagaagatttggtactaatatttctcaagtgaatagttttgtgaaccttcgggaaactacacccgtccaccccctgttagggaggcatcatgactgttctgtgtgtggaaagagcttcacttgtaactcccaccttgttagacacctgaggactcacacaggagagaaaccctataaatgtatggaatgtggaaaaagttacacacgaagctcacatcttgccaggcaccaaaaggttcacaagatgaacgcgccttacaaatatcccctaaaccggaagaatttggaagagactcccctggtgggaaaagta

SEQ ID NO: 455471 - DNA, 529 bp, Homo Sapiens
tggactgtatatcccatgctagcagcaaatttataaccaaatcagacttctcatcacctccaatgctaccaggtccaagcaccataatcccccatctggattattttaataatgaccctagctttttcttccccaaaatttctaaacattatagccagggcaatccttttctgctgaaaactcttcagttgtcaaaggtctcccaatcccttataaagaccaacaggatgtgtcttcctgttaccctgctgatatcatctctttctaatctttttcttcattctgttgaagtcacagctctacttattccaagaacatgctttgcatgttatcacctcagaacatttatacgttaactattcttcgtctggaattctcttctttcagggatccacatgacccattccttacttcctttactccaatgacatcttctcagtgaggcttcctttaaccaaccctactcaaaaagtgcaacactccgtttcccacacacatagacacatgcgtgcatccccctgtggaagta

SEQ ID NO: 455472 - DNA, 336 bp, Homo Sapiens
tacttttccacaggagggaaaacatggttcggaaatttaagagctggtcgtattaaaaaggatcaaataaggatcctgaggcttgtgcctgggacatgtgcctttagtgtgaagaaagaccccaactctccaacggacgcctgattacttttatagaaagagatagtctgcaaagccgacagcaaaaatggctcagacaaaagctgaaaacactggaaactgcagagatttgtgcacaaaagctggtttcattaatttgcatcttcagcacgtttatctacatctcttttcttatttttaaaagtgttttgcaacatgaatgtaaaacactttgaa

SEQ ID NO: 455473 - DNA, 370 bp, Homo Sapiens
tacttcacaggtctttacttctcagaaatatattttttctcaatgtctaacattttaaagagcttattaaaatgtttcctcaatattcatatttatgtcataatcacactctgtgataataggagaaatcctgagtttcactagtacctcttaacatgaacaaatctattagaagagttatcagaaactttgaaattctacttaatcctactcagtatccttagaaaactatacttttagaaatgtacacattcatttgctatagaattatcttaattaggaattaaaagtgagactgtttctatcctgtggctctaactgaccaataacacccttggggtgttggattgtccttgtgttgatggatttg

SEQ ID NO: 455474 - DNA, 634 bp, Homo Sapiens
gacaaataaaatatactgtctagattgaccacatttttatttctaaatggtgattcagaggaatggggtgtacggttctgttctgttctgtaggagtgaacatgatcctcttttagtagctggtttgtgtcctccttcctggacattattgcgtgtggtccctcctacttgtgtgatcataaaacatgagctaaccaactacaaggaggtctagcaaggctaaaaaacatattgaaggccactaaactcattagtgagtggtttcgctactgattaatcagtttcctcatacacaaatcatattgttttaatggctgcttggtgcatctccggaaggtttggcctttagatgttcttaactattaaatgtatgcattttattatctcacacttcaccccaacatagatctgtccccttccctgttcacttcagtcaagttgcctcacgtttgatattttcccacatgtttatggccagttagataccattgaaagcgaatataacacttcatcagaaacttcagactctttgatctaaacacaggtgaaaatcacatgctcatctataactgaatatttccactcaggctgaaacccatgaactcatccagaagaggcatctgtctattgatgt

SEQ ID NO: 455475 - DNA, 478 bp, Homo Sapiens
acttgtccacagggcaagaaacagtcagactgtgagccagttctgaggcccagtgagttgttacaaagagaacagggactagccactttgccgtgtactcagagaagaccagagacagatgctatcaagtgcagcaaaagaaatttcagtcaaactgaagacaagaactcaccaagaatagcaggagacgcaagacacgaaaatggtttacaaagtgaagctgtgggatcccaaaccctgcctgtctttaagaacacaggcagcagtcacatgtacgatacggcctttgggcaaagctaactctaatccacacagaggcgccatgatctaggatataaagcacgacaagcaggatgctggatacaggagcacacgatcgccattactcaacactactgaaccagcgagcgccagtcatggctggccactgaggaaacaatggatgaacatggacaaagctccagcacctgtgaaaata

SEQ ID NO: 455476 - DNA, 459 bp, Homo Sapiens
tacttttccacagggttattttaaacagggaaatggcatgacctgatttatacttttaaaaactgttgagtgatctggtaaatagactgtaagagggccagaacaggaagtaagttaggtggtttctgtagtgttccaggcaaaaaatgacactggttttgacgaggttatagcctccaggacttagtaatggtgatgggagaaacatggacagatttcagatatcttttggaggtagagctaacaggacttgctgatggatcaacagcgtatgaacacagcatgtttaagtaaactttttagtgtacgccacaagtgagacatagacggttgagaacctctggtctaagtaaaagctggtttcaggtggggcaggagtggtgctgactagagtggggctatggtaggagatgtgggataagccttcctctgttcttgcaaatctgggagcgtgagtcc

SEQ ID NO: 455477 - DNA, 606 bp, Homo Sapiens
ttccacaggggagatagcttcagtgtttcccagtgacctagaagcatagtccatctgtttgcaagcatttattgagcatctattattatgtgctaggggctggggagcccaagatgaaccaggcataggcccagccttcaatcagcctggcccatatgctgccttggcctggcattcacatttccacctgctcctcctgcctgctacaccgacccatcactgcctcaagcagcctacatccacagcgggatgcctgcactgctgcttccgcgtgtgctggcctgttggcactgtgtgtgtagtatcctggccccgtcaagagcttgtgctgtcttcagtgccctgaagtcagcccctctgcatgcacgcccttctgcagccctttggcctccgtggccaggtggcgagtcctgtttccgtcctgggttaactgaagccttggcagctgcccttgctgcctcatggggtgttttttggcctctatccctctctccctccactccaccctccctttttgctaccgcctgtctcttctggtttctgctattgcctggaaggtaggggacgtcacggtgctttgtgcagtagagtacctgtggataagta

SEQ ID NO: 455478 - DNA, 458 bp, Homo Sapiens
agctggctttgcagtgggttgtttgcagtgtcagcgttcgggaatcagctttgcaacaagcctggttcttttttgaattaatggtaaagagcatggtgcaccatttatactttaatgataaacttgaggctccaaggaaaagtcgttttccagaacgtttcatggatgacattgcagctcttgtcagcacgattgctagtgatatagtttcacgatttcagaaggacacagaaatggttgagagactcaatacaagccttgcattctttctcaatgatctgttgtctgttatggacagaggatttgtttttagccttataaagtcctgctaaacaggtgtcttcaaggctttactcattaccgaatcccagtgttctggtgtccttgaggctggattttctacgaatcatctgcagtcatgagcactatgttacattaaacttacctgtggaaaagta

SEQ ID NO: 455479 - DNA, 559 bp, Homo Sapiens
gtacctactttccacagcgcaaccattatttctcccaccttaaaatatctcctctcagcttcgcgtctccctccagccattaccccatatctttgaaattccttgaaagaaccccttctacttgatatctccagctccactcctcctgttatctcctgaacccactccattcaggctttcacccccaacactctaccaaaactgctcaatgatcaccagcgatagtcatgttgctaaatccaatgaccaattctcagtcttcatctttcttgacctaaagtactacttggcacactcgactgctccttcctcctggaaaacacgttgtttatttgcctccctgattacttgatttccttccttcctcaatatttacttctcaatattctttgttgggtcattctcaactccccagactttcagggtgggagtgctcacggctcaatccttttctcatctatattttgcctcttagtaattatctgatcatctcttatgacatcaagtactgtctgtatgttaatgactcccacctttatacctcctccttcagggatcc

SEQ ID NO: 455480 - DNA, 576 bp, Homo Sapiens
gtttttatattgaaaaaaaagccatgcatgctcattgagaataaaattgcccatctttgaactgtacagggatagccactgccagcatctggcatatctccttccagtcctttttttgtttatgtgtatgaagctgtggtttccagcgtatcatgaggctgtctttttacacgtattagtgaacaggcatgtaaaatgctggtagggctctattctagcctcctcagccactgtggctatgggtgtcaattcgagtagcctttctgggaaacactttgataatgagaacgttaaggatgccctttatttttttcctaataatttgacttctaggaatatatcttaaggaaataatgtaactgctgaaaaaaatttatactcaaaacttgatcacaacaagctttatgaaagtgaaaaatcagacaaaacttgaatgcttaaagtaggaggtggcaaattatggcctgtgggccacctgcctacaaatgaagttttatttggctgcttttgagctataatagcagaaccaagtaggtgggacagagaccatatgcctgtgaaaagtaggaccgacta

SEQ ID NO: 455481 - DNA, 756 bp, Homo Sapiens
gtacctacttttcacaggcaaagtaatatagccaacctatgtatcgaactatacaagttacaggtttaggcacatttaatgagattaatggagcataattttcacaattataatgtattctgaccagtaattgatgactgctaattgaaaaagttcactgtagagtttccctctaaagctgagaatcagcagaactatgatggtttagtgaacgtgggaattaacgagcactcagctgatcacaggagcctaggggtagtggaaagaaaagcaagagtaggtcatcattgccttatttcataatgcagaggcttctttaaattcacttgaagctctgtgcatttcattagtttctctgctctgttctctgcacaaatgcagacaggagaaaaataatattcaacatccctctgaggaccatagctgagtaaaaaagatgcttgtgctgccacaaacaggggtccacctggaactcaagcttgctagtaattctgagaggttcccctatccctgcctggcttggaggtaaagtgatgtctttgggctaccgttaaattcaaaccctgcagagagtcctcttttgctcactcaagcttatttcaaaacgagcctcacgcagagagcccagatcagtaggaaagactgacgctacattcaggcacggagttgctccctgccctgctgttactctgtatgtcttttgtcctgtcaaggctgagaaacatttcttgggagatatcccaccctgtggaagta

SEQ ID NO: 455482 - DNA, 170 bp, Homo Sapiens
cactcggtctgttgtctggggtattctctggttctttgtcttggttgagaatagatcaggacatggacacacacaaagagtgagtttaagagcataaagtttaatacgacaatagaacaagagagagagaaaatgcgtcctcatgctgagaaagccggttgcccgagagg

SEQ ID NO: 455483 - DNA, 342 bp, Homo Sapiens
tggtacctacttttcacaggactaaattttatcttgggttaggtatgaaaaagaacacttctcaaggatagtcaaatagtttatgttcaatgaaatattttcatggttcaatgttgtttcattcttaatgatcataaaacctctcaactgctctggactcattttaatgacagctctctcgtggctgtgaatcacagttcaccagcacattaattggcaaggtaactacagaaaaagggcttcctcgtgagcttcattaagttttcacaaatgacagcagcttcaacttcttacacttaattttctttcagtttaacacgaagagtcaatgcaaaccccccc

SEQ ID NO: 455484 - DNA, 546 bp, Homo Sapiens
caatcagtccagcaatagtgatgccttaatttttgaggttggatcagaaaaggccgtgcggcttctgccaagtatttagggacactccctctgggagaagtcagccaccgtttaagacattagatgccctgagattgccacgtgtaggagctctggcatctctgctgagaactcagcagataaccagtgaccatcagtcatgtgagaggatcatctgggacgtgcagcccagccaagcctgcagatgactccaggctcagccaacatctcactgcaacaaataagagacccccggcaagaaccactcagctaatcccttcttgaattcctgatctatgaaatcatgagcaaaataacatagtcatcctaagacactgtgtcacacagagatagcaactggagtagtcagcctttgaagaaaaccaaactaacgtgactcatacgcagtcacggactaggtccttttctttgcttatgaaaatattaagcttcgtgaaaggtgctcccaagggctttggcatgcacgctatttagaagacaaaccca

SEQ ID NO: 455485 - DNA, 530 bp, Homo Sapiens
tcgtacctacttttcacaggatattacgtgcttgtaggcactatgaggaggaaaaacaaaactgaaaactaggtcttctgtccctgcactcactatgttctatctccttactgggccagaaattcttatgcaaattaatagggaggtaagactagccaggaactcaaagcccaaactttccaaggcctgtgatcctggaacagctcttccatgtgtccatgagagagactggtgctaggaaccagtaagtatagaggcaaattttttgtgctcctttctgagcagcacactttaaaaattccatacagtctgtatctgacataaattagggtattgtagccaagttgtcaatttcaccaatcctcaagccacatgtctattctgtgcaggtctatggaacctaatgcacagtctcctgagagcataaatgaagtatcgggcaattggctatggccaaaggagacttgtctttttcccctgagagattgctctcactgagcagtagagactcttctagatgcctgtgataa

SEQ ID NO: 455486 - DNA, 818 bp, Homo Sapiens
  misc_feature (92)..(92): n is a, c, g, or t
ttttcacaggcgaacaggttatatatggaagagacgccaataaaaagaaggcctctgtaagaactgacctaggtgtaagttgaccctttcantgcttatgtttgtttttgacctgcccttcctttagagactcaagtgctttccctgggttttagaagggtcaaggttgctcctctttcctaactggaaaagacaatgatgttttatttccaagcacatatctgagttgtatgtgtggacagcactgagactgagtctttccacagctaggactgagtgtctccacatcctttctgaagcctacgaagctcatttatgtgctctgagttacatctattcaagcacataccaaggaaatgctcactgtgcatttggaagtaggtgttggacagttggactgcagatgttaggtgtctgtgtctctccacaacataggcatcaaccccaatctgccttacgttggccgtgagcattggtagagtcagcctgacttggcggaagcacgtgtaggtggtcttgcctgttagcttcttactcccccttgctgtggcctttgaggagtttgcctcacgttataattctacatattaggctcagcacctgtttttctttctggatgcatctacagcttaggttcctttaggtgtgaaaagtatgtccccatataggataggttgggttataaaggtgtcatttcctattctttgctgcatcttgaacagctgaccatggtgtggtgtcctttgatagtgttgtttgacagacaaagggctatctggcgatatgcttggcattttcctgtgaaaagtaggtaccgg

SEQ ID NO: 455487 - DNA, 173 bp, Homo Sapiens
  misc_feature (20)..(21): n is a, c, g, or t
agggcacacaaagaaacagnntgaagtatggtccatccaaaagaaaactacaaatccaacagaaactgaccctgagaaagggtagatggcagatccactagaaacagacttaaacagccatcttaaagatgctctaaaaactacagccctgtggaaagtaggtaccgccattt

SEQ ID NO: 455488 - DNA, 617 bp, Homo Sapiens
ggtacctactttccacagggggcatggagtagttgtatttaaaaccttaaagttgtgctgttcctaaactagcaaattgctcatgctgaaatttctggcataagcaggggaagtcttgtgtctggagaatagtctcataccttgcagtctgggacaccctccctactttgagaatccacctacaggaagccaaggaactttataaatcctgatgttggacttctgatacgactgggctacttccaagcaggtgctgcaggagattggcatcccccagcccctgcagttagagaccccgaagtcttcccagccagtgagccactttgtgtatttactgtatatttattgtgccctaaatgtgcaactctcctaaagacaaaacttctctttctgatgttaagcacatgttacttcaacaagatgcttggagaacaacaaagtacccagaatttttagaagccttcagaagaggctaaaatatccagctttgggggacctggaagaaatgtctccaaaggaagcaaggcatgttttagttgagtgctctggtctcactatgaagtggggatgactgtggcttcattactctaactgggtgtgggttggaagtgatggac

SEQ ID NO: 455489 - DNA, 549 bp, Homo Sapiens
catctgcctcccagcaggagctctgtccatgggctgggctttgccatttagtcatacaggctgcatcaaatcacttcccttctcgaagagcccccatcccagagtgtgctgcagaaagtttcagaaaaaatccacaggaaagccggtactgcacagccttgcggtagtggttttacaccctcaaggtgaagtgtgtctgtctggagatgttgtttgaatttagctttgttgagggaaattaacccatttcagagacctggcagtgcaagtgtcctggggcagacagaggtcctgtcctactcaccaggtaccacatgttggaccaaatggggtcgttgaagtaaagggcctgcgggtcacttcgcacctgtctcttcacccttcgtttcacttcctgttgctggagccatttcacctaccagaagaaatgcaattactgtttatattagaaatgatttcttgattttatgtagcctctttgcaggtgctacagccttccttgtgcgtgaatatctgtgtcatagcagatattttagatggtaagttcct

SEQ ID NO: 455490 - DNA, 494 bp, Homo Sapiens
tacttttccaagattatacgtggaagaaaagatctatgaccaaacaaaaacatcatggggtgtcctagacctgcatgaagatggtttggaagagcttcaaaatgctaagatagacctaaggactttttcagaactactaacagagaatggaagccgcaagctgacaaatgtcagctcagtacggtaaagaaccttcttagagcactgtccaaagatgaattggactgcatcatgagatggtgagttcctcttgctggaagtatgcaagcagagaccagagagaggtgtagttgtataaaaggccttaagccatagaccatgtggttatactaatgtaccagattggtgcaattctggaaggaaacatgccagtgaaccaaacagaatattccaagaaaaagttcgcaggttttaggagcactataaataaataattgccgaatccaaattaacacttcctttctcttaaatggcctgtaacattttcagtcatt

SEQ ID NO: 455491 - DNA, 495 bp, Homo Sapiens
tactttccacagggactacacagcagagttaataagaaacaagtcatcagagctgagcttttctttagtagaaacaaattacatgaatataaggactgttgatgtgcaacagtctaaagcctgtgtgcttaaaatcacactaacagtctccttttcgtcttttgcagcctctttcattagcgaagcccatcctatgattattttacagggttctcaagtgtgaattctgctttagagacttgtaattcattaaacagtgcttgatctaactcctttaacccacatttcacccatggacgtctactaccttctttaaaagtctttcagtgtaggaagtgggaaggtgggatctgttatttggatcaagtgatgagaccaaaagaagtcacagttacagtttcagctgtgaagtgtgatgcatactaacctagagactaactattaagcgtattagtaggtttgcttattggtgaaggtgaaagctagcaacatctc

SEQ ID NO: 455492 - DNA, 478 bp, Homo Sapiens
tagacctgggtgactttggcatgcaattttttgtctttcattattaagttgagaactttcaccttttcacttaaatggagaactttacgtcttctctttggggatatccaaattgccagcctcactactcttgcattttggggccattataaagtaaaataatggtcatgtgaacataagcactgcaatactgggacagttggtctgataacctagatatctagtcactagataactgactaacaggcggagagtgcaaacagtgtggattcactactgcatccacagcctgtatccagactagacaaagggatgattcatgtccctagtggaatggagttggatggctcaagattttatcatgctacccagaacgtcacacaattggaaacttgtgagttgtttatttctgcaatttttcacttaatatttttggaccacagttgaccactgataactgaacccgtgtggaaaagta

SEQ ID NO: 455493 - DNA, 497 bp, Homo Sapiens
caactatacatatattactgaacattttttatgttcaaatgctgtgctaagtatctgaataatattcacatgaagctgaaaatctatccaaaatacatttgaatacagatacttggtaaaatctctaaaatgcacaaggcttcatggacacatgaaatttctttactatggagaaatcaaggaaggtttaataaaagtagtaacattagagctaatctttgggtaaagaagaggaaaagacagattgtagtgcatgctgtaactgtatataggttctttggagatagctcattgaatgcaaactttcagaactcacttcatgagtcaataggaactttacacaatggtgagaataaagtgcatcctttcaaagcacactgtccatggcgtgagagtaaccaccacactgacatttgttgaagaaaggttctcctgggttctccccactctaccctccttggatgccaattaggcaccttaggaaggacaagtgtctt

SEQ ID NO: 455494 - DNA, 436 bp, Homo Sapiens
gcacgcacatatagtcccagctactcaggtggctgaggtgagatgattactggagccctggggttcaagactgtagtgcactgtgagtgtgcttgtgaatagccactgcattctggcttgggcaacatgagagaaataaatattgttttacaaaataatttttcctattttcgaatctgtgttttttgcttataccatcattttcctattcatgttactgtggttaccatttcttatgatcttctctcttcccaggccaccattttcctctccacatctctctgaagacaccatctttctgtccccttctgccggtttcttactcctacttgttcttcatcctcattgtaacctcccttccttccacccttagttgttcttgaaaaatacaatctggaacctcagattggaactgttaaggatattttcaccagcc

SEQ ID NO: 455495 - DNA, 553 bp, Homo Sapiens
ctctagagtgatcccccttttccacagggacaaaaagagggagtaggttttcaaatccctggcatgaaggagaaaacacacttgttgatgaggagccaacagaagattcacaaaaaagaagctggaggaagaggagttgcgtagaaggagaagcacaaccaagtgttccttcttagggttttggaagctggatggaaagaacgtacttaccaaaggttacgagaggaatgctgaccctcttctgtgaggtccctgtgtttgatgtgtttccagctctgatttaggcttatgctgtccttgctgggcctttgtgaagtatccagcaaggctggaacaaagcactttattgtagtgcatgaaaaatatctttgctgaaagagacgatgccaaggctagggggactaaaattagaccttccggtgtgtttgacttggcaagttgtatggcctcctccacctgcctccctcccagccgtgggccttctgagagcacaggtagcatgtgctgaaggagaggaagtgccgcttcctctggcaccctgtggaaaaggggg

SEQ ID NO: 455496 - DNA, 559 bp, Homo Sapiens
tacttcacagggatggctggagagggctgaagttatttcccttcccacaactggaagtctagagggaggtggagttaggaatttccttttctccatgtggagggctagagttgactggagctgcatttttcccattccccagttaggtttggttctaagagaaataatttctcctgagggcaggccttgttaagaacaggataccttggtgtatttcaaaatgtttcacttctcccttctccagctgacagcgtaagaggatttttctcaaatatttactgtgaggacctggtagagctccaggaagtaaatctcacaaaactacgggggcttccttaggactggctctccctggagcttttaggtctcagacttgtccacactgagcctccagcaactcctcaattacagctcagattttcctacccgggtactggttccctcaggggtttctggtcctcggtttctgcttcagtagttgtgattctctgtatccagctgtctgtctctccagttttggaggatgtggttttgcctgtggaaaagggtacgagctcga

SEQ ID NO: 455497 - DNA, 510 bp, Homo Sapiens
tactttcacagggtcacatgaagctcagtgtcttcatacctatccatattctgagttctatttccgtcatttggccatctcagccagttcagaactcttgctagagaggtaatgtggtcatttggaggaaagaaggcactctggctttttgagttttcagggttcttgcagtgattccttctcatctttgtgagcttatctatcttcaatctttgaggttgctgacctttggattttttgccccttttatcctatttgatgaccttgagagtttgattgtggcataaggttgattaaaccaactggcttcatttctgaaagactgtagggggccaacacttagctcccaactcctggtctgcatgctgtaactctgcaagacttgtagtgggccccaactttgttctctggctcctcaaggttagcagcccactgtgatggtgggaccaaggtatggctgctgcagcagagtattagcagatgccagggtgcttgcctccctggaaagta

SEQ ID NO: 455498 - DNA, 293 bp, Homo Sapiens
aagccttaaaaaatggaaagcttcttccttctctggagctgaaaaataatgaaaaccagcttggacttgttcttagagtatttatgctcaagaaagagttcattttagacaatgagttgcattacatattatttagagttgctaataagctcagaaatctcggaattgactctttccattgaagttactctctgttatttaaaaatgtttctgtggggtggcactataaaacataagaaaggaggaaagtcataccttgacttccaagaacatcccagacctgctgaaaatcc

SEQ ID NO: 455499 - DNA, 549 bp, Homo Sapiens
tactttcacagggaaacaattcaatctatttgctctagacttctctcttctatctctgaaatacttacaagtacagttcaagttatcctctcccccatcttcttttctccttccttctctcccttcttccctacccagaaaaaaacactatcctaagaatgatgtatactagtctcaggcatttaaaaaatacttttacatgttatttgtccaggaacaatatataaattgtttttgtgtccttaaaatgtacataaatacatcaaactgtaggtttcattttgaaatttgtgttttcactcagtatcagaattaagttgaatttattgccattcactcacattttttttcttatccacacagttctagcttctgttgaattattcatactactgttatcagattaacaattctgccttcattttgttagctcaactcatttttctgtcacatgaagaatttgaaaaaggcatttatgtagtaaatgagtgaagttgaattggttcatctttaaggtccttttaagggttctacaatagaacattaata

SEQ ID NO: 455500 - DNA, 394 bp, Homo Sapiens
agtatccttgtgcacgtttacataggcacatgagcaagtgtttctctgtgttgtgtgtctccatgtgaactagccaggttttaggttcgtatatgtatctttaccgttagtgtctgttgtcacattacttatcactgggccatacccaccctcacatgatttactagttcctgtttttccacattctcacccatactcggcctctccaatggatgtaaaatggaattcagtgttttaattttatattgcctattactattatatagtaggtaccctatgtatgtgtttattaaccattagatgttcctgttctgtgaatgatgtgttgatgagtgggagccccatgttttgttagagttttgatttgctgttagttatatgaagattgagagct

SEQ ID NO: 455501 - DNA, 538 bp, Homo Sapiens
atgaagaaaaggaacccaggcctttgaaaagtgagagcaggagatcaggtaagaatccaaaagctttgtcattgccaataactgcaactcctccataatcacaatttcacgtgtcacactctgtccaccaccccctgagtttccagcttactctctctaatattcatttctccatcaatcagtttaagtccaccaagacttacaacacgattgatcccatcaccctttcaccaccccttaccttttcctgtccttttggtccacatatctcagcctagaatccatcaccaggcgctatatcactccattcccatgcctctcattcacttccaactaactccttgatatggtttggctctgtgtcccccacccaactctcatcttgagttgtactcccataattcccacatgttgtgggagggacccagttggagataattgaatcatgggggcggtctctcctatactgttctcatggtagtgaataagtctcatgagatttgatggtttgataaggggaaatcccctgtgaacagta

SEQ ID NO: 455502 - DNA, 475 bp, Homo Sapiens
ccctctcaaagtgctgggattacaggtgtgagccatcgtgactgtaagtcttttgtttttctatatatgatagtttatatgcaaatagggacaatctgacttcctgttgtctaatatggatgctctttatttttttctcttccttaattgctctggctagtacttccactactgtggtgaataaaagtggtaatagtgggctttcttgtcttgttttggatcttggagaaaaagctttcaacttatcccctttcagtatgatgttggctatgattttgtgctatgtggcctttactgtgttgagatatactccttctatacctaacttgttgagagtttttatcatgaagggatgttgaattttatcaagtactttttgtgcatctattgagaggagcatatggtttttgtccttcattctgttgatgtgatatattgtgtttattgacttgtgtatgttgtatccctgtggaaa

SEQ ID NO: 455503 - DNA, 472 bp, Homo Sapiens
gaatatgcagaaagtaatttgagaatgctaacccacaccacggtgataaatgaacctccacccccaagtttaaactgttcaaatcagcagttagtggtaattcgagccatctggagaatgctctggggagtacaccaggctcagctgtggacccctcaacttcctgctgctcagctactttgtccacattggatttggtccaaacatgtaagacttctaccctaatcagtatccttcagctttttacattgatccagtgtcctctgatataggtgagtcttgtggtagccactccaggatcctgattggggtgccaagagaaacagcaggatgttgaattgatcatcagatgccctctggaatggttagcatccaaggtgacagtgactgcattgaggcgctctattcttcttcacctctcaggaactgacttttatttttatcaacacccagtatctccctgtgaaaagct

SEQ ID NO: 455504 - DNA, 632 bp, Homo Sapiens
ttatcagcaaactgtccaattagtctagctccaagatttatgaggaaagaaaagggacagcatttgctgcccccacccctcttttccagtccttgccttccaaccaaaagaaatggatgttttggtggaaggacacttctttctatcaccctcttcagtcacctctatacactctacattttctctgcactttcaatgccctgttcttccaaacccctatcccaagttttatgacagttttaattgaagcatgattgtggtaattcgagccatctggagaatgctctggggagtacaccaggctcagctgtggacccctcaacttcctgctgctcagctactttgtccacattggatttggtccaaacatgtaagacttctaccctaatcagtatccttcagctttttacattgacccagtgtcctctgatataggtgagtcttgtggtagccactccaggatcctgattggggtgtcaagagaaacagcaggatgttgaattgatcatcagatgccctctggaatggttagcatccgaggtgacagtgactgcattgaggcgctctattcttcttcacctctcaggaactgacttttattttctatcaacacccagtaatctacctgtgaa

SEQ ID NO: 455505 - DNA, 739 bp, Homo Sapiens
tggctcggtacctgctccagagcagggccctgctgctgcacatggctgctctcctgtttgtcgtcagcgagctcctgtatctgagtttcctgggtagccacaatgcccttgctctgttggagctgctcctcagaggcttgcaaggtctgctccagttctctcacccgagtctccagggtgttaatggccttagcctggctgcttctggctgccaagagctgttgtctggtatcctccaaattctgctcagcaagtgttttctctttcaggagttcttgcacgtgttcttctcctgataagttctgttctagtctcttctccaaggatgcaaccttctcttgcaaatgtgtgataacgtcttctttctcttgagtttcagcagtgaccttttgcaaatcaatggaaagctgctgaatgagtgcttggagctcttgttccttttgttccagggctgtgatcttactttctgcacctgtttttgaagctatcacatgatctctctgctcttccagcgttgagtagtgtctctgcaattcttctagcttctggcttaagtctgatgacatctgattggagttcatcgggtcctcctggttacgactaagttctactggttcgtgcctccaattcttgttcccagttccatagacatgtcgattcttttttgaacgcatgtgcgtacttgtaattagttcatcgtgctggaatcccatttgaatgtcatcacatttcatctctg

SEQ ID NO: 455506 - DNA, 546 bp, Homo Sapiens
tacttttcacagggcacagggggtttcaggtccagaaaagcagatataccagctctttggtaaacaaagtagttttactatctgcgtaattctaaccagaaggcatggttgggaggaggtcaagcaaaacagtaatgagtgaactttcctcctccagagatcacagcaggagtccaaaaaacaccaccactcaggactgggcgacagagagtaacctagagataagtgactaacatggacaccttccataacgatggggtgttatccttggactcttgcttgagaagaggaggaatgagggaaaccaagatttccatgaagtctcagaagagaaaagacccaagttctttcccactaaatagtagagatggcaagagctgggtttcagaggacaaaattgggatatgaaagtcagagaggcatctccctttattaaaataagactgctctatgcacatcatagaagatgtgtctatatggatttactcaccatgcaaccacagtccatgtctctgaatatcagcatgacgcttttcccacttgcta

SEQ ID NO: 455507 - DNA, 394 bp, Homo Sapiens
ttcataactctacattatatgtgtaatttattaatgttgggcaacaaataaattcttttgcaaacagcatatttatactatagtcaaattgaaccagattgaaaaatatagactgatatactgtgataagctttactttgcagctggcttttccttggtcctacttcacaacaccttatctgtaaaaccttctacagcagtcaggtctaacctgataatctcatcctgctcagtcttgccataaaccagtttgtacagagggagtatgcccttcaggaaggttactaaggtgtttttagtgatggcagtaaccttgtcattctacttgtatagcttgatgatgaacgtatggagcaaatgtcaaatgactttgatgaaggaaccataagccctc

SEQ ID NO: 455508 - DNA, 453 bp, Homo Sapiens
aaggtaacgtgccttctataaaacaggcacaaagacaccaagcacactctatctacatgctagatttctttccttaagcttaacaattacattccaactcatatctactatcattaatcttaaaaatctctcacaccatctgcaataatgtcaattctatgattacttttcagcagatgataaaggcatttcaaacatttttatagtaaatatacaaaataaaaacaacatattgcctagtaaatgttctgtcttcttgtttttacttaatcacgtccaacagtgaatagtgatagccagccaggaaaagcttatttaagaactgaaagaaaagaaaagctttttggccctttttcatgctggttacttacaagttatcgatctggggtggtttctcttttgcgctcttactcatagaggcagatgcttcattattctcgctctggaaaagta

SEQ ID NO: 455509 - DNA, 197 bp, Homo Sapiens
  misc_feature (71)..(80): n is a, c, g, or t
tacttcacaggggataaggtaaaaattagatgaagcccaagcaaatattcttaaaaagaaaaacttaggannnnnnnnnnacaaaagttaacttaaaatgcattatctagaataatgttataaatcaacgtatagagacgttagtgaatagttcccttcattaggatgttgaaggaatatggtttcaatattacaat

SEQ ID NO: 455510 - DNA, 569 bp, Homo Sapiens
tcggagttttcacaggtgagatacagatgatttcaaggtggaccgcccaggcaggtgagcaaatggaagctgaaattaggtcctggagaatcagtagccccagtgacagcagaggtgggagcatagtggttaagatagaaaggcttcctggcagcactcatcatgcatggaaacccatgctaggctacagcaagaacagagactatcacccaaagactgggtaagaggaattacatcagtcactccagtcctctgacagaacgtgcaagtactatcttgagcataagggaaagaggaggtctccaaaagctgtgaggaagctttaaagctttgaataagctgaatacttagcttacctaaatgagctgagtccatccaaacaacagttttaagttaagtgagatccaaggacctataatcacacaggtcctccttttattaagaacagggaatgagaatgagatcatactgaagaagaataaattcttatacattaaatggcagggtaataatttcaagcgtgatacctgaagactaatacattaagtaaaaataaacgcctgtgaaaa

SEQ ID NO: 455511 - DNA, 479 bp, Homo Sapiens
gggcctacttttccacaggtaaatataagccccagaagaatgaggaatttgtcttattaatgtagcctcagattccacaacagtgcagataaatggtgagggttcaatgtacagatatacagttgtcattaagaatgaaaagcataatccttgccaggaatttccatttaagtgattcttttcagtctttgtatttgataaagtccctagggtccatctctattttactcttccatttcccttaatgtaggtttccccagagttctagtctcagtattctttcatttccctgtgctttatctcttggtaatagtattctttgtcaaatatcaactatcacatccaggtatgactcctaaattggtatctctcttgtcacactggttgctagacttttctatctggacaggatctcttttcatctcaagcgcagttatgtccaaacccaaattttgtatcaccaccccccctggaaagta

SEQ ID NO: 455512 - DNA, 314 bp, Homo Sapiens
cccaccacgtcattcttcaccaattaccctctgttgttttctttatctgttgacaaatttcatgctatttatcattcccctggagaaaatgagacccatgaggacaggcaccatctagttatttcccataccttcaatgcttttctttttgaggacttgaccacaccccatgatctagtgttagttctggatttctccggcatcgaacagataaatgactggttatgactgggaatgcctgggtgcacacagaccggtgaagaaagaatgaataccacggttctggaccctgactctagaatgaatgttttcct

SEQ ID NO: 455513 - DNA, 803 bp, Homo Sapiens
ttcttgtagtcagtgatgaggcactcaatggtcatctgagaataggacgtttatgcaatatgacaagcccatccatgactttctttagtcggccagcatttttgcacacctgcttgtgccaggcatgttctcaatgcatgggtatgtgtctgtgaacaaaacagacacaaattgctgccctcttagagcttctattctatgggaggaaaacagaaaataagcaataaacaagcaaattatagtaagttagaaggtggtaattgctaggaaaaaatatttagaaacagagcaggaaagaggagggccaatttggggataggaagaggttgcagttttaaattaggtgcttgttgtaggcctcctatatttctagtcttttgttattgttgttgttttttcagaatgttgtgattatttactattgcaaatgaatcatctctgtataaattacatattgcatgaaatgagaggagttcagctaaaggggaaagctgattgctaaatgcttgcagaaggatgggaagttgctctagcccttgcatggcattctcaggttatctattcttagtttagtttccttttccaaaaatgatgtttatcatatagtcttcgaatggaacatatcgctgacacctactgccatgtgtttatagttaaacataactagcctcccttcttacaagaccaagaggttcatccagaatgtttccctttagaagtcctaagaaggctctcctggttggctttccagcccataacagtgatagattttgcagccttcttagtctagccgtgggaaagta

SEQ ID NO: 455514 - DNA, 525 bp, Homo Sapiens
taaatagcttgatttagccatttcactatgtatacttgtaggaaaacatcatgttgtacactacagatgtatacaatttttacttgtcaattataaacaacaacaacaaaactgcaaagtctccttagacccacccaatcacatgttgtctgctcatttaatgagtaaatgctatataggttcattctggacctgggtaaaatgatttacagactgggaccaagtgggaggaccctatttcaattcattaggtaaggtcttccaggtcaatatttgaccattgattggcacatctggggtatagttatttaactgccttctagtttacctcaatatgacccctcagtggagggaaaatggagcacaatgactagaagaatgttgagagatgaggaaagagagaatgggatggaaagaacataaaataggaaagcattgacattgtcacttcttggctatttcttcctgtaaaattttgcctggagtgcctacaatgggtccccatcctctgcctgtggaaacgta

SEQ ID NO: 455515 - DNA, 561 bp, Homo Sapiens
tactttcacaggggtgtagtgatacctcatggcccagggcttcagccattcaaaaacagacattcgccatgattcatactgttagcataaactatctcgtcaaactaacaaaatgcagcccaaggcctcaggcatactagaacactattatcaaactggaaattccacgagctcaggtcatttcccaggagctagtcaaggaagggccagtacgtgaagacacctctctttgaaaagtgcagggctggagtaacctgaggctgctaggttaaccctttactgcattaatgtcaaattattagaattgtattcaaataaaatataaaaaagaaagatcacttagagtaactttttcctgcctcacttgaataatgcagagacacttcaaattcgtaacatgtttagggggtctcaaggaggatgggctatgcgttttgaatatatgcatataaaaccacaaatgacataggcctaataatttctttgcatgtgtataatcctctcttcaatgtaattcaaaggtctcttttttaatatcagtctttacattgtcgctgtgaa

SEQ ID NO: 455516 - DNA, 855 bp, Homo Sapiens
atcttttccacaggtctcaatgatccttttctttcaacatataaacatgcataagtctttcatattctttatgaaaacagaaaacgatgaacgcttttggtcgcttctctctaggtttgggtgtgtttcatcttattcctggtcttagcaggcagctccttgaagtacaggtcctcgtacacatcccgcacctcgccatcttcctttcatcttcaaccccctgcactcctgtcctctcctaatgaccaccaggtccattatctaggattctctttcatttcttggactttgcacaacatttggtgttcttgaccactctctgctccttaaaatgttgcccacctgttttctgagttatccatttctcctcattttctttcttgtccagctgctctatatttggacttctctttactgtcctcccttcctctcaaaccttagcctcccctacagttcagccctcagccctctgctcattctgcacgtttgccctgtggcagctcatcttctgttttcttctactaccacctatatgccattgattccattgtaaatctgcatctccagccttgaaatcttatctgacatgtgaggcgaatgtcagtcacgagacaagttcaaaacatcacttccccaacttcaatccagcatactcgttctgtgttttctatctcaatgaatgaaaccgtgcttcaccaaggtattaaaacccaggacaacttcactgctcttctatcaacactatgacagttgtatatagagactgtcgtttcagactctcgtgaatcagctctttcctcccgtgaaaagtaggggatcctcaagactcagacgtgcagcagcaagcatgcaggg

SEQ ID NO: 455517 - DNA, 567 bp, Homo Sapiens
tattccacaggggctgatcgaaccagcagcataatgttattggatacaggaatctgggtatcattttacatctcatacaaagggaaaagaaaccttagtagaaatatattaaaactttggtgtttaatctttaaagtgatcaataaggtgctcaaaggtgaacctccaccattagtcaattgtcttgaatcagtttctcctacatccaaatacatcattggtcagactaaaaatcaagtttcaaacatgagacttacaccaaaagcaaaaccaccttatcactactggttgcataacaagggtagtgcatgaaaatgcagcttcatttatcaacatttcccgttttgttgagctcacaccatgtattgcttagagccaacttcggtggaacttagaagggccctactgtgctggtgtggagttcacacagtgtgcacagcctcctggcgccacgcagcagccaggatgagatgcggcacacaatgcagcgcaccattccgctataaggaccctaactcggcatcaggcaagggaaaggcttctcaatattcttcccctgtggaaata

SEQ ID NO: 455518 - DNA, 499 bp, Homo Sapiens
ccaatctcaatgcaaagacccagagacgtggttgctttcttagtggctgtcaccgctgggccacttccctgggtcttagcttctgagctggtaactggcacctttggcagagaacttgggtcactgctcaagaagctggtgatgtctgtagaagatgaaggggcagaggcagaaaattttgtagcacagaggaaaagcattgtgagaggaggagaccattctgtctggattccagaagtattacagttcttgatgacagtaaatgcatcatggctcatatagctagagcatcatagcgggtaaggagcacagcagcggcgcacgctactgaggcctttatctcattgcacacgaatgatcacaaccaactgggtggctacccactcattatccattcggtctttagtcactctcctcctctagttcctgggctaattgcgacagccaccaattgtacctgatcccgagatagtcagagcatgtagatcccctgtgaaaa

SEQ ID NO: 455519 - DNA, 455 bp, Homo Sapiens
ctcggtaccccttttccacagggataggcagagacttccaacatagaggttcttaaacttcgaggggttacaatccccttgcaaatatttttatagctatggaccctctcctcagatctacagccaacattttcagtgcaccttaggaggtcattttagtccacgcctctgaaaaagctgcactccaacggctgaagagcaagccatacggccgagaatggggctccctttgccttcatgaaagctacttcccccaacactaagactcagctgtacgtttgcttagctcagtcacatttacattcttctgggtgaactgtaccttttgagtacctgccttcattttctagaatcagacctaacaaggtcagtagaagcctgggcagcagcgggcctggaaagacgaggcagccagcatgaactgctgttctctccctgtgggccctgtggaagta

SEQ ID NO: 455520 - DNA, 510 bp, Homo Sapiens
tacttttccacagtagtggttctcaaactttggcatgcagttggagggcttgttaaaatcttgctgggctccatccccagtttctgatttagtaggtttggggtgggggccctagattttgcatttcttacagtttcccagataatggggatgctgcttatctgggaacaccgctttgagacctgccactcccaaaaaacctttcttgcaactacacactaattataggtgttgctgctcgagaagcttcccattcagacctgaacagagatgattcagtgtttgagccagcccccagataaccagctgcctaccacttagctaattgctgggatcaaggggttgaacagacattttctgtttcagatgcgaacaagggggtgaaaaaattaaaaagatacagggaagcaattgcaatgccactgtgcaagcttcaccagtggacgttccaattaacaatcagagagtacctgctgagcccctttcacatcaccattaccacgaccactg

SEQ ID NO: 455521 - DNA, 480 bp, Homo Sapiens
  misc_feature (43)..(61): n is a, c, g, or t
cttttcccccgggatggcttgcattatggctctcccctggttnnnnnnnnnnnnnnnnnnngagaaaagaaatggagggtttagcaggttactttgggctgcagccagagtgattgccacatgcatttctctctttatctcctctctctcctaccataggctcagttctgtatcagaaagggctgaggttcctacatgcaccaccttccttcaaaggggcaggtacgtcaggtcacatacactcaagtgttttgaaagaatccatttccccactgactttctgataggctgcttctgggtcaagttctgtagccaatactttttttagtctgttttccccgtgaggaaaacatccagtcagaatggcagtctcaaggacaagtggggaactgtggtggagacgatttgcttacttccatcttggaggccaagggtgtaacttggctacctcagtagctccttggtggtgcttactcagtg

SEQ ID NO: 455522 - DNA, 551 bp, Homo Sapiens
  misc_feature (76)..(124): n is a, c, g, or t
ctgcaaaaatcctacctctcccccatcctgattcacccacttcacttctcattctgggtttcttatgctttcttgnnnnnnnnnnnnnnnnnnnnnnnnnnnnnnnnnnnnnnnnnnnnnnnnnatgggcttttccagcacagagtgctggcagaaatgaatagctctcatgaaatatgtcacggaaggtttcctaaaggagcagagtcatacagaggtgaacacccaggtcttccctaatgaatgtaggatgtaaacaacttttaaaatcctcctagagaggatctatgctgaccatgtgacttagtgtggcaccttgggccgtgtggcatcagcttgactctggaggggctagagactaaggttaggcacatgggggctcagtcatgtctatgtgacctgtaccccataacatctctggacactctgggtttggtgcttgtcactgatgggggataccccatggtgttgtcacacatcatagctaggagacataatactctgggcacccggaagctccacactgggtctgtcctgcccctgtggaaata

SEQ ID NO: 455523 - DNA, 573 bp, Homo Sapiens
  misc_feature (289)..(324): n is a, c, g, or t
aggggaaatagaagtcatgctcatttcttccagaataaacagtaagctgttggatgattctataccatgtcagtggtgccattttggtagatgatggtagggtctatacaggggtcaaattcaggtttccattttattttctggagaaaagcatcccattgttgtgtcatctgcccatttccaagtactccctttctgtttgtttctcttgcctgtctttgcaccaactagtccctctgcaaaaatcctacctctcccccatccttattcacccacttcacttctcatnnnnnnnnnnnnnnnnnnnnnnnnnnnnnnnnnnnnaagttccaaggtacatgtgcgggatgtgcaggctggatgggcttttccagcacagagtgctggcagaaatgaatagctctcatgaaatatgtcacggaaggtttcctaaaggagcagagtcatacagaggtgaacacccaggtcttccctaatgaatgtaggatgtaaacaacttttaaaatcctccttgagaggatctatgctgaccatgtgacttagtgtggcacttgggccgtgtggcatcagttg

SEQ ID NO: 455524 - DNA, 541 bp, Homo Sapiens
acttatgccactttcgtcagtttcccactcttggtgttgtgcaatacagtagtctccccttatttaagtagtcttcactttattcaaggggggactactgtattgtatgacatccaagatccccagtagatgcctgaaaccttgggtagtatcaaaccctatatatactgtttctccctatatatgcctgtgataaagtttaatttacaaattagacacagtaagagattaacaacaataactgataataaaatagaacaattataatgctatgctgtaatgagtcacatgaatgggggctctttctgtctcaaaacatctaattgtatcatattcacctattttcagaccatggttgaccgtgggtaactgaaaccatagaaagtgcaactgaggctaagaggggactactatagaaggcaaccctcagcagtgtggactgctggtggaaaagctaggaacagcacaggcaccagagtgtacaaaaccacctccacattaagcccgttatttaagtctgcccaggacctgtggaaaagta

SEQ ID NO: 455525 - DNA, 815 bp, Homo Sapiens
agcagggtttgagccttttcttggtgtttctgcgctgctttgttctgctgcctgaaggataaatgtgtagattcggaagcagtaatgaccagacctcctgataacagtcacaggggtcatttattaagcacctgctgcataccaggctctgtgcttgcattcatcctccctcttcttaagagggtggggtttgtatccacttttggccctgggcctctctgagctttgtcctaaaaggggctcacacgaggatcccctcacagagatggagtgaggattaaagagctgacgggcatggagggagcagccagtgtccagctccagagaagccctggataaatgggaactgattgcagcccctcagccctgtggggacatccaggccgctggcctcaatgacttgacttcttcaagtgacaccctccttgctgtgccctcaaaatgtttgatgggtgtgagggagaagttcatatttacaaatgcaagtatgtgtgatatgtgcttcctggtgactgcgataggaggtatggggtaatgattagcaatttggagacacgtttacgacccatctgcagggagaaacagcccgcgttctgattcagccatgtgtgtgctttcaggacccaggaagtgcttctgcctgcttgggcgccctgtgtctgtgtaattaattgataattaaccactttggctttctccacacttggtgatctttggtgtctatctaaaactgacaccaaggaagaccgcagattcagaaaagtatcccttcctttcaaatttagcacttggcacagattagacctgtgaaagta

SEQ ID NO: 455526 - DNA, 512 bp, Homo Sapiens
  misc_feature (170)..(197): n is a, c, g, or t
  misc_feature (262)..(323): n is a, c, g, or t
  misc_feature (358)..(416): n is a, c, g, or t
tacttttccacagggtggtcaaagataccctgactccaatatttaggtacctggctattactttgtgtttcattaaaaaaattgtcatttttttgctgagtgcagtggatcccttgaggctgggagttccaggccagtctggtcaacaaagtgagaccccgtgtctatgnnnnnnnnnnnnnnnnnnnnnnnnnnnntgtcgtccttcatgctcactgagaccttttgactctggtaaaacttctcagtgagttgttaaatnnnnnnnnnnnnnnnnnnnnnnnnnnnnnnnnnnnnnnnnnnnnnnnnnnnnnnnnnnnnnnatgattcaatggatttgaaaatgggccaaactaannnnnnnnnnnnnnnnnnnnnnnnnnnnnnnnnnnnnnnnnnnnnnnnnnnnnnnnnnncttagtgaggatgccctgcagaagctggagggaccactggaagaactggtcaggcatccatcaagatgacctcactgactttcctgtggaaaagta

SEQ ID NO: 455527 - DNA, 139 bp, Homo Sapiens
tatttactgtaaataggtaataacttgatagtatatatcattaaggctatttccatttttaaagatgatattaaatagtaccgttcctcagtgtgtctaaatcaatctactttcaacgacacggcaatgaccttaaagt

SEQ ID NO: 455528 - DNA, 676 bp, Homo Sapiens
tgttcacaggagatgctctgggggctgcaggacaaaatagtcttgagaccacaagtggtaagaccagttacaaggttacagcaggagcccagataaggtacaatttaagcctgatttctgtccagtccttatatctgtttaaataaagtccttctgtttcattacaaagcacttgtcattcacctaatagaattgctaggcccatcctagttcacattgacccaaatgccactggagtaaagtttggcatttcacaagaccacaggtgtctctgaattgagctaatctacaaagactgcagcagtacagttttcctacctgcctctcagttctgactgtggacaagcaaatggaagcaacagtgcccacctggatccatgtgcctccaagtgagtgtaattcggtgctagagcaaaagccaatggcatgcattagttattactataagacgcaattctgcaataaaatacaatacggtcactttcaatatgtactaaaagtgatttaccagagctcatggggagtgacttagatgactatttgattacaatacataggataaatcaccttcatttgagggttaaattatcccatctgacaactctagatcaatttgacagttaaaatcagtgtcgccaccctccttacccaaggcacactgagtttgtcctggttc

SEQ ID NO: 455529 - DNA, 426 bp, Homo Sapiens
tcttttccacagggctaggcaatttctttttcttgtaacccattaacattctatgtattttggggaatactgactgagagattcacaagtacacacagacattcatgcaagtaaatatgtatactttaaattagtattttcatgtatacataaacacatataatccaggtaaagcaaaaatatctttgcagcaagggattccgtgtaagagattaagtgttgtaagagttgattctgttttcgtggtctggtaacaggaagtctcttctgcacatgccttctatgaacctctttgaaccacttaaagtctataaggaaaacatttggttgtatatgatttacacacaagggaatgagaggaaaccccaaaacttctatcctatcacaaagctaaatcatttttccccctgtgaaagtaggaccgac

SEQ ID NO: 455530 - DNA, 403 bp, Homo Sapiens
gattacacaggctgacaaatttgtgctgcaatgttaatgatgaaatgaaactctggcctactctgttccatagtcacagatgcactgttttccagccatttttcttacaaatgaatgtagaaggttgcaaggaagacttcaggaagcaattcaaagcaatcctcactaaatgaaaaacaacagccaaatactatgtctgcatttgaacagtttcattaacattatgctgctatattttttatgctgctatatttgagttaaatgctaacacaggtttttagtgctttttatgttctttaatcatgaaattgtacatcgtgttactttccaaacttcacctacaaaaaagatatagatgtacaactccttttaaaatgtttcacggccggttgcagtggctcaa

SEQ ID NO: 455531 - DNA, 702 bp, Homo Sapiens
  misc_feature (625)..(625): n is a, c, g, or t
  misc_feature (675)..(675): n is a, c, g, or t
  misc_feature (692)..(692): n is a, c, g, or t
tacttttccacaggcacaactgactcttctattgggatgattaactatattgtgcatcagtgagagtcagctgggggaaaagcagagcatcttgttcggactttttgaggggagaacgtattgtttacacctctaccctccacacatttagtgctgatccccaatagcaagagtgtcacaaagaaagttttaaaaggataccaagattctcttacaggagcttatcaggtttactcaattctaagaaaagattctggcacacatctttgattacgaaattaattttagctaaaggtctcccattacactcagctccttatgcagcttccacactgcaactgctgccaatctcaaactccaggtggggcagtcagggggctgctaggtcagtgggaagcatgggaagtgacacaagtacagagttcaagaaacagacttcaataacttgctacaaagcagagttgtgtgaacagtcttgcacagtgattttttgctcactgtgtgatatgaatctattattttattgtttggcaaaacctttatctggtaataataattttcagttttttgttgcccacttttgctttcaaaagtgttccacacttgcatgttatatgcgttaccnctatttatgagaggaatcagtaacaccatctcctgcacgtggtacaatcnatgcctgaaacccctgntggaaaagta

SEQ ID NO: 455532 - DNA, 474 bp, Homo Sapiens
tacttacacagtgggatgaaatccattttaccagtttttaattttatggttcatgctttttgcattctgtctaggaaatccttgtctaatttaaggtcatgaagattttctcctgtttgctttgagaagttttatagttttagcccatgtatttaggtatgtgatctgctttgagttaagttttatatgtagtgtaaggtaaaagtctaggttcctttaattttgttttgtttcattttgcatatttttcaagcaccatttattgaaaagactgtccttcctttccctattaaattaccttgacacatttgttgaaatgaattaacttacatacatgatcaattcctggactgtcttctgtttcactaatctgtatctctgtctttacaccaataccacactgtcctagtaaatttatagctttttgaaatcaagtagtgtgattcccccagccctggaaagtaggggatcctt

SEQ ID NO: 455533 - DNA, 515 bp, Homo Sapiens
ggaatagagaaatccgagctatatctcagagcaaggtttaatagcccatgttccacgtgaagagcagacctggcttagtcagactgttttgactactgaccatttttatagtttttattacctatggagtagtctttcaggaacagcataagtatttgccactgttatttgtttctttttgttctgtttttgttatctcttattgtttaactttgtggattagaactggttagaagccagaccactgtttgtcaaatgtttctactcacatgcccttaacttagaaaataaacttgttctcctcaggctctgaggtagaacatgaagatttctgcccaagcataaaaacacataagatcttgtatattttatcacacaagcttgcagaatattgtcttgctttaaagtaaatatattcgttattacgaactacgttatttttcttccgagtgcttataatcgaagtcgacacaccagtaaggttttctgcaagatattagtaatcttggaaagta

SEQ ID NO: 455534 - DNA, 561 bp, Homo Sapiens
tgccaaaagcagccactgggaggggactctgactgttcaattttacttggtgagactggtccttaactgcagaacaaagacagcatgttctcagatggccgactggtaggccaatctttgctataaaagcggctcaggtacttcattcggtaggtacttttgagttaaatctgagaggtctgcattaaaatgtaatcacttctgcactgtctagagatagtaatagcctattttctgagagaaaacgagcctgaaaataaggcttcacctgctgatagatcaggtggggatgtcgactggaaaaagcagctctttacagcaggacactctttcttctgtttgctcctgttgttgatactagcaattttgatcactacaaagagtttctatgaactgtaaatttagttagaaattgatccagacacacactttggttaatcacctgctgtgtgccgagcggtgagcttgtttatccatcctgccatacagcattaccgagaggccagacacctgaccacaacacctgaaccgagagcttgatcacagcaatgatgagagtat

SEQ ID NO: 455535 - DNA, 540 bp, Homo Sapiens
cgctgtcgccgttgcggtagtcctcgcagctctgttgtgtaaacattttttacacctctgttaaagcaaacttgcagttctctacgaagtgttttccactgatgtctgctaaaatggtacttaggaggtaaagtatgtaagaatatccttctgatgtaattacatttaataacaatatcagtgtgggccactttcttagctaccaccagttctttaatgtttttgaaaattaacttccagtcttggccacagcagcctaagagtccccagaagtagccagttttaggcatatttgaaaggaatctgtcttttctacttgggaggttgaggaactttcaccttctttctcattcttctcatttctgttaacttcttcctcaatctttctttgtgctttcaggattttctgttttattgactgtctgtatctttggtcccactgtgttgactgctttctgcaatgattcaaaactttttattttgggaacttctaccctagcctggtcctgtccactgtgtcatgtccctgggaaagtggta

SEQ ID NO: 455536 - DNA, 656 bp, Homo Sapiens
tatttccacagggcatggtacaaggaataaaggtgacaagaaaaatataatgtctggacaaaagtctttataattttatacagatatattcttcatatgtgcaaagtatgcaataaaggtatctgttttggtttctataagacatgcttggcaggcttctgcctgggcttccctggccagtgctgactggcagggacaaactatctctcaggctcacagtgactctgtcctggctgtcctcatgctcggagggacatgcggaccaggtaccgaaaggagtgtattctgtcagtgctgcagaaacctggaccaaccttgactctggtcttgatatcaaacctggacaatggagctcactctggctacacagaggtggggccaacctgggcacagacaacatgctccttggtgctgccgtggcctcaactgctcactctcctagtgagtgtttcatcctaagcagggcctcctatttaggccctacgtgaggccctatgtgtgatgtgtagagtttccagcaatggggcttggactggcccatcccagttctgactctcctggccacccagggcctacctctgctgatggccagtggtagatggcagtggttctttttctaaatctcaccctgtgtgctccactgtggaaaagtagta

SEQ ID NO: 455537 - DNA, 353 bp, Homo Sapiens
ctgtaccacaggatgagtttatgaatagtagcactagagtggtgtgttttgatgagagaaagatgcagcgagggttccttttctatctccacctcactcttttcagactttggtcttgtatatacaatacatttccatgtatatgtcttataaacatctctaatgtaacacattgtcagtgtaacacttgatttcccccaccaaactatttcttccctcttttacttgctgactcctctgttcacccaggtgctcaaaccagacaacccggctcccacccactgaacgtggagaagtggggcaagtgccaagagtcacctttgatccctccctgtggaaacgtaagagacagc

SEQ ID NO: 455538 - DNA, 425 bp, Homo Sapiens
tacttttcacgggtacttttccacatggtttccagcctgtctctctaattccaggaatgctttctataggaatctgtcgaactccatctttaaaacatgaaagtccagggtaaacttttcgaatttgtgcctgttttctttcaatcagttttttaattatctccttctgctttttaatgatgacagaaaattctgtgtacgggatccgtggatttagctcacatcccattaaagtggctccttcataatccttgatatagccaacatatttggttttaggtattttaatttctttggagaaaccctgtttcttaaagtatccaattgcatattcatctgcatatgtgaggaagttcaggatgtcatgctttatgtgatattctttcaaatgattcatcaggtgtgttccatagccctgtggaaaa

SEQ ID NO: 455539 - DNA, 560 bp, Homo Sapiens
aaataatgggatgccatagtactttggcacctaggtatcctgaaactttgagtttggcggtttttaatgtttattagttatgtgactcttacatatgccaggcattgttctaattaatatataatatgcatgtatattgatttatcttctctaaaccctttgaggtacctattattattatctctaagaaaacagagacacacagaggtttgttaacctgcccaaggtcagacaattaaggacagaactagaagctgatcccaagaagtttggcttcaaagctcttaaccacatactaacctgcctctcagtgacggggctcagtaactcagcttcatgatttcacaggttttcaaagattatttttctttttaattagaaccagtccaccatacagttggaagggtaaatatttgtcatgtttggtgacagacatgatgagttaaaaaaaaggtctaaggcaaagtcatgtacttgctcttacatatccttccatctgtatttactatgtgaaaagtcacttgagcacagtgtttgatttcatgcttataagcagcttc

SEQ ID NO: 455540 - DNA, 563 bp, Homo Sapiens
agtgtgcagggagataaatgataaagataaatataatagtgaataggagtaacaatagaaggagttatagttcaggtactatgggaactcaaagaaaataacatatcaggtgggagagtctggaggaggcatttgagttagtgagttttgaataggcacaatgaataggttaaggagcattctacctcaagggaaaaacatgacccaaggcactggcacttaaacaagtgtgtgttgaatagctgaatggaattgggtagcgtttgttcttccactgatttactcactatgatatatgaatgcctcctgaatggcaagcaccatggcaggttggtgctgggaatataataagatgaccgtcatgaaactacagtctaatagagatagataaaaccgacaaattaatgaatatataaatccaaagtgagaaagactgttaggctactgagtaacttgagtgaggatagatggtatgattaggtagtcagggaaggactctttgaggaaacaaaatataagctgaaactgatctttgttaggagccagtttacctgtggaacgta

SEQ ID NO: 455541 - DNA, 446 bp, Homo Sapiens
cttttccacagggcacagggcctctaatagttaaatagattgtaagctgcacaagcatagggacagtctgtcttttgtaaacctcccatgcacacaataggaaatcaaatattcttgaacaaatgaagtcactaagtgctcattaaatttcattttaaatatatgcctctgttaattcatggatcttggaacttacttaaaagacaatgctttgacggacatttccacattcctcatagggatttactttttaatacaaacaggttcagttaacattgccatacacatctcattacttttgggagtgcttttccagaaatctctggtagtcacgtcacttcatgatggggctacgttctgagaaatgtgtctttgggtgatttcatcactgtatgaacatcacagagtatacttacacagaccctgtggtataggggatccttagt

SEQ ID NO: 455542 - DNA, 395 bp, Homo Sapiens
tactttcacaggggatgcccacaagtatctcacatttaacacgtgtaaggtgcaagtccatgccctttcccaactccctcagtttctccccaggcagtataaagtgctccatcatccatctagctgctcaagtggctgacgtaggagacaactttgatcttccctttccctcagcctccacatccagtccattagcaggtgctgttgatcccaggtccaaacagagccacaagctgcaggtttctgtgcaggtctctccgtctccattgccacacatcagtcatgtctccaatccctttcatgaagactgttgcaacagtcctgtttactgtcaccattagataccttcaatacaaccatcccacagttgccaaggggatcttgttaacaatgtc

SEQ ID NO: 455543 - DNA, 753 bp, Homo Sapiens
aatccgtgctgacatcatatacctccccagactaaactcttattttcccttcaagttatcagttggtccatggggaggttccaagcagtaatgacaacagtctgtcattacggatttcttcccgcatctcccaccacgctgaatccctctgtgccgagatcctagatgctcatatcctaagtggctattacaagcatcacccggaagcgtgcattccacctcataggcagcattctaatatcagcatggcacggcacctttctctaaaccagagccagcaagcaacagcaactctcctctcaccaaggtcagcacactgccctgagccacatcactcgagtgtggcgctccgaaggatagtatccaaatacgcagcacgacgacgcagcacaggcccagggagggaacgtgagaggaagtcctctatttttagttccaaagcatgtgatttctagctatcataagaattccttattcataataacatacagttcaatataaacgtctgtgatatgagccttttataactggatcaacccgacagcgtatctggcattctaaggtaactacctgcaagtgggacttcaacatgaggacgtgcaaagcactgctgtcccctgggcttgtcaaaggcaggtaatggcgcaaggcacaaccacagcagagcttctgcctcacaactagacttgttcttaacacatagcaactgacagcttccacagctgctgacatgcaggctagctcatctatgcc

SEQ ID NO: 455544 - DNA, 524 bp, Homo Sapiens
taatctgttgaggctgtatttctgtttccctccaggagcacacatctctgaaataattttagaaacataagggggaaatggcttgatggcaaattcttcctttacacacgacttttcaggaacgcgccaaatgcatcaagggaggctgggctgtactcagaggctctctctctggcatggattctgtgatgcagagtgagggtggagctgcggcgtgaaggccttgccacacttagtgcacttgtagggcttttctcgagtgtgaattctccgatgcaaaatcaggtatgagtttcggttgaaagcttttccacattcactacattcatagggtttctcccccgtgtgaattctctgatgcttggtgaggtccgagctctggctgaaggccttcccgcactcattacattcataaggtttctctccagagtggatgcgctgatggaggatgagattggaactgtggctgaagccttgccacactcgttacaattcatgaggtttctctcccaggctaaggctta

SEQ ID NO: 455545 - DNA, 494 bp, Homo Sapiens
aggagtaccaccccgtcagtgtcaggaagaagaaaggcggagtactagtaccccatctccagctgtcgaggtacttgatgacatgaccacacaccttccatcagcatcgtcccaaatcccagctctcgaagagagctgtgaggctgtggaagcccgagaaatcatgtggtttaagactcgtcaaggacagatagcaaagcagccatgccctgcaggaactataggtgtatcaacttatctatgccttgctcctgatggaatttgggatccccaaggtccagatctcagcaactgttcttctccttgggtcaatcatataacacagaagttgaaatctggtgaaacagctgccaacattgctagagagctggctgaacggacaagaaatcacttgaatgctggggacatcacctactctgtccgggccatggaccagctggtagcctctaatgtacagcttcggaacctgaccctgtgtaaataggaccgagtcc

SEQ ID NO: 455546 - DNA, 476 bp, Homo Sapiens
gtcccatctgcagagttttctacaggtacatcgatgccattatattcattgagaagaaccttctgcagcactgcaggtggttggtttccttttctttacagcgctacacgtaggctgcactgaatgactttctttgaattccttgccttcagagtcactacaatgctttttatgcacactgagatctaagacagattcccactggactggagtcttgcctgtaccctcagccttctgtttgacaccgctggataaatccagtggctgctggttgcacacactgctaaaagcagaactagctgtccactctttagacattttatattcatcaaagcatggagggctcacagtttctctctcatctctcccagacaaactccatgctggtgagtcgctgtgactttctaatttggattttttggaagtcagcccggcatcggtccatgctgctttcccatcacttggctttccaaagt

SEQ ID NO: 455547 - DNA, 378 bp, Homo Sapiens
accacagggaagtagtgttgttgatctcaccagctccattcaagcatgtgatcaagtttttgagcctcgtcacgggaactgggctgtgtgaaccctcttgtccctctttctgttgtcttctcccttgtaaaggcggacagaggctttccgccgggattcagctttaggagggaaaggcactcactctccttctgctttttgaggaaagctgtcactcagcagctccgcctgaccctggagcatggactgggtgggccagcacttggtcagtgtggaggcggagatggagcaccgagaggcctgggcagcaccatcgctggagctaccacagttggggggccctggagactcagccccagggtgtgccctgttcaacta

SEQ ID NO: 455548 - DNA, 523 bp, Homo Sapiens
gatggttatggtttgcttttatttgcttgaaataataaattcaaggggtctcccttgccagggtttttccactgtcagcagttttctgtttcccttgctctttaagtcaaactgaagcccaagccctcatggctggctttcccctgaccccttggctcctgggagctgatcagaagacagattgccgtgggtctctgacatacagagtgacctagccaccccccacctccaagaagatatttctaaaatgcctgcctcttcagcatctggacactccactgtgacccagtcagtaatggacactagcctggctgccaccaactacttataatctctttccaatttgggtcagggacctaaaagccatctccgtaattctagccatgaacagggggctcagacaaaagaatgctcaactataaaattagaccttgctttgcaggaaaatacctctcagagcctgggaactaccaccctgtggtaaagtaggagatcctctacgagtcgacgtcaacatacagtt

SEQ ID NO: 455549 - DNA, 618 bp, Homo Sapiens
  misc_feature (222)..(309): n is a, c, g, or t
  misc_feature (322)..(355): n is a, c, g, or t
gagccggacctacttttcacaggcaagcaaggatattaatggaaactaatgcatgttgaccttacaaaagggaaacacgagtggaggttgccgttcttggttctgccacttgctgctgggctgtggctgtgattctgacttgcccctctgtaattcatttcatacctccttacctcaggccagccctcagctggctaggctttttggtttgtttgcttgttnnnnnnnnnnnnnnnnnnnnnnnnnnnnnnnnnnnnnnnnnnnnnnnnnnnnnnnnnnnnnnnnnnnnnnnnnnnnnnnnnnnnnnnntcaagtgattccnnnnnnnnnnnnnnnnnnnnnnnnnnnnnnnnnngtgtgggccactgcacctggtctcaagctaggctttttgttttggtttgtttttgcagagggtaagggcgatctgatcttcattcctggaggattgagttctgggtcctgcctggttggaaatgtagtcgtctttcattaacactcccactggatatggcaatataaagaggtgtccagtgtgtcttctgggttcatgcattatcttctgcctcattgacagagcaattattccctgtgaaagggatcttagagtgactgagc

SEQ ID NO: 455550 - DNA, 455 bp, Homo Sapiens
atcacaggctacacattgcatttattaatagttgcatgtatctttagtcttctgccgtccatggttacttctcagcctgtttttctgagaaaaattttctggaaattttgaagaatactgttcacatattctaaatatgtctgtttttctcattagattgagattacaggtttttggaaaccacagcagtacaattcacttcacatcctatcgggggtacacatcactggtgatattaacattgatcacttggttaagtctgccaggtttctccactgcaaagttactttttccctttccatactctgttctttaggagtcacttaatctagcccacgttcaaaaaggagaagattaagctccaccctatgaaagggggaatatctacatatatttggaaatctttaaggaaattctctcttctccctgtggacaagtaggggatcctctaaagt

SEQ ID NO: 455551 - DNA, 735 bp, Homo Sapiens
tgattgtcacacagcatcaagtcgataaaggagacccaagctgtgcgctggcaggccctctctcctccccaggctcttgattactggtctattcttgaagctcacttcacgtgttttctccaggatgctttttgacaactctagaccatcctggtccctggaccctgaaatcccacacaagaagaatctgacctaggagaccacaaccgcagaatacctcaataatagcaattgatgactcagtgtgatccagctgtaaggccagcggatgcctcggtgatgaagactatgcctcttcatcttgaaagacttagcgaatgcctattctgtgtcaactactattccataaactccatattcacccattcagtcactcactggattcattaattgtcagatgctgtgttagtcacttttatatgaaagtcactctgttcttttaaccagcagtaactaagcttgctttggggaaaaaaatataaaaacattaaggaatgaccaatgcctacaagatcctcacacttccgatatgagagagatctcaggcgctctaaataaattcttaatagtaactagcatttctatagtaattcctaggtgctaggagctgttatatgtcccttacatgcactagttcatttactccatacatagccaggtagtacgtaagtgctattaatatccacatattctaaatgacgaactgtgacataaagatgagattcctgtggacac

SEQ ID NO: 455552 - DNA, 210 bp, Homo Sapiens
ctgatgcctgtcttattctttctctcttggtttatgcttcagagcacttgaaaaaccagtatcactaaaatctaatttttgtcaaattatcttcaaaaattgtatggctctttttattgtattgagtgtcccttaactttcagcattttttgtagtttggcagtagactttctgacattctctcgttacgttccatatccatgtggaaaa

SEQ ID NO: 455553 - DNA, 457 bp, Homo Sapiens
  misc_feature (62)..(110): n is a, c, g, or t
  misc_feature (133)..(184): n is a, c, g, or t
  misc_feature (195)..(228): n is a, c, g, or t
tatttccacaggggatacttaagtccccccgatcccctccctttcttttgagacaggtctcnnnnnnnnnnnnnnnnnnnnnnnnnnnnnnnnnnnnnnnnnnnnnnnnntgaatgggtaattttttaaaaannnnnnnnnnnnnnnnnnnnnnnnnnnnnnnnnnnnnnnnnnnnnnnnnnnnaagtgatactnnnnnnnnnnnnnnnnnnnnnnnnnnnnnnnnnngcgtaagctactgtgcccaggtgagtttcttacatgatatggtatggtaattgtgtatgacctatgcacatcctcttgtatactaaaatgtaggaggtgttttgattttagagacaacattattgaaaagtttagtgttcttatagtattgatgccacattcatttgcagtccaaagagcgctttatttattgtcttgaatttgcttggttttgttgccctgtggagta

SEQ ID NO: 455554 - DNA, 518 bp, Homo Sapiens
  misc_feature (18)..(18): n is a, c, g, or t
atttccagagcaaaaggnccggtcatttaggacaacagtggacaggcgtatgggggtgatgggcagggggaccctgttcctgttgtttggctgctctcaggcgttcagctggtcaccctgggagaggggtgagggcaggccctctgctttaactcacttgtgtggtaggaggaaaagcaaattgtttccagatgaggggaggctgcctggggagtggaatttgtgccccgtctgcgcacagcagcctctctgggcctacaggaccctgtgtctttgtgttcagacaagccctgctgtgtagaggcctgagctttctgccgccgacttgggctcagtgccccgaggcaggcagatggaggagtgcggcagatgtgccgtcctctcccaggggagggaagctccttctgtttccgagtgaagtctgggccaacatgccccgtattttacctatccctttccttctaagtagttcagatcactttcagaacgtcactaataatccgtatatttatgctccc

SEQ ID NO: 455555 - DNA, 670 bp, Homo Sapiens
atcggtacctacttttccacaggatagtgtttagtatggaaagcttttaggattttaagaaaatgtgattcctaattgatgttttctttaaaaagttatctctcttaattcattttctaatgcttatatggctacccagttatcctagcactttttatagaaaaatttgtatttttcagactcagtgcaaggtaatttctaagttgttttcttccccattgtttgtctgtctttgcgtcagtggcattcttcttattgctttgctaaaagtcttgatatccagtagagtgagtccttccaccttggacattcttagccctttccatttgtttccatttgttacaaattttagaatcagcttttctaagaatcagcaattttccagagaaaaatctgtttggattttgattgggattgcaatgaacttatgatctgtttggacgaatttgcatctttacaatgttaagtcttccagtccagtatctactccattgaggtctgctttaatatctttcaaagttttatagttctctccagaaagataataaacacttttgttagacttattcctaagtacatgatagttcttggtgcttttataaatggtagcttttaaatttcattttctggccgggcacaatggcttgcccctgtggaaagtacctcgccg

SEQ ID NO: 455556 - DNA, 1089 bp, Homo Sapiens
ggctggagaggctcagaatcatggtggaaggcaaggagcaaaaaggtatgtcttccatggcagcaggcaagagagcacgtgcaggaaactgccctttataaaaccatcagatttagtgagatgtattcactatcacgagaacagtatgggaaaaacctgcccccatgattcgattacctcctaccgggtccctcccacgacacatggggattatgggaactacaattcaagatgaaatttgggtggggacgcagccgaaccatatcgggtagcaacaacctagggtcagttttgcaggtggtaaagccatttaccaagatagttgtaggtaaagaagggcagatttattagagaaattgtgaaaatatgttgcagtgggcagctcagcagagaaggggctacctgccaagaggcaagggctggaggaaagttttatagggtcctgctgaagggtgctacgtgtggaatgaggtcattgtgcccgcaggttgtttgtgattagctgtctctaacaattgttcatacaataattgttcattattgttctcaacttggggctctccccaacctggggacccttccttattgttgcttacttatcaggtctccacataaaggtgtggaaacttcattcattcatatcttcaacacaaattgtaggtagcctgttttttaaaacatttattcaacaaatatttagtccaagccactattacttactaccttctctactattgtatggacttttaactatctctgacactattcactattcttccacattctctattatttatacctatggtacaatttgccagttttacccagacaacaaatacacacagggaatatatagagtcatagaaagaaaatatacaggtccttaaacggctgtccttgccaacaaaaccatattcgctggaacaatacatcacaactatgcccaaataatctatcctaccatgtccaaaattttactttaaaactggaattaccagagttcctttctgcattaaccagttgaactagacggtaacgaaatacttcctactttatgctgtgatagatctatgttgtttgtttgttgtt

SEQ ID NO: 455557 - DNA, 351 bp, Homo Sapiens
taaggaagggtccccaggttggggagagccccaagttgagaacaataatgaacaattattgtatgaacaattgttagagacagctaatcacaaacaacctgcgggcacaatgacctcatttcagcacatagcacccttcaccaggaccctataaaactttcactcacagcaccttgcctccttgcacggtagccccttctctgactgagctgcccactgcaacatattttcgcaactttctctaataatctgcccttcttacctacaactatcattggtaaatggcttacaacctgcaactgatccctagttctgctacccacaggtacagagctcgattgtatcatgtta

SEQ ID NO: 455558 - DNA, 359 bp, Homo Sapiens
cctagggtcagttttgcaggtggtaaagccatttaccaagatagttgtaggtaaagaagggcagatttattagagaaattgtgaaaatatgttgcagtgggcagctcagcagagaaggggctacctgcaaagaggcaagggctggaggaaagttttatagggtcctgctgaagggtgctacgtttttagggaaaacatattacacacaggttgtttatgatcagcagtatcgtaacaagtggttcagtacaactaattgttcacttacttgttctcaacttggggctctccccaacgctggggacccttcctgtattgatgctacccacaggtacacgagctcggttcgtatcatgtca

SEQ ID NO: 455559 - DNA, 581 bp, Homo Sapiens
  misc_feature (219)..(232): n is a, c, g, or t
tactttcacagggttaacttccatgtgtcaccaaaggaaatctcaaatttaaggttgtaattcacttgaaagctagcactaattttgttaaaagcaaccaaaatttccaaaaatccagtccattttaacatcttatgaattcaatatccaatttgtaccgaccaattagttcttcaactctttaggaagtgctttccccttactctaatggttttctcnnnnnnnnnnnnnnaaggtatttttaagtcactatccacattttgtgaaactgaaggaccaaggccaacgagaaggggaaaaaagtgagcgtgctgcgtcgtacccctcaaaggaaacaaccaaaaatgtttctggattttattaaagataatgctggattctcgttccccatagtaccaaagatgccacacagagttttcttgctcaaaagagcgaagcaattaatctagaggaagagataacgatgtcgaacgctggtaaatcaaaaaaattaggagagaggagtggaaaaggagaagacgcggcggcgctgcgcggtctcggagcagctctccaggaaagggttcttgggcagcggcccc

SEQ ID NO: 455560 - DNA, 662 bp, Homo Sapiens
acagggacggggtagaaccagtgctgtgggaactccctaagtgtcaaatggaattttcaagagatgaccctaatctttttccaattgttttatcaaggtgtctgtactaggataaggaattcctagtctctgttcctaaactttgttccaaatggttacgtggttgcagttctccgggaattgacctttagaaggaagacactaaaacatcagaatgtgcaacaacgagagtgagtggtcccagatccacgagaacatcatccgaaagtccagtgccaagtactctgcccccagcgccagccatggtcttatcatttctctgcagcttcttcgtggagacatggaacagattcggagagaaaatcccatgatatttaataggggattggcaattacaagaaaattgggatttcctgatgtcattatgccaggtgatatccgcaatgacctgtacctaaccctggagaagggggatttcgagagaggaggaaagagtgtacaaaagaatattgaagtgaccatgtatgtgctttatgcagatggagaaatcttgaaggattgcatcagcttgggttcaggagagccaaataggagttcctaccactcctttgtcctctaccacagtaatagtcctcgctggggagaaattatcaattgcctat

SEQ ID NO: 455561 - DNA, 410 bp, Homo Sapiens
ataggattgaaaaaatctgtgtaatcttagagaaattatttaacctagttgggtaattaatttctttgcttatacctgctgaactaatgttacctttatctcaggttgttgtaaaagttagacaaagtaatgagtggttagttaactctttaatctctcaatgcaaatgtcaccatctcagaaaaacctcatttgttccaccctatctaatgtgcagtctcttttcacctacctacctgaccattctctattccatataagggtacttatcaccatggatttatttttatttctttgtttactgttgttgttcattgtcagttttcccaaccagaatataagagtcacaagagcagggaccttgtctatcctattcccactgaacctcctgcaagacctgtggaaaagta

SEQ ID NO: 455562 - DNA, 529 bp, Homo Sapiens
tacttttccacaggttacagggtacatttttttcttgttcttttcatgctagtaatttttaagtcaatgccagaccttaaaatgtttatatttttgggtgctagattttgctgtattccttcaaagaatgtcagactttgttctggcaagcagttaagtgacttggaatcagtttgctccttttccaggtttgcctttaatatttctaacagtgggtcaagaataccctttagtccaggtctaattcagcaccaccaacacaatacccttttgaagactacacatgccctgttaattatgagatctttccactttggttcattggagaaagaattattcccagctttgtgtgagctttccctggtctcaagttgtttcctctcatgcatatacatgcatgtacatgtcagtacttggccaaagacttggaaccaaactctaaagatcttgagctcccttgctctctctctgctccttcctttttaccctataaatcctagtcccatagcttctctgccctgtggaaaag

SEQ ID NO: 455563 - DNA, 529 bp, Homo Sapiens
tactttcacagggggtaataccctcttttgatcagacgatcatgaagaggttgcacagatagatttttttaaataaataatgattacagcaacctaaaagaagtgttgttgggggttagaagctcctgcaaattccgaagtatcagggccagatgatgtggtcttagcttaggaaaagagttagtcttgtccttgaacttggctaaagacattcatgtctggttttacttacatgtgaagagagtaccaagcagtaggggtatttccttgttagtactaactaatgtgatgcttaccaagtagtgctgatgggtgacagaccagagcacccagcaaaggccagagaagtccagaacctggcgaggagatgaggcttacactgactgaaggcagaaggcagcagggaggagaggaatgtgccggagcaatggcacaagtgctcctaggccagtgctgtgatgagctgatcagcactcccattgcctggcttgctcctcctgctcagatgccttctctcacctgacccctg

SEQ ID NO: 455564 - DNA, 636 bp, Homo Sapiens
cttttccacaggtaaaatatggacctgaaatgaaagctcttcttcaggttgaattgctaagtatgagtctaggcttctggaggaagaagaaatatgcactttaacaggaagtgaatggagccattggaagagtgtagtgtagatgggtaatgatttcacacacacaaatcttatttattcatttttatgaaatcagatctctgtgttaatatatttagagaggaaaagacgttggagtcaggcagttaagaaagaaagttctaatggtactttagttgcggaaaagaaagacaagagaagcataaggttagagagggagaaattaatttgtaatggacgtgtaggatttcctgtgcagcacccctttctcgtgattcttctgataaaaccaagttctccatttagggattaaatacttgccctccaccatgccaacagtgtggttctaacaggggctactatgtggatggatcaaatctgtcagttccttctatcttcttatcctccagcccaccacactaactggggccaagcaggtgagacataacactagatgggtcaataaaaatcagttctaggattggcattaccagaagaaggaccctttcatctctatatgaagctgtaactctgcaa

SEQ ID NO: 455565 - DNA, 528 bp, Homo Sapiens
tactttccacagggggagaatgctgcagttctcaagtggcagatgatgtaggatgaggaattgaatgatagtggagttggagagttggactgcatttggaacgttcctcaggtagactcaagaggtcttgatgacaaattgggtaattgttttggaaggtgagggagaagaaagaattgaggataattcacatgttgttagcttggagaactgggggccaggtgaccttggccttacccacaggcactgtttggttctggttatggggcaggggagtggacaccttcactttgactgcaagctccatgaggacaggtatcatatgtacttgttcatttctgtttttccagtgactggaataatgaatgaatgagcaatttgttatccctcccaaagtgttctactaatttgatgacaattctgggacttctgtctgttgtacttaattaatattgatcaggctaaacatattatcaggtattattacatttcggagaagtcatttattcagcaaacatctgttgggcg

SEQ ID NO: 455566 - DNA, 776 bp, Homo Sapiens
ttttccacggaatactctaaattcctgtcttataatgtaacgagaaggaaaggttatgatcaaattattcccaaaatgttgaaaactgaactatagtagtcatcataggaccatagtcctctttgtggcaacagatctcagatatcctacggtgagaagcttaccataagcttggcacctatacctggaatatctgctatcaagccaaatacctggttttccttatcatgctgcacccagagcaactcttgagaaagatttaaaatgtgtctaatacactgatatgaagcagttcaactttttggatgaataaggaccagaaatcgtgagatgtggattttggacccaactctacctttcattttcttaagaccaatcacagcttgtgcctcagatcatccacctgtgtgagtccatcactgtgaaattgactgtgtccatgtgatgatgccctttgtcccattatttggagcagaaaattcgtcatttggaagtagtacaactcattgctggaattgtgaaattattcaaggcgtgatctctgtcactttattttaatgtaggaaaccctatggggtttatgaaaaatacttggggatcgttctctgaatggtctaaggaagcggtagccatgccatgcaatgatgtaggagttctcttttgtaaaaccataaactgtgttactcaggaggtttctataatgccacatagaaagaggccaattgcatgagtaattattgcaattggatttcaggttccctttttgtgccttcatg

SEQ ID NO: 455567 - DNA, 441 bp, Homo Sapiens
gaggattacttttgagagtctgacatgcatatcataattttatgtcaggtattatagatattttgaaatggtgactgactcttttgaaattttaagttctttagaatgtgacgcttttaatatagcctctggttttagatggagaaacactatgctattgtcattaaaaattaattctatttccccaattgtctaatatatgtcttaaaagatctttcatattgtgaaacatcagagggtacaacctttgttcttcagtttaggtattaaagagcacacagaatactgtgtgattaaacatgtaaggccagataatgcatttgcaaaggttcctttattttaggtttaagcctgcataattgtggtcttaatctcaggatagcaagaaagagaattgtacatgaaagtatttacacaaagttcccaagccactgtggaaaa

SEQ ID NO: 455568 - DNA, 343 bp, Homo Sapiens
ggacctactttccacaggcacaaataattatgctagttttctattcatcatctctatctaagtattccacatagtatttcaggttaatgaatatttttatatctcctatttccagataaaaccatataaagttctctcaggtcagacgcacagaaacacatgtataagctacatcatcatatatcatcactttggtgttttaagtcatagaaccattgctcactgtagaacaagacagcaaaaatgatgctttatgaaaacagaaagtaaatttcacatctatcattcatcttataaattctttgtatcaaaattttaattaattagagtgacctagtttcct

SEQ ID NO: 455569 - DNA, 472 bp, Homo Sapiens
tattttccacagggcatgggtgtttgtttgtttgtttattattttccgacttgctctgtgacttacaggatttgtattctaaatggaaatttcctattttcacttgtttcaacttctgttaagttagaggaacaaagaagaaaatgcttgagcaaaacgttataatcatggctgtcctttcctatttgcatttgaggaacattgttttgctccgggtttaaagttttctttggttattaaatatggattctttcttatcccttgcccccttttttggtaatccttgatatttcacagctcataataatctacttatcaacagaataatttgccacaaagttcctaaaatgtgcctatccaaatattattattgcacatgtagttaaaagcaaaagcttagaaactcctaagtcctagtggcttctaacaagtgaagaatctgtgcagtggaatccgggccactctctcctat

SEQ ID NO: 455570 - DNA, 552 bp, Homo Sapiens
aagatttgaaacagcattgatgctagacactgcaagttaggggatattttctcaagccagcgtccacagctatttcaattacagaaaagaaaagtgtttcaatcagaaacatagacacgtgcccctccttagattcactgcgtttccctgccacttcctatcaggaggaactctaacaaggtggaggctgagggagggtaggttcccgggtgttccttgctctctcctcgtgccctgcttctcaaatcccactgccaacagaagcactaatccttacaaacaagcgtgtgttcactcactcagcaggaacttactgaaggtctgtgagcagcagatgcacccttcaaggtgctggagacagcggtaacagagaggcacacagtctgtggctccacagaacagccctggtacggaagacagagtcacctatgggcaccgccgaggacaatcagcactggaaggacaagcacaagatgcctagggagaacacagtccatgtccaatcacccagcagctccaaggctttgatcaggcaagacctaattctatcaa

SEQ ID NO: 455571 - DNA, 533 bp, Homo Sapiens
tatttttccattaggtagagagggtttttaaaaattacatgtgatgttttaagtattctggttttgcaacaataactagatagaaaatgtaacaacagatcctattaataatacttccaataatacatataaaatacttgtctaaaagtaaccctcagcctcctgagtatctggaactacaggagtgcaccattacactcggctagtaatttgattggttaagaacattaactataactcgcacattttcctgaccacatttgcttaggacaaaacagtaaaagacatgagtgtagatgaaagcgataagggaactaatcttaaacactgaacctcttttcagcaaattggctttctagtttctcagctctctctttacacctctaaatctctttcctggcaagatcatttatttgccttggttcatggtgatactcttcattgttatactggtgggtgattgttttaattgatagctgtttttttctacttcaggacagatgacactgctggctctgctggctctgatgttt

SEQ ID NO: 455572 - DNA, 511 bp, Homo Sapiens
gataattttattgagttccccagggacattatttgtagaacccagttgctaatggttaggtcagtgaccgctagagacatctcagaaccccagaagctctggtttctatgaaaagagaaaacagccccaacagttggatgtcacttatatcttgaggcagactttttttagcagaaactggaatatatggctaagggggtaaaaaggaccagatccaagagcttggggatttttagatttcaaaactagatagtttcaaactccccaggaaaggaagagagggctactaaaacaatctcctcctcttttgtctagaaaagaccccttgaaaccactattagaatggcccctttgtatgcacaaaaacgacccagattttcttcttatcacttatctgctctcctagaagttttaaaatctcctgacatttaaaaaataaatgacaaggaaatgtttttcccagcctagctctgagaaaggcagtacatccatcccagacctgcctgtgaac

SEQ ID NO: 455573 - DNA, 486 bp, Homo Sapiens
tacttttcacagggggagtctaccaggtgagttgagggggttagcatgggcatcaccacctctgcattcctaagtctttgatggtggtactcatcactgcattttctcctgggatgcagttttgcttcggatttactattttgaccagggttgtgttgccagggaggaagagcagtttcaggagcttgtgtttggccctttctgccatattggctcttacttcacaggtcatagaaccaatgtgagggtatgcttagctgactgttaagcatacctatgccaattttgcatttctcaagtggaggaagttatctcaagaatggattcatggacctgttaagcccagtatgaaacggtgctctaacctgaggccatggtagcatttggggtccccacatatcagtgccagctcagaccttgtagccacagcccttgaaaggtctgagtattttcctttcccagttactctggtaaatagccacagat

SEQ ID NO: 455574 - DNA, 319 bp, Homo Sapiens
tttaggtaaagcaacaagttgtagtgaactatactggggctagtaataactgtaagctattaccaaccctaagtgaaaaggggtaaagggagggagcaggaactaaacctagtgaggtaactggggtaactgctggggaacagaagagataggattcctaccaactgttctaactccaaatatttcttaaaaaacaaatgtgatagtcaagaactttaaaaatattattaatcacctttgtcatgattctccctcttatatatatacaatagtggcaagttattctgagttgtaatatctccaatctcctgtgataacg

SEQ ID NO: 455575 - DNA, 479 bp, Homo Sapiens
cggacctacttttcacaggtttaggtaaagcaacaagttgtagtgaactatactggggctagtaataactgtaagctattaccaaccctaagtgaaaaggggtaaagggagggagcaggaactaaacctagtgaggtaactggggtaactgcttgggaacagaagagataggattcctgataaggtactatttagtagaggaacacagccaactgatgatgacatggcaggaaaggagccagggaaataaataacatcatttcattttcctctcaacttctaatctcccactggtgcttcccatttgttgaacccaaccaaaagcaagagagcaaaggaacctacctcacagagcagggagcagaatagaaaagagcagacagaagctattcagcacagtagggctctattcacaagcacctaggtctaggtaaataaatgatgtcatcaggactcagtctctctttttccctgtgaaa

SEQ ID NO: 455576 - DNA, 466 bp, Homo Sapiens
gagacatggacttgctatgttgcaggttggtcttgaactcctggctcaagagatccccccaaccttggcctccaaagtgctgggattacaggcatgagccaccgcgcctggcctcaagtaagtttttataccatgataggggaaaacctggaaggctaagagatgtgctgttttccttcatgggaccccactttccacagtaaacaactggtataatcatttattacgttgtatgcaaattttgccttagacaacatttgtctggttccttattaataacttgcatctgatctgcttagagttgcttaattataagtaaatataatcccagtagcatttagccttaatctcaagagttcaaaatgtttaacacattctacctgacgggaggtggtgacctcattcagtcggttaagagcctgagccctgtgaagttaaacacctactctggaaactactctggaaa

SEQ ID NO: 455577 - DNA, 381 bp, Homo Sapiens
gagcattgactttcgctctttttgtcccaaatgaatatataaaaaacaaaggaagatatttactttgaaataaacaaaaataaattaaattaaaagtagtaggctatgtagcaggcattattctccaaattaagaggtatagcacagacaagtatagaatgctcctgtttcatggagctttcattcatactgtgcatagtgaaagacagtaaacatataaataattgataattttagatagtgatatgtgatctgaagaaaataagatggaataaaataacaagggactgaaaagtttggcaacaacacttaaataaggttgtcaaggaaggcctctctgaagagcgagacaatttagctgagccctgtcctgtggaaata

SEQ ID NO: 455578 - DNA, 459 bp, Homo Sapiens
  misc_feature (443)..(443): n is a, c, g, or t
tattaccacaggggtgtgatgatatctcaatgtagttttaatttgcatttctctattggtcagtggtgttgagcaccttttcatatgcctgattgccatttgtgtttcttcttttgagaaatgtctgtccaaatcttttgcccgtgttttgattggattattagcttttttcctatagtcgtttgatctctttatatcttcttgttattaagccctggtcaaatagatagtttgtaaatattttctcccattctgtgggtatgtctcttcaccctgtggggtacaaaagttcccttttctctgcatacttgccagcattttttattgcctctcttctggatataaggtatttttactggggtgtgatgatatctcaatgtagtttgaatttgcatttctctataggtcagtggggttgagcaccttttcatatgcctgatagncatttgtgtctcttct

SEQ ID NO: 455579 - DNA, 882 bp, Homo Sapiens
tatcgtgtcggggttgggctagcagttcatgagaagttgtgcacccagaaatgcggcctctgcataagaagctaattgatcagttccagatgatgcgggccagtctctaccatgagtttccaggtttggataagctaagtcctgcatgttcaggcaccagcaccccacggggaaatgttctggcatcccatagccccatgagtccggagagcatcaagatgacccaccggcacagtgaagcaggaaacatggtgatgctgggtgacggctccatgggtgatgctcctgaggacctgtaccaccacatgcagctcgcgtatcccaaccccaggtaccaaggctcagtcaccaacgtctctgttctgtcctcgtcccaggcaagcccttcttcctccagcctgagttccactcactcagcaccatcccagatgattacctctgccccttccagtgcccgaggctctccctctctgccagataagtaccgccatgcccgtgaaatgatgttgttgctgcccacataccggtgaccgcccaagcagtgccatgtatccagcagccatcctggagaacggacagccgccgaatttccagcgagccctgttccagcaagtggtcggagcctgcaaaccctgcagtgatcccaatctgtctgtggctgaaaaagtctcctctccaccctatcccagcctcccccacaagcccccagtcaggtctggacggcagcaactctacgctgtccggcagtgccagcagcggcgtgtcctccttgagtgagagtaactttgggcactcctcggaggccccacctcgcactgacaccatggactccatgccaagtcaggcctggaatgctgacgaagatcttgagccaccctacct

SEQ ID NO: 455580 - DNA, 470 bp, Homo Sapiens
  misc_feature (244)..(244): n is a, c, g, or t
ggctcggtacctacttttcacaggggtcggagtgcaggcctggtgagaaaagacctgtatttggctcatctgcagttgagaccatttagcggcactgcagaagaatcaattaatttaattcagttaactttttcttagagaataatctggattagaaagagaatgggcccaggggggaaatccctacagatcaggaccagtatccaatttataacggtgctttgtgaaccagtcttaagtaatncggagttttcttttttcaccttgtaatatgcagttcagttgatcgaaataaaaatatctattcattgtccattttggctggtccatcatgttacatataatacatctgatgcactgtcttcaactgtgctacgcaagtttgcaaagatgttttagctggagtcccatgcaaatttcaatttcatatttctaagtgatcatcttgtttctgagtttttaaaaattaa

SEQ ID NO: 455581 - DNA, 219 bp, Homo Sapiens
gttgtatgtacattccacatttctgtttatatttctttatatacattgacaggagttcacctggctacctttaatccaggctcatgccacaaggttcatcctagttttctgcctttcgcgtttactattctcctttcaccagtgagaaacccagttcccctgccctccacatactgcctgtgttgtcctgttgtccctgtgaaaagtaggtaccgagcc

SEQ ID NO: 455582 - DNA, 551 bp, Homo Sapiens
gtataatatcggtcgcatctccttctctcctgaactacagtggacaaatgccgacagaacaactcgagttaaaaagtgggccatgccggctgaaacatcgttccaatgcctgtgatttggctgatctagactctggctggtcatagttacagctctgtcccttagttctcatctggggtgcagactgtattttgagcaaaaatctcttcttcccaatgttcttttgaatgtgaccttgccatagagaaaccagcttgttctagttttcctgggactttcctagttttaaaatggaaagacccatgtcatggtaaccccctaagtcatggggaaacaaagaagttttatcactctaccttaccattttcctatgaaaagggatagtctaattcctttcttctacaatcttgtctgtccttaatgacagccttgtgccagtagaatgttcccaaagtgatgctatatgacttgcaaagctatgtaaaaaaggctgtgtagcttctactatttcttggaacatttgctgtttagaagctttcatctgggacact

SEQ ID NO: 455583 - DNA, 584 bp, Homo Sapiens
aactttcccagaactgaactggtccagaatgacaggtatggtccccaacccttcataaccttcctggtctgctctccaaagctgacagactgaatctccttgccacaatgccaccttccctgcagagaggatctgatcggtaaacgtgatgtgtaaatcaatgtgtcataaatcaaattctgattcaaatgctctgggggccagctacttaaatatttaatggaggctttaaaaagttgagccccaaatcctttgtgcaatgtgaacaatcaaatcctaatcaaagacacgtcaaccatcccccgggttgaaataatgggtgttcggcagatgggggctgcctacaaatctgagcctgctgcctcatttcctctagtcaacatgggtagtaaggggattttagtaactccctgaagcttcccagggcttgaattcccccgctcaagcatttcccctccacccactcactccagctgtgtttgttttaattttttgctctcagcctgacacctcagacaacagcagttccttcttgccttctcgtggcaactgctcatgcaccctgtgcctgtggaaaagtagtc

SEQ ID NO: 455584 - DNA, 464 bp, Homo Sapiens
cttttccacagggcatccaggtctctgatggtctgggtttactgagatgtaaaacttttggcaaaactgatatttttaagccattctttgtaaatattatttctgctaactgggtttttgatagactctgggaaataagcaattaaaggttgttttggggttctcttgtaagagacccaaaggaggcattctgagtaagtgatcttggggagactcacatacttaaaaatcaatggagtgtggggaaaggtggcaggactggtgatattttgcaaacattgagggtccctatactgagtgctttttggatttgcttttctaattcaaccagtcagccatagaaaattctcaattgcactcccaattatattatgatttagaataattagctccttttgaataccctagaatgaattctttaattgcaaagagacctgtggaaagtaggtaccgagctcgatcta

SEQ ID NO: 455585 - DNA, 455 bp, Homo Sapiens
tggacctacttttccacaggcacatcaaaggagtcgctttttcctccttcattgtgaatggcagcaaaagaagaggaaatctggaaatataataatttggtttgcctgaacactgaaatggaacttgagaattccttgggctgtcagataatttttgttaaagattttttttaaaaggagtagttaatcttctaataaatgcactaatcatcagagaaaacaaggctcaagataaaaatatttgcccttgatgagttccctccattagaatttataacacagttgaagaggcttacatgtgttattttgattttaatagaaagtctaattccaaacataatttcaatcagcatatgtgaatgtctcttcctatctttatctataaaaatgattagaatatacagcaacacatagaacattccacacccatgttcagctctgttttcctggcagta

SEQ ID NO: 455586 - DNA, 470 bp, Homo Sapiens
ggagctcggtacctacttttccacaggtacttttccggggtcaaagaaacatgttggacacaccactggtgacagagcaggagtctcttaaccccggcgtggttgaggcatgccgttctggtgggatctggggtcagtcaggggtttaacagtcgctcctgcttgcctgattgagacagtagttaaggcagtgacaccaaactaggtctcaggaatgtgtcctcgttagaaagactcactaatggttgtgggtgggtggcccatgagtccttctgggtggtggcgagaagtaggggaccctttgggctttgccctttttggtcatacggacttcactccacagacataattgaaccgttgggtttctgcagccaaattcaaatgtcactaatcttggtcacccctttcatctcttgggtcctctgtaagttatagctatctgatagtttactgaaaaataaactgaaaat

SEQ ID NO: 455587 - DNA, 535 bp, Homo Sapiens
tacttttcacagggaccccaaagtataacaaattctgctggtaatttaaactttaagcggataagcacaccagaaatgctcaatgtcctatacagataaactattcatactttatatcttgtgtttttaaagtaaattttatccacaactacatattgcccaaatagtagtaacatttttgagttattggatgtaaaggtactttgagaggttaactgtttcctaagttacaagagaaaatactgccaccagctgacttgttttaatcccatagctatatttctgctctaatctccagttttaaaaatgatctgctaattacatttctctacacaccaactgaaaattaccaactgaacattttccttgttgacagtttcccacaagatgaatttgatttatcaaaaatacagctttctgaacttagtattattgacatttacttggtgcagttaacttttttgttaaaggtctgttgtcaagcatttaagtaatttgtagttgtaaaaagacctgtgaaaagtaggtaccgacc

SEQ ID NO: 455588 - DNA, 911 bp, Homo Sapiens
catgagccggacctacttttccacaggctctgaaaataggtagtgtcagtgtgccgatccagagctagcttggtgtacgcagtgtcacctctggagaagtctgaagtgaaataccacatcctcccataaatggttctctgattaagctgatcctttctgccaacttctctgtgtgctcttgagtgggagggacattttctacgaatgcaattccatagagcagaaagttttgcagaaacttcttcagtccctcgttggtttcctaagaagctctggcaaatctaccgatggaacttgggcttgctggtagatttccagcattcccatagtattctaggctggatgactttttgtttctgcccttcatagctgtttttcaccagccaattcaaatcatatttagtcacatgaccatctggccaagtgaaaaagagtgtggtctcatccagacgaatggtctttggcttgatacataaatccacactggcagtatcccagctgcgctggtgagtcttagagttgtagcacgatgctgagcggcagtggtctcgaagccagacgtaatcaaggcgcatcacggtattagcatatttcagctcaaaatgatcttcatgttgctgccaagcacaagtcagagacttggaggctgtatggtgccaatggacagctaaaggaagtaagctttcgaagttgggctgtggaagggccggatatatgactcctcccttcagcaagtcctgaagcctgctgtgtaggtgggacaatctgtggtaccacatcctgtgctggaggtcgtgactgctaactccgcagagtgggcagaattccaagcaaggagagtctcgggaggcagcctttcacccgccttttgccttttcacccccaaaactgtcggccccacgctcccctcc

SEQ ID NO: 455589 - DNA, 487 bp, Homo Sapiens
tacctacttttcacaggaggaggatgttcttgtttttgtagttattggaaattttgaaagtatgtgggattggccctaatggtgaaactaatgttcctctttgtttttagtggttactgcagcttcttttcacactaaagactctactaatagaaaacctttaaccaaaagtcagccctgtttgacatcctttaattctgtggacattgcttcttctaaagcaaaaaatggaaaagagaaggaaattgcaaaactaaaacgacccacagcacttaaaaaggtaaaccaaaatctggtgggatatttattttataggatgaataaggattttaatctgttttgtaaaagtaggttgtggtgtcttagccaacagattgttgtgagaagtattcatacacatgaatcttgacgataatgtgttaatttgaagctcaggatatcatcagtatcatgactatctttctgtgtagaacggggccctgtggaa

SEQ ID NO: 455590 - DNA, 606 bp, Homo Sapiens
cctacttttccacaggacaaggagttttacctttgccacatcttgagactgactgacctggcagtttgggcatctgccctggtggttagcaatgaactacagagaagccactagcatcatattactgtggctacaagtttgctctgggaactaaacatttttaataaagtgtcctgaaacctatttgctgacctccactgcatttagggaattgggtgtgtcttgccagagaaagaccaatagcctgggttaggccctttggatctgggtcctcaggaaccagcaaaacccatattaatctaaggtagtctgaaatggaatgatataagtggacattcccaagtctcttccagtcaactgactccttaagagttgaaggccttggtagatgcaccttcttgcaatcccttgaaagaccctgctgtatactcacatgtcacctctttgaacaactctagcttgccctccaccaacagttttattcacagcagctcaaaaaccctctcagtattcttacagctgtgcttagaaatatcagctgaataaacactagagatgacaggctatcttttgaaattcagcttatgaaggatggaaatttcacaa

SEQ ID NO: 455591 - DNA, 516 bp, Homo Sapiens
tttttccacaggggaaatggaaaaaacaagagcttgtatgttaaggcaactgatacttctgtgtcgtactccagcatgtaaagcatttggaatttatcattcccatcctcataatgaggaaagaagaagaaatgaaaaatcagcaactcttctcagatgaatcagagagctgaggtcacagggaaaaccacgattccctaaattgagcacataggcagctaaagagaaccacagcttactgaagcagaagctcaggagcagaaattaccactggagccagtatcagggtagaaaaacaaactgtaattgaaaaattgctggaggcatggtgtggacaagcttgatagtaaaaactccagaagagggcagttttagaggagccctcacattttcatgaattttatctccaggagccctactacgttctatagtgaagatctgagaatagtcttcttgtgctttctgcaagtggatggggaaagtagctatcttgaaatgcacctggagcattcttct

SEQ ID NO: 455592 - DNA, 531 bp, Homo Sapiens
tccttggtgtaaggttctaagggtcagtttgtatgttgtcaatcaaccagttgagacagaaacattgacttacttgagtagaagtatgtcagtatctctccgaacaaagttgatgccagaactctctgctcatgtgagtcatcccacagggctaattctggcctgctgcctgtttttgtacataaagttttattggcacacggccacacccatccattcacttactgtctacagctgcttttgcactacaacagcagagttgggtaattgaaacagagactatatgacccacaaagtataaaatattaattttacgggcctctatagaaaacatttgctgattcttgacctagagagtgctttgttggaggtgggggacttgcaattacctgataaagctccaaagaattccaagctctaccatatagcagtcttggcaaacatgtacaggggtatgtgccacatggttataccagactcaaagcaaataaaagacaaagaatagccctctggccgggcgcgatggctcat

SEQ ID NO: 455593 - DNA, 667 bp, Homo Sapiens
ggttggtccctaggctagctctgcactggggagaatcaggatgcctctgggtaaatggagctgtgaactccccttcggaaatgctcccagcacttctggccctcccacacttcatgcaggcactccggaatctgtcaaagaccacctaggaattcaggtttttagcttcttagttcaggactcaaatgtcatcaaaacagtgactcttgaggaagtcttatggaggaaaagtatcaagaggcatctggtctccaaggttatggatccgttaaggcaggaacgatatctgatgtaattaaagcttagcaagcccagggtcataggagcaccccatgactagcctattatctctgcctaagttcagcacatgattaaaactagtgctactcctagagggagctggctttctcgctgcagaggacagcatgtgacatgaagcagccactggagtgggtgggaggcggtctgttccctgatggaccactatctgttctgaattctacaagaagggttctcctccttttttctatctgacgataacctgaaggatataacactcttatcagtaattgtggttcccaacaacagtgagtctaattgggcggtggtgaggttatagagcgttcattggaatcgttgaagggatgacctgtggaaagtaggtacc

SEQ ID NO: 455594 - DNA, 455 bp, Homo Sapiens
gtgggtgtctccagggccacagagttccctctcagtactttacaggggaagttattctctactctacacttgaaagtagagaagaaaagaaacacgtgtgaaagtatttggaagtgcataagtggtgtgtgtaaaggggaatgtcatgttcagccttgtgtttttccttccttcttcctactggaacccgtttgagtctttgttacccagttagtagaagctgtagatctgagtagaagttttcttgtttgtcaaaagagcattaccactagtggttgagagggtgcatttccagagagaaagagggggcagcagcccttttgcaacttttaaacagcgatgagaattctggccctttgtctttaagcattatattaagcagactttgacgtttttgtttgagcattttactcaacattactaaccccttttccttctctggtcctgtgaaagta

SEQ ID NO: 455595 - DNA, 359 bp, Homo Sapiens
cttgttcacaggggaaccccagccatctcagtgtgtgtctccctcagccagctgacctggccgaaggctgttctaggtgccaagaggacccttctctcaccgtggggagcactcggggatggttgcgtttcctgcctcatcccattactgaggcttgctactcatctccctccggggcactctcttacccgagttgagatacctctgcaactgaggggttgactccatgtcatttagaatggactttccagctacatttgtaaaatgtcatgatgctcataagaaataataaatctatgcatttagtgagaaaaatttcaactcaactcagagcctgtggaaagtaggtaccgagccga

SEQ ID NO: 455596 - DNA, 501 bp, Homo Sapiens
  misc_feature (85)..(145): n is a, c, g, or t
ttttccacagggaagccactaaaaaaagataaagaaacaataatggaattaaaatggcatactagaaatatctatttaacacacnnnnnnnnnnnnnnnnnnnnnnnnnnnnnnnnnnnnnnnnnnnnnnnnnnnnnnnnnnnnnagcaaaatggcaggtttaactcctactttatgagtaattacattaaatataaatgaactaaatattaaaatcaaaaggcaacaagtggaaataaatgaaatacaggacagaaaagtaacaaaaaaatcaactaaacaaagttggttctttgaaaagataacaaaattggcaaacttagctaggctgatcaagaaaaaaagaagactcaaagggttaaaatcagaaatgaaaagggaaacattactgttactcttacaaaaataaaaaggattataaggggatactatgcataattataagccaactaattagacaacttagataaaatggaagattccgagcctgtggaaactagg

SEQ ID NO: 455597 - DNA, 326 bp, Homo Sapiens
tgctgggaccacaggcgtgagcactgcaccgagccagaagttttgaatttttacgaagtctaatgtgtctgtttttcttttgctgcccatgcttttggtatcgtatccaagagatgattgccacatccaatgtcatgaagcttttcccctgtgtttccttctaagagttttatagtcttagctctcacatttaggtcttttattttgagttaatttgtatacggtgttaggtaagagtccaactttatatttttgcaggtggatatccagttgttgtgacaccatttgttgaaagactgtcttttccccattgaatggtcttgaca

SEQ ID NO: 455598 - DNA, 953 bp, Homo Sapiens
  misc_feature (880)..(880): n is a, c, g, or t
aaatcggctgggggtaggcagggttatgttttgaatttctgagaccagagcttctttctgtggcattgtaacagctgtgctttgcctcctagagtcttagagagccgtccttgttgtctctggtaaccaccgtggtggtgtttgtggcctcgatggtggttaggagaatgccgacagatgtcctcttcgagtcaaatcggtaatgactcattccagactccaggtcacagaagatgtgaattcaagtatcaagacatttttaggtcccaaagatacctaccatgacatgggcacactcttgttcaacccgcagggatgtcggccatcctccagctcttccagcaggatggtactttcagccccgtcagtctggccgtgtccttcgtgactctatttcttgcttgcatgttggactatacgggatttctgttccaagtggcctttttgtgccttctctgctgtgtggagctgccttttggacgtttagttggccaatgtcctaaaaagctacattggattgggccacatctattcggggacctttgccctgagtggtgcaacggctttcttttgcggggtggtccgcatgaccatcagcctcacggtgatcgtgatcgagtccaccaatgagatcacctacgggctccccatcatggtcacactgatggtggccaaatggacaggggactttttcaataagggcatttatgatatccacgtgggcctgcgaggcgtgccgcttctggaatgggagacagaggtggaaatggacaagctgagagccagcgacatcatggagcccaacctgacctacgtctacccgcacacccgcatccagtctctggtgagcatcctgcgcaccacggtccaccatgccttncccggtggtcacagagaaccgcggtaacgagaaaggagttcatgaagggcaaccagctcatcagcaacaacat

SEQ ID NO: 455599 - DNA, 489 bp, Homo Sapiens
  misc_feature (329)..(379): n is a, c, g, or t
cgcggcgaggtactttccacagggtactttccacaggttagataaatgtttagtgcttatttctcatatttttaactgctatacaacttagaatcttaaacttttttgtgtgtatcacaacatagaacagagatttactatagttgtgtatcatatgacgtatgacatgattttgaaatagagacaacaaactgatttcaaacctaaaactttaataagtattgagtaattaccagaggacaattagtccagaactgtctacattgctcactcatgggatttaatccagtggacaattttgttgttgttttgagactggatcttgcccnnnnnnnnnnnnnnnnnnnnnnnnnnnnnnnnnnnnnnnnnnnnnnnnnnntgtgtccaggctcaagtgattctcctatctcaaacaacccagtagctgggactataggtgtgtgccagcatattgcgttttgtttgttttgtctgaatcattggtcaact

SEQ ID NO: 455600 - DNA, 459 bp, Homo Sapiens
tacttttcaggacattgctcaatgggcagcaagatgtaaactctggagtctacaggtgaaaccatgtctttctgagaagtaatggggtagtgccgtcctttacatattgcttcacgcaaagtattatgagacagtggcgtctagcacttgtcttagggtttaataacatgaaagtccttgccctcagaaaaaaatccttaccatgtaccttgttttttcctgtaaacatgcacactgctggctggagtgtgacccccccacagcaaggtttcccaagggttctgaacttagagagttggcatctgcagcactgattatgatctttcctatatgagttaatctaagtggagggatacaaagccatgcttgagctgagtaggcccaagatgcagaagcagtggctgcttctctctctgttcccttcctcacaacagcaactgaaggggcatgtatgtggca

SEQ ID NO: 455601 - DNA, 509 bp, Homo Sapiens
aagggagtctatttgcgttaatctgtttgggtctgtgacattcctgagctatttatatctttttcaagttttggatagttttctggtattatttgaaaaagctttctacccctcgttcttgcttaatttcctcttgaacatcaatatttcttagatgtggtcttttgagatagttttctatatcttgtaggcaatctttggggatttcttaaattcttttttcttttctgactgtattttcaaatagcttgtcttcgagctaactgattctctttgaagtattctgctcttgaaagcctcatgaatttttcagttcagcaaatctatcattgtctttttagggtcagtcaccggttccttgctttgtgtgtttggggagatcatggttccatgtttgctattgttttttgtggatgtattaatgcatgtatctttgcattgaattattagtaatttattccagtcttttctgtctgtattgttttatttttattgaatatgtttgctta

SEQ ID NO: 455602 - DNA, 465 bp, Homo Sapiens
tatacccaattaaatctcatggacttgtctatattgccagagtgaattgtttattataatttggtggaaacagtcctggtctgctttaaataaaattaatcagttaccgttttttgaagtggaggtagaggcagtagttataagtgaaattacctctgtaataacctgaatagaatcacattgtttttgggagcaaagcagtatgttgtatgttatgtgcaccagaagccatgagaatccttttctaatcccagctgtaatgtcacctggctgtgtcacctaggcaagtcaccttccctctatgaggtctgtttcatcatctaatgacaaagttggaccagttgatcatggcattacttccggttaaatgttctcttatatatgattttatttcctagctagtcccttctctctcctggtgccatgtttccaaaatcataggacagtcctagacttactgcacag

SEQ ID NO: 455603 - DNA, 346 bp, Homo Sapiens
gggcagcctgcactggagtttgagtcagggctatctcttgtgtgttgtactccagtcagggggttccagcagcacccgcaggctctagagctcaatgcacagttctttttgtttcacctgcagtcctttcttctccaggatatgcacaggcctccagggtctttcatggctcagggtcagggtggctcaagtgccaacccacatgttgtcctccaaatattcccttctatccctggcatgctgttgctgagctcaacttttaatttttgactttttcctttgtaattaatctctatctgggtttctctctttctctgtgccatttggtttcacttaattagttcca

SEQ ID NO: 455604 - DNA, 630 bp, Homo Sapiens
tacttccacaggcgccatcgaaattattgaaatgaaaggggtgttatgcgggggctgttgtagacttgcaggaggctggccttgcccaaggaggggcagcactcattggagtccggggaaagctgggctcagtattgccccatcttctgttttctctagaaaaatcaaatatctggttttctagtgaaatctctacctgttgaagtcacatttttggaaatactgtgtgggctagaacaaaacacatctgggagctagtcatcttgattctagggcttctctttcttttttcacctcaccatatttctctatattcatttgccagcatttctttgtctccagggtcacttcttttccttcctgtctcacatgtccagttgttttctctctaccttttatctgcataaaaacattcaggatgtcccccttcctaagcacatagctaatgactcctccttctgtgctactccccgtgtcccgtcttttcttcgttctttcatactgagtttataaacagtgaaggggtctacgttcattgctcttacttcttcactccttttaacacctacagtcgtttgtcttcacgacttctctgaagctgtctcatttcctactagcagaagtctccta

SEQ ID NO: 455605 - DNA, 449 bp, Homo Sapiens
  misc_feature (92)..(92): n is a, c, g, or t
cttacaaagattgaggtggaatgacttggactcttcttttgtcctcctccctttagtacagtggaacatgtagtgagttccctgacccatcngttagtggttactaaagacactaacatccactgcaccactgcatttctgcttcgtgtatttggagacaagaagggaaaacattcttctctcatgtcctttcaaaatcatgtataccttcagctttctagccatgttttctttatatcttggtatatttctgctggagctccttcttaaaaatctcattaaaaattagcagaatttgacttgtgtggcattttctctctagagtaagatgtgttaacttaaaggggccatataattaagatctgtttgtgtattaatcttttactctccttatctgaagcatagtactgttttgaattattcatatcggtttttcctgtggaaaagta

SEQ ID NO: 455606 - DNA, 244 bp, Homo Sapiens
ctcacaaacagtactcaatacattcttgttcaatctaagaagaaacacaaaatgtttaagatgggtgcatttgtgtgtctgtacttcattattattttgacaaatctagtcggtattataagaataacaggatgcacattggcaaacccattttttatctcacttagttaaataaaataatccagttgtctgacacataatgattttatcaaaataccctgtctttgatacttctgccctgtgg

SEQ ID NO: 455607 - DNA, 477 bp, Homo Sapiens
caagggcaatagaaaaccaatgaagtgttgtaagcaggaaggtgacacgcagaattgcatttttaaaagatcactatggatctagcatggtaaatagactgtgggggcaaggatagacacaggggagccagttaggaaggtatttcggtagtctaagttgagatactgatagcagtgaagtggagagaagaggacaatctggagacttcggagttagaattaacagcacctggtgattcaatgcaggaggagaaagcgtcaaagatgattccttaccttttccttggtagcgctttcaattatgactaagtagttatttgtgcaagtatttgtttagctgccttccccacaagattataaacaaccctaggacagggatttatcttgaacatcttacttaggtacatgctgtagcagggtgtgtggcacatagcggtgtttaaaaacgatgtgttaaggctgggcgcggtggctcat

SEQ ID NO: 455608 - DNA, 529 bp, Homo Sapiens
tacttttccacagggtagggggatagacagactcagtgagagaggaactggatcccatgtcaattattgagacagattcctcctatggcattgttttttgatgacccagtctctgtcccttatatcagagcccaactctatgttaacgtgtcatgcttcatgataggcattgggttgaacctaatagccatctggagatggaatgagcttagcacagggaatattagtgagcctgatctagttacttcagaggaactgtgctagggagataggatagtgaggctgattattttgggaaaacatggaaagttgggttgaataatttagatttgttgccatagagcatagggactcattatagacttttgacctgaagaagggctggttccaacccagatccttctcatagaagatcattccttgggtacttcatttacacttgctattctttctttttagaatactcttttccctagctgttctgtgatgctctctacttcctcagtcctgtggaaagtaggtccgagcc

SEQ ID NO: 455609 - DNA, 572 bp, Homo Sapiens
ctcctctgtcccttctatttatctttcccgctcgtcgtttttgctggtgactgaatagttagttcccccttagtacagatcattctgttgatttcagtattcgtacgaattgtccttccgttttcttggtttctcagttccatgttgtcctgtcattcacttgttatatctggctatacctgggatcctcacttctgtagacacaccccagaccagctgtcctcaaagtgtggcccagtggcttctggggggtctctaaatactttcagaaggtctgtgagaccaaaactattctcataatcatataaaaacattatttgccttttggacttttattctgttatgagtgcatactagtttttcagaggccactaaaggaatttgtacttgtatattcttgcattttaaacttttctgttttaatttctaatatggtaaatattgagaggcatgaccaaaaacttttgggagtcctcagtaacttttaacaatgtaaagcagtcctgagaccaaaatgtcggagagctgctgccctagactttaccattaccataactacaacctgtgaagta

SEQ ID NO: 455610 - DNA, 588 bp, Homo Sapiens
tacttttccacaggatgtgaccctttgtggtttgaggctacacacactcccttgccctcagagagaactggtcatataactaacataatggttataataactattattgttttattagtctttaactggcctgcattctaatacgtggtcttttccacgtttttaaacctcaaaccaaacagggttgaaggaacagactaccaagattgatttaatacaccatatgctaaagattaccctggaatatctatctggttcatgaattaatctggcttagaactttaacttcgaatgacatgttagtatgtggcttgtctagtagaaacattatgtccttttctctttgaggacttggtttcacagtaattttattattagagtagtcacataatgttcactttatattttacaagaatattgagccttgaagtagtcaggcgatgaacaagcacagagcataagagtaataagaattgtatccagcaatgtgaaggcatcttagttaccaagaccaccagcagagaacaataatctagtttgatttaaatctcctccatttcctgtgcacgatcaggaagcccaacttcc

SEQ ID NO: 455611 - DNA, 577 bp, Homo Sapiens
tacttacacagggaaagaatcaatgaggaggcacttcaacccagcagaaaggtgctcagacacggagccctcaggaagaagcaacagagcagtgcttgggcttcagtgctagccagtgttggcaggggaggaggttcccgaggtgcccaaataaccaagttcaaggcaagtgtaagaaaggagctaggagaggaaacataagtgaccgaaagagaaaccaaaatgctgcctgtgattgtattacagctggaagattatggcatgatttctttttcgtctgttctcccagtttttgatatgaggtcgttttgtatattcctttaaaaggagcaaatgtaatatactttatggaacactttcaatagtgcaaaatatctagaaggcatcaggaacttgtcactcaagacagttctgaaatgggcgcacagggagaaaattagaggcctggcagattaactcagagaggatcagtactttaaggtagtaatggcgagggacagggaggggtcctctcatgacttcttgtatcaatgtcagagaccactcgacacagattatgcgccagagatcaaggtca

SEQ ID NO: 455612 - DNA, 145 bp, Homo Sapiens
gtcctacttttcacaggggggaagactctatacagatatgtatatatcatggttcaagtgctctcccaatgaaatttgcattaattatctttattcgtcccttcttacattgctacaaagagctgcctgaggctgattaatttgt

SEQ ID NO: 455613 - DNA, 615 bp, Homo Sapiens
  misc_feature (587)..(587): n is a, c, g, or t
  misc_feature (605)..(605): n is a, c, g, or t
ggcatcattgctctgccttctacatcgcctcctactacagcaagtgaaagtgtcctttctgttgttgaactgcacttgatttaaacaacctctaaactctattttgaaagctagtgtggaatggtaagtattaaaccaagcaaaacttgaccctctgtccccaatgggatcttctaatgatgctttaggagatctcaggctatggtactgcccacatgctaatactttctacccaaacctagctcactttacaagaatcacccctaaataatttccactcttctctgttctaagactattttgacttaacttccttgccctcactccccctttggttggtttagctaactttatgacttactcatcataaagttagacaagtctctgcttttttaaacctccttgggctactgctcagctaccatctttccctaaagtgtccccattgaaagtttgcatctaataacgggaagttggccaacatcttggacctcttttcaggtatggacaatggggtggatgttcgggggaataggaggaaaaacatggcatggaacaaaccaacataaaaggtttggcaattcggnatttcctcccctgtgggntggacatggt

SEQ ID NO: 455614 - DNA, 709 bp, Homo Sapiens
gaggcaccaaggaggggtgcagcttcttgtattgggagcgctgacctcgcacagtccttgggctccagtgacttcactcagtgtttatctaacatgagtgagtgaatggtgtttgttgtttttttggcaaaggtcccaggggttgtcgggtacacaggtcctgtctttggccataagcaacctgaaatgaggcttggtctccttcccaggatcccacaccatgtctcacatggtagaccccagtgggaagtatgtgactgcctgactcaggtgcctctcgtggtccaagccatccctgccctgtcccttccctggttgtcgccagacctggagcccctgctccttcactttgcagcctcctcttctgtcaccaactgggaacccacctcttcctgaaagtcctcccccactgactcaccggcttgccccgagtttgtcaagaatgtcccagtaaccaggggacacacagtgaagtgactgaggggttaccttggagttgatgccttggctcagatccagctcccctgttttcttcctctgtaaccttgggcaacccaacccctctaagcctcggtgttctcatttgtgaagttgtggtaataatggtagcttcctggtagaattattttaaatattaaattaatcccaacatgaaaaggaatggaacagtgcttggcacccaggaagccttcaggaaatgctatctctt

SEQ ID NO: 455615 - DNA, 467 bp, Homo Sapiens
tgtcaagctggatgtagaattgtcctaaggcagttgaccccaccttccaacatgttttcactttatttgcccctccctacatttgggttaggttccatttggatttgcagcaataatgactttatttctctcttggtcaggatttggcacataaaatccttttattatagaactagctattttagttacatagtaatgtaactaatggagagatttatagagaattttgtttttgctgtcatatatgtccattttggagacagatatgatagaactagaaattaagttgcatttctgcaagtgccatttgaatgaacttcaagtatcttcttaattattaaattttctgatgaaggcattgtaacaaatatatagtattattacatctaattaatatttggaaatattaataaataggtattttatttactgtaaaaagtcaaacttcattatgtagataatctatt

SEQ ID NO: 455616 - DNA, 510 bp, Homo Sapiens
tacttttcacaggggagggtctgagggtaagtgccaagatggagaaaacacaccggcccctcacagagtatctcctgaggaatgacaactatctagtgggcaaggagggcttcctgcatagcagagggcaccccctctgatcccccaacgccaagggaaaaaaatcactcttcaccggctcccctgagccaggacaggctccactgcagccacccaccttataattttccgcggatgctgccttgatcagatagatctgaagatgactttaaggactacaagcaaatctcaagggaagaattcagaccttgaacaacagccttgaactttttcagggttagacaagtactcccctgtggagtttctgcccttatttcttcgttcttctgttaattcttccatattttaacagaacacagacctgccgaaacgacacaggatggcgctttgctttttgttagttctccaaccttccaaacccttggggcacatgcaagccctgtgaaagta

SEQ ID NO: 455617 - DNA, 532 bp, Homo Sapiens
tggtacactagatgtaagaaaataacaacaaaattagggcccacatctccctgacttgccttttttagtattaagagttatgtttcaaggaaaaagtcacttcactcttctgatctccattttattattaatagaagaaaatcgctgcatagagtgacctgaaagcctccttctagctttaacaatctaacggtataaccagctcttttagtcatgaagtgtgtacgaatgagattctaccacttttctaaatgatatcactctgccaagcaactgggtcttcatacactttgtaatcaataaatgttttatgttgcccctttagtatctatagctattccccaaagttatgttacatgttccccttaaagaggatgaatcattctggcccttcaggatctgatattcttcttctctgtcaaatacaattatttgtaattagaagcctggctccaaaaacagaaacttagatgaagaaaaaataaatgttaccagcatagatttctacatccataagtccctgtgaaaagta

SEQ ID NO: 455618 - DNA, 570 bp, Homo Sapiens
tacttttccacgagggaataattttggtttttttcccacagcttcagaacctttgtgataagctcccaggtatcacttgtggcacacgacttgccagcttgttatctgtatgaactgagctcaacccctgttagtcgctgaaggccttacattatttacatatcgtcatatccctcacaaggccaaacacggaagcttaagatcagtagatgcctggtaagtaagtcgctccacagagtgctggtgacaagtggttgtcttttcccagaccctctgctccctgttcatcttcctcacctaaacattaagagaagcaaattccacgatcttgtaatcccttttggatacaaatatgtatgaagctaaatttgtggacttttcagaagtgtcagccaagtggcgacaggcagcatgtttggtaaaatctttctatcacagtaatattagccagtcaggacagagagggggctgtttcagcagaagccatgtggctgaacagggtgtatatgggagccacagacagacccttaggagtgttagcaatgccacagacattagtagccagaccac

SEQ ID NO: 455619 - DNA, 504 bp, Homo Sapiens
ggcttaggatcatggtctggtagttggtcaaacatttttgtcacccaaggccgttgtatacaataggcatgtagcacagttttttgttgaaacaggttgcacagtatgtttagattacccttaagttctccctccttatgacatatttggtgtttcacaagcattcccaatcagtaaggtcccacaagttctattatgaacgtaggtggtttatagctgtttcttcttctccctttccctgtctccctttcttttggataatgtttttaatggattcaaccaaaaattacaaggcaaacagcacttgcctgcgaaacttatgctatggtagagtcatttccatgacaattagcattatatgaattgcaagtaatgtagtaatgtcagcctactttatacgtttccgtgctgtcaaacattaaaacaagaaacaggaatttccagttcagacatgatggcatagacctattttttcttgctcctcccactgaggataactgtaaa

SEQ ID NO: 455620 - DNA, 451 bp, Homo Sapiens
ggagcggtccttttcacaggggtacggtcagtatttgataactgagtgttctagtttattttaggtgtatcgttttcttattgtaaatgtctagctaaactttctttttaagatattgaatgatagatgcccatccttcaggtttcgtttaagcgagaatccccattctcaaatgatataatataaactttccaaattcttaagtagatcatctgagattgagagctaagtttagctttctcaaagatattttaggcgccatgacacctagacaaagtggtatattagattctgattaatttggtcctaaagcacctaagaatcattcttactttcttatccacaggggttattaagttttcacattaaaaaaatccaacagtgaataatactgcattggggttactgtaattgttaagtaaaataagaaatacaaatctttagttagatc

SEQ ID NO: 455621 - DNA, 471 bp, Homo Sapiens
cagggggaaactaagactgagaaagtgactcacccagagtcacgtggtttgagaagtggtggtggagctcactgctcaccctctcaccaggagggtttcacacctgtgcagccttctggcctgctatggctaaagtgtctcttaccagttcttacctttcttctttgtaatgtacccacactcaagttcccatattgactgcttcctgcattctgaatttgtattcaaattgtgtttaacatatgtaaatctgtgcttattttaaaaaatgaattttactgcattttgaaaatgccacacataaactttgagtgtcattcagctcttgttatttctatagctgcacaacactattccttccttactttcatgaactgatcttttcatccagaatttttctgacacccttgtttttaagcgtcacggcttgctgaagcaaagtggtggaatttaaatgttgttgccttcaag

SEQ ID NO: 455622 - DNA, 306 bp, Homo Sapiens
gcgacttttcacagggcaccactacaaaaatgaacaaagtatacagtacaaaacaagtgatttaagtgatacacttgaaaatatctatttaacacaaaaggcagcactacaggactagaggaataaccaccccaacaaacaatgagacacatagaaaacaaagagcaaaatagcagatgtaaattccactttattggtaattatattaaatggaaattaatcaggcactccaaacaaaaagcacataggcagaaggggtaaaaaacataatccaactataactggctacaagagacaactgagatt

SEQ ID NO: 455623 - DNA, 448 bp, Homo Sapiens
ctagacaactataccgatcgcattcaggtccttcgcaacatggtacactgtgcagacctgagcaaccccaccaagtccttggaattgtatcggcaatggacagaccgcatcatggaggaatttttccagcagggagacaaagagcgggagaggggaatggaaattagcccaatgtgtgataaacacacagcttctgtggaaaaatcccaggttggtttcatcgactacattgtccatccattgtgggagacatgggcagatttggtacagcctgatgctcaggacattctcgataccttagaagataacaggaactggtatcagagcatgatacctcaaagtccctcaccaccagtggacgagcagaacagggactgccagggtctgatggagaagtttcagtttgaactgactctcgatgaggaagattctgaaggacctgagaagg

SEQ ID NO: 455624 - DNA, 381 bp, Homo Sapiens
actacttttcacaggggtaatttacttcaacaaattatctgtgtgagtcaaatagggaattttacaaataaagaaaaaggaaaccattgaaatgactggatctcatttgacctttatcaaagttttaccagataaaaagatgcattcaaacccagaaagtataggaaaagaatatcaattcccaacctcacttttcctccctgtgacctagatcaagtgggaactgagcccagggtaactttccatcaaatcaccaaaaggcattaacaggactttttattatggtttatagtaaatataataagttttgcagattcatcttcttctagaagataacagcttgaaggaggtaacaaaacgaatattaatcctaaaccaggt

SEQ ID NO: 455625 - DNA, 389 bp, Homo Sapiens
tggcaaataaacacataaaaagatgttcaatatcataggaaaatgcaaattaaaatgaaaattgttataaacaacctaaagtctagaagaaataaaagtgtttttaagtgacaataggatacactatatgtctattacaatagctaaaataaaaaagcagtgagaacactaaatgccaacaaggatacagagaactggataactgatacacattgttagtggtaatgtaaaatggtaaaaccactctaggaaacaatttgacattttcttataaaattcagcacactaatgcaatatgacccagtattgcattcctgggaatttaactcagagaagtaaaaactaatcttcacacaataatgtccatataaacctttaaattactatta

SEQ ID NO: 455626 - DNA, 160 bp, Homo Sapiens
tacgtctaataccctattactcatttttcctgatctctcctcctcccaccttcctccctccaataaggcccagtgtgtgctgttcccctccatgtgtccatgtgttctcatcatttagctcccacttaaaagtgagaacatgtggtatttgtttttttgt

SEQ ID NO: 455627 - DNA, 599 bp, Homo Sapiens
  misc_feature (112)..(150): n is a, c, g, or t
  misc_feature (152)..(199): n is a, c, g, or t
tacttttccacaggttaaaggacaggcgcaaattgaccagagctttctatgatccaactcaggacctccttggagcctgactgtgggctcacactaccattcctcagggggnnnnnnnnnnnnnnnnnnnnnnnnnnnnnnnnnnnnnnngnnnnnnnnnnnnnnnnnnnnnnnnnnnnnnnnnnnnnnnnnnnnnnnncaatcatagtagccacattccaagtgctcagtaaccacatgtggctaccatgtcctggacagagcagacatagaacatttccatcatcacaggaagttctactggacagcagtaccttagagagaaaccggaggcttgtcacccaggattcgccggttctgaaatgttacctaaggagatataaggaatatacttacctctatcacatcacctaacacattgtgttgcttagttatatctcacccccactaggttggagaactccttaagggcaagaaccacacctttagtattggtatcttcagtgcctgtcacttgtccctggcactggctaaatgctcacccactgttggttaactgattaacagctgataggaacctctcacctgttactttcatg

SEQ ID NO: 455628 - DNA, 136 bp, Homo Sapiens
gtatgagccaatgcacccagccccatcccagttttacatgtgagcctcctccaatgcatgactttatatctgcatactgagacccagggtaagagatacccagccctcaagtcctaccatagcctgtggatacgta

SEQ ID NO: 455629 - DNA, 504 bp, Homo Sapiens
  misc_feature (272)..(313): n is a, c, g, or t
tgactttttcacagggcatcttgatcaggacagtactatacaaatagaatgcaagctgtaatgtaattttatattttcttatagccacgttgaagtaaaaacaaacaggtacaggtgttttttaccagactttatagacagtacagttgttacatagtttagatgaatacaatcttgatcgggtctgacgtatatgcacacacgctttgataccatcaccacaatcagggtaataaacatacctgtcatctccacaagtttcctcctgcccnnnnnnnnnnnnnnnnnnnnnnnnnnnnnnnnnnnnnnnnnntcttctgtggtaagaacacttaactcaagacctaccctcttaacaaatctttaagtgcacgatatagtattgttaattccaggcaccatgttgtacaacagatctttagaccttacttgtcttgcatagctgaagctttatacctgttgaacaactctccatttccctggcccctagcaaccacccttcta

SEQ ID NO: 455630 - DNA, 577 bp, Homo Sapiens
ttattttgccacaggttattatgggcttttatccatgggctagtcaaggataaaaaagtgcatttgttgctaaaaccaaaccaaacctcaaaatcctctgtggataattccaaacagttgattgtctatgcatatgttagtccccatacttcatggggtacatgatggagaggatactcctaatcatagggctcattattgaccgagccctaagaaattgccagggcctcggatacagtgaataagataggtgtggcccttgccctttgaatcttacaatctcccctagacacgcagtgctttcctgctggctttcaggcctgtcttggccgtcccagctcagccttcccagtcctggatgtgggataatctttaagcctgtccactgtttagttttctgatgagagcaaacagaggagtgtaacagggattttcttctctctgctggatcaccagcaagagatggggacaagagaaccagaccagagctccctaattccagcttccaaatgttctctgagatgcaaacctagtccacaccccagccccttacccccacaggtcctgtggaaaagta

SEQ ID NO: 455631 - DNA, 389 bp, Homo Sapiens
acctcagcataccagaaggagtgagcccctacagtgcatgtttatttctgaagattaactagagcactaggcaaacactaaattattaagagctaaactgaacaccaataagaaagagaagcaaaattttaaattctaattcaaatgttatactatgatagtgttatgtatctagatagaatttctgcttatatccacttctaatatattttaagttccggtagtgatagggtttggattttttaaattttagtaatgcttactatgtatttatgttgaaataaagttattgttcacaccctgacaccaaaggtcccattctgcaaggtaggattctctaaataggcaactgcattgacttttatgaccccattcactccctgtgaagt

SEQ ID NO: 455632 - DNA, 532 bp, Homo Sapiens
gggctagggaacattctggcgcagtgaggtatgagtgccaggtggtctcagacttcacgcttcattgtgtctcaaagttagttatgtctatcccttggtgtacaggaagatctgatacaggttaaaatctccaattcttgtgtgtctgatttaaccatctcatactttgtgtattttaacatctaatcaattttattacctctcatattactaacacttaagaaatagggttattttcctgttttggaactatctaaaggtaaaaagccagactttttggatttctaaacagggcaaaccagaaatctctgggctgcatcctgggcagacctggatgcctgttgaaggatctggggagttacgaaaactgaacaattgaagtagtggagcgtagaatattttgagtcagggaacttgcttatgttctgcgtcaaggcaaaacatcttttaaaacattacttttatttacaatgagtagatacgtaaaacttacctcacagagttcagctccttgaaacctgacattccctgt

SEQ ID NO: 455633 - DNA, 484 bp, Homo Sapiens
gcctgtcatatttgtttccctgtgtgaatggaaggtagtagggtcaggtgtatgccagtctctgtaggctgctcaatacgctgtgttctcaaggctgtttgctatgcgggccgcaggctttgggcctttgaagggttgaataccatcttttgatttaccatggttgatggcggggaggattggaaactcaggaacacacgcacacaaaaagatccagcaaacgagacaaatataagctaaaatgaccaaacacagcaatacacaaacaaaagaaaaaccaagagacacactgacaacagaagtcaactgaagttggaccagaaaaagagcacggtactgtaaacacagaaaagtagaataaaaaaacgacataactaaagaagtcactgctcaagaacagtcctttgtgtcccagagtcttgaagttcatgatgtaggcattttccaagtgtgtccagttgacctgacagcagataagattggt

SEQ ID NO: 455634 - DNA, 419 bp, Homo Sapiens
  misc_feature (297)..(373): n is a, c, g, or t
tacttcacagggaagagcacattgttttcatagctggttggctcttaatacttccccaggaggctccaggttcaaagagagggtgtctgagaaatttgggaagatgccagcaaagtgaaggttttcaatgacacactccaggatgtcagtcaggcagggagaatgacccaggtcattcataacagaatttttgtacaaaagaggagaaaaagaagagccagtggaaaaaattatgtatgcagagatttcttctttagtggcaggtaaacatttagttatgtaagtaactctcacttnnnnnnnnnnnnnnnnnnnnnnnnnnnnnnnnnnnnnnnnnnnnnnnnnnnnnnnnnnnnnnnnnnnnnnnnnnnnnaaaagatggggaagctgctattaggaccaagtaagtaaaggtcagg

SEQ ID NO: 455635 - DNA, 155 bp, Homo Sapiens
  misc_feature (14)..(14): n is a, c, g, or t
tatttccacagggncagggttattaaaataagctaggagacacatggctaggtaccttccctcaggttgctcttggtcatgttaaagagataagacgtatgtatagcacaaattgaagggagctactgtaacagatttcacttcgttttttccat

SEQ ID NO: 455636 - DNA, 560 bp, Homo Sapiens
  misc_feature (13)..(13): n is a, c, g, or t
  misc_feature (465)..(476): n is a, c, g, or t
tactttcacaggnatctgaggccatgtctttacttatgtggtgctgatgtgggccggggaagctgtggcaggggcccgggaaccaccccagggggatgcagagggagtggaccctgtggggctcggccatggcagaattctgctctgattggctttagatcgtcgcctgtgacagcgtttcctccgaggagtgtgttaggaagagcagaaatgcctcctgcatctttattagatccctccaaatgggaatccagcagaaagccgatgttcttgtaaatatcacgacctccctccccatgaggtgtttgtagaacagttatttactcgttttgttttccccacctgcagtttacagaagaaaatcaagaaagcgtgtttttcctccatgcataatcccatccccgactgtaacaacaacaaaaccgtcctcctgttaggaagcagcagtgacttctttaggcaggnnnnnnnnnnnngcgtgctatgccagaaagcaggagcagctgggaagggagagggagggggccacacctggcctaccccagtcacctgtaaaccag

SEQ ID NO: 455637 - DNA, 229 bp, Homo Sapiens
tgctggtcctacttttcacggtgactatttctttttccactctttattcacgtttgccacttcgcttcaacagcatgccctgtttaattgggatggctcggccgctcccaatgctgtccgctcgactctccaggcctttcgttctctttgtctgggtcgctccctttccgagaagtgaacaggttggaccggcgcttagactgcttgcgaacgggcgtgggcgtgtggt

SEQ ID NO: 455638 - DNA, 532 bp, Homo Sapiens
ttctgaagttgcctttaatttatccatccttttcttcaacccatcttgggcctttgcctgctcaccaaccaaaatgacatctcgggtggcatcatggatagggatgtctgagagatgtagccctcggcccatgagttcatccaacttgtccacacatggagagcccaaaaataaaatggaatttgattctggaacatggatcatttgtcctttgacttccatcaccttgtctttattttcagagccagaagcctcaggcttggttctaatcacaaacggggtagacagtcgcagcaggaccctttcaaaggtggcattaacctttggagatacaatctcgaagcagtcctcaaacttgagcactttgtgagtgtcacatcgaagctgcttccttagaccttcccccaactgaaggactgacatgctgggctcaaacaatcatagtggacaatgggataggctctacagaagcgtgatgatgtctaattctgagggtccgcaggaacttgggaggtttccctgtgaaaagtaa

SEQ ID NO: 455639 - DNA, 210 bp, Homo Sapiens
acctacttttcacaggtcttctgtggtgtctctggaaaatgaggcattttaaggcaaacaagggccccccacctgcctctccagcctccgcaaatgatattgcaattcatatattctgtgttcttgccctattgagcaatgccctgcaccatttaacatgccataatttctttgattatccttatattctatttcctttcctgtgaagta

SEQ ID NO: 455640 - DNA, 586 bp, Homo Sapiens
tactttcagggcatgtgggtacacccagtcttatgggcaagctgattttatataatcttgttcttttcagtaaattttgtatatcaaatatttaatcttacttctttgaaaaactttttagataagtgatgtttgcaaattgaagcatattgaaccatatatctggatattttgtttgattataaacccatttttacaccatggccatagagaatggtgccgtgggcactatcaggagtgatgtcattaaccccacagggctatgtggaaagcgtgtggctgggactgctgtgtggttgggacaaggcagtggtgcacacgggccagctcctgtaactttcctgtttgtggctctcatggggcactcctgctcctgctctccccgtcctcatccatgatacatactctctctcatctacgtgctcataaatttcagcagcaagaactgcatgatttttaaaattctgagtagatgcttccagcaaaggatttcctaactgatcactgccagagaagaagaggtgctaaatagttgccaagttacatgtttttttcccaaatgaagacttccctgtgaaaagtaggg

SEQ ID NO: 455641 - DNA, 366 bp, Homo Sapiens
tactttccacaggggaataaaataaacatgcacaaagatgcagagaaagaacacagatgtttgaggaactgagaggaaaaatcacaatgtttggaacatagaatacaagaggaagaatagcaagagataagactagatatataattaagcaagaggctagatgacagatggccttataaatcaggttagggaatttggacttcatcctgagggcaacagaaaactagagaaggatttaagtaagggagtgaaagttacacctgtattttaacaaagtactagtggcagtatagagaatgaattagagaggggtaagaccagacattctaggcaagcttgtcttgtctaggcaagctacgacagcag

SEQ ID NO: 455642 - DNA, 510 bp, Homo Sapiens
aggggtacgagggttcccttttccccacaccctcgcgagcaattgtgattgtctgtcttttggataaaggctattttaaccggggtgaagtgatgtctcacggtagttttgaattgcatttctctgacgatcaatgatgttgagctcctcttcagatgcctgttggccatttgtgtgtctcctttgagaaacgtttattcagatcttttgcccgtttttttgatgggattattagattttttcatattgagttaattgcatgccttctatgttctgcttgtgaatctgtgtgacaggagcggtttgcaggcgtttcctcccattctgtgcgtgtcttttcaccctgttgactgtgtcctttgctggacagaagcttttgaacttgatgtgatcccatttgtccatttttgctttggttgcctgtgcttcggggtatcgcttgagaatgtttgcccaggccaatgtcctggagattttccccagtgttttcttgtagtggtttcatcgttt

SEQ ID NO: 455643 - DNA, 459 bp, Homo Sapiens
  misc_feature (13)..(13): n is a, c, g, or t
ccttttcacaggnagatctggagtcctgagccactgccagaagtcacccaacagtggtgacactgaacaaaaatattcaagtggccacttgtcttccactgtggaaagccgtttgtcatgtcaagggtcagagaccccagtaaacttacttgagcaaggcaactctctgggctagtgaagatggttaactctagaattgatggggtgcttttttggtctctcaccagggacaattaagatattctcatcgtcagtagccctctggcttacagtagtaggcatactgattctggcccatgggctggcaagtcagggcctcttctgggcatctcactgattccacaatactttctcaaaatgggtagacctgagcagggcatggggtgctctgaagtattggctaataatttgcaccttttggctatttgttttatcaacccttctgaccctgtggaaata

SEQ ID NO: 455644 - DNA, 535 bp, Homo Sapiens
  misc_feature (203)..(260): n is a, c, g, or t
  misc_feature (276)..(295): n is a, c, g, or t
  misc_feature (523)..(523): n is a, c, g, or t
tacttttccacaggttgccacagtatgtaaaatgcaatatctgcacagcacaattaagccaagtgcagtaaaatggatatgcctgtacttctgtattctaaattaaatgcttatgctgtgatttttagaacaatatgcaaactgcagacatttgctcttaattcctgttaaaatagatgaggatttactctgcttatagtccnnnnnnnnnnnnnnnnnnnnnnnnnnnnnnnnnnnnnnnnnnnnnnnnnnnnnnnnnngttacgttactacagnnnnnnnnnnnnnnnnnnnntttaaaaaatagagttttaaaatcagattgtatatgtagatagtttaaaactgaaataattctataaatcttattatgaaaatctgcagttgcttctgtagccactcacccccaccactcccaaccattgcctgcatcctagagacaagcatttcacactgcaggctgtttcttttgatatttaaatcatatcactagataacaaatttttggatctacttcttgatnttctgttttgtg

SEQ ID NO: 455645 - DNA, 856 bp, Homo Sapiens
aggtccatggactatgggagttggctacagatgcctggcgcgtcttgtacgtgaggctctgaggagggctgaagactgggccttgggcatcagggcacagaatgtgcccaccttctttgtcttgccacattgactacaggccagtcccacagtcagccatgtattgattgtgcaagatcctgctctcagccaggctcagcgtccatggtcctatgcacagggagctcacccttcttggggcagcgcatgcctggacagagagcacctcacagacattgtccaccgctgggacagagggtgcagcagtgctcataggagctggactgtgctgatgagttaccgagtttttgttgagctcctaatgtgcaccagccctgcacaggatgctatgggggatgtggaaagaagagcaagtgcatttaatgaaccagcttcaggccttgttgtaatagaagacaagagacagaatcagggatgtagctctagaacattccatgacttcagtccccactaaagaccccaaagagtactctgcaaatatctgtggaaggacaaaatgttctccatagcccttgaagattctctgataagagataaaggagaattcaagaatagacagtggagacctaagccaacccatcagctccagagactcctcactgccaggggaaacaacatctgccaagtctcatggtaggaatctcacttgattaaacaaaaaaaagcccaggcactggtgactaatttgactagcaattctcaacccattgaaggaattttagagatgagcaagttgagacccagataagaaaactcagtaatcaaaggggcacacctctccctgtcctccttagtc

SEQ ID NO: 455646 - DNA, 267 bp, Homo Sapiens
  misc_feature (83)..(83): n is a, c, g, or t
tcttgacttttaaaataaatcacagttggtacttatggatttatttttctgattattggattactgtctctctatgccactangatgctaagttagttccaagagagcagagacctttctgctttggttggcaatttatcctcaccacagtagcctgcaatcagtaggtgcacaataagtaattgtttaaagaaggatataaaaataatattgccactggctatcctagccagggacgaggaagacacttcttcccctgtggaagta

SEQ ID NO: 455647 - DNA, 425 bp, Homo Sapiens
ccggtcaaaatcgacagtgcagtagagcatctttcccttttctgcccattcaccattgtgacaaaaatcaaagacgagagaaattatctactcatttctgaatactgagaggaatgtgctcattttgcgcctgactccgtggatcttaaacactaacatcccgctcagagatcaaccatgatttccataccaatctcatccactcagttttacttagcaaacacctttgctgcccttccacggtgagaaaaatggtgcaccaatcccacggatgacaggttgctactcgactgtacccgctcaatagttttatcagcaaccggaaaacttcacaatcggtcaattagctacttaaatctgtctaagacaaactaagaaagcatctcagtttcacctgtcttaaatctagtctaagacaatccccc

SEQ ID NO: 455648 - DNA, 451 bp, Homo Sapiens
caggttgtattatagattatgtgtatggtaattcctgtacgtgtagtgaatgtcatggagctttttgtaaggaggtatctaaggttttgtaatactgtttgtctgcgttagttattgattcactaactctctgcttgtgattgttgttctgagtttgcagaattcacaaattgttaatcacttaagaaatctgattaatgctctttgggggaagttgtcttcattgtctgcatcttttgcttgggtggaatttgtcagactccttttaatttctcctcttcccatctggtttgctttccctgtcttagtaaagcacagatttttttatttacagattttaatttattcactctaaattacagctacttttttatatagctcttactacatactgcaaagagaaagactgatctaattatctttttagttaaagggagaattcattcatttc

SEQ ID NO: 455649 - DNA, 790 bp, Homo Sapiens
  misc_feature (661)..(661): n is a, c, g, or t
  misc_feature (695)..(695): n is a, c, g, or t
  misc_feature (700)..(700): n is a, c, g, or t
  misc_feature (712)..(712): n is a, c, g, or t
  misc_feature (725)..(725): n is a, c, g, or t
  misc_feature (748)..(748): n is a, c, g, or t
ggatccccttcctttctttaagaatgttgaatattgtcccccactctcttctggcttgtagagtttctgctgagagagcagctgttagtctgcctatcaaaagactcgtcttttgatagggtatggtaacttctgcagacagcaaaaccataggctgtgtttctacacactcaataggaagtaaaaactgaaactgatagctatgtggttcagctctcataacctagagtcctatgttgaagatctgtgagatctagatgattgccctgattttctgatgctctttgtatgggaagcatgccctcaaagatctaaggtaaagtattaccttgaaagataagctattcttctcactgattggattggatttgattcattgaatttgagtaagtaattaagtgatgattccacttgggtttctcaaagggcaagaatgagaaagagaagaattaaagtctacttagttggttttctcctgaaatgattctgattcctaaaaaacatgaatgagtctatagcaaaatgggcattgccgaagccctgatttacagaccttacaggatgcagtgtatgtatgttttctgggcctgctgtaactgtatataaatatgaacatttatggcattatccaaattggtaacagactttttacaagccttcntattatatgttggaacccatttaggggtaaatcnatacntataatttgacngggtttaatggtnttcctttttagggtaaagggttnttaggaggtttaccccggggtccccttggttccgtttatggg

SEQ ID NO: 455650 - DNA, 377 bp, Homo Sapiens
cttttccacagggcttcaaggttagcactgggatcaaattccgactttgcaacttaactttcttgagtaagttgctacacctctattagcctcagtttcttatctgtaaaatgggacggctaagtacctatttcattgggctgttgaataatgatggtctcgtctatgcaagggcttagtaccagctgggtgaaactcagtgaatggcaggcaaccctattatgactaggcttctgccaatgatcagacttgaaccctgtgctcatccccccatcactttgtggaactagatgtcctacgttgcacatggcttgattcatggtttggattttttctggttgtttcctgtgtgcaggttaaatcaggaccgagcgatt

SEQ ID NO: 455651 - DNA, 482 bp, Homo Sapiens
  misc_feature (400)..(400): n is a, c, g, or t
  misc_feature (410)..(410): n is a, c, g, or t
  misc_feature (428)..(428): n is a, c, g, or t
  misc_feature (433)..(433): n is a, c, g, or t
  misc_feature (466)..(466): n is a, c, g, or t
agaaacacaggagagaagatttattttacatcatcaacattgcaagatttcagaatgcacagtattaaacttggccttggggtgagagggaggaggacggggagggataaaattgcagctttcaagggatcacaggttgagattaaacctgcacacaggaaacaaccagaaaacaactccaaaccatgaatcaagccatgtgcaacgtaggacatctagttccacaaagtgatggggggatgagcacagggttcaagtctgatcattgggcagaagcctaggtcataatagggttgcctgccattcactgagtttcacccagctgggtactaaggcccttgcataggatgaggaccatcattttttttcaaacaggccccattggaatagggggcttttnggccctcccnttttttacaggttagggnacttnggggttatagggggggtttgggcactttttttncaggaagtttagggtt

SEQ ID NO: 455652 - DNA, 453 bp, Homo Sapiens
cttttcacaggggagatatcctatactttttctgaaaatggttaaaatgtaattctcatacctactaataaatacaaaataattaaaaagccactaataatgtgctattcattttttacagatgtcatatggttgagagactctgtgaaagtagaagaggtagcaaatgtggagaaaccactagccagatgccaaatgttaatatcaacaaggaaacttttactggagcaaaaccacatgaatgcagcttttgtggaagagacttcattcatcattcgtcccttaataggcacatgagatctcacactggacagaaaccaaatgagtatcaggaatatgaaaagcaaccatgtaaatgtaaagcagttgggaaaaccttcagttatcaccactgctttcgcatacatgaaagaactcacactggagtgaagccctgtgaaaagtatcctgtgg

SEQ ID NO: 455653 - DNA, 670 bp, Homo Sapiens
tttccacagggaggtatttttaatttgtatctgcagttggtggacagagatagccaaatataaggccctgagctctttataaagcacagaaggggagagaggtgctcacatttattgagcacttgccaggagcaacatatgttctttcttctccagaggcaggtattcttaccctcgcactacagaaacagaggtcctgggatgccgagtgagacccccagcttacacgtggctggctgccttccagtgcaactaccttgcactgcctccccagagtgaacctccttggcctcctgaacgcttctgagattgaaacttagcaaatctgcagcagtgttctccaggtttagatgttgcagaatctcattggcatttaacgtggctgggtgtttgagtgtatttttatgtcttgcctaaggcctgaataaaagttacaagcagcactgaagaccaaaccaagaatgaaaatgtgggcagccaaccttgttaaccttagctaatctttaattatgccttaattgaggttctatgagtgtagatatgggaagactaataataatatgttgagtttatgcagcattttaatttccccactccttcacgtgtgttgtaataattattgctgccgtttcctgagccccagctgggtgccagttacctgtgaaaagta

SEQ ID NO: 455654 - DNA, 422 bp, Homo Sapiens
gctaggattcagtgatcagtttggcaactgagtgaaggactgataagtgtccaggatgagagttgattggatttcccagaacctgggaccaaactgtgacatcatttgagcaggcataaaagggacaaatagcagttgttgctagcagcataatttcagagtggaaagtctgtccttttgttcttattttcctcctgtgtttctgggtttatttagaaggggagggtacaagtaagaattcaattttgtttggacagataaaagctattatatcatgcccttatctctaattgtttcttttattagttgagtatagcagatttctttgagaagttgcttctgttttggtgtgtaattatagcatgagcttttaaacttcacaaagtttatcttggatctttacaattttaccctgtggaata

SEQ ID NO: 455655 - DNA, 424 bp, Homo Sapiens
  misc_feature (129)..(202): n is a, c, g, or t
tgaatgacaaagaagagcacattaaaaaacccactataagaaccagctgccttttcttgcataagatgcataaatcattgcgtgggaagcagcgtaggtctcaaaggggcaaattgagagacagagagnnnnnnnnnnnnnnnnnnnnnnnnnnnnnnnnnnnnnnnnnnnnnnnnnnnnnnnnnnnnnnnnnnnnnnnnnngcgtgcgcatagatattcctacccttaccatggaagaacaatattttttcatcaatttctctttgttgtactcagtagcattctgatcagtaggctgtgttccattcacattgaaacaggaagagcgttcattatttatgagatgtgtatttataaatgtgtattgataacccacatattataacatgtgttagtgaaccatgctccgggcctcctcgctgc

SEQ ID NO: 455656 - DNA, 381 bp, Homo Sapiens
gtacctacttttcacagggcaccccacatcgcttgcctgagtcactacattccttaaatgaccccagtccttgccttttcttacacatgagatgtctgatgggattagtgattatgcttctgtaatccataaccagatgtactcttacacctaaaccttgatgagattctgcttgaatgtaacttttgagcaagtttgatgtgattttgcactgtactgaaccctaccacctgtatataagcagtgagctgaaatactgtgctggaacagtctgacaggactgcttgcttatatggttactacttataaccattcgtcacgactattttaagacacgttagcaataactaaagataattaagtcttgttttctccttggac

SEQ ID NO: 455657 - DNA, 402 bp, Homo Sapiens
  misc_feature (50)..(50): n is a, c, g, or t
ggccctgatggaaacagctgtgccagcagagcacctccccgcaatgcccnggtgctggggctgcccctgggagtgagatgctttagcaaaggggaatgaaaggcttaattttagggctccaagagaataagaccaagctactggctgtaaacttgcatgggggtttgggggcattttgggggaggtaaatcagcactgtgagaggctttggctccacaagatttgcaggttaatctggaagcattacttacaaagtatggggagtaaaaaggtagttccaacatctatgagagtttgtaatcaggtaacttgacaatgtattacgaagctgctctgttccatggatctgactaaaatcactagattctgggtgcaagtagcaaccctggccctgtggagatc

SEQ ID NO: 455658 - DNA, 401 bp, Homo Sapiens
tacacttgagattaaatagatacaaataaactgaaagtaaaagataaaaaaagttataccatgcagaaagtaaccaaaagagagttgatgcagctattctcacagcagaaacaacagacattaagacaaaaaattgctactacagagaatgttttgtaacaataaaaaggtcaatccatcaaaattacatgccacttataaacatgtgtacacctaataagagaaccccaaaatatatgaagtagaaactgacagaattgaaaggcagaatataattcaaaaataatagttagaaaccttaatacttcacattcagtaatggatagtatagatagaagatcaaggaaatagaagacttgaacactataaactctacagaatactccacctaacaaccctgt

SEQ ID NO: 455659 - DNA, 883 bp, Homo Sapiens
  misc_feature (15)..(15): n is a, c, g, or t
  misc_feature (23)..(23): n is a, c, g, or t
  misc_feature (38)..(38): n is a, c, g, or t
  misc_feature (57)..(57): n is a, c, g, or t
  misc_feature (123)..(123): n is a, c, g, or t
  misc_feature (346)..(380): n is a, c, g, or t
  misc_feature (496)..(496): n is a, c, g, or t
  misc_feature (563)..(563): n is a, c, g, or t
gctacccaaagaccnagttcccnggtgcctccggaaancgctgtccttcattaacangggcagccagagccccctaaaaaccgtccctggatccccaggtgcccctcgagttaagaacagaanccccacctaccccaggtttaccaggggcgggaactaaccagcacttttcaaaaaaggtcaagccgaggcatcgtccagccaaacaggccattggtgacaggaaacacactcagccagaagcagctacacatgtgtgttgtgtctctgagtgctgggtccctcagtggctctcgactggccccagagccggggagggtccacaggcaagccagtttatccttcnnnnnnnnnnnnnnnnnnnnnnnnnnnnnnnnnnnttaatttttgccaagaagctgagaaaaacaatgctgagggattgctacacaaccaagctgggagaaccaaggatggttccttcgctccttcccatgaccactgagcacacgaggcnctgaggtggactcttagagagcactctgcagacatccatcaagcaggttgaaagcaaaccaagaagnacaagctagaacaggggcagggggacaaaaggaaaaagcaaaccataacccagaaaaatccgtgtttacaagtatgtacacgaaaagtcagggttcaggaggccgtttgccaggaaatagggtctttgtcggtagacagtcagtgtgggtgtgggtgtgtggattggagtgccattgctgtggattggatgatagaagtgggtgctggaagtgtgagatgacattggagctcctggagttacggactgactctgaagggtcattcccaaacagttgccgtaagaatgagaattgccctgtggaagagtagggtaccgagc

SEQ ID NO: 455660 - DNA, 414 bp, Homo Sapiens
tacttttccacaggtcacactgttacttagtgtcagaagaggtactccaacagggctcatggtaagaaacacgtacctcagacatgtgtactttttttcgttcgttaaaaaatgcggatgatacgggacaccaaaaccacttggcatagatatccaaacggcatacaatcaaagaccatacccaggttatggccataatggcttgaagaacccattttacatcaggattatgacattgaagaactaaaaaatactatcgtttaacatatgccctgtttgagtccagaactatgtcagcatctgttgaccagagtaagtattagcagttcttgtttcaccctagaaagcccacacgtttcctcccgagagagctctccattgctacttactcttctctgagaggttttctttccc

SEQ ID NO: 455661 - DNA, 578 bp, Homo Sapiens
gatgagaggaaggcagttttaaatgtgtgccttttattgactcgggactgccattttcctctcaagctttccaaatatgtctcttttcagtgtttcttgtgtaaatagcaaggcttctgttttagggatacttctgttctttattttctgttcatttcagctgttccatcctctaggggaaaatgaggatgaaacaaagtcctcatccttgtgagcttactcgttagtgggagcgacaggtaataagcctgtgaatgtgtaatgtgatgtcgggcagggacggggcactgaagaaccatcatgcagggtcatgggaggagcgtggtggtgatgcctctctatcctcaaggagacgctgttattaaagtggccacaacagatacaaaacccactgcacgacccctttttatcagcagcgctccgttgtgcaaggctggattatccagcctggtaattattctgtccttcctcttgtcgcctattctctccgcacacctactcacccccagccatgtgctactcacacaaaacttgtatccccaagtctagaattcaaaccccctcccgttggaaaagta

SEQ ID NO: 455662 - DNA, 656 bp, Homo Sapiens
tacttttccacaggctaggaaggggaagtggaagagatggcaagccagtgccagcatgggctgaatgtaaccagtcactgtctagataggaagggctggtggcactcatgtcagtggatgagatcagcaatttgtcattttacttggcatttacaaaatgaacttggagtttggtttgtagctaaagttaggttggctgctcagcttgaaatggaaacatagccaatgaaatgattaatatacatgttgggtcccacagttttgtacctgaagcagtgcaaggcttgggcatattgattccttcctaggaggtctaaagaataatcccttgaatcaagagagagcttattagatcagttttatccatggtatatccctctatttttgttttttaagtattaaatatttgttagactcaattttggtttgttgactgtcatgatagaggacttgcagagtctgtgcttggtgacctaccttgtactgtcttgttcttcacactttgctgcatcttctcccatatgtaattgattcatttgtttgaattttgaattttggagcctattacatctccctttccctcccagtctccttgatattcccttttcctccccatttagcagcctttttgaagctgattaccaccatggaggcct

SEQ ID NO: 455663 - DNA, 300 bp, Homo Sapiens
gagaactgagaaaactaatatgtgctcactgaaaaagtggaaaaattagaaaggtataaaaagaaatattaaatcatccataagcccaccaccaaaagagaaccattgcatatatgtcctaggtatctgcatttttataaatatcattgtaatataccgacacatgtatatagggtcgtattttagatatgcttctgtatcctctttctactaatttaatatcccatttttccatattgttaaaatgatttataaacatttttaatggatgttccagatttatttaataagtaccttctc

SEQ ID NO: 455664 - DNA, 234 bp, Homo Sapiens
tacttttcaaggggagatttggaattaggttttagatatgtcaaatttgctatttttgttagatactccagtttatgtcactgattatacatccatgccaaataggcattttttaagtttaggaaagaagtctagatttgaggtataaatttggaagtctgtcagcatatatcctgtattagagccatagtctgaatgagttcaccaaaggaagagtgtacctgtggaaaagta

SEQ ID NO: 455665 - DNA, 261 bp, Homo Sapiens
  misc_feature (103)..(103): n is a, c, g, or t
atgctgggagagaggaggtggctgtgccaagcctcctgtgtccaagattttatcacagggcttcaaagacccagccactgtgtccttgaggcaaaatgaaacnaccgcagcctgctgctcagaggagtggccacctctacactggcagagagcagccagcacccaaccacaggggctcacttcctgtgactacaatcttctctgccccacactccagtcctcccccacaccacagttctcagttggtaccgagcctgacta

SEQ ID NO: 455666 - DNA, 655 bp, Homo Sapiens
agggttttacgacaccaggtatcccaccttttttgcaacataggcagaaacaccaagctgtgggtaattgatgtgcgtgtcactgattcctgcaacagctttgaatgtattaaatctgttttcaacagcccttgcataggtgttatctctcaaatctctgtaaagagcactaagagtatgtagtgttgcatgatataatccaagcctgtgggctgtgtcatccgggattgttggaattttgcatgtgtctgttccatatcccgctggtaaccagcttacagaccttctgtcaggttggcttacattatcatcaacaggttgccgtagtgatgatatgatgctggacacaatcattgtgcactttgttaatttggtatggtggtgccacacattatcactgtacagcattaacaaggctggaatatggccctctgctgtagggggcgtggcacctgtgacttgcactggaataagtaggaggctttccccaaaggatatggagactgatgtgtgctccatatcttgaggggagctctcttggtttcctttggccgggtctgttagttacttttgaaggccatgccaacccttttaggccattaaatttttctcaaacaatagccagcctcatttctgcttcatccctgtggaagta

SEQ ID NO: 455667 - DNA, 485 bp, Homo Sapiens
tgtcaggtggccacacgcaaactgtccgttttaatactcaaggaaattcgagcgttgtttattgccctggggcagcctgaggatgacgacaggccgatgattgatgtcatggatcagctaagttcttccattctagaaagttttattcatgtagcagtttcggattcagcaacattaccactcacccacaatgtggatctgcagtggttggtggaatggaacgcagtcctggtcaatagccattatgatgtgaaaagcccttcccatgtctggatatttgcacagtctgtcaaagacccctgggtcctctgcctcttcagcttcctccggcaggagaacttacccaagcactgccccacagccctcagctatgcctggccttatgccttcactcggctccagtcggtgatgcctctggtggacccaaatagcccaattaatgccaagaaaaccagcactgccggcagcggagacaactactgtta

SEQ ID NO: 455668 - DNA, 920 bp, Homo Sapiens
tatttccacagggcagtgtgagtgtcggccaggttatcaggcgcttcactgtgaaacctgcaaagagggcttttacctaaattacacttctgggctctgtcagccatgtgtctgtagtccacatggagctctcagcataccgtgcaacagttctgggaaatgccagtgcaaagtgggtgtcattggctctatatgtgaccgatgccaagatggatattatggctttagtaagaatggctgcttgccctgccaatgcaataatcggtctgccagttgcgatgccctcacaggtgcttgtttaaactgccaggaaaatagcaaaggaaatcactgtgaagaatgtaaagaaggattttatcagagtcctgatgccactaaagaatgtcttcgctgcccttgttcagcagtgacatctacaggcagctgctctataaaatcgagtgaattggaacctgaatgtgaccagtgtaaagatggttacataggcccgaactgcaataaatgtgaaaatggctattacagttttgacagcatctgtagaaagtgccaatgtcacggccatgtggacccagttaaaactccaaagatttgtaagcccgagagtggtgagtgcatcaactgcctccataacaccactgggttttggtgtgagaactgcctagaaggttatgttcacgacctcgagggaaattgcatcaagaaagaagttattcttccaacacctgaaggttctaccattttggtttccaatgcctctttgaccacatcagtgcccacccctgttataaatagtacttttacccctacaaccctgcagactatcttttcagtaagcacttctgaaaacagcacttcagctttaactgatgtatcatggacccaatttaacatcatcattttgacagtcatcatcattgttg

SEQ ID NO: 455669 - DNA, 340 bp, Homo Sapiens
tatttccacagggggatcccttctcaaaataatgttcatggaggcataaaatacataaaacaaattatttttaagtaattatcaaagtattaaaaacaaatttataatacaaatgcctataaattacatctattggtaactctaacaactgccataattttgaagtaatgctgaatttagatggattttaagatatttcaatatttgtaatataatttttactaggacagtcccaggtattttatactgttgtgttttgttgcctacattcataattgaaggaaattctaaatttcagctagggggtaatgtttttcccatccaagttcacaaattttaa

SEQ ID NO: 455670 - DNA, 509 bp, Homo Sapiens
acctgagttctggaaatttatcctttttctctccatggattcagcagcagcgtcatgtgaccttcaccacactgatggtccttacagatctaaatttctatatcaatgaaacagagagagatgaaggagggagagcagttgagactgagaggatgacgagcagacctcattctgcagtggatttcctacactctccacttctgaatgcttggaaacacttgccatgcttagaaaatattggtatttccaggttagagtgatgcaatccaaatagatgggtttcttctgatctggcttaacagaaatcttgaaaaatctggaggagtaaatgtttaatataccctcagttctcaaccattcttcttcccctgaaagacaacatcacaggcaggacatcctcccaagtgtacatgcaatattatgtacagttcccacgtgagaaggcacatcataatcttagtgagaatgatgttctcataaggtcagttatactcagtgtgcataccctg

SEQ ID NO: 455671 - DNA, 533 bp, Homo Sapiens
tacttttccacaggcatcaacattgcttattattctgggagtaactcccggttaacgatatagggggaaaaacactcattatccattcccttgatttacttaaatccctgataaattttacttcccctctcaccttaaaccatttcttctatctgataaacagctacagtttcgttgtatcctttgaaacaatttaaatcagaaggtgaaagttcaaaataatgccttttaaagatagaaaataaaacataattataagatcaacagtattaaatttctgctacttcattttccttaaatttaaaacttgatttactagctgttaaactagggggaactctggggtttaacatcattgagggctgggaggtacatgtgtttgtggaacttcgttaatattttaaaataccaagtccatgaataaagtcacataacctctttactggaacttggaaagcgcagccaggaataggcttcactttgcctgtctgtctctgctcttggtcgcttctcaggcagaccctgtgaaagta

SEQ ID NO: 455672 - DNA, 566 bp, Homo Sapiens
tactgtccacaggctataaggaggagaaaaaaggaaagagaatcagggacagaaaacagttgcctggagcctctatctgcaggaaagctgttccttaggaagggaaaagataggcaaagggagaaaagtagagggaagtgggaccaacagcaggtgaagactctggtctcttactagtgcagtagcaaagaaggaagagagaatcgcacctttctctatgacctttgtatgctcagtgttccaactgctggtaactctagcagaattggtgtcctggaatataaccaagcagattagaactcccttcaccagttgagtagtgaagataggagtctgtaaggaggcagatgaggccttggtatgcagattagatgttgtgggcttaactattttcttatatcatttatcagtgtctttaatgtagacaaaagtacaaactgaaagaaaattggcttataatcatagctgagataaactttttgaggtcaacgaacatgttcctctgtggagtctacttcttgtccaagggtttgctgtggttatctgttctttcttctgcaacattt

SEQ ID NO: 455673 - DNA, 589 bp, Homo Sapiens
tgatgcttgagctctatttctgatcccagccaagtagcaccttctcattcatttaggggagtgaccgtcctagcacttagggtcagctgtcttctctaaagctatccttgtaccactttggggcaagtgaagattcatcatttgaacacattttggatttgattatgtagctgacttgactttgtgtgggacagggatttactgatggtaaagactgtggagctcagcctctcttttaagatctatctccttggggctccataaggatcatcatggtgattttatcagtgtattcttatatatcagtgagcagacctgatcctaagacctgctaatcacctcctgctcccagctaccctaaatataaatgttcattggaacagttatacaactgatctcatgatacatggcagagttctctgaaaatcatcttagccatcccccatatctccagcccaaatgatgtagaagagtctctcctttgtttaaagatctgagctcattcagcttttctaccttgtctgtcaggaaagtctttaattttcactaccacctcaccctcactcctaccttcctgtgaaagtaggac

SEQ ID NO: 455674 - DNA, 674 bp, Homo Sapiens
  misc_feature (326)..(327): n is a, c, g, or t
  misc_feature (587)..(609): n is a, c, g, or t
gtcctacttttcacagggagtttactagtatttcttgatccctctttaaaagatgacaatattaatcctccttctccttcgttcagtgcttcacatcccaactgctacctttgtgctttaagtttgtactaatcggtaacaagtatatttagttctcatatttatatgctctgttctgttctcaaagttaaaaatcaatcaagagtgtttacattttgtgatgttttaaatactatttactgtggagctgagttgtacaccatgtttgcacatgttttgtggcacagctttactttttccctgatgttgtgctgaattgcctttgnnttctttttctcccttgtactgcttgccttcttcatttcctcagtttctctcaaactgtgaatcctttgaggtattctattgagtccctttttcccacagaaccattccctttttattccatcctggactggtcgttttgtaggcctactgcatgtcccactgtgattctcagattcccttctctctgggttgattttcctgttttctggatcccatgtctttttctttcttggttatccccacctgccctccatggatgnnnnnnnnnnnnnnnnnnnnnnncctttcttcctcccggtggctcattctcaagtagctttcttagaacaccctgttactatctctat

SEQ ID NO: 455675 - DNA, 563 bp, Homo Sapiens
tgttactatacatcatccctcattctgatgaatcagggaataatcttattaaggatcacttatatgtagtgagctgcttccctcttgctgcactcaatattttctatgtttctttgtcaacaatttggttataatctgtttgagtgtggatctctttaggtttattttatgtggagtttgtcgagcttcttagatgtgcattcatgtctttatcacttttgaggagttttcaaccattatttcttcaagtatttttttctttatagcccagaccttataagacaatattccttcaaatattctttctgctcctttctttctctcttctctttctgggactcccattctgtgtatgttggtatgcttgagggtatcccacaggtctcctaggctccgttcagttttcttcactcttttctttttctgctccttagactgaataatctcagttgatctatcttcaaatgttggtgattctttcttctgcctgctcaaatctgctactgaacccctcttagtgaatttttgatatcagttattttcaactccccctgtggaaagta

SEQ ID NO: 455676 - DNA, 558 bp, Homo Sapiens
  misc_feature (111)..(179): n is a, c, g, or t
agcaagacttagtctctacgaaggatttaagaaataatttgtgcatttggtgcaggcctgtagtcccagctactggggagtctgaggcgggaggatcgcctgagccaacannnnnnnnnnnnnnnnnnnnnnnnnnnnnnnnnnnnnnnnnnnnnnnnnnnnnnnnnnnnnnnnnnnnnctctaaaaaacaaaaacaagaaaactcgcatttgaaaaacaagacacaactgaaagactccaaacctaacccttttcagaaaatcagaggataaccatttacagtaaagaaaaagggtaattttaatggcagaagttaaaagttcaaagaaaattgcatgttgggtattttttgtatacttatcaccatgctgacagcagtaaggtgattcaagggaaatacatgaaattgttcctgcccataggaatgtgtgttaccttcagggagataagatgataacagtaaaagttatgtagtctactgtgtgtagaacactgccagtttctttatacacagacgtggtggttctccaaggtatatatatttatgcctgtggaaa

SEQ ID NO: 455677 - DNA, 413 bp, Homo Sapiens
cttttccacaggggaaattatttcataataaaaagaaagcaagctggacaggtaggcaagcttgaggtccaatcataggacgcttaagttagtaaatttgaaatcctgaggtccttgaccagtggatggtgggtactgaaggagggtatgggaaatgctggtatagcaaatagtatgcatcccattttcctctgcctgccttttagctcctcaacactgagttatgttccagtgatccttttctccctaatttctcccatgagagccagtctgtagttggtttttcaacaaacatctgtgaaagaaaaccgaagttttaaatgacttctcatggttattttttttcctttctcttgcaggacattggggacacattgagcaggtatagttttctgtttccctagtgttaaatc

SEQ ID NO: 455678 - DNA, 196 bp, Homo Sapiens
ttcaatgatatagtattactacctacctaagcaagaggtaaatggtccttcttctttttaacaagcttgttgtcttcttcacctgtttctggaaatttatatattttaagttcttagatttctttcattatctgttttaaagttattatctggtttaattccatgtcctgaagagcgtgaagtataacccgcaccg

SEQ ID NO: 455679 - DNA, 415 bp, Homo Sapiens
tccacaggagcttattcttatatataagcagagattttgcagaggtatttattctctagatatgccctgaatgtcttgtgctattatgtgtacattttgcatactgaaagtctatagtgaaagttcctttactttttatactgtcgtgaacatgttctattcttcgcaataatgttgtccctgatctgaaattactggttcaatttccgtgatataaacatttacaattagaagctagatagtactggcagagtctgcaagtcagaacacttaaatatatcatgggcagttaaaaagaccgaagggaaacaaaatgacaaatgtatttatcagaaagcaagcaatgctgactgcttgttagaaacccatctagctatcttaggtcaccagaacttcagccaacgtaatgacattc

SEQ ID NO: 455680 - DNA, 470 bp, Homo Sapiens
ttttcacaggggagaagcatttatgaaggtcaagcccaggagcacagactaactaaaacattgagaacaaagcataaggctatcccacaccttacactcaaattagtaggggtcttgtataataacaggttaatggaatttaaaggactgcacatctaagactttatttaggaagaagtccttaaggaaacccaaaaacaacagtgaatacaaaaacaaggaccacagaagaaatgttagcctctgatatctacagttacatcaaactgtaaacatgtcacataagcaaacttggttgtttcagctacaattgtaaacaaatgaatttgctctgttgctcattgaaaatcaacataggacttgcaaggacaaacatttgaaagattacctctttttctggcttagcatcaccccaaaagcttctgaatttcaagaatgataaagcttacatttagctgctcattccagat

SEQ ID NO: 455681 - DNA, 566 bp, Homo Sapiens
cttcacagagggtctgttaccacttagcagtgtgagtcttaactatgtgtagagggtgtgggaaatgatatcttttgatagcttctttaatcccttggctcctctatctgtaattttcaatccatcaagagcagcccatggaatatcaaaagtgttcatctaaagctattagaaaattcagattacaacaatgagttggaatacgtttttcaagaattagcctgtttaaaagattgtgttctatgaaaagcttgggaaaagtatcccatctccaatcgtactttccatttttgccattttaggctaagatgtttaccaggtcaggatcattctatgtaggacatgtgaacttataaagtgcatggatatttgtagagtaaagtggatgaagatgggggtaggcagttgaagatacagattacgggttttctatgtttcatttttttagcgaaaaattgtattatctaattcctaacgtatgagaacttaactatatatcatttctgaaatggagttttggaaagtagttcacctgatgagtttggacttccttcatgctgatcctg

SEQ ID NO: 455682 - DNA, 518 bp, Homo Sapiens
  misc_feature (11)..(11): n is a, c, g, or t
cctacttttcncacagggtgggaagaacacaaatggaatacaaacagtaatgatggacagaagtttattctaaataaatgacagccacttaaagagagtggagaagaaaagaattaaccaaaataactttcaaaaacagtattttaactaaataagatgaaaaacaaaataaacatagcaaatattgtacactagttagcaaatttttttccacagaggtatgtgttaacaattatgaaactacctttatgttcattccaggactgaacaagaaaataaatatgtcatgagtaagaagaaccaggtttctcactgtcactatcaaaggcaatggggagggctagaatgagccatgtggtgttggcttagattggaggtactcatatgaattcatattttgtaacatatatgcagatacatcaatacggaaatagaggtaggtatatgtatttcctagctctgtcactagagggggcctacaagtaatgatatccctgtgaaaagtaggtaccggctca

SEQ ID NO: 455683 - DNA, 497 bp, Homo Sapiens
ttttcacaggggaggttgtttagatatccagacccgctggagacagtaaggagtaattttatattttatgctatcaggttaaactttgaattcataggtgagaaccttgtaaaaatttagagtactgagttagagaaagacccctatataaacacagtggattcataaacccagaaaatatcctctaatccctattgttgaattagaatttaaatatgggggagagccaagatggctgactagaaggagctagcgtgcactgctctcacggacagaagaaatagtggtgagtaaaccctagacctttaactggaacattcaggtggacacattgggattcatcaaggaaacaacccacgaatgaaagagaggaatgagacaagacaaccacccacctgggatggcatagagaccagaggacggcccccatacctcggacaaatgatgagtgagtgatagtccccaggaacccacacttctaccatggacttttgcaa

SEQ ID NO: 455684 - DNA, 642 bp, Homo Sapiens
  misc_feature (465)..(465): n is a, c, g, or t
gaaccatggtttgtgacccaggaaagcaacaagaaatctgattggcattgttatttagtatttttggatgctgatggtgcatttacatgacagagtccttcctaagcttattgacatccataaatgaaaaggctctgctttgctgactgtttaaccggtaatttaattttcctaacgactttctttacaggagctggattttgaagccaaaacaagttacgcgctacggatagaagctgcaaataaagatgccgaccctcgctttctgagcttgggtccgttcagtgacacgacaactgtgaagataattgtggaagacgtagatgagccccctgtgttctcttcacccttgtaccctatggaggtgtcggaagctacccaggttgggaatatcattggcactgtagcagctcatgacccagattcttccaatagccctgtgaggtactcaattgacagaaacanagacttggagagatacttcaatattgatgccaacagtggggtcatcacaactgccaagtctttggatcgagagacaaatgctattcacaatatcacagtccttgcaatggagagccagaatccatctcaagtaggaagaggctatgtggccatcactatacttgacatcaatgataa

SEQ ID NO: 455685 - DNA, 542 bp, Homo Sapiens
tactttccacagggtctgagaaggcacacagtcgtttcttccccttctgtcagacataattcctcggtttggccttctgacctctatatagtctgataatggaccggccttcattagtcaggtcacgtaagcagtctcccaggctctcagcatccagtggaaacttcatacccccttaccatccttcatctttgggaaaggtagaaagaactaatggtcttttaaaaacacacctcaccaagctcagcctccaacttaaaaaagactggacagcacttttaccatttgccctccttagaattagagcctatcctcaagaagctacaggatatagtccatttgaactttcatacggatgtactttcttgctgggccccaacctcttgacagacaccagccctctaggcgactatcttctggtactccagcaggctagacaggaaattctccaggctgctaatcttttcttgcctactccagattcccagcaatatgaagacaccctagctggatgatcagttcctgttaagaatatgacccct

SEQ ID NO: 455686 - DNA, 604 bp, Homo Sapiens
tgcgtgatacagaagatagtcgcctagagggctggtgtctgtcaggaggttggggcccagcaagaaagtacatccgtatgaaagttcaaatggactatatcctgtagcttcttgaggataggctctaattctaaggagggcaaatggtaaaagtgctgtccagtcttttttaagttggaggctgagcttggtgaggtgtgtgtttaaaagaccattagttctttctacctttcccaaagatgaatgatggtaaggagaatgaagcagctgatggagccacaggagacgctgcaggggtgggggctagggaggctttagaagggggaacaaaagagaaggttgatgggccagggcctgggtgctgctttggagctgtcggagccactggaatatgacgggggctccccagtgaccgtagcagatgacttcaaagatgaagaaccaaaggagaacacagggggggctccaccagcaggaagcaaagacaaagtggcaactgggagcagcaggtgatgacaggtggcagagaggcaggggctgcagctgcagaagcatccagttgctgtggggctcgagaggaggttagggatggggtaccgagctc

SEQ ID NO: 455687 - DNA, 953 bp, Homo Sapiens
ccaatggcagccggggaagccaggaattggatggaaggaaagaaaagaggatccggtggtgaggtgtagggatgtgtggatggtaggcgagccagaaaagcataacaccttctgccaggcagaggtggatatgattttgtaattagggtgtagaattgatggtctacagggagcgcaagggtaaaaataagaccacatagggactggggaacctgtcccaccattgtggcgtgggttggattagggtaggatcggctgagacataaggggggtggggatatgaaggaagtttgagtagaaatggtacccccatattggtggtttagatgatgctgtgttggtttgtatggatgttagtccagaagctattaggtgaaggagggcaacagccctacctgaaaccatgctgagagagctgagtttgaaggaaaggtgtttagctgagtttccaggttatgaaccggtttcaggaatgaatcagccaagaatggtatagccaagtaagaaatgtgtaagctcacgttggactgtgtccatgtaagtaggtcagccggaagagccgtgaatcattgggtgtgtgtagaaagacaaatccagcagttagaggagaggggagattgtgactgacttaatacgtggtgtgtgaggctgatgaagggggcccagctgtcagtgattgggggtggggactcagaatatcccataagcagagaaggcaaaaggagaaaaaggagatttgtgtaggtgtgaaatcctggaaggtgccttgcagccatagctcctcaattagcatgaggaattgagatggattatctaagggcgtggggaaggggtaccaggagagatctgagacaaggtatgaagtaaaagatttaagattggaagtggagagtgtcatgggccagtgcctttcggatgggtgacttctggattctgttagcacagcgagttgg

SEQ ID NO: 455688 - DNA, 533 bp, Homo Sapiens
aaagtaccaggttcatagccaccattttctcatagaaatggttcctgtttaagggcttttgtggatatataactaaatcagaagtgtacgtaaagtacctgactcataataagtaatcagtgcaccttagctgttgggtttgtttgttttagtcacttttaaattctaaatagggtatatgttcagaaactattaagaactgtttgtggataaagccatgtttcttagcatagcatacatagccctggctgttgctgtacctccctaccccaaaattcagccttagcaaactgcttgcttgctggtactaggaaatacctctgaaatcaactgaaaatactgcatagtaccttcagttgatcaccttagaagatcttgcagttctcactcccacctgccgtgtagcctatcctcattatctgtcagggccaacttatctttcaaactgcagcttaaggtcacctcctcccttaaggcttttcctgacatctagcctgtcaaacctcattctgtatttgacctgcccattcctc

SEQ ID NO: 455689 - DNA, 447 bp, Homo Sapiens
aggggaagcgaacccaaggcttgggactcctacctgtgcactggaaagagcggttcctcagttcagcctcagtttcttaatctggaaaggggaacctgtgccatcgcatgctgttagggggagtaaagcacctgggccgtgtctggcatgtggctgtttttagtgaaagctctcttcctttctgtattcccctccaaagctcgctgttttgcttcattgtctcctatttcagggatttaatttttttaactattaagtctttttaaaaatagcctttctccaacaatgactttagtctgttgcagttttcatttttatcctttccgttctttcttctgctttgactcaattgacatttttttcctatgattgatgactttcatatgattttccatgttgtagtaaatcgatttcagagaaatagttccatccgagccctgtgaagta

SEQ ID NO: 455690 - DNA, 460 bp, Homo Sapiens
  misc_feature (323)..(390): n is a, c, g, or t
ggtacctactttccacaggacttttctcattttctcaaaatgctacgtttgttctgactcaggcttcagtagacattcccagggcatctccactgctttcatctgcagtcttcctaagctttggctcttcccagaactgtccaaagtcaatgcccctgctctattattttatagcataaccctctcagtctttccttcatagcactcattgcaatgcagttgttttgttgtctaactacttgcttttgtctgtgtcccagcatccagcatccagcttagcacataataggttctcaatcaatgttgattgaataaatgaacgnnnnnnnnnnnnnnnnnnnnnnnnnnnnnnnnnnnnnnnnnnnnnnnnnnnnnnnnnnnnnnnnnnnntccagagctcccaacacatgagaagtcatattttatcacccaaacctaaactcttttgagagtgaaagag

SEQ ID NO: 455691 - DNA, 544 bp, Homo Sapiens
atagagacaagttgaacatgaagaaatacttaaaaggcaaagagataagatatgtccggaaggaatagggctcacttagttctgaagccccaggaggagccaggttaaaatggtagagtcagagcgtgaagagtcacagcctgctgcctgtgtgttcagtgcagcctgatctccaaacaagcttctgcttccctcatttcctccatgggaacctgcactacctaacatctccttgtttggggcaagaggtgtgtttccttggtttccgtgttcttagaggacctctgttcttatatctaaaagagactaattcaactgtccttcttggtgtcgaatttagagtgccacatgtttggctctattcttggaaaaaatcatctaacattagaacataattttataatttacagagtgctttaatgtatattatgccatttgcttctcacagcaacctcgctctgtgaagtttctttatttcctctacgtgggaaatttctctcttacacacttcttgatcattttcatctctcctttcacaggcaaa

SEQ ID NO: 455692 - DNA, 573 bp, Homo Sapiens
acgattgagctcggtacctacttttcacaggggaagtgttcttattcctggtctacatatctgtgaataaccacaaaggcatgggtgggggtgggattaaagaaaagactgagagggctttaagttacaataggatgggttcccttaagaaaatacctagcttgattttgaaatttttgttagaggtaattttgtttccctggggatgtttttctctcctttctttttttatggagtctggggtggggaaatatgaagaaagtcatttcttctctaaattcttcgaaagtcccttgatcctttttccacaatagtgacctcccttgctgcatgaggcatgtgtaccttcttccatggaaaatttcaaaatgatgctggctattgtttctaataccatgttagtctgtgagatattgctaacttttccagctgagataggaaggatgaactagagcgaataaagatgttcaagtagcagttgaaagccttgatatggcctttttactctctctgtgtttcccttgtttttctcctttcctcatttcattgtgttctgcatcaaaccccctacat

SEQ ID NO: 455693 - DNA, 521 bp, Homo Sapiens
acagggtgagttggctcaggtttctctagaatgacggtgaatctctcctttttgttagggataggaagtgattctttttcgttatcttcactttaattaagaaatcttgaacatatcctgaaaagtacctaccatggtcggacacatgcccaggtactcatgaaacagagccaaatgaatgttcactaaataatccatcattgccttcttcccggcctcccctgtggttaatttggggtcgcatgattagtgtgggccagtggatggtgagcaggaataatgtaggtgccattgaaatttagggctttagtttttaccacaccagagccgagtccagctcaatgcctgtaatctagctgtcatcaatgtcaactttttccatatatgtttggaattgctctctctcaaagaaatacactatgatagcttctctcctccatcctctcacacccaccctcaccacccacctggaagtaacctctaccctgaaattggtgtgggtcatcccccttttatattaa

SEQ ID NO: 455694 - DNA, 680 bp, Homo Sapiens
cacgagccggacctgagtagttgacaatcacatgagcctgacctgactagtttacaatcacacgagcctgagcctgactaggtttacaatcacacgaccctgacctgactagtttacaatcactcgaccctgaccttactagtttacaatcactcgactcccgagcctacatagatgaccatcactccatacctgagccttcgtaatttacaatcacacgacccccgagcctgactctagtttaccaatcacacgaccctgacctgactagtttacaatcacacgaccctgacctgactagtttacagtcacacgatcctgacctgactagtttacaatcacacgatcctgacctgactagtttacaatcacacgaacctgacctgactagtttacaatcacacgatcctgacctgactagtttacaatcacacgatcctgacctgactagtttacaatcacacgatcctgacctgactagtttacaatcacacgatcctgacctgactagtttacaatcacacgaacctgacctgactagtttacaatcacacgaccctgacctgactagtttacaatcacacgaacctgacctgacgtagtttacaaacacacgatcctgaccttacgtaggttacataccacacgatcctgaccggagtaggtttacaaccacacga

SEQ ID NO: 455695 - DNA, 229 bp, Homo Sapiens
cattaattgaatccactttttcaaggagatcatttggtagtaaaacgccacctttcttcaaagcttcaaccttactaagcagctccgtctttttcaggtgtctgatggacatttccacactgtatcgcttgtaaagatgctgctgctgctcctctgacatcatcaggtcgtggctgtccatcacaagggactccatgtcaatcagccaatcccagagctcttgatattc

SEQ ID NO: 455696 - DNA, 563 bp, Homo Sapiens
tattttccacagggttacttcaaagcttttagttataggaacattgggaggcccaaactgttgaattaaataactctacaatcctgtgctaaaatactcattaaaaatattgaacctcaataagaagaaagtctgtcaatgtgttatctataacccttgagtccttggatttttctactgtgaagtcatcccttcattcaaaacaaacaaaggagcaaatcagaacaacaagaaaaaacctgtgagaaccaattgcagcactggcatgttaccaggggctggggacaacgtctttacaaaggccaagtttttcttctcaacaagtgaagaatctagaataggctacagataagttaccttataattctagttcaatgatataactcctaagacactgacacaaacaatataatttggcagcaccaagagctaactttgctgggaaaggaaataatgtgacccctagagaaggagaaaggaagtgaggatttaaaataaggccaaagaattgaaattgatatggcaaaatgtgaatatttgctaaatccagatagtgggtattc

SEQ ID NO: 455697 - DNA, 534 bp, Homo Sapiens
  misc_feature (56)..(88): n is a, c, g, or t
caatatttttacagatagataagatagtgcctctataaaatcggaacagaatactnnnnnnnnnnnnnnnnnnnnnnnnnnnnnnnnnggcctcttggaaattaaacacaagattgcagaaacaaagaatgcaatataaaagttggaggtggggtgactaactcatcgcagtttgtcttagcactaacattcccactcctgggaaacctctctatgctaggtcaccttagttggagaatgatacggtttggccctgtgtccccacccaaatctcttgttgaacttgtaatctccagtgttgggggagggacttggtgtgaggtgaattagatcatgggggcagactttccgtcttgctgttgtcatgacagtgagacagttctcatgaggtcaggttgctttaatatgtgtagcaattccccattcactctcctgctccgccatggtaagactgtgcttgcctcccttcggccataattataagcattcctgagacctcccacccatgcttcattgtacaccctgtggaaagta

SEQ ID NO: 455698 - DNA, 444 bp, Homo Sapiens
  misc_feature (299)..(386): n is a, c, g, or t
tactcgtccacagggctcaggccttagggcttggattagaagccacaccagtgactcccctggttctcgggttttcagactggaactgaattacaccaccagctttcctaggtctccagattgcacacagcatattgtgggacttctcagtcttcataattgagtgagccaattcccatagtaaatctcctcttatatgtctgtatgtattttattggtttttttctttggagaaccctgactaatcagtgttatatctaagaaaccatgatttaatccaagattagaaagatttactnnnnnnnnnnnnnnnnnnnnnnnnnnnnnnnnnnnnnnnnnnnnnnnnnnnnnnnnnnnnnnnnnnnnnnnnnnnnnnnnnnnnnnnngcaaggagttcaacttcattctgttgcacatagatatccatcatctctgcaccctgtg

SEQ ID NO: 455699 - DNA, 190 bp, Homo Sapiens
agatagcctttgaccaccccactgtaccacgttctgcagaacacaggttgggaagtaacggatttagaataaactaggccagaaaggtcccacgagagccaccccactgggacacatggactcctagacatgctcggtctggccctgctgctccccaggcagactctagtatttcatttcccccctgtgg

SEQ ID NO: 455700 - DNA, 460 bp, Homo Sapiens
tactccacaggtcttaacaaaagctacaatggacaagttgttaaacctcataatctttgggaaaactttgatagactactttattttctataaatagaacaaaagagaaatatttagcaaatatcaaatgttctttattttgaccccttccctacctcccagccattggattttatctaaaaatgtttaataaaatgctttgttcagtcctatttcttctttttccacctataatcaataagactgttgcccatgtatttctggagctagaaggaaaaggacctcttgtgtaaggggtgttttgtactaaatgaatattattgttttttcttggcagagtcaatttgggtattgccccaactactctgatgaataatttgtagagtgatacaactggattttgttgcaacacctactgagagttacccctattttaatttgcgtgggaatgatgccccct

SEQ ID NO: 455701 - DNA, 279 bp, Homo Sapiens
gttgttgttggggcaggcttcagccaacaagagcatttggaattgtctcgacttttccctgctctagacttctcctgtctctgcacatttgtttctgcattttcagaatctagctattttagtgtaccaaatctcttaaaaggacctgtattcattgtgatacaacccctataggaacttgagataatcagaatttcaagagaaaattatagtttcttggtgcctgaactgacccaacctcatgggtttaggatactaatcagtgttcctgtgaaagta

SEQ ID NO: 455702 - DNA, 495 bp, Homo Sapiens
tccacagggagcacttattgagcagtttgctgcaataatattgaatatttttagagttatgacgtctgtgttttgttgactttggtcccttctttctcccattcttttgaagtttccctaaaacatgtgtgcacagacgggagagaatggtagttaagtatgtgctgattttaaatgtccttttaaatatcatttattccttgataattgactgtataactgatgtaagagaaatatgttttatatgttattccacttgtgaatctctttgcaatgtgaggcatatagtgaaaatcttacaaagatagggtcataaaatgtgcattctctacactgctgcaggttaatcgtcctcgagccacgtttctgaggcctgtcagtcactatttcttagaaacctttgttggctccttcccagtgactctggaattaaagcccagactcttgtttttttgctcagcttatcaatttagcactgtcccttccaccttttgg

SEQ ID NO: 455703 - DNA, 1132 bp, Homo Sapiens
  misc_feature (1007)..(1007): n is a, c, g, or t
  misc_feature (1043)..(1043): n is a, c, g, or t
  misc_feature (1068)..(1068): n is a, c, g, or t
  misc_feature (1084)..(1084): n is a, c, g, or t
  misc_feature (1109)..(1109): n is a, c, g, or t
  misc_feature (1122)..(1122): n is a, c, g, or t
tactgttatcacagggaagaaaaagcaaactacactttggcctctggttctgaatgcagaaatcaaaggatgcagtaggtgtctatgtcagaattatggatcagaggcagacaatgacgagtgaagatggttgtgaagccctcttcattcctggaggagcctgcatctcatctctcaggccctctttctctgtggttctcatgaacagcagtggggaccattgagcacttgaatggcctgtttgtctatgggcttgcaaaggacaagcagagttcacagagctcaggatagaaacatcagagcctcctccacgggcttcagtgaaactccgatgaactgtacctgagggaattttttcttaatcaaccccttgtgtggatgaatacaggaacaacaaaacttgtgtacgtatgaaagtcatgttgttaagcagttatgatttaagaggttttaagtcagagggatcatctggaggccggctttgtgcaagcttttacagccttctgcagtgtccttaccctggctgtacatggggaagggctatgtgtaaacaagtgctttagaggcctctgagagtttttaaaaatcagacccattaacaaaagagagggtttcttaggaacaaagcaactattttgattactgagatctctgttttgtttctgtgagttactctgtattcctttccccatttcactcttgcccttcacatcttaaatgtccataagaaacccttgcatgtgttggtattctgaggcatcccgtgggaaagtcccctaagtcccattttgtacttcaacaaaaaatgactgtagcagaagataagtggagacttttatggatatactactcattttacttaaaatctacccagttcagacttgaatgtaaacttgtattaggggaaaattctccaaagagggttttctacatacacagaaggcagttcaacttctcaagttaattttggataaggcaggaatctactactgggccagagcgacggngtgggctagggggttgccagccagtccctttctggntggtccagggccctgcacagcgggntgccacgggtggcccntgccttttggtggggggattcaaantccccctgtttgncccgtgtggg

SEQ ID NO: 455704 - DNA, 599 bp, Homo Sapiens
ttcctaaaatagatccaggtttttcagttccctgaagcagcattcagtagcatctatataataaaggcaccttctgagaataaaactattttatggagtgtgtgaacacacttgttctgtcacctgggttcatcttgtagtgaagcacattaggtccaggtccttccctctgggagtctgactgggaaactctttaacgcaacaactcaattagcccctgtagataagacatgcttcccagagtgagatttttgaaatccccttttcatccagaactatatttacccacctattgtaactattcagatagagcaaaattaggaggcttgataaatactaagaatttagtaccacagaaattatttattattttccctgtagtccacaattagtgataacgaatcctatttttgttaactgtgacataactttgatgtcatatgttgtcctatgtggttcttcctaagtaaactctgtactgattatatactgacttagcaatgtggccttggaatgctgagcaaaatgtggatgtactggttgtaaatgtttatatattgtacagtacctttatatatacacttgaggttctgattaga

SEQ ID NO: 455705 - DNA, 541 bp, Homo Sapiens
agcaaagtatttgtgggatctatgtaatggtgctgccagacataaggtgagtgacagagggaaggcagcccatctgtaattaaagaagtacaagggttcttttggttatgcatcgtcaccaatatttaatattatgggatttgacttctatctgttactggaatttttgttgttactgcgacttgttaagatcgtaagaacatgtaatacgttattaatctgttttgaaaaagcaaccatgtggtttcactcatttgtaatgtaatttgacctagtaatggggaaggaagctaatgaaagatcagtggtgttccttttgtacaagtgtagcgaacgtcctacttgtcaagccgttaactgtgacttatttgttcattaaataatccagcagcacatgtatgaaactattgtaagtccttttctgaatggtggaaactttatttggcacaactatgccatttaatgctttttactgttcacaagaccagcattcagcaatatccaagaaggaagagggtggttctgttttccctgtggagta

SEQ ID NO: 455706 - DNA, 410 bp, Homo Sapiens
gggggaaaggggggaaagacagggattctcaaccctcagccctggctgtccttaagaaccatctggaagagctaggaatcatttgaaaatacccctgccacccatttttaatgagcagtcagggctgagaatcacaactttaagatattttgcctgtaattaatatttatattttaaatctacattttctgagaagctcggaattttaaaaaatgtattagtatctttctgaagataatgaaaacttgtgtctttagattagctttacatatctgacacctaaatggtagtgttcattcatattgataggataatgaaggaaagaagagctttgatcaaacgcctgggacaccaaagatttatctctggtcccaagagtggaaatctcgagagtggccctgtggaaagta

SEQ ID NO: 455707 - DNA, 609 bp, Homo Sapiens
tctagagatcccccttttccacagggcctacagtgcagagtgatgtgtatttgcatcagcagcatcttagcgaaggatatgctgtgcgtggatatggaaagacgtgtgtactgcagttggactaggagtaggtgatacacattttgataaagtacataagcacatcatgacctcgaaggcacttgtattgaaaacttattttttaatctgactgattttgctacagctgagcagaaatgggtgtgtaagtggctaggggaatcatttgcccaggaccatggctaggaaggtgtgagacgggatggacgcagctgggagagggtcaggtcagatgaccctgggagagggtcaggctggatgaccttggaaggtcgctccagggccgggagtctccagttctctgttgttcccttgacaaagtccagcctacccgggctcccaggcacgccggcctcatgccccctggaatgacactttgcttcatccaaactgaactcccatcattccctaggagagccctgtttattcttgtctccaagacctgattgttttttccatctggttggattcattctatgattttgaaatccacttccatgtggaaaagta

SEQ ID NO: 455708 - DNA, 490 bp, Homo Sapiens
tactttcacagggggggatccctgaaaatctatcttttaagcttcaaaggactttatgccaaaaataattcaggacatagcagatcctatcacttcactgtttaaaacattccagtggtttcccttcacacttaaggcatattaaggaattttttaaaagtaattctataaagccaaatataatctaatttcttgctacttctctgaccccatctcttatcttcccctcacttattctagtctccacttcactggcctccttccctttatctaacacactaagtaagctcttactttagcacttcccgtttctttgccctggagactctttgttcatatattcttaatatttgcttccttgatttattcaaatctctgtgcatgtattacattctccaggaggtcctccctagttaccctatcacagcagcagcctccatcactctctgccttattctgcttttcttcatagcactcatccctgtgtaaa

SEQ ID NO: 455709 - DNA, 361 bp, Homo Sapiens
tacttccacagggaaagtcaataaaaacaatttattccaagtagtgtaatgatttatatactcatatgcaactttctgtttataatgagcatcattgttagaagcagggaatacaaggaagggacttttaaggacataaatgacttttatattctaaatttatttaataggtgtacacagatttatcttatagaaaaaacatcatctgtactctaaattccaaaacagtagaagaaaataaattctatacatatatttgatgtctagcctgtggaatttttatgtgcctcgaatttgcttataattatgaatctttaccacccatttccatttgttacttaagtatatatacaatcaaata

SEQ ID NO: 455710 - DNA, 485 bp, Homo Sapiens
tctagaggtcccctactgttccacagggggtctgtggcaaccatggatacatttctttcccaacgcattctctgaggcactttggtaactctgcctctttgctctcagcattgtgttagaaaataaagccagcagacaaggattaaaccctcatgttgctgggttccttctagaaacaattggagggctaaccaagtcacctttggtggaaggcagtaaggtgagtcattgctgtggctggactgaataggatagccttagctgtaaaattgggctgatctttcaaatggactcatgcttgccgaatgactcacgctcctgtttacaaatcagctctgtgaagaaatgcagagtgggaggctctgcttgccagacggagaccttagacctccaggggtggagaacggagtacttcctctggtgctcggcttcccttcctgggggcagatctctcagcttctggttggtggctctcaaaatccaga

SEQ ID NO: 455711 - DNA, 542 bp, Homo Sapiens
cccgtccttgtttcaacctcgtcaagcctaagttttacatctggaaaatgggattatactgcttcttgtggttgttgtgaaaattaaaagagttaatgcatatataacagcaggctggcaaatcacaggcactcaataaatattgaccactataatcattcctccttgaatgaaagtggttccaagaaacagagccaaaagagacaactcagagtactaggtttggagagtcttagcatcacctactacctctgtttcctcgaggaaagttaaggactgagcttgtgaggtgaaacaactagcctagctgacagtcaggctctccctcccctcttgctccttcaccattctgtcaaccttttacagcacacaccacttactagctatcatacttttaaaaattgctcgcttatttatctgtctccaacactacagcatagagctccatttacgctcagttactctgcccgttgttgtcctctcctgtattccccacacctgaggataagtgattgtactgaatagttaccctgtggaaagta

SEQ ID NO: 455712 - DNA, 372 bp, Homo Sapiens
tattttccacagggaggatcttagtgtgctgcagtcagccagaagaattttggtgatgtccattattgatgaggtttattgtcatctttatacatttttattctattcattttgtttataggtagaatagagcatgaggtacataacaggatgtggaatcaggactatagtggttaaaagtaaataaaattaaaaagcaattttaaaatagaattacattgttgggttgggtgacagaagtggaaggccagttggccatctcgatatgttcttatagtgtggcattatcctggagggttcactacagtacagggtctggccctcaattttatagggccagacagtatatcataggggttaaaagcaaagttg

SEQ ID NO: 455713 - DNA, 239 bp, Homo Sapiens
tactttccacaggggttgagtgaaacttttcatatttccgcggaataaacagctaaggcctaagcaggaatgctgacatgtggggacagatgctccccacatccacattactgagaggcagcagcagaaccattcctacctcactgaaacatacctccacgcccccaaaccgcaaagggagaggatacgtgaggacaaacgatcgacatgttgacaatgaggcagtgtagggcatgctt

SEQ ID NO: 455714 - DNA, 565 bp, Homo Sapiens
agcgctgtttatgtagtggctttatgtagccacttctgggtatggcactcactgtgccatttattttggttaatgtttttaaaagactcattttaactttaaaatcagaggtggcgaatgaaactttgcttaaggattcatgtccctaaaatgtaatgttggagtagtaaggaaaaaaaggaatcatcttttagcggcagctaggtataatgaagtttgcagaaaagaaaaatagggtgtatttcattagatctaatattgacagcactgctctagcatgatggacctgccttctgtatgagatgagtatgacatccactcaaaaaaacagcccagtggggaaagaaatgccagcaataatagatgtgaccttttagtgccttggccattggcatcgcctgagggtaatcctagatcacccatttttccatttggatgtagctgagactgacagggcaggtgtccggcctaaagcaactgatttactgatttacgagcagctttcagtctccttcctacttgcctcttgcaaagtgaacattgaaaatccagttcttttcactac

SEQ ID NO: 455715 - DNA, 255 bp, Homo Sapiens
  misc_feature (139)..(150): n is a, c, g, or t
tagtaatggagtactgtttggtagagagaggaaacctggcctgttataggcccttagggccttagggaaatacacacaaaggtcacaaacatggaatattcctattttttattcttataccctttttcgcaataccacnnnnnnnnnnnnccaacagaaaaattgttcaaatcctaataattctaacttagaaatgtcttgcattcaagatctctccacttctagtgcaactacactattccccctgtgaaagta

SEQ ID NO: 455716 - DNA, 441 bp, Homo Sapiens
cttttccacacgggagatgatttttacattctgtgacttaactgtgcacatatgtcatccagcttatttgaccagagtttccagagacagaaaaatggagcaaatacacaattccaatcagaaaaacaaaatgaaatcaaatagaaaccacaggaacaaggaattcactagttaattgataaactggcattttaaagtgttcattttccttgacactgagataaatccaggagggtctaaaccctggtcacttgaagaaggccaaactaatgtttttcttcacacgatatcccagctccaacctcctgaaggtttattttcctgatgttcaggtaaagtcactcaactaaatggcagcttctgcagaactcccaagaggcagtgtgttttgcctggtgtgaggcaagtcctaggtcatcatatgtgcacttcaagctcccc

SEQ ID NO: 455717 - DNA, 558 bp, Homo Sapiens
  misc_feature (289)..(358): n is a, c, g, or t
taaagatcacagtgacttgcctgtgtttaatattgccctcgcgtggaaaaaaataagaagacagtattcaaatacaagcacaagaaaccaggagcacgtttgttggtctgctctgcctctgccttccgtgttggttattaatcaagtgacagcggccttctaagaaagactccagctgatcatgtttctctgtgcagcagacaacacagagatcactccagttttcttctaacttctcagagaagacagatcatccacagcatggagctatgagtgtacttcataacannnnnnnnnnnnnnnnnnnnnnnnnnnnnnnnnnnnnnnnnnnnnnnnnnnnnnnnnnnnnnnnnnnnnngtcagggatgtggagaaattagaacccttgtacaccgttggtgggtatgcaaaatggtgcaaccactgtgaaaaacggtttggtggttcctcaaaataagttaaacagaattaccatgtgagccagcaatgctacttctgggtatgtacataaaggaactgaagcaggacttgccagttctttgacaccctgtgaaagta

SEQ ID NO: 455718 - DNA, 418 bp, Homo Sapiens
acaaaaatgcaagtagagcccattttcaaaaatcagtctaacaagctgcatcacaaaaggtttccacctggagtttgcaaaaggctttcagagctagattctcttaggcttgcattgagaaaagggcttaactgcttctcagaggcaaagctacagttgtggagcacgggaaggcctacctgacccaagactcagtagttctgtaatttattaagaacgtgatctgttaaacaccggagactccgccaaggagcaccagcatggtgggagcaggggcacacagcccagatggcagaaggccactccacaccacgggcatttacccagcactttctacgcaccagccactccctagctgcgggaccccaagctaggtaccccgctcctctgccgatcggtccccgcctgtggaaaagta

SEQ ID NO: 455719 - DNA, 554 bp, Homo Sapiens
  misc_feature (42)..(42): n is a, c, g, or t
tactcagttgtggataaaacgtgtaaagatacatggggaagncatatttgatatagattacagatacagggtaaacaggagaattaaaagcacaattaataaaaaccacacccaccacggccaacgccaatgccagtcggacagccgattcatgatggggtgcccatggttatattctaactgctttgtttttgcatgtcttgggcaaggagagtaatattgtgagaattgtcagggatatacacacaacattcagcatgcagtaaggcgcaaacccttccttgggctgctgtaaggatgtgtaatgccatttgattttgcaacacaacagtacgcccctgagcaaattcatctgataacaacgtaagtccagtgctactagcattaagagctttttctacatgcaagcttagtattttaatttgttgttgaagcaggattgtaccagcagtgatacggtaccaccaccagggagtccggcgcatttgtaaccagcaatatttgtaagtaactagattactggggagggaaatattatcccccctgtggaaata

SEQ ID NO: 455720 - DNA, 427 bp, Homo Sapiens
gagatcaggctgggggagatcagtaccagaagtaattaaatgagccgaggagagcagcaagaggctggaagagagacacatattggcacgatttgttattagtagttagttggtaatgacacataccgaggacggggctcccagacgaagagaaagcaagcttcagggcatttttaagagttgggcaaattatagagaggtgagagattaaatgaaaatctatcacattacaaatacagcctgcagttactgaaatcatatttttttcataaatgagtcataccaacagtaactccaagaccttcataatagtttgcaataaactctgtgggacgctcgccacttcaatcctgaaaaattgacatcataagccaaaaaatagcactttgacgtttctgtcttctttagggcacccctgtggaaagta

SEQ ID NO: 455721 - DNA, 597 bp, Homo Sapiens
ttcatgattttgctatgaaatgtggggcttttggccacattgaaagttcctatgtgaattttagaagatgccaaacttggaattaattaaattgcactgtataaatatttattaattcaacaagtattattgacttcctatttgtacagcagagaactatgctagtgctaaatattcagtgcagagcaaagccaagctcctgcctgcattgttctctcacacattctacatgtatgttattctacataaaagtcagttaccaaaaggccatgtggtagcaaggtgatttgttgatgggggatgagatggcccagcatgggagtcagaaaatgccacagtggggatactgtacagtaactgtgaaagagccaatgcttttcagagcagaagagagccaaatcaaagggttagaaaatgctgtaattcaggacccagagctacagaaatagataactgagggaaggatgaggaactgtgggaacagcctctgttgactaaagctgcaaagacgaaacaaagaagtagaatcaaggaggttctatggataggtagaagaggatgatgccatattggggttcacgttatcctgtgaaagta

SEQ ID NO: 455722 - DNA, 265 bp, Homo Sapiens
tttcgaagggataaacattgaaatagatagcattggctgcttccagggtaatgaactggaagccaaggatgggaagaaaaatgttcactgtaggcctactctttaaagctggaatgactgtttcaattctccgccaagtcttcccagaacgcatgcactgaatggtggccgtagctcacccagagtgcaggtgacactaatggaaacgcctctagacgcttgctgccagaggtttgaaccaggctcactgcctccaggtctcccc

SEQ ID NO: 455723 - DNA, 407 bp, Homo Sapiens
cttttcacaggtacttttccaagggatcactcacacagaaccctcagccagtacctacacactgctaacagactcccacaaatgtgaggcagctgaactcagcttcccacgagcactcagcagagggaagaccataggaaactgtgagagtctagttggctgccaatttattaatatgttgtaggacttcaacaatagaatctcatcctcagactcaagctacacatggatgcctccctccaataagccatggtgctacattcagtgcctcttaccctgctgtgcatcacgggatgaggacatcagagccaggttccagcccagtgtccatcactaacctcaccctggaagagtaataagaatcatctcacctctcctggcatccatctcctcccctgtggaaagta

SEQ ID NO: 455724 - DNA, 254 bp, Homo Sapiens
  misc_feature (103)..(103): n is a, c, g, or t
agaggatccccgtctctccacactggcggaaaagtagactacataaaaaggccatttctcgatggagatatgcttttgtaatttttaaatgcaacttttggtntgctaatgaggcctcaggaaatcagatataacccttactagattattcttttcagctgtaatacacatattaaaatatatatttaacataatacaacatataaacatactcatcatcacttacacaaatcaattatatcatatatatagag

SEQ ID NO: 455725 - DNA, 470 bp, Homo Sapiens
agctcggtacctacttttcacaggaatcgtaattgaaacagatttgtttgttagaagagggggaggtattaatgaggctacacaggcactgctgtgaaccaggaaaactacacagtgtgggtatgagggagtgaagaatacatttatgttttaggtctcacttctttctttgcctgtattaagtagtaagggggagaactaacaaggtacctctgcatttaatggttcttttgcagtttggctgaactgtgtcttgaaatccttgaagagcattactaagatggtatagaagttacttgcttaaaaggagaaaagaaaaagctttaatatagacaactcaatagctgaactactcttgcaatgtgaatagccattccttgggtttctaaatgattttcacacttcccacacttgtttaaatttgtaatatcctttatggttttcctttattggccaggagaagaaaaaca

SEQ ID NO: 455726 - DNA, 487 bp, Homo Sapiens
tactttccacagggggaatgctttcatcttttccttgttcagtataaacgttggctgtgggtttgtcgaaagtggcttttattaccttaagttatgtcccttctatgccagttttgctgaaagttttcatcacaaagttatgctggattttgtcacatgtttttttctgcatcttttgagatgattgtatgatttttgtttttacttctgtttatgtggtgtatcacatttattgactgacatatgttaaaccatccttgaatcccaggtatgagacccacttgatcatggtggattatattgttgatatgctgttcaatattgtttgctagtattttgttgagaatttttgcatctatgatcatcaggcatattagcctgcagttttctttttttgttatgcccttctctggttttggtattaggattagggtgatactacctactctgttattagtactttggaacacttagctcatttacattc

SEQ ID NO: 455727 - DNA, 437 bp, Homo Sapiens
  misc_feature (189)..(233): n is a, c, g, or t
agattagagatatcgaggtatctatctatttgggaagagatttcttataaggaaatgactcacacaattatagaggctgagaagtcctaggatctgtggctggcaagctagaaacctaagagagtcaatggtgtagttctagtttgagtctgaaggtctgagtaccagaagatccaatcagagttccannnnnnnnnnnnnnnnnnnnnnnnnnnnnnnnnnnnnnnnnnnnnagtccaaaggcagaacaagactgatgtctcagctcagaccgacaggcaggaggaattccctattagtcttttggtcctattcaagtcttcagttgattggatgagggccagtcacatagaggggccatctgctttcctcagtctactgattcaaatattcctgtcacctagaaacatcctcaccagcacatccagaagaatgtt

SEQ ID NO: 455728 - DNA, 512 bp, Homo Sapiens
ggtcttagaggaaaaaactacagtttgtcttggagggacctcctcttgctaagacccccaccaccagggctaaggattgcttaaatcagtggtgttcaaacctggttctgagctgccttctcaggggctgaggatagggacaggaccagaccctggggctctcacccccagcctgggcctgagcagcttcttgcttatctgcttgatgtcctaggcttctagagaaggtttcattttgaacaaagagttatagggctgaagaaaaagttgaaaagcaccgcctcaaatcgtgttccctctccccagggatagattgctttctgcttccggagcccatcagcgtttgccagtcccagagcaggcctgacactgcagtgtagggagggcgcatgggagtccctacaggagaagtgtcgcaggagtgatccttggagcacttgggtgaagggcggatgcacaagatacacagacacctctggggcacacagctttggccgtgcctgtgaaacagt

SEQ ID NO: 455729 - DNA, 652 bp, Homo Sapiens
  misc_feature (403)..(403): n is a, c, g, or t
tcctgattgcagcctcttctttcaaagccttcagttcatttctaagcttcgtcatggtttcagtcaccattgctttttcattttcatatttgttcttgagattagctagcgccacctcagctgtctgcttgttggctttcaacaccgccctcaatgtggcgatctgctcccgtttggtgctcagcagggactttagcttgaggatctcttccattaaggcttccttgtctttatcaatcatgggggctagctccccgagccgctgctctttgacgagacagttgcaaggaccggtccacagctttctgcagatgcttgatttggtcccggattatggcattaaggttgtagatattcattggctctttgcggatgtcacttgtatccaatactggagatgacnggtggggcagtaataacgggagagattgtgggggtcttagttggacttggttctttgctggcctctgtgctttcttttgcaactggttcagatgaggtccttgtttctaccggggatgacacaccccgcctggctaatcgtggggacaaaagtcctctgggatcatcgggccctttcaggctgccactgcgggtgactctgctctgcctatagtaatccagcatgacctgtgtaaagtaggtaccgagt

SEQ ID NO: 455730 - DNA, 263 bp, Homo Sapiens
tactgttccacagggtgcatccctcaggcctgcttctctttgtgtgggtatcagtagcccaatgtgggcttcagtttaagtatgtattacttaggctaataaaacttacccaaaccaatgttatttcattctctttatcaataataatgtttcacatacacattggtaacattacagtaagcatattttcatgctgctgtcttgtatttgcaagctcaatatttagatggaaacctgtttgctgagccattgatttaattcaa

SEQ ID NO: 455731 - DNA, 482 bp, Homo Sapiens
acgtatccacaggtactgactgtgagagcaattactaacagtatctaaccccacgtgggaaagctttgctggatcctgaaggacaagtaagagttagccagggtaaacagggtaggcagggcattccaggcagaagaaacagatgtagatttagaggttcaagagagcatgatacatttaagagctgcaaatagtttagtgtgatcagaatttagaatatggaaagggatggtgaaaggtgagactggaaaattaaacagagttgaatccatgagaagctttttgggtcctgccgggaatgtagattatagtctaaaagcaatgggaaatgattgattttaagcaagactagcttggtgttagaggacagtaagagtgtaaaatgagatgttgtctgtgttgtataaagttcaattttacattagcaggaagaatagaatttgagtcatttattcaggatgtattactgagcacttcctatg

SEQ ID NO: 455732 - DNA, 751 bp, Homo Sapiens
ccctgacttttacacagggtaaccaaaccagctcccatatgatactactaggggctagacaaaagcaaattaaaaccaaaaatgttagagtggactcagagttaaacatgggtgattgaaaacatgcatttttcctcactgtcttctgaaacccaataaacataaccataaagggatctacaaagacataaacctacgaggacaaagaggagcaggaaagagatgaccctgaacaagacagttcagcaaacttttggaagaaggaaaatggatgagtaataactgacttggctgagtagagaaaggtgagcccttactgcaggcaggaggagaagccgacaagagggaaccagtcctcacagcagagccactggtcccctcaggaactgaggcacctagtacctctgcacaggaagtgttcaggtacagctgaaagtaagaggactggttgaaaatctataaaaagcagtcagagcatgaagatctctcctgcttctctcttagaaggtgagcaactctcccccacctatcggagacatgagccttactgtctggggagattgaaacagagaggttccagtctcagggacacccagcccagcataggaaacccaaagggccaaaaacaaaggcactgagtgagaactggaccctcacttggagggttggagttgttgaactccaatggagttcaccaatggagaagttgaaccctcagtttccttcccctcctcacctgtggatacagtca

SEQ ID NO: 455733 - DNA, 451 bp, Homo Sapiens
ttacacaggatccagaaatcaaaaagcaaagattttcaaagattatgttaaaagaggtgaaagtaaataactgtcaaactagaactgtgtacctcacaaaagcatccttcaaaaatgcagaatataggacatcagaaatatgagtgactagagatcctcggctctcattttcctcacacaagaaaggactaagacgatgaataaacagttaagatttgactggagtgctgaagggagggtgctggagtacagtgggaaagtggaaattcacctgtggtgatcagaagccaggaagacaatgtggaggcacccaggtcctacaatcctgcctctcccatctagatcaaatctacccagagtcaagagagacttcctgttgcagagaatagttaatcagaagaccctcaccagcccccattgtcactgtaaacacttacggttcctatagtgc

SEQ ID NO: 455734 - DNA, 451 bp, Homo Sapiens
cggtaccctactaagacacagggcagatggaacacattaaaacatcagaacagaacctcaggtagttacagtagagtgatcatgtcatctcttaagccagccaaggtatgaaattaaaatattggctagtcttaaacatatagaattaatttcaggaaggctttgtcaatacttgctggatatttacagatcatctcatagcatacactgtgtttaaagctacatgactcatagaagtcaatgtaaaagggggtaagatggttttgtttgagtgtagcaggtattatttacatctcctcggaagtgttgctgataagagataggtttgaatctgttcattacatatgaatattggttgtgtttctttttcaaaaaattatatggattgcagtttgacttttgcactcgctttactggtgatgtcagcattttataaccctgtggaccagta

SEQ ID NO: 455735 - DNA, 399 bp, Homo Sapiens
  misc_feature (28)..(28): n is a, c, g, or t
cttttccacagggttaccagggtcactngctggtacatttttataaatttaatgatcacattcatctaaacaaaaccaaaaataagcaaactcttcctacccttaacacatctggctgtccatctttcttccaagccaatgcctactacaaaacttgccaggttttgttgagcatcttacaagggcaccccacaatcaaggaaaatatgtccacagaagggaggacaatgctttgtatttggcgtcccacaaatttatgaagcactttggatgggtcagcacaacacaaggcggcatagtagaaagagcagcagatgggaagggagaggctcccagcggtaaaaactttaatgacaccatcttccagaacattccacaggtacttccctgtgacaaacg

SEQ ID NO: 455736 - DNA, 570 bp, Homo Sapiens
gacagagtcttcatcttccttcccacgcccagcttcagtgctggtgctcaggctccgacttccccaggaattccctagaccacaggacaatcaggagccaatcatttgagctcagaccaaagatccttctccacagtcctcacactgctatctaaggaagcagaggctgtgcagagaggaggcagccaagagccccatgaggatgcgctgtagcccagagcagcactcagtgagttaggcagggaacaagcagtgtggtgccaagtcaaagcccaacacacaggcatggagacaaggtctctgattcttgaccctcaacttcagagctattctctggtctaaattttctacacatatcttccttttataatggggaaaattataaccgcaaagcgaacccatactctgagcccactgcccccttagcaacccaggtacctgtgctaaagggacacagttttgcctctggaacttccaaaggcaactggagaaaagcagaagtttgcagtagaattactcacgggatatacagcactgggaggctattcaggccacctatttcagaccctg

SEQ ID NO: 455737 - DNA, 518 bp, Homo Sapiens
ttgttaacaggtatttgacttgttcatttgtgggagttctttgatattctagaaactggactatgtccagttaaatatgttacaaacatcttttcctgcactgtgttttgtcttttcattttacagtgtttttgattaaattcttaatttaaataaccaaagagtacagttcagtgctctgtgcagtgagtgcagtcacattgttgcaaaaccatcactgctgtctaattccagaacctttcatcacctacaaggaaattgtgtgatactcctcattctcccctcctccaagcccctgataactacgcatctactttctgtctgtatgaattggtctgtgctgaacatttcatgtaaatggaatcatacgctgtacggacgctatatggacttttgtggccggctggccccatgcagcatcatgttatcagggtccctccacactgtagcaggtgtccaggcctcattcccttttatggctggggaatgttccatggtctggatagactatacttgat

SEQ ID NO: 455738 - DNA, 481 bp, Homo Sapiens
tacttttccagggcacttccaccctcttagtgtgtctgctgggcctgacaactacatggacagtaatgagaggttcccaggagaaagctactccagacttctcttactttttactgccgcagcagagaagccatttgattcatgcctactttagcatcattaatcacataccacacgacatcactttggagagtcacttgggactactgggactgggatttcacgtgtattatgatgaatttgaagcatcagtgtcatgtctgacattggagttcccgtaggaaaaggaagatccaaagaagcaggtggaactgaatgcttatatatgaagttggacaaaaagtaaattgtgaaaacgtgaccagacaaaggagcatgggctagggcagttagttgtggagaagtgactaggaagataaggattcgttcagcaaggtttgtttatggaggtttccctcagccttgcctccccgtgcctgtg

SEQ ID NO: 455739 - DNA, 651 bp, Homo Sapiens
ggcccttcacctcgtggtaaaggttatagcagcaattatagaaggtcaccagaaagacctacaggggatcttagagaaagaatgaagaacaagcgccaagacgtggacactgagccccagaaacgaaatacagaggagtcatcctcacctgttaggaaagaatcttcaagagggagacatagggaaaaggaagacatataaatcactaaggaaagaactccagaaagtgaagaagaaaatgtagaatgggaaactaatagagatgattctgacaatggagatattaattatgattatgttcatgaattgtcattggaaatgaagcgtcagaagatacagagggaattaatgaggctggaacaagaaaacatggagaagagagaagaaattatcattaaaaaggaggtttcaccagaagtggttagatcaaaattgttcccgtcaccttctctaaggaagtctagcaaatctccgaagcgaaaatcaagcccgaagtcgtcttcagctagcaagaaagataggaagacatctgcagtatcttctcccctgttggaccagcagagaaattcacaaccaccaagtgagaagcaaaggaccacgtactcctagtccaccccctcctataccagaatgatatcgtcgctgtgaaag

SEQ ID NO: 455740 - DNA, 549 bp, Homo Sapiens
aaacaggttggatttggtttcccagcaggaaatgcctagcagacatccggaaatgtagccctagatttggctcaagaggtcaggtttgaagatgggttttgaggagtcactgctgagggatatcgatctagtcatcatggcaagcaagactgctagagagaaagtgtagatagaggaaggcagaagcagagagattcatggagatgctcacacgtagaagccaggaagaaatcagtggtggagaggccaggagggagcaaaacagtcgttggggaaaagtaagaggagaattttcttagaagaatagggtgagtcaacaagtagcaaacactgaataaagaagtaaaaaagttttgcttaaatctagccatgcctgactgcagaagtgagcacaatatgcttctgaaatgattaccctcccaaaggtagaggggccaggccaggtttctgcaatctcggcacagattaagcaggcaacgctgggagttctgagcttccactcaaagtcagggaaatggcaagtatgggatcgctaacccactccacccc

SEQ ID NO: 455741 - DNA, 638 bp, Homo Sapiens
gtatggtagttgagctgtctctcaaatttgactaagcaagacctaagcaaatttcctgggcaactgcattcagcatacggggctccttgtaattaactgacttatttgccgagattctcaagttagtcaggaccaggaatcttttgtctagccagtgtatccaaggtatttcgttaattctagttttatttaaatgtttaaaaattattttcccatatttgaaatgggttggtatgaacaaagttattagtttattcctttaaacaaatctcccagctattgttttgtccatgtaatactttcactaattactaaattgctttctgtttttgtaatgctggacttcacactgcccttatattctgcacatctgaactagagaaacaatgtagtcctggtaattgaccctccctggtggccagactttgtggagtttatctactggtgggagcttatccaaaaaagactgtccttaaaatttgcacggctgaggtaggatagcagtgcatcatactaactggtatcattttgtgattatttcatgtgggattaatcccagcatacaccattgttaacactggaagtattgtggaattttattaaatcctgcagcccctgtggtagtaggggatcctcta

SEQ ID NO: 455742 - DNA, 562 bp, Homo Sapiens
agaggccaatactcaataaatgctgattttctttctttcttttctcaagggtcaaaatgggaaagtggtgccgattcaattttcttctggagcattcctactctcccaaacagttgggtagccaaggatagtgaactggctgtcgagttgtttcaaatgtctccaagtatctaagtgtgttagctttctggttgtatctaaggaaagtcagaaatataggtgcctaggagagagtcaggtgagctcctggtgaaacctcctgccctctgctctccctgagagagagagaacaggacataggcagatctcacacaattcctggttccactttagttacactttttctaagtaggtcaggagctaatagccctttcttctttatgatgacatacctgtcttctggaagcacatttaagtacatttaatctccctttactatcctgaccagcactttgtcccaggaaggatcaagtctaaacaaatacccaccttgtgcttccacagaggtaaccatgatacctaagattggtcagcaaggtggttcaagctaccctgtggaata

SEQ ID NO: 455743 - DNA, 504 bp, Homo Sapiens
ttttttttgacaaagcttaaagggtttattttccacaggactttgtagagccttcagaatactttgtgcccagcaaatctttaggaggggcctaggatgtgctggctttcccaaatgtatttgaccaaagaatactttttttggcagaaatattaacatcttaagattgcacagaacgttttagagaccattaagttaactgccactacaggaaagaacaaaaaatgcacactccacttgcaaatcctccctgcaatacagagcattcaggtgctctgccttaccaagcgcctctgcttcaaggtggaagcaactgcttactgagtgcttcagtgggccttgccctgctctggggaaatgactccatttcaaccatcccagggcaacaatagccacagtgttcaacacctagaaccagtgaggccttttagaaggtggttgtttctaacaactttttacaagacagcaaagtcaggaacaagagaaggcagaaggatactcccc

SEQ ID NO: 455744 - DNA, 496 bp, Homo Sapiens
gtatctggaaacaagtcagaaacaaacttccacggggtaggagtcagggaagctgaatgtccggagtgcacagcacaaacctgagcaaggaaagatcatcttggctgtggtgccaatggaactgccactgagatacacaatgcgctgttttcttcccaacaagccaaccgctaatcccagcaccatttgattgatgcacccattcaatcctacacgcgacaagaaatgctgagtgtctcctcaaagcccagtcctcttccaagcagcactggtacaaacaaatcagatgctcgcatttgccctttctcccgtcgatttcaaaaccttcacataaaaacgccatttaagtgctctgaaattcataaacaactttaaagggctggcaaattattgctaagcagaagtcttgttggtcctgataagaagtacttgtaataaatgtttaacaacgcatgccaatattaaagctaagtgtttgttcttgccctgtggagta

SEQ ID NO: 455745 - DNA, 524 bp, Homo Sapiens
ctcaatttgcagtctaggccctgctatttgatggtgtgaaggcttgcacctggcatggaaggtccgttttgtacttcttgctttagcagttcaaagagcagggagagctgcgagggcctctgcagcttcagatggatgtggtcagcttgttggaggcgccttctgtggtccattatctccagcccccctgcggtgttgctgtttgcttggcttgtctggctctccatgccttgttggctccaaaatgtcatcatgctgcaccccaggaagaatgtgcaggcccatctcttttatgtgctttgggctattttgattccccgttgggtatattccctaggtaagacccagaagacacaggaggtagttgctttgggagagtttggacctatgggtatgaggtaatagacacagtatcttctctttcatttggtgagactgttagctctggccgcggactgaattccacacagctcacttgggaaaactttattccaaaacatagtcacattgaaccctgtggaata

SEQ ID NO: 455746 - DNA, 485 bp, Homo Sapiens
tccacaggccttacaacctgagctgacgttttggaaaaatttcccttctgggcaatcaaagcaactatatgaagcttcatttgcatcacctgaaaattagtttctttccatccaggtttcttggctagcatcctcactaatgcctggcatggcatttcagttcggtccattagctcaacagccttctggagctcttccatacaagccagcctttctttccagttactgctgtcaagaagctgtatacaggtagggggaagaacagctgaagctttttcttcacatacttctatcgagagctcaggctccactatttctttagtctccagtcctttcttgttcttggttccagtattccctgcgcctcctggtgcagctggtttccccttttttggtggcccaccagccttagccgcaggtgccttttttagaggtcctggtttgggtgcagaaatgtcctttgtgtccttatctcctgcagcccc

SEQ ID NO: 455747 - DNA, 531 bp, Homo Sapiens
tactttccaggggaggagaaaggaggtaattccagcataaatacagaaatctgagtttgtggcaagcacttcagagaagagccagcacagctgctaactgattcaaacctaaacgtgattatacctactctcctaatgccttataagcagtgcaaaagaaaagacagtctctcctgagtccatgtgaaactaagatgttttcacctaagagttctggtcattgttattattccacagtctaaaactgcagtatttttccttttggcaattcagtgtgtttcacaagttcatccctgtatcctgatgggtgcccaatacatatttcttgagtaaatgaaataatggatgttgagaacttagaggagcacaagaggatggagggaaactggaaagatggccagtccagctttaagaatttggccaagaacttcagagaccataccatgggataaacttaaaagaagaaccacacattaaaagccaaggagctttctggaatgcaatacctagcgcagctacagccctgaaaag

SEQ ID NO: 455748 - DNA, 476 bp, Homo Sapiens
tcgagccggtcccttttcacaggtacttattgctggaaacctacgttgttccttggattgaagtaatctctccctcctctggtgcgcccacagcacttgcaccaacagtgggtactcaacagactagcgtgcctgccgaagaaggggtcctctgacaatcaggggacaatggggaattatgctctccagactttctacacacacaagtcacacaggaaggaaggtaaagagaaactagagaaaataatttttgaagaaaaacttttcaggaagtattgaaagtacacggtaactcagcctggggcaggggtggagggcagcagcactgtttgctgcagctatgctccttcctcagtgccctgcacacccgggacttgctcggtgagcatctctcgtgtcagtgacagctagtgtgagtactcttatgttcagctgcccctgactacctcttgactttggggacaagttacttaatc

SEQ ID NO: 455749 - DNA, 402 bp, Homo Sapiens
tacttccacaggggaggaaacactttgttaatcccagagtagtttaggagatttcaaagtttactttaaaagtctttaatatctataccctgatggatactgggaagatgtcacaaagtttgtgagaaccattttatgaagagttaggaggtatctaatataaacatctttttataaaaatctatcagacaaatagacttttagctgtgcacttgaaatacacacttttctcaaatgactattctggtttgattactatgcttatcttaccaacatgggacatttggaagaaaggagaggaagtatcataatttagaaaggcagttacaggagtggctgaatgaactcaagactagagggtgcagatcccaagttcaaatattggctgtgatggcctgtgga

SEQ ID NO: 455750 - DNA, 540 bp, Homo Sapiens
  misc_feature (120)..(227): n is a, c, g, or t
gagcaagtcacgtcttacacggatggcagcaggcaaaaagagagagagagcttctgcggggaactcctctttttaaaaccatcagatcttgtgagacttactcaccattgcaagaacagnnnnnnnnnnnnnnnnnnnnnnnnnnnnnnnnnnnnnnnnnnnnnnnnnnnnnnnnnnnnnnnnnnnnnnnnnnnnnnnnnnnnnnnnnnnnnnnnnnnnnnnnnnnnctgtccaatcttagtcaagccttcagattcctgcagtcctttgtagtaaaactagcagaattgcttggcaaagcccagttcaaatagccagtccacagagttgtgagcaagtaagagttgtttttttaaagctactaaattttggtgtggtttgttttacagcaataaatgactaagatactgactttgtagctgccctatgtggggaattttatattaagtcaggctgagagtttttcattcattaagttatttaattgtcacattaactccatgacatagtatcatatgccctgtggaaagacctgcccgg

SEQ ID NO: 455751 - DNA, 548 bp, Homo Sapiens
tttgagaagaaacaacagcatggcagacacccccaaactgcgtttaacgtgcagtgaaatctcccatccccactccattcccaaaccatgaggtttcagcagcagataagcgtattattcatccatgaattctaagcaatcagggtggcgtctggcatgcagaaggtgctcagtatgcactattgaactaaactttcagatacctgatagttcactcattatagcaagtgataaattgcagtaaatttccaatgaatgcctgaacattgctattttaaattgttgatgagagaggaggactagagagagaggtgcatggagccaaaccactgttttgttgtgattatgttggcacctgacttgtgttcttgccattccacttattcagagaggctcagggaaactcgaagtaggtaaaaatatgcttaaggagagatgaacatttatatgaagtaaggggaaaggctggggttttggaggatacacacttcattttgatgttgagctttatcattgactacatatataaacttcagaaagtcactaag

SEQ ID NO: 455752 - DNA, 174 bp, Homo Sapiens
aatccacatagaaaaagttacttgatcaactttataaacttctaaaatggatgggacaattaaaaacttttcaggtacttggctcactgttacacattcatttataaaatacctttacatggagaaataagactgagaaattaaccatcagattctattggagtatccctacca

SEQ ID NO: 455753 - DNA, 455 bp, Homo Sapiens
tacttttccacaggatagcaaatataattcagctcatgtgtcaattatgattggttggttgtaactgtctagagtgctctgaaaacactatgaggcttcaccccagctgatagggagaggtttctatcatctattagcctcatctgtttgtggtgaggagtggggtgctagtggctgactcttcatgtctgtgtctttcaagctccagcctatcaacatatattgtagaaaattcagggcaaggaaggtgctggtggaccagggagtcattaacacttaggtggcgtctaaaaccgcagggatggtcagatcatgtatgaaggtggtgtaggtaaagagaaggaagttccagagtgtgaaagagcagttagtacagtgacacttggtgtggaatcattgctaatctgctgtctcaccttcatgcatggggcaaggccaagcccataggtacctcc

SEQ ID NO: 455754 - DNA, 415 bp, Homo Sapiens
tacttttccacagggttaaattactgtaattctatggtagacacatacattctggttggactgagcagctctttgcgccccttcccactacgtttttttcagatggaatgtaccttttactgtgtgaatcttttcctcaacatgcatctgaagaaaacacctccgtcctctgaaactcagcagcatgtattatctgtaccatagactattcattctgattaatgattcaaaaaacaccaccaccgagacagtggactgactgccgttagactgagagagccaatgctactgaatttagaaatagatcttaggaaaatgggaaaagtcagagttctgcccttgtgatcactttcctggtagatatcaacttcaaagttaccaccttccaaatggcagctgctgttccaagcacttc

SEQ ID NO: 455755 - DNA, 662 bp, Homo Sapiens
aaagaagtgtgaacaaacaagcaacagtttatgaccagcgtatatatagcaatggaaagttgcatctttgctgtgaaaacactttaaagaaaatactttttaaaaaatcccacagctttttggttgccactagacgcttcttattttaatcattttagtaatgctcagctggaccagtgttagttatatttgagtcagaaaaatgttgtttttcaacttgctttataatctcctgcatctatctcctgctgtagcatcatgaaggtgtcaggcaacagtgaaaagtgcacatttttgttgttgcagaaactgtgtcagaggaataagtaaatcagcctgcagcagaagactttgttcagctccagaggcatctgtgaccgtctgtgtccaagtctctctgtgcctttttcttttacaaactgaagctgtggagccaatgaagtaacagtagagattgtagggaaagaatacctcaggaaaaacaaatacacttacaagaagaccctgttcttagaaaatgtgtttagttatgggttagcactagaagagacttggctgtcagccaggccaagtgaagggacctcttcatccattcccatttcatgtcccatcattaatacggggaccccaaaaaggcaaactcgggttttgccatcagtttg

SEQ ID NO: 455756 - DNA, 526 bp, Homo Sapiens
  misc_feature (307)..(353): n is a, c, g, or t
tacttttccacagatggggcagttgggccgaggtccaagttggttttttccagatttcctctccctttctttataagtattttggttttgacagctgttgtatccccaagagtcacagaagtaatatcagtcccagaatcatgtgatgaagacttcttccgccctgttgcttttttggcagaagatgaagtggcaacatcttcaccaacaaccttctctttggaaaccctacccacaggatacaaagcagaactactctgaatttctgatccctttttccttttctctttccttgactcccggttannnnnnnnnnnnnnnnnnnnnnnnnnnnnnnnnnnnnnnnnnnnnnncacgctcttgtcagcatctcgatctttggacagctcctcgggggccttgtctttatttctccctctttcagtctgagagcctggggtaaaccaagggaagagaggagtaggactacttgatgaaaatggctctgccggagcactagtctgcttccttggtctctgatttttcc

SEQ ID NO: 455757 - DNA, 166 bp, Homo Sapiens
acggcggcggataaaatcgaacacttattagacaataaaatcatcttttttaataacttaaggtaaaatcctaattactggagtctttttttctctcccttatcattcccctcttacacctttcatttttcctcccctccggcccatgtttaatctgtggaaagta

SEQ ID NO: 455758 - DNA, 105 bp, Homo Sapiens
tgcatttagctcggcctgtccttcgcccttcggtgaatgcgattgccatttaaagtttttgtgacatgattggagtggcggtcccttcttccatagggttgtaac

SEQ ID NO: 455759 - DNA, 430 bp, Homo Sapiens
tatttttgcacagcattttggaattgactctcattttccatttgttataggtgtcagtgtcagctttgacgtgtgcgtttcctgtggtgccgtgtaattccttgggagatccttctacttgcatgggtggagctttggggactcctggcatagaaaggcctttatcaccaatcttatcagaagaaacattgttacatggtcgttggcccatatactcaggagtcaaaacctcatccataaactctggcttcaagtttccttcctcaccagttgtcacctgaccaggttccaaaaaagatttactggaatgcttttctttgaaagtttctttacaggattttttccctttctgtctcctatctctggaactagatcccatatgttcgttgataatggatgatctgttgctcattccagatagcttcaaggt

SEQ ID NO: 455760 - DNA, 532 bp, Homo Sapiens
gactgtgccccgggcatctgaattcgtttaactgagtcagtgagtcagttttctgcccattagtttatctcatttttaaatgagaaataggtgattataataatgcctacctctaagcttattaaaaggattaatttattttatgtatctcaatctctgagtgtaaccccatatatgttttttgtttgtttgttatatttgatatcgcaccacacctactattattgtagtatatcatgctgtgctctaaggagcacttagtaagaaagtcttgcctgaaaaatatggaaatgagtctgattccatacttcttgaaactttttaggaatcatacataccagactgattatgtcaaaagaaataatagtagaatgggagtacttcagggaacatcctgtctggtaggacctggaaggggtatatttgattgaaagatgattattgaaactgggatatttgatgatttaggaaggaaaatgggtataaggtagaaatgtcttttatttatgtattttcccctgtgaaaagtagc

SEQ ID NO: 455761 - DNA, 329 bp, Homo Sapiens
tacttttaccacagggatatttgtattttaaaagaagacaaaagtctaagctaagaaaataaaattctcaaattttaggcgttagtttgcttggtaggagaggtatttctgagggtaagcagaaacttcttagcacgcctgtatatcagtccccccgtagatcagcccctgaaattgatccttaaagccaggtctacattgtattgccttccattcattagatggtatggcacacttaaaaaaaattcaaatttagaatttagtacatgtttatgtagtgagaagctacaaacttgaggtttctgttttttccccccctgtgaaaagta

SEQ ID NO: 455762 - DNA, 245 bp, Homo Sapiens
catctcacctcagccacctgagtagctgggactatatgtgcatgccactgtacccagcaaaagaaattattaagcagggacatagtggccttgaagtacaaaatatgtgaagaacaaaaatatttctgacatcttattagaggagtgatctttagcaactgactgcaaggaaagtgatacttaatgaggcaggctatttcagttatgctaaagcaactgagagagtacttctgtccctgtggaaa

SEQ ID NO: 455763 - DNA, 689 bp, Homo Sapiens
ttttccacagggtacttttccacagggatctggaaacaccttcaggttgtttctggagacattcagagaattgagggacttgaaagagtgaaggaacagggcagggagttctgtcaatttattgtcagatatatcaagtttctgtagcctccgtaaacctatccagttagtggcattttcttcttcgaacaatttttctaagcaagttttttgaagctgtcagctttttgaagttttgagaggtgcaagaatccaggagggaggtgggacaacttgttgctggaaatgtcaatttcaagtagcctggaacagatgatttcgtccgatgactgcacgccaggcagctcccccaggtggttgtcggagaggttcagcttccggagattgatgaggccccaggggataaccgaggggagggtcgccaggcagttggcagaaaggtcgagctccgtgatctggcaggagatgtctatgagccagtctaggtctacccagggcagtctgagatgggaccatttcacacggagagctgtttttcctggataactgctgggcaagggactggcttcaatgaagtactttctcagcagatgtttgctggggtcaggactatccagcaagatgtaggaacagaaataggccccatgccgaagcaggaatattgcaatgtcttcattccccctgtgaaa

SEQ ID NO: 455764 - DNA, 293 bp, Homo Sapiens
ttttcacaggtatttggccatcttgtaaccacccccacttttttcttttgttcctcttctaggcagttcccaaccctcagaggtgaacactgttttgattttctgttaccataagactagtgttgcttgttcttgagtttcatgtaaaatagtacagtagtacagtcaggcttgtttcgcttgacataacgtttttgagatttgttcatggtgttttgtgttttggtagtttatttgtttattgctaagtaggtattcctccatgcaaatatactacaattatgattatctct

SEQ ID NO: 455765 - DNA, 130 bp, Homo Sapiens
tctccaacttccatgcacattcagttccagccgcactaggcttcattggtgttccacaaacacccaggatgctctgtcagttccattgtcctgtgtgttttctctgagtgataacactttcctgagatct

SEQ ID NO: 455766 - DNA, 577 bp, Homo Sapiens
agaaaaaacagcccattttgaaagtcagtctgtgacctgtgatgttcagaattctacaagtgcctcagggcctaagcaagaccatgtccaatgccctgaggcttctactggctttgaggaaggtggggcaagtcccaaacaagatatcattctgcctggagctctgacaagggttgcactggaagctcccacacagcagtgtgtgcagtgtaaggagagtgttgggtctgggttgacagaagtctgcagggctgtcagcaaacattccaggccaattccactgccagatcaaagaccaagcgcaaatcctgggggaattggggaggaagccccatgtagacacccaagggaagctttagatggccctgtcttctcaaggaaccctgaaggcagcaggactctcagcccgtctagagggaaagagagcagaactcttccttgccgacagccatgcagttctcaacctgttgctactcatgcttattcctcccattcctctactttactgtgttttagagatggtgacctagggaaggagcctttacaagactgccccacatacgatccacccatgtgg

SEQ ID NO: 455767 - DNA, 268 bp, Homo Sapiens
ttacagccttctgagcactgtatgtgctttaacttatgaaatcttataaacttaggactggctttaaagtctaaaatatgaaaatcaattaatgattaaatactgcccccaaaccatgacagcataatttttcaggggtaaataattttttctagtgctttttaatattgataaaacataaatctatttttaaacaatgtgctttaaatgtatagtctctttaagttcatgtttcctgagcacattcccctgtggaatagggagtcct

SEQ ID NO: 455768 - DNA, 513 bp, Homo Sapiens
tccacagggaagcattttaaaaactcacatacactgacttccatcctgagttaactgagtcataatctctagaagtgagtagcaatcatatattttttgaaaaagccactaagttatttggatgcatatatcaagttaagcaccacttcttctgaggactttacatcttacgtaattatttaataaccacaaattgcctatgaaaagcaaacaaaaatttacattattggttctatccatatgcccctgaaataacagacccaaattccatccatctagccaggaaattactaggccaaaaccaagccaggtaatggcgtcccataagaggtcacaatgaaggactgtcagtatctgatactctgcttatcttgacaggttattccatacaaattgtatcctctgtgagtcctagatggtcctgtcactagaaagaggatcatttagggtttaccatgggattatcgaatgagaataaagtccacaaaatctccacctgcctgtggaaaagta

SEQ ID NO: 455769 - DNA, 544 bp, Homo Sapiens
ttcgtgtgttaattcccttgaggtgacttttgcattggctacagtatgagaaccactggactggttcaccagaagggactgaaaggtttcagggaaggatggggcatatttggtattttcagggtggttatacagcctatcaccccttcacctgatggcttccatctcctcaacccaccagccagggttgggctttcagccgctgttttaatttgcctaatatggcctgtacgactgtagctgattgggccatgtgaagacacctaacccaagctaggccaatcagatgatcactcccacattccctggtttgcaggaagtccaatttgtttcattcacttacctcagaaccagttgggttgtccttctatgcctactatgtctactatgtctacttctttatttttctatttatgtcttccttacgtgggtttcttcttttccttggacctctatctgacctacccttgcctggtttttctcttgtctctctctcttgccttattattcccttttctgctttcactcaacccctgtgaaagta

SEQ ID NO: 455770 - DNA, 463 bp, Homo Sapiens
gcgttcacaggcacaagatcagaataaggtgacatgctattactagggtttttcggtaaaagtcactgaaaagtaagtaatgttttggtctcggatatatgtttcacagagcatgcaatctggcgggaactgacagtttagtgtttgtttcgtagtaatagttttcgtgttttggccatactttatttaccactgaatgctctctgattacggatgttttcaaagcagtacctaaaatgtgagcacttaaataaatgtacagggcatagaaacatttttgctaatattgttgctttgagcattcatggtgatgctcaaagttgaacagtaattttaataattgtgaagaaatttagagaaagaatctctggacatatttaaagaataattcattttaattatcttttgtcttcttatttttttgctttaataagacaattaccattaccgagttaagaaccca

SEQ ID NO: 455771 - DNA, 549 bp, Homo Sapiens
tacttttccacaggaagggaagacggatgtcaagatgacctttccaatgcctggcaccggagacttggcaccactcagctcacggccacctccctcttggcagactggaggccttcagggcccagcaggccctgacagcaactcctgcagttcatcaagacaagggcctcagctctctcagcctggccccagggacttgcagcacatcctcagggcatgctgcagcctgactgaacgcaccaggtgaggaggaggcccaagcggggcagttctcgttccttggatagttctagtcttctcgatctatcaaaaataaactcctgtggggagctcagattgggccagcttcaggatgggcacaggaggggaacagttatctgctgtgggtgcatggatttccggcaccttgctttttgccaacaaggtcacaacgtgcacctggtgtttccacgtgaggagggaaggggcagaggccgggatggagggagggttggacagtggtggctggagaatgtgtgaggactcattccagaaatccctacgctgccc

SEQ ID NO: 455772 - DNA, 316 bp, Homo Sapiens
gggggtcactctcatgctgattcgagtgtcatccccctgcctacagtggggaagataaacagggccaggccagcactacttcctacccacttcccttctgggtctgcctattcactgccagaaagtcagaagtcaatcatcccacgggcttcagcttcaattcaggtagagcagtgaggtttgaaagtgcctcaagcagagcccacagttctctgatcctttacaatattacactctgtaattgtgtggcatagcagccatgctaggaacgaggtcaattacttaggtactcgctagactttttccttttctccac

SEQ ID NO: 455773 - DNA, 575 bp, Homo Sapiens
ctgtctctagaggtcagggtgttggggcggaaagttcaaacactttaatattacggttggttcctctggcacccaggccccatcccaaggctctccaggagaccccagccaccagtcattcattagcatgccaaaagacacttaacactttggagagtataagagttttaggagctgcattccagtaaacaggtgtgcagatcagataagcatttcttattgtattgcagtatcagagatgatgctcaccgctggaccacattccaagatatggctccacttattgatctttgaatgaaggggtaccttattgatcctccccctgaccttaccccaaataacaaatcataccagtactaaactggcagaactcaagattggttaggaaagatcctctgaaacttcgtataatgacagttaccttgttttgagtgtgtcccctgtgccaggcactgtgctgagagctttgtgtgttcagactcacttcacagttacaaaaccctctttaatatgtgggaactgggcttgaaatggtttaggtacacggtccagttcatagccaatgttgtgttact

SEQ ID NO: 455774 - DNA, 437 bp, Homo Sapiens
  misc_feature (99)..(99): n is a, c, g, or t
tactttcacagggggccgttaacatttttcattcttaccagcaatgtatgaggattccaatttctctgtgtcattgacagtgcttattattctccttgntttattatactcatcctagtgagtataaagtgtgtctcatctcattgtggtttgatttgcatttacctaaggactaatgatgttgaacatcctttcgtgtatgtctatttggagaaatgtctattcagatcatttatttttgtagtaacagcttcattgataaatttgattcaaataccacacaattcatccatttaaagtgtgcaattcaatagtttttggtacatttttgtacatttagtacattctgtatttagtacatacaaccaccatcagtaacaaatttcagaatattttcgtcacctcaaaaagaaatcccctgctctttaactgtaacc

SEQ ID NO: 455775 - DNA, 223 bp, Homo Sapiens
tacatgcagtaacaattcaaaattttaattgaaaatattttatttgacagaatgagaccctagtttcaataaaatatatatcattctatgatagcatataaaaacgtttaaaaattaggaagttcatctttaaaaacctacggagttcctgtagtgagaagataatcttatctgaagggcctaagactacataaacaggcatattgtgtccctgtggaaatag

SEQ ID NO: 455776 - DNA, 464 bp, Homo Sapiens
ttgggcaggtgggcagtgggcacatttagtcacccgagggtgtcagccccccactctcccagcctgggctatgttcagggctgacaccgtcccggggactaggagaggaaaggcttgtgttgggggcgaaggcttgttaatgggaacgcaaccgtgggagtgctttgtaaactgttctgtgtggtgcccctggggggagggcaggaagcaatgtcttgccagccagcccctcccgcccctgccatgctgggctccgccttagcttgcttcacagcagcagagttttctgcttgttttgttcatggaggcaaccccagcacctaaagcgtgcctggcacacagccacttctcagtaagtgtttgttgactgaagagtagatgaatgaacgaacccagccatcactctgaggtggcttatttctgtctcatgacccggcatggagtgtgctgaactaaatgtgaag

SEQ ID NO: 455777 - DNA, 535 bp, Homo Sapiens
tactttacaggtgtgtcagcagttttttggctcaggtacaacccactctcccacccaagtgagccctgggatcccaggaggctcagtaaacaacaccttgatccttataggtgcaggctaaattaggctcagtacaagccgccctgccttctcgccctactcacgttagacaatattcctgaaatcaaagtaaaaactaaatcaccttgttaaacaagagacttattttcccaagagaatgtcataaatggaggctgcatttctgaccaagatcttagctgttaatgtatgactgaagatcttggctgttaagtatgactcaagtataacaaagctgaggacacagttgctaatgtctttaatcccttacaattagctctcacatgcgagtacggcttatgcaagcacttcaatttcctacataaattacacagaggatcaattttaccattataacttttgtgtaagtcaaaaggctaatacaatatacatcaaaatctaactgatagcagttattttcttgagattaaaaccc

SEQ ID NO: 455778 - DNA, 652 bp, Homo Sapiens
tatcaacatgggtttttcttttacttcacttttccttatttatatctttttataagtgtaagctcatatacgaagaggcttcatctccaagcagagagaccatcagctctggattgtcagttttccactcaggctatctgtctatccatcatcttacacaaactgttggaaccgtgttctatgggatcactagtactgatgactcagttgttcctcagcacacttactgctgtttctaaaactacagagtttatccacaatttcctatgcatacacctttctaattttaagagggagatacaattcataaatttaaaaagatgtatcaactgaagaatgataaatttcataaatttggaaaggagagctttacttttcataaaggttgcagcctgcagcgtagccattctgagaggccaggaagtgtaacctccatccagaagccagaaacacacttttttgagggtcagaagaatatgacagggatttatgttgaatagactggccaaatacacatattcaataaactataggaagagtcatgaatatttataagtagagaaatgtgggcatgtgcagttgagtttcatgtctctctatgggacccatgttccaaaaatgggttagcataattcgaggatacagttttcag

SEQ ID NO: 455779 - DNA, 446 bp, Homo Sapiens
  misc_feature (400)..(400): n is a, c, g, or t
  misc_feature (405)..(405): n is a, c, g, or t
  misc_feature (417)..(417): n is a, c, g, or t
gtacattattacgatagatgtgtttgtattgttttttttctgatgatactgatgttgatgaatttttaattttatttgatgtggtagagttgggaggtttcagggttttttcccctcttttactttccattgaggaagggaatgagctcctttctcctctccttcagccaatcattatcaaatgttccttcagccctgcagttgccccaaataaccttttttcagcatcctctgtcctcagtcatgccagtctgggacatgctctgttgtgccctgtgacaaaactgctcagtattcctattgcttttactgtgttttaggggactgtgaaggggatcaaaaaaccaaacaggaaggcaaggggagtattcaggacttatggtggatgctgggagtgggnctttntgttcagggggnaccatttttgcaatcaggggtggtttctt

SEQ ID NO: 455780 - DNA, 155 bp, Homo Sapiens
tattttagctctcctctcttatttttagtatgtgtgtactgtccctagtacatatttgtttgctgagtaacgagactgaaaaattccactcagcgtttctgagatctgggcttaattctttagcctcctctcccatgcagatttggagtgaagca

SEQ ID NO: 455781 - DNA, 571 bp, Homo Sapiens
gttgttaactatagtcaccctactcttctatcaaacattcgaacttgttccttctgtctgtatttttgtgcccattaaccaacatctcttcatttccctcttcccacccatataaccttgccagcctctgctaccaatccactctaccttcatgtgatcgactttttagctcccacatatgaatgagaacttgttatatttgtctttcagttcctggcttatttcactcgacataatgaccttcagttccatccatgttgctgtgaatgacatgattacattcttttttacgatgccactgggccccaggggagtacgcattctgttgtgagctgggcttcaaaatatcaccttgctgtagctgcttaggactcggggggagcgtgggacccagtgtgaacttcctcactggaataggaaatgcttttgtgctgtctctgggcagccctctatgtgaattttttgtcctgcaaggggctagggtctctcctgtgactaaaattccaggggttcacagtaggaatgtggaccattgggcatctctaacttaacctttccttgtgaaaaacct

SEQ ID NO: 455782 - DNA, 421 bp, Homo Sapiens
tacttttccacaggccatgtgttttagattcttatttgtaatctttaggactttatttaaaagctttcttgtgacatttgtgatgtattgatagtgtgagaaattacaaaaactaagattctgttttattgtaaagtatacaaaaagaatcttatttcatggttttatgtttctcttctacttggcttcacaatgatccgaacttgcagcttttaaatgagaaaagcttcctatttcattgtgtacttttgtttgtgtaacattttgtggaaatgactgcttattaaaatgacacttcacagacttggactaacgttcatgatatcatggtgtcttttggaagaagggtgttgtgttacccactctatcgccatttcaagctggtgatgaaggcctacagggacactataaagatattgca

SEQ ID NO: 455783 - DNA, 224 bp, Homo Sapiens
agaggtacagctggggcccagcgaccgctcgaagtatggcgaacatcacgctttctagcaccaggaagtccacgccctgaaaaaggatggacagcaaaggggccaaggcaaagtggcacagggacacacatgagggctcgccttcctcccaccagagctgcgacttctgatccaattgcctggaggctctggagcacaggctttagcgttggtctatttttatt

SEQ ID NO: 455784 - DNA, 402 bp, Homo Sapiens
ccatacttttccacaggtcacactgatctacttgctactttgtgaaaaactgagcattgcaactggctttgtattctccttccagcaccctctatcggcgagaacctaatagccactcgctccactgggaaaggagaaatgtagtcagcctaggttagtctcgtatcacagagcaaggcaatgaagaattggtttggaactgtaaggcaataatttaacttctgtattataattgtctgtttttgatatgtcttccttattgcaccatgaacttggtagtgtctggaacagtctgatttgtctccatatctgcattgtcccagaagtgactttggcactaaaaagttgatcattaattactgtttgggccaggtgtggtggctcatgcctgtaatcctggca

SEQ ID NO: 455785 - DNA, 804 bp, Homo Sapiens
tacttcacagggggtgacacaagatgagctgagtttgatgatggtagagtgtgagtgaggcagattgaaggacaaggtccttcgagctgagcagtttccacaactgcaaggccagggtgttgggctaggttatgcatttgaaggttaaaggtatgttaaccgtagtgactaattgtgccagagagtttaacactgagccagatgtgctcaaatgtcagacggtgataagtgttctgccaaaaaaattgggttctgggacagaaagaggatagatggccttttagacttggtggcctctctgaggaggtgctatttatgctcagatctggatgataaaatgatgagtggagagaattaatccagtctgagggagcagttaatataaaggctctgaaataggtacaaatccctcacctttgaggagaaggaggaggctaggaaggctggagtttattgggctgagaaagggtgggatgaactgaggttagagtgcagtaggagtcagatgacgaagggttttgacagtcatgctcaggagtttggtgcatgtatgttaattctaagtgccttggtgtgctagccagcctccaagatggcccagtggtccttgcctcctggtatcatgcctttgtgtagtcccctctcctgctgaacagggctaacctgtgtaaccactggaatatcgtggcaaggatggtttgtgacttctgttgttaggtcattgcaacattctgcctccctcttagtagagcacattgctctagagggaagtcagaactgctgtgttgtgaggacatttcaata

SEQ ID NO: 455786 - DNA, 429 bp, Homo Sapiens
  misc_feature (220)..(293): n is a, c, g, or t
cttcacagggtgagtagcttttctgcgatgacctaaacagctagtcagaaaaaccgtgctctcagcttagtatatttgtttgaaaagtgcttccccttttagattggatggacttgaacacaactactgatgagtgtccacagattgcctgaaatcttctcgggaattcaaaacagtggttttaaatcaggttttacttgtgtgtcacaaccagttggannnnnnnnnnnnnnnnnnnnnnnnnnnnnnnnnnnnnnnnnnnnnnnnnnnnnnnnnnnnnnnnnnnnnnnnnntgggcgtgtagctattagcaaaatctccttgggtagctgatgtatagccttgagttaggaagaactgagtttaacaggtattcttcctttagcattaccaagaatgtttgcatcctttttccctgtggaaaatgta

SEQ ID NO: 455787 - DNA, 819 bp, Homo Sapiens
ggcgcaggtttcatagggaaagaaaagcttcttacatctcagacatctgcttgctgagcaaacacaaacaagaacacatgtattgtttcccaggagctggcaaactagatctcaagtcacacagttacaaagagagctctcattcagatgccgggcatataagctcagctacccagaaagttcagctttaatgaagactgtagttttagaatgaaagcctgagcaggaaggatttctgccctgggaattctcaatgctctgcctgagtcacactggaggatggagataggctcctcattccagcggccagcagctgccacagtcacaagaccaccctccaaacagcaagggtcttacgatgacaacggggactctgaagagaagccagtcaaagacacagggctttggacaagatcaagggtcttcaccaggaaagcttaatgcagaagccccctccctccaagtcccctcagcgtgagccttgagccttgacacagctgtttccacctgcaagggctggagaggccaagttcacgcagatgttcagcaatgttcaagcaaatgatgtgtaaatagatgaagtggtcttagagatggtctaagaggagggaacaggctcagagaggtgaggtgatttgcccacgatccaatgtgaattagagaccattaggacacgaactcaggtatatttccactcttacggtgaatcataaggttcccagtaagtgtaaaatgctgcagagaggttaaaagaatattgtaaccaacagctttctgctttcattctgctctggaatcatttgtgtaaactcacagcag

SEQ ID NO: 455788 - DNA, 317 bp, Homo Sapiens
attttccacaggttgtagcaagaacaaaagaagataatgcatgtaaaaccagagtgcttagcacatataataaagctaaattatcattagccattgttactatagcttatttttaattataattatcctagatacatatctgagcatgattatgtatttttcctatttacccagcttgacaaggtgcttaaatcttttctttagcactagaaaaaagtaggttttaattgaacctcttttcatttcatccattttacagacaaattatttatgaagataagccaacaactcataatttaaggatctctttatgttcg

SEQ ID NO: 455789 - DNA, 243 bp, Homo Sapiens
  misc_feature (202)..(202): n is a, c, g, or t
cgctgcatcagttaaattcacagccagtgtttcccaacccaggtcccataaatgttcttctcaatcctgccgtgggatgggtgaccttccttctctttcatggccttttgttttccttggtggcttacagttgactgttttttaccccatccaccaccctcatgaggcttactacttcccacacatcagaggcttctattgngggtctcatttttttccctgtggaacaagtagggtaccgag

SEQ ID NO: 455790 - DNA, 297 bp, Homo Sapiens
tacttttcccagggtgaaatagaagatgaatacatgtagacaactatttatgtacaaaaactcatacaattattgggtagctgggtataagcccattatcaactctgaaaagcgtgtcttaagatccattcatttttctcaaatggggaagctaaggtacaaagaggccaagagacttacgtagcttatatatgacctcctctgcttgtcctagttctgacctatagcatgggcaagaaaaggcatcaaagaagtgaccctcaaattagccttgttgctgggcggggtggctcagac

SEQ ID NO: 455791 - DNA, 172 bp, Homo Sapiens
atatagtcggacctactttcacaggcggacactgtgggccagcaaactaaagtgatgtagcctaccagttgaatccaaaccagaccagcaaatgttccttgcatgctacagtgtatgctgtgttgttgctgtcgttgggcctagatgtgggggcctggcaggaccccaggaa

SEQ ID NO: 455792 - DNA, 331 bp, Homo Sapiens
  misc_feature (15)..(15): n is a, c, g, or t
tactttccacagggnagttcagtgagaggaagctggggtgaagactccattgattgggggtgtgcctcgttgctgacttgagccggagcagtatcagtggaaggaggtcagtgggagatgcttgtagtgggagggaatgaaaatgggaatggagcgaggagtcatccagagatgactaagaggatggcctgggggagccatcagggtaccaacaggaggcaggtggcatgctcaaatgtgtgactagagaagctaaggaagagaccctttgtaaaagtatgttctggtctaggtacagcatcaagtcatggtgtacttgtgggaccgaggg

SEQ ID NO: 455793 - DNA, 339 bp, Homo Sapiens
cttagagggagataatctcttagtgatttgctttcctgtctactccactacatagtttgtcttgtaagcctaagaaagatgttttgcctttgaagataatagtaactccttcagctacatttagagatcctgtgtcaacatatctagcataccctttcttttttgtaattatacacttaagtggatgttcagtttgagacatactgtgaaaaggttggtttaaaagccttttctgtgccagaggctaattttctttatgcttttcaagagactatgaagaggctaatgagcactgatgacatcactaagctgagacaggcctgtgaaaagtaggtccgt

SEQ ID NO: 455794 - DNA, 307 bp, Homo Sapiens
accccccaaatcttattagtggccattacccatctgcatcaggataatatccagatcagcttattttatttttgtatctactctgatattcactttgattttgcttaggctgttggctaatggatgctaagaaagtagagattacaggggagtggtcactcaacactttatgggttcaaagttctgtgctaggcccctagagacacggtaatgaacacagggcttccttgttctcctttaacttaagggctatgtggaggtgggagtgttgggggaagttagctacagaaaatgacagtgcaggctg

SEQ ID NO: 455795 - DNA, 191 bp, Homo Sapiens
cccaggattatttgtggatcaagcttttgatccgactcacaagggatccatcaacaagaagcttcttggtggtgtgtcctttcactgggatgtcactgttgtctctttgtcactcgttatgtatgtcaccacgcattgaggcacccatgaactctatccttcaggacagctgaggtggcatgaagctgcca

SEQ ID NO: 455796 - DNA, 422 bp, Homo Sapiens
  misc_feature (107)..(116): n is a, c, g, or t
  misc_feature (277)..(277): n is a, c, g, or t
  misc_feature (283)..(283): n is a, c, g, or t
  misc_feature (297)..(297): n is a, c, g, or t
  misc_feature (358)..(358): n is a, c, g, or t
  misc_feature (411)..(411): n is a, c, g, or t
cagataatgatccattttaagctattggcattgcaataaatgcagttattggatgtgggtggggattctgaattttgttttctggtctaaatgtttaaaaaaacaannnnnnnnnnctgaaacaagaaataaacaacagtgaaagtatcctcctgccaaatgcagcttgaagacagcctaatgacatttgggtcttaacaatcttccaaggacaacaattctgcctccctgggaagcctctaacatctgtatatattcagctccactgaatgttgcnatgaangtttcattggtagnaaaatttgacacatggccttctggatttaatcccggttgggtttcacctccagtccttgtnaaaggggcacaccctggtaggttttccattttggttccaatcaatggaatttnccctggctcac

SEQ ID NO: 455797 - DNA, 158 bp, Homo Sapiens
atcactcggtccctagttatttacttacttttatttggttttataaacatgtgctaagaggtaggtattatttttgtgtccacttcacagataatgaaatagaagatcagagagtatatgtgatttgtctcaggttgcatagctaggaagtagcacag

SEQ ID NO: 455798 - DNA, 484 bp, Homo Sapiens
  misc_feature (336)..(344): n is a, c, g, or t
tacttttccacaggattatctgcaaggattacctctgtgaattctcccattattcgctggagtaaatattatgagcattttatggttaagcaacacagctggtaaatgatgaagtcagaattcaaactcagttattctgactccacagtctccaattacttataataatctcttctcctatcaggctttaacaaaaagcccacatatttatattctctcaatgactccctagaatggaaagttagtggaagcttttatatacaataaagaaagaataaaggcaagattaatatgtattatcatggtaggtagagtggagaaaagtatattatgtcnnnnnnnnncttccctctcctactccccctgtattttccaggtttcaccacattctagaaaacatttacttcagttgaataacccatcacctttgaagacatttaacttgctccactagaccccaagctagagtctagcctgtggtata

SEQ ID NO: 455799 - DNA, 431 bp, Homo Sapiens
acgatcataggtggctgctgtgacaaagggaaattgtgcttttccagcatgcttactgaccctgatttacctcaggagtttgaaaggatgtcttccaagcgaccagcctctccgtatggggaagcagatgtagaggtagccatggtgacaagcagacagaaagtggaagaagaggagagtgacgggctcccagcctttcaccttcccttgcatgtgagttttcccaacaagcctcactctgaggaatttcagccagtttctctgctgaggcgagagacttgtgggcataggactcgcacttctcagtacaatacaatggaagttgatggctgtcaagttatgtcttccatttgcccgacacaaatcatctacctcatctcagaaggcagaagaaggtgggcgacagagtggcgagtccttgtctagtacag

SEQ ID NO: 455800 - DNA, 513 bp, Homo Sapiens
  misc_feature (25)..(25): n is a, c, g, or t
  misc_feature (48)..(48): n is a, c, g, or t
  misc_feature (126)..(126): n is a, c, g, or t
gcagagagaaggagcaccaccattnacaaagactatcatttgacattntctgcttctgaaatataaactcttctaaacaaaaattactttaaaaatccatttactcaaatagtttttggtatgatngcagttatcttgcagggctctattttgaaaatttgcaatattacatgacctttatttccctaattgatggccagtgctcctcacattatatagaaatgctttttcacatgtacacgttagggtcttacatgaattattctgtatactgttagattcattcatgtcaaaaatatatttgaaatgggcagaggcatatatgaaaatcattgcacttatggccatgctgatgcttcctacagacatgtttcatgtttcaaacattttcacttttaaagcctggggctcagggaggggccaaggcagggagacaccctgagaagaagaaatactatttcttccaccagagccactaaggatcttttctcacttgcaagtttggcatgaaag

SEQ ID NO: 455801 - DNA, 235 bp, Homo Sapiens
gaaaaaaaggagttcaattttgaacgccaacatcgcacaagaggagctttcaacagccactcaaggaagagaaaaatctagtaactctgtaaaatgggcacagtgcttcctagatgtgtcatattttgtcaatggccacagctacatcttcccattattccattattcaagattccatttttttgctctgagttggaagccaactacttccagagttctaatgataacattagtg

SEQ ID NO: 455802 - DNA, 412 bp, Homo Sapiens
tacttttccacaggctgtgaccattgaagatggtaaatgggaaaggagccgggcacacctcacacatcaaagcagtgcaatatgctgtagctgcccagccacacacctcggagtcgttttacaggagtgagcaagtacttctcttgctgaagtgaacaaggtgactggctaaaataagcctagtcatctgtaactgaggcataacacaggtttattcttagcatcccctttgcactcccagtcactggaaaagaaaggactcagaccaaggacccgtgaactttccaatacatttgaccccagtgaaccctgtgtttctcgtggctggccctgtactaaagacctcagtgttcttgttctccatttaggcagggtcagaccagagatttagtcagaattggtttaaactatt

SEQ ID NO: 455803 - DNA, 524 bp, Homo Sapiens
  misc_feature (180)..(190): n is a, c, g, or t
  misc_feature (338)..(338): n is a, c, g, or t
tcctacttttcacaggagtgttatgcctggctgtgttcctcactccagctcctttctcaaggctgtgagcagcatcaaattgtgtgtgactctgcagtatttggcaggatgatagtaatctcagacatttgtttagttgtcagtgaaccacatgtgtgactcctctttctctctctctcnnnnnnnnnnncaatgttctctctgtgccatcttcatcttctaggctgtctccttgggctgtttcatctgttcttatttctccaattgttacatcaccttctttgattccctggagctaaatggtagtcttgatgcttctccaaattgtcagaccctcntcccaaattctactggacattctcaccttgatgattggttatcattaacaacccatgtcaaaacagaatccattttattgtctcctgaccctcctgctccctctgtcctttctcttcatgggcttgccatcagcacacagtgcaaagctctggatccttctgcctcctccctgtggacaagtacgg

SEQ ID NO: 455804 - DNA, 601 bp, Homo Sapiens
tcaaaaacagtgccacagacatgggaaaactcgacaaatattttatcagcacaatcaagtgatttgacttacagctaaacacaaattagtgtgacttcagaaaatattttcatcatatcttggtcatattttttcatcatatataattcctagcaaagaaacagaggacgtgcagaccatatgacatgaggtttcacattagcttgatttgacaaagatgcaaataatgcacagaccatctgtacatgagaaccagatgtctcatttgcatttggatttttccagtagaaatgaatgtggaggctttgagaaatgcattaaatttattttaattgacatagacttagaatgttgagacaaattattttccaggtatccaatgcaaaggtcagtgtgtgcacttgaagggatcaaaataacaatgaaagacgggcaaggcagctgaggtcggcactagaagcatctggaggatatggaaactataaggaggcagatattggaggcacagataaacacccaactttaactaatattgcttgagaccatctcatataccagttgttgtaaaagcaacttctgtattcattatttcatttaaatt

SEQ ID NO: 455805 - DNA, 426 bp, Homo Sapiens
gtcgctcgctgacttttcacaggtctttcgggaagagatagaaattggtttgatactgattagcacagtcctagatttctacaggctttggtaggctaccagctgatcatatatacacgttatcgtatatatcactaccttgaggagcatgtcccaatgtcgtttttgttttcactgtgcctcttttttgagaaataagcaggatgttggccaaagtagggcttgtttgcagcaagtagcatcctaacctccgtatcactttcgtggagccaatcttgatctttcaactattatgttgtggttgccgagagtccaagagtgccttaaaggtatcctcattactgaaaagactgacatttcactatgcgtgtgcttttctcttgtgtggaaatctcacgtggattatccgtaagattagcctttccc

SEQ ID NO: 455806 - DNA, 406 bp, Homo Sapiens
tacttttcacaggggagtaattagcatagagattaatgaaatgagcactgggttgaatggtaaaagatttgtttgagctttaagcagtattgttgttaaactatcactgtgccctaagcgtaacattattttaaaaatgtcttcaactgtgtttcccccatttgtctgaaagcttagttagttcaaagaacatgtttatttttgttctctactataaacccagcacatgacacaaaatcagggagtgtaaagttggggtcatgaacttattttaggagcctggtaggtaatataaatggcagacaacagggagtagtaaagtgtctgtctgtcttacttaaagacattcacatcagttatttccaacactgttagccctaagtgtaaagtaccctgtggaaaagta

SEQ ID NO: 455807 - DNA, 476 bp, Homo Sapiens
  misc_feature (265)..(299): n is a, c, g, or t
tcccctcaccataatctgacttttgtttacaccactactgaatctagtttcttagttttcattacaccaattaattgtcaaatcctagacctatttgacatggctggcccttctcttcttgaaacattttcctgtcttagcctctaacagcatttcttctgtttttcctcatatccttctggctgcttgatgtcttttcctgctctattttcttcatcctgtgctgaggcttcctggggccaacagccttcttttctatagatgnnnnnnnnnnnnnnnnnnnnnnnnnnnnnnnnnnncacatctattttcagcgctttactatggcctttacgtgtaactcctcatctcatctctttctcttcgtgtccctctcacccttagttactcctaagctcagttctgtatttgccaaaatcatgctggacatctccacctggataccctaccaggcatttcataaaacagtatggccc

SEQ ID NO: 455808 - DNA, 522 bp, Homo Sapiens
tacttttccacaggacatactgccgttaggatagggggcacagtggtggttctttcccagctaccccactcctcgtcctccctgcacaccagatccttggggaggtgggcaaatgcgatgccacagccttcagctgtcattgattacctcacaaggagcgctgtgaacatctgggaacatgagcctgcctggcaaaatagtcttctgccttccacacccctcttgaattgagcgttgtcactcttgaaaatgtgcccagatcttaggaacctcacagagggcttaattaaaggcaatggagagatcacacaatcaggacagtattgttcctcatccacctgcggttcttggccttcaaagtcttcatctcatccaatttctttctcaactcatttgacttattacaataaagaaaccactcatcaggtcaaagaatgtaaatgtagacaatctgaggttggaagctgggttggaaatgatgcaccgtacttggttaaatcgctgtcactgaatatctgacta

SEQ ID NO: 455809 - DNA, 516 bp, Homo Sapiens
aagacaaggtctctgtattttgaggaactcttatgtagtagaaaagacaaatgcgagaactagtaataattttaagtcagggtgagtctattaatagccagcagtgatgcaagagactgtggtcaaagaagggaagctaactctttgtagaggcatcaaaaatgcttcacagaggaggtgacagatttgttaaggatattccaggccgtggagtaataggttttaatttggtgctttaatttggaagaatatctcaggagatggtaatatgtattttaggtctttttttagggctttacaatttctaaaaaatatatttgggcttttatttggaaataactttagacttacaaaaatggcacaaatggtacacagagattatatatgccctccatccagcctcccgtaatgctgatatcttctgtaaacatagtgtagttatttaaaacaggaaatcaacagcagtggtgctattaactgatctacagaccttatttgaattttgccagtcgtctc

SEQ ID NO: 455810 - DNA, 461 bp, Homo Sapiens
ctgactatttgggaagctatcaaatgggcaataccaattacttggtaatattctgcccctagtagaactactaactttattgtttgtactactgttgtttggtccctggatcttaaatctcttggtaaaatttgtatcttccagattagaaaaattacaactgcagcttccaacaataccagcctttgcagcctatcttgggagacctcaaaacacatttagatttagtgtctagagattttcactcccctaatatctctggacgcggcatccctaatcagcatgaagtcacagaagaaggacctatcaagaatgaggagtgacatatactccagggaacggatatttgtaggccaacaggcgagggaatgccagggagtataggaattttgtcaattcaagcagtcagcctgttctacagcctcattgccttgcagccagttttatccccagccctgtgt

SEQ ID NO: 455811 - DNA, 521 bp, Homo Sapiens
acatatgtctcctgcttacttagtgtgtatgagagaaaaggaacagacgatagattgtttagattctaggtgatagatgacagatcagtaaggtagatggtagatagttggatgatgggtgattgatatgattccaaagttatctaataagataagaccaagagacatgctgtctacatagaaacaagggaccattcactctcggtgactgtcgccttttccgttccctatccgatatccacagtattgagtggacgtggtgctgccagcaccttctgtgactctatggatgactctgctaaatcgtgtgagacagatgagtgtgtatcctgcttcacatgaccgacctccaggcaaagagatgccgtccttgtgtcacgaacgaggccatgctctgttgagagtcagagtcctcggtattccccagactgtcccggatttttcatgagataggcaggcagcacttgccctgagatgcaagaagccaaagggtcctgggcctggcagtgcctggtctccgt

SEQ ID NO: 455812 - DNA, 150 bp, Homo Sapiens
tgagaagagcaaaactctgtctcaaaaaaagaaaagaaatgaaatgaatccctgttccagttgaattccaaagagtcgtgtgacttgtccagcgtcacaggttgttgatggcagaacttcccttaggctgaggtcccctcactcccacca

SEQ ID NO: 455813 - DNA, 758 bp, Homo Sapiens
ggagtatctgtgtgccttgtctgtgccccaccaaaggctcctatctctctgcctgcaaatccttcaatcagcatccacatcccatgcccacccaaggggatccgcaagtgatgagccagctggagcaggcgtgaggaagtgcaaactccaagccctccccttccaagctttggcctctgtcgtggtaacagttgcttgtgttttgaacatctaaagtgtgtatgaacttgtggtttactagaagggctcctcttgctcatttcgtttaatcctcacaacaggattattaccatgcacattttacagaagccgaaagcaaagctcagaggactaagtgactccatgctgattacacagcacaggattgacccccccgccttctagggctgagacccagctagttaccatctaagcatccctttcctcccaacacaaagcctctgcatggccactacaaccctattaactgtcaggcatacctgtgcctccctggcctggggcctttggccattcccctgccagaaatgcctttacctatcctttcgcttttttactcatttttcaaagcccagctcatgccccatctccacttgaaagtcttccattgcctttatggaacgagccttcttacgagcccatgtgtgtgcttgtaatgcagcaccatgtaagtttaacaacttgtggcagagccaacttgtccctgtggaaaagtaaaagtccctgtggaaaagtaaaagtccctgtggaaaagtaaaagt

SEQ ID NO: 455814 - DNA, 285 bp, Homo Sapiens
ctctctccacactggggagaaaccatataaatgtgatgtgtgtgggaaagccttcagtcagagctcagatcttattctgcatcagagaatccatactggggagaaactatatcccatgtaatcagtgtagcaaaagtttcagtcagaattcagaccttattaaacatcgaaggatccacactggagagaaaccctataaatgtaatgagtgtgggaaagcttttaatcagagctcagtccttattttacatcagagattcatactggagagaaaccctatgcctc

SEQ ID NO: 455815 - DNA, 553 bp, Homo Sapiens
tggcagctccgattattgtgatgtccaggctattactgattttattgaagacacttccagaacatattagtcaaactagttctctctgcctgcttatagaatgggctgaacacctccagaatgtcaccaaaatcagtgggaaacagaattggaaggtgctgcagatagtaaacacaatggcagttcatgcattaaagccctgtgtgacgggtcagggaccgtattggtttgttgtgctgtggatcatcttctctgaatgctaatcaagagaatctgaaatgcccactaatggagaactaatccaggggcgtataaccttctgattcaagaccttacagaggccacgttacaacacagcaccctgaaaatccaggggccctacattcccaccaggccacaccaaacgtccaggctttcctgggagatattttggtggactggcggccaaagttaagtagcttctgatctaaaaatgactctggctttcccatgaaaataggacagcatcgtcatcatcactgacttcttgtctgatggtgcaggcaacagtctg

SEQ ID NO: 455816 - DNA, 475 bp, Homo Sapiens
gggggattgggtttctctggctttgggagccagtaacttgagatcaggaggctccatcaactgagttttcacatttgctaaagtactgcatgtgtcctctcctggcagaaggctgtttaggggtgcgtgatggtcacgtggggttctggggtcctctgtggcggagattgctggggtcctcctgttcttcttattctctgcagtgggaactcatagccaaggagattcctcttggaactaagcttttccagccagaggtaaaatatttcctacctttttctatgcagccatccttgatttttgtgctccactcggctactgttcctttttagttgtagcccagaactgtcccagagctattttcatccatgaatagttgttaaattgttgtttttgtgagaggatgaaggttagcaccgcctagcttgctgtcttcctgatatcatctctccttttttatttaaactatttatac

SEQ ID NO: 455817 - DNA, 448 bp, Homo Sapiens
acaaaaagatgtaataatacttgcccaggttgttatgtgaattgaataagagaattttgtcaaagatgttaatatgaggtaagaaaaagaaaattgggaaaagggaggcaaaacaaatcttagtacagaaataatggttatgcaaggcagtgctgaaagaagtagtcagctatactgctttcctggggaggaattaaagtcattacactcttctgggctctgggtggaataattctggatggaaattaagaattgaggagattaagaggtggtcttgcttaggacacagggagcttcctgtgaattcctgagaattccattcactgagttaacataattgctgaatgcttactgtcttccaaacactgttctaacgcaaactatgccatataagaatgtaagaatgacattgttcccaatctgttggattatattctagcctgtgaaa

SEQ ID NO: 455818 - DNA, 464 bp, Homo Sapiens
tattccacagggggtttttccttcctcccttgagcgctcatttgtgtaacttcttcaggtagatactcctggagctcccagccctaagtagtgtattcctatagctctgctttatctcatagtacttcttatgctctggtgttttgttttgttttgtttcctacagactgagtatctgactcctgaactaggtggtaaatgagtataaccttgagtatgagtactgtccattatctctggtgtcctcattatattgtgacccatgtcatccaaaatcagagcagtactatggcaaaagaaaacagaccagctgtaatttcaaaataactcatattctctttgtagaacatgatgtagtacaagtagaccacattcatcacatagctctatgtaactttttaaatttaaacttcctagggacatcctccattattaaatcaaccttatccaggccctgtgaagta

SEQ ID NO: 455819 - DNA, 189 bp, Homo Sapiens
tgagctcatttagagtaaagtgatgcttttaagcaacgatgtcattccgagtggcctaggagctgcctgaaccctggagatttgtctctgaaaactatcagagccaactgttggctcttggtgaacttcagtcaggaaggtcagttctcagacaaagggagaaagtatagacaccctgtgggaaagtaa

SEQ ID NO: 455820 - DNA, 359 bp, Homo Sapiens
gggatggtgcaggatgatgaacctggtaagatattaagggtgatcagatatcaaaggtaaggaagttcttgctaaagctggatttgacaaggaagtgcacagactggagaaggtttaggtgcctgactaatgtttgatcaagcaaggaatctttgtcagtgtacagaacgctacgtttttataaaatgttcctctgccccatttgtatctcccctttcatggaacacaaagcacgttttgcataacttctagatacatgtacttctattttgcatgacctgatatatcttttttctttacaattctcaacctcagcatatgtaagtggaactcagaaggcaacattccctgtggaagta

SEQ ID NO: 455821 - DNA, 434 bp, Homo Sapiens
agctggggtgacactgctcctctagaagcaggtttgaaattatgggtatgttttcttgccacagtgactgagtacggtggtggtagtggtggtaccactactggtatttagtcagcagggataagggatgttagctgtcctgcaaagttttggtcagtcatatacaatggagaatcatctcaccccgaaatgcaaattgcaggcccattgagatacacagcaagttagtttatactcttgatgtgaatatagtttaccaaaattagtgacataatgagtggaattactaggtaagtcaaatcctaaagagtgaatgtgttagaattgcagtgtcaataccaaataacattcaaaagaaatgagccatcaagtgaagcttatgaacctggaggtaaaatatgcttatctgttaaactgaggtttcattgacgtgt

SEQ ID NO: 455822 - DNA, 846 bp, Homo Sapiens
  misc_feature (414)..(440): n is a, c, g, or t
cgtcatttcgcaggagggaatgtgatgtcctggcttggctcacaccctctgtggttttaggcagggttcctgctggatccctcactgtggccagagagggagggctctgcttcaccacagggaaccagaagaggactggtgtgtgggaagaccaggtaatcataatactattaataatagcagtaatcatactgttttatacattgtacatgtcataaggattttaattttcatgtaacataattgttgtaaaaattttcccagtttgttttgtgctatttacctggtgttgaaatgtgtaagaatttacattttaggtacgttaggtttattcctttttataaggtttctgtttgaaattttgattttagaagacattcattctcaaggacgtaaaacacacatacatctaannnnnnnnnnnnnnnnnnnnnnnnnnnaacatttaatactggaattaacttttatgcaaggtgtgggaccatgattcaattctatcattttatattctcaaatcattacccagtattttaataccataaatggaacaatcgctctgttttgtgggtttaaaatgttaccctgttactagataaaattacactcaatttctgtgtttttaattctctttcattaatgtgtttatttttgtgccatttcaaatttgtttaattttggatagtgataataatcttaaatatcttatagtaaattttataataatggctctcattgtatgtgtgtgttcaatatatggatttaaaaatcacatgttcttgttcgaaaatatttttcttggaatttttattggaatttgagcatatttttaaatgatttacagcaaac

SEQ ID NO: 455823 - DNA, 782 bp, Homo Sapiens
ggtagcgcgctcaagttcgttttcctgagtgcatatctgctagcgtgtgaggaaattagcgatttgacacaaagtcaaattttattagagatctgacaaagtcaaattttattagagatttgacataaagtcaaattttaatatagtgaaactaatcagaggtgctggggtactttaaaagttaaggaacttaaaaaatatcttggcatgagaggaactcctaatgtttgacgtgggtctggaggaattaggttggttagaggatgagagaacttctattctggtagaggctataaaatacacttgttggtagaacctgtcaatgtatatgacatgctataaaccatggagttggtcaaatagtagtgcttgggaaaatctgagtaaaatatattctacatcaacaacagaagtagacagaaaattagactgatttgtggtttagtttggtgaaatctctgaactctataaagtaatgaataattaaacataacgacagaggtgatacttcagaaggaaaatattaacacaaaaacaaaactgagtgctaaacatcactaagcaaagaatatcatagttattaactctagttaatgtacacatcaaaaatacacaaattttttggccaggtgaggtggctcatgcctataatcccagcgctttaagaggctgagaccagaggatagttttgaccaggagtttgaaaccagcatgagcaacatagggaaactatctctaccaaacacacaaacacccccccctgtggaaagtacctgcccgcg

SEQ ID NO: 455824 - DNA, 511 bp, Homo Sapiens
tcaagcatgactttcaggtgaatgatatgtggacctgggtgacttaatgagaagaggtaggatgaggagaaagagttgggtagaccaagagtccagcttttgacaaattaatgttgatgcctttgagcactctaagtaaaaatgtgaaagagacagttacacatacggatctggagctcagaacaaagacctgatatgaagtgtaagtttaaaagttggcagacagggacagtatttaaactgcccaaggcaagagggtgcatggtgagaaaagaaagagggacaaggacagaaatataaggatcttgattactcgtgattgaggagaacaggaagaactagcaaaagatatacagaagcattagttatcaaatataattatctgctagaaagtattattgctttcttttgctataaagtactatcagaacatctgaagttattttggaataaagaaggttatttacacaacaatttatatacagtccatattcctctcatctatgtcccg

SEQ ID NO: 455825 - DNA, 377 bp, Homo Sapiens
gagagaagggcagaaagatgaaaatgtcagtagagactgagataaatgagatggaagaaaaagaacaaggaactggcaacaccagtgtgacccaaatgcattagaagacaatgggaaatgggtctttacacaacccatttgatggttttaatcagaaaaatcccacataataatgtttaacactcctgttactccaattagatattattatttaacatttccaagaaggttgtggatttcacagggacagagaccaaccacgtcagatgttgggatcttaagacgggtccgatgttggacatcaaaaatgttctcagtaaatgaccgttgaataaaggaacttgtaagatttcatagaagccgggtgctgtggcttg

SEQ ID NO: 455826 - DNA, 546 bp, Homo Sapiens
  misc_feature (239)..(249): n is a, c, g, or t
ctgcgagcttttccacagggaacaaattaatcatcatttctaaaggtagggagacctccgttgtttctagtttgtgatcgttttttaatggaagaatgaataagcccccgaaacttgtatattgtctaagaacaaattctggcttccctcacccccaccaaaagtatactgtgcttctgatatttaatccatttgcaatattcaactaaaagtacctcagaggaaaactaatcgatggnnnnnnnnnnncattttaaggcattaagtaaatggtttcttttggctactgacagatgaaaattaatagcagaaaagcagaaatatggtttagcatgtgtttctaaaaatatgagccttagatatatgattagtaagaaacccaaattcatcggtatggtgtcattaaaagaagaaaattaagtaaagaaaaatgcaacatatgaggaatgaaaaaaatggatattagtctaaacaaaaacataggctatctgctaagattctcaaagaagcacatctacgtctttaaacctacgtctttctcgtttt

SEQ ID NO: 455827 - DNA, 475 bp, Homo Sapiens
  misc_feature (444)..(444): n is a, c, g, or t
tagtgatatatatatataatttttgactccttacaataattctgggatgtgggtattacccccatttaagaatgtggaaaccaaggctctgatggctctgtaatttgcccagggtcacacagctaggaagcaagttgctgatctgcttggttccaaagtcacctctctttttcctctgagcacatttctaagccactacttagaagctcttgagataaagttggcctagctcaggtccaccgaggttttgagattgccctttgcccaaggaggagttgtgtccttggctcacctgtcatctgcctgtgactggacttgaaccctcgcacgtctcagctgacatccttgatgctgctggctgccttcctcgccctgtttcctctccatgactccaggggtttgaagcacacaggagctgggacatgtcaattctggtagctcttntcccaattaccaatgaaaggccgtggagcct

SEQ ID NO: 455828 - DNA, 317 bp, Homo Sapiens
aaataggataccatgcacagctagtgagaatggacttttagtacgtgaaggtgggtctggtggacaacagacaagtcgagttccagatagcaactagttctagattaccctaacctaaatgtagttaccgtgactgaatcccaaagagaaggttcttttcctttgtatttaaaccctacctacccttcagaattggcttttttttctctaaataaaagcaaaggaaaccaagtaacaagcactgccaggctccctttcttccatacttccaaagccctttggttacccttctgccactgtaatgtctgtggaaagta

SEQ ID NO: 455829 - DNA, 801 bp, Homo Sapiens
  misc_feature (788)..(788): n is a, c, g, or t
gaccagtgtacacttagaaccctgggtgcactactacactatatccatatcaacagcgattatcgagcccgtcattgaatctcctgcttgttgctatctgctttgtgaactcaagtggctgtcatcagattgaggtagcaggagttgctcacttgccttcctgccagccagacccagtgcgagatttgttactcagggaactgggagatccccgtgatgtgtttctcaccgttcgagtttgattgtgaaaagagtctggtacctcacacattagatttgatttcagaaatcctcaccgtgggcccatagtttacctttcaactcccccttcagggagatccttgttaagtttcggttttctggtaagaaaggcagttttctgaaaagtacagtatttttacatgttttaatcgagtccaattaagtttccatggggatagattagttattagaacaagattacagttcttaagagaaaccttatagggataatctttataagcctgaaataggaaattatggctcacattaattgaatgcagtgctccaagtctggtctccctccaaaatcttttttggttggctgttacgggtgaggatatgacgaaggtaggttgttttaagtgctacccataatttgcacattaaaagtataattatagccacatgaggccctgagcacacttgttccgtgtgtttgaatcccagcaggctgacctacctggatgtagtaggcatattcgtctgcatggagttcctcctggattccctccaccctcagtattagnccctgtggaagta

SEQ ID NO: 455830 - DNA, 308 bp, Homo Sapiens
tctcaaaagcaaccaatcatccaaccctcagtgtcaggcctcacttgcaagaattttttccaaatccccaggttggagagtcttaccacttagcgctaccattgttgtatcaactgtattgaagtagtacgtttttgcattatgcatgtctccagataggttgtgaacttgctgatggcattgaatatcttcttcagctgcctggtactattggataccagaaataaactctgttcagaagaacatacttgaagccctgctaatggagtccattaagtataagttagttgtttttctttctttctttt

SEQ ID NO: 455831 - DNA, 549 bp, Homo Sapiens
  misc_feature (481)..(481): n is a, c, g, or t
ccgagcaggcgcggtttgcgtctggggtctgcttccatttattcactagccatcactacaatcaccagcttttaaaacaacagctaccagaaatacaaagagtgccattggaacagctgtgtctaagaattaaaattttagagatgtttagtgctcataatctccagtctgtgttctctcggctcattgaacctccacacaccgattctcttcgtgcctcaaaaatacgattacgagacttaggagcattaactccagatgaaagattgacccctcttgggtatcatttggcctctctgcccgtggatgtgagaattggcaaactaatgttgtttgggtctatcttccgctgtttggatcctgctctcaccattgctgccagtttggcttttaagtctccgtttgtatctccctggggataaaaaagaagaagctaaccagaaaaagctgggaatttgcattcgcaaacagtgattatctnggcccttctacaagcgtataaggggattggccagcttaagtacaaaagaagggcgtgcgttgcaagtg

SEQ ID NO: 455832 - DNA, 342 bp, Homo Sapiens
tacttttcagggtcatactatcttctattcagaacagcaacatataagagtacctaccacgatcccaggccttggaaacatagtatgttgttcaggtcactttttaaagcagttttattttcatataatttctatataccactgtaatttttatataccataaagttcacccattttatgtgtacatttttctttgtgaatttacccacttgtgcagttgtgcattacaacaatccagttttagaacacttccattaaatcctcagtaaattctgctgtgagcacttttaaccaaatacttgatgtagacttatgtgggggggttaacacagatggcatgac

SEQ ID NO: 455833 - DNA, 330 bp, Homo Sapiens
gacgggtgaatgacttccttcgggcgcatataaggaaagggcggattacttccctccagacgcagatgaggaacgggtggatgacttccttccggacgcagatgagggatgggcggatgtcttccttccggacgcagatgagggacgggtggatgacttccttccggacgcagatgagggacgggtggatgattccttccggtcgcagatgaggaacgggtggatgccctccttccggccgcagatgagggacgggtggataacttccttccagccgcagatgagggacgggtggatgacttccttccagccgcagaggaaaccgagctg

SEQ ID NO: 455834 - DNA, 168 bp, Homo Sapiens
agattcagcaagttgaatgtcaacccatcccctgcacacgtttctaagggcacatcagtagaaaagtgagagagagatactgactatgtgcacttcgaaactaaaacccagtccacatataaatcaatacaaagagagtttcccaacataaccttatgcattccgggt

SEQ ID NO: 455835 - DNA, 158 bp, Homo Sapiens
tatttccacaggggatcgttttttcactttgggctaattgaagggatgacgacagaaagaaaattcggaagttactataaagactatgtattttatcctgagtgagttgggaagccctgaagagttttgagcatagtaggctttcttctgactgagta

SEQ ID NO: 455836 - DNA, 436 bp, Homo Sapiens
ttccacaggtacttttcccagggatattacagggattaaatgaaataacagatgtaaagatgctttatagtagctgcttaataaattttagtttcccttccaagcaagtccatcttcttcgaccatcacagcccaggagcttcttcacttctccacagcaaggggtgtgtcatagtcatcttggtgtccatggtatctggcacaatgctctgcatcttttaatgaaatgaatgaagtgctttgtttcagaagagagggagctccagcttagtctccactggactatgtcatcaatttttcctttctaattcttattcccttcagcaaacactattacatttcacatatcaagaattctctattgaccctacattgctctctctgctcctgtttacagcaaagttccttggaggagttgtttttccctgtggaagta

SEQ ID NO: 455837 - DNA, 203 bp, Homo Sapiens
cttgcagagttaaaaattcctagatgtttcaatggttctcagttaacaagtgttgatagaacattttcagtgcttagactgcacttttgatttctagggagaacttcatttttaacataaatttactaattttagtagttcaccaaggaagaagatggtagtaaaatactggtcataattatttagcaaaccctgtggaagta

SEQ ID NO: 455838 - DNA, 1052 bp, Homo Sapiens
  misc_feature (20)..(20): n is a, c, g, or t
  misc_feature (39)..(39): n is a, c, g, or t
  misc_feature (998)..(998): n is a, c, g, or t
aactaaatacaacaaaaggnttttggggccttaaatggnaaacaaacttttgtcctcaattaacaatgcctctgaacagtgttacatctttcttgaaccctaaaaggggccagctaattgaaagtggattgttggctttgtccttaaggtcatataaaatgacgtgtgtgttagtggcagtacccacatgtgctgaagtgccaaaagactggcattttcaagtgtcaacaggccatgcatcactgcgccacagctaaacccttatagtgcttggccctgaaaagcgttaacccagaaagctctttgaacatatgatcattaaaattcattgacttacgttacaaacatccacgtaacatagggagaaaccatgtcacatggagtatccactgggcatgtacttagagctcatccacaagattaaaatacaaagagatcgtaggtgcacacccaggcagagggaaatgtccaatctgggaacttttccttcagagcatccagttgaggggatctcttgtcttccccagacagatagtgggcagcaatggccacggtgaccattccttcaggatgttcttctgaaacctgcacttctatccagaactgtcatgcagaggcctggagtccatgggagtaaaagacaaagtagtctcctcctttacttgtgactggggtgccattgccaagagaccactgagaaagtgttgaccctttgtgggctcgaacatagaaggacatatggcttggtcctgttgcttcaaaagtcaattttatagaatcctaaggtgtctgttctttggatatgagtcggaaatgaggaggatttcttgggagaaacttctggggcaggaaggtaccagtttttcctgatcaggaagtgcactggaagataccaaggaaaaccacaaagaggtgcattctcctcacagtgagctcggatactatcattgatctcaggaatgtgaggggttatgtgagaaattccagtataatcaaanccattgatccatattccagagtcccgtttaactgcatttccttccaagtcatgg

SEQ ID NO: 455839 - DNA, 137 bp, Homo Sapiens
tacttccacaggggaatccctcagcttctatggtaattttgaaactaagagaaaataagacagcatgagaaggcattatgctgctattaaatatgacttgggtaatggtcttactttacaatcaaatataccacttg

SEQ ID NO: 455840 - DNA, 757 bp, Homo Sapiens
  misc_feature (179)..(179): n is a, c, g, or t
  misc_feature (406)..(406): n is a, c, g, or t
ctttataagctgaatgaaagaggtcgacacagcggacactgtcataagtggaacaaaggatgaagctaatcatggaggcaagctccctggagagacagggacaaaatcaagaatgagctggagaaattaatcctggagaaagggagggacctgacttccttgaaggcaggcagccaggnaagtaaagaggaaggaaaaatcaagatacatttttggcaagggggcaggaagtggatggagtctcctcctgggatacccagtttgctcagtgaaataagagatgacatcatctgttgagaaggaaaggcctaaaggataaggatgaagtagggggtagggggagagaggtagagatttggactaattcaccgtgggaaacaaatgagagcacagcaagtttattttnagaggtcttgaggactcgcccaaggctcctctgaggttgcggacccatgaacttgacatgaagaccctctgtggcatggtggggttatctgcctagttctccagaaatcaagatacttcttttatcagagaaccagggtatctgatagactctgctatctcagtctgcatgcaacagaataatcttctgttctatattcttcaaacatctccagttcccactaacaacggtaatttttaaatgtcaaaaattctgaatatcagcatcagaaagttaaaatatgcagttgccaaagaaaaagaaatccacatacagctggccctctgagtcggaacccacagattcaaccta

SEQ ID NO: 455841 - DNA, 406 bp, Homo Sapiens
cagaaacatccgagagggcccctgtcacccaagcttttggctacagtctactccttccatctgggattaaccaggcgtttcttatccttgctgatctagtgtttcttattgctgctgtaacaaactaccacaaatttcctggcctaaaatggcacacatttattatcttatacgtctagatgtcaacattctgaacagcaggtcttccggggctgaaatcgaggtgtcagcagggctgccttccttctggaggctctaggggacaatctgtttcttaccttttctagaggccacccacattccttggcttgcgttcccttccagaaatggcacaattccaacctctgcttccatcatcacgtctcatcctctgactccgagtctcttccctccctcctataaggac

SEQ ID NO: 455842 - DNA, 581 bp, Homo Sapiens
tacatctgcacctctggcgcacaggttcctcaatgcccaccaccgcgatacaggtcagttcggtgaggatctcattctcattgtcccaagagggctctgtgtcatcgaagtcccggtaagctatgcagatagtccggagtccatcacaggccattgggctcgatgacagtgcgtaccatatcatctctgtctttattcttgaatggcactgcttcccctttccggtccaggtttcgattacacttgcgcaagatgatctcagaggcgcccttgctgtacatacggaagccaccgttgggattcctgatgacggtgctcattgacttgcgcactgagttaaaggtgtacaccttgtagagcttctcctcgggcacttcattacgcacagcctgataatcctgcttcagatctgtgacaaagcctagcagagcacactcggtcttgttgcccactctgccgaggcaggcctccctccttctctggaggcagaatcttggaggtataagcactgttgatagaaatgccattgacatgaggtccaggactttgggcaggaagacatcagggcttgtcttggaaaa

SEQ ID NO: 455843 - DNA, 356 bp, Homo Sapiens
cgagctcggtaccccttttccacagggcagggataaaaccagcttggggaatagaagataggaaggtaacagaaaccacacatagacttacccttaagctgtggacattagtttgcatttgatttttagcgatgtcatatgcagtgtccaaggaaatcctcaaaggaccttgtatctcggagaactcagctacaggtatgcaaaagtgtcagcctaactaactgaatttttaaaggaactgatggtccaatgcatcggacgcatcaatctcggtgacacagaaaggctggtgagatttttgtgggctggttaaaacctctccaggcttgaatggacctcaaacccctgtggaagta

SEQ ID NO: 455844 - DNA, 113 bp, Homo Sapiens
tatataacctcatcctgggatgactcaaatgagaaagaggggaacacatgcttcagcctgttagcagtgtcatctctgagtggtgaaatctgaattttttcccctgtgaaagt

SEQ ID NO: 455845 - DNA, 130 bp, Homo Sapiens
actttaacaatgtacactattatattttaccctgaatgacttgtgtgtctcttacggatgatcctttaagctaagttgctggccagttcctttccacgttgctgagagctccccgcttcaattttaaaaa

SEQ ID NO: 455846 - DNA, 112 bp, Homo Sapiens
tacttttcacaggggactccagatccttttagtggggaataggatttagaagcccagatccaggtgcgtagcgtgttatcgttacatatggattacatagtttttcatggta

SEQ ID NO: 455847 - DNA, 652 bp, Homo Sapiens
  misc_feature (460)..(483): n is a, c, g, or t
gacctacttttcacaggtctgggaggacatgacctacccagcacacttaatcttcagactacaagatccttacaaggtgctttgctcgctttccaccaaacccacatcatgattcccatattgtcccaaagcctttatgcctgttttatataggataagtatctgttttattatcttgttgtcaccacaggttggggaaaccaaagggcaactatttattatttatatttctattaccactctccaaaaaaaggagagttgaggctacctatataaatataaaagatatatacaacagaaccatcaattaaaagaaggatttaacacatgtgacaagtaatccgatgaggagactgaggcagagagattattgtaagaaaactggatagcaactaaaaacaggcaaataacatatctttgagctttctagcaaggaaacataatgagttacagatcacannnnnnnnnnnnnnnnnnnnnnnnatataaaagaaaacacatcaatttttttctctgaggagagagatcaataacttgcccaaatttatttatctaagccactggcagagccaatgagtcttccaaaatacttgatgatcctttacaaaagtgtaccccctatacaagaatccctgtggaaagtagggatctc

SEQ ID NO: 455848 - DNA, 425 bp, Homo Sapiens
cttagttataaggtagcgcctccgtccccaccccgtagtagaagttagagaaggatattaacagcctgtgctccttctgtgctccatgagcctcatctatactccccagtttcacattccttagagctctgtgaattcttgcttacctccccagcacagctgcaaggtcataagattgatacgtatatattacacaaccatgtattcccaaggatgtaagacatggagtaacaactgcctttcttctcgcttctgtaagtacgcttcctgcatcacgtaattcccaccactgattgtttaaaaggtggccgctctctttgttcggggctcagactttcctggacgctagtcctactgagccaggtgctcaccttaataaaggctctcctgaactctgttcagtctctcccatgctctgattgctc

SEQ ID NO: 455849 - DNA, 503 bp, Homo Sapiens
  misc_feature (249)..(259): n is a, c, g, or t
tccacaggtacttttcgacaggatactttccacaagggggttaataaagtcaaaattcaggactatcaaaatggacacatacattatatctaaaatattaatggtttacttttgtaaataataaatacacattataaaggtgtgactagaaaaaggaaaaaaggacatactatctactaagtggagttaccttgtttatcccaaaagaaagcttagcgttgattttagtaagttctcatgtggggtagnnnnnnnnnnngatggaaaatactttaaagtattaaagacctttcctgggtcttttaaaatagttttaattaattctattattatatataggcccaaatgcaaacaaaaattctcacacagctttataaaatattgtatttccacagcacacaaatggagccagctacagtggaagaactgaaaatttccccatcccaaaattgtatctgatctctctctgcatctaggccattgaaagggggaagtcgccagcg

SEQ ID NO: 455850 - DNA, 944 bp, Homo Sapiens
aggcaatgcactataacaacttttatttctccatttaacatttgtgagatagcttcagtctgtttcatttcatcattcatctttttggaaatctcgctgctgccacaacagaccatgcatataaattcctcaccatgacctctgcaaatcaaacaaaatgtactttaagcctgcctcacaatcaaaggctctatgtgatttatttccaaacggttcttaggagctgggcctaaatgcgacacagctacatgcaaaagcacaatgttttggacagggtcagagtccacttagagagagagagacctaggcatagcacaagacacacagtagccattctgcattctgtaagtttgttttcgaatgaggatctatgtagagaaatttgctccactctgtcttccttgtctaaaggaggaggcttttcatccttttcgggagacatttccagggacgttcaggtggactgtctgcaggtcaggttcacatctagtcatgtctttatcacccccgtgcatccctagctagggggaagcttatagaatcagaggtccatcataaggcacaatgaattacaggatgccagaagcatatttgtctatgaaaatcttcaccaggtggaaatggccaaaacaaagatcaccaacccccaggggaaagggttcaacctcggctgagcttccgaaatacttcaagccctgcaaccagacacaggcccataaggacaggacctgagtgaaaccaagcagtttctggggaaggaaatattttcattgacattttggggttactgtggcactaccactagtggtctcggagctctaggaaaatggtgatcatttttcacaggctgctagttttggtgagcttctggtggggtgggttttaagttatcagagcaatagaacttccctgacaagtcaaagtaccacctatgggaagagtgt

SEQ ID NO: 455851 - DNA, 145 bp, Homo Sapiens
ggggaggctctcctgtcagagtaggcattttttcatcctcactggtcttgcgagtggataggcagccagctcctttgtgcgcactgagatataactgttcttggcattcttttggcatctgctgttggagcatgaggctgtgtaa

SEQ ID NO: 455852 - DNA, 473 bp, Homo Sapiens
cttttccacagggaagtaaaggtgcaataagcagtaaagtaggaacagtgttgaacaaaataaatgtctacaaaacaattacatgataacatttgttttatagttttgtttcagttgctgttcctgcattttatatgtctatcacctcagagcacagaatactttatattaaagtgctacagagtcctgccactttactatgctcaagataaaggagacatttgtaaccttgctaaactgtacccactatttcattcaacaaatatttgaatcactgatatattccaagtacacttctaggtacagtgaaccacaaggagacaggcgataagatatgcataatttaagacatttaagttagtgacaaatgttttcaataaaagcaaatatgattatgagacagaggggagtgaggaggttacttgatttataccatccacagaaaaccactctgtgctgaggcaagattccct

SEQ ID NO: 455853 - DNA, 601 bp, Homo Sapiens
ctcctgagcccctcacactagggcttttcttcttcttttttgatcaacatatcttctggtaagtgtaccccttttggggatcatgactttatggaataggagggtatctcttctcacctcctaccttgagcagacccaaacttctcccccgtccctttgagggctgaaaactcaaatgtcacagacagacgttcacacttcatttggtctgaatattgctagccatggaatttctaaaatttgcttctacgaactatttattagtttcagtgtgctaagcctgctgggaggaaatgctggttgtgagcatcagcacagaaacattctggacggttattagcacaaagttagcatatgattttgtaatctcttctgctaacagtgttttttaaactaactctttacggtgtcctgtgtactaggtactgtgcctgtgctgacttcctagctttgattggaagttccttgacagcggaccgaatccctacccgttactctttctccatctccctctgcagtgctgagccctcaaaaacaaaacagcaacaaaagacacacttgcactagttgctgattggtaatcccccggaaagtaccacac

SEQ ID NO: 455854 - DNA, 497 bp, Homo Sapiens
ctttttctcagcatgaggcttgtaagattcgtccaggtcaccatgtgtagtcgtagctcattcattctcattctaccttgagaatacacctccgtggcttacatcatttaaatggtggtaaaattcattccctgccagggtcatatttccgaggaccatcgagcctggccagagtccaacccctctcagactttatcctcctcgccactcttcattggtcctagacttgctgcatctcttctactcagttacccagacctgaattccaatcttgacttcaccaacttagacaatacttttgacatttctgaccctctgctttagcaattctcaacctttgtgccctgtctccctttgacagcatggtgacgtctatgggccccatcagtctaatgttctccaaattcattagataaaatacactggattgcaaaggaaaccaattatgttgaaaccaattagaaaataaattcatgctgaaatatatgtcccctgtg

SEQ ID NO: 455855 - DNA, 530 bp, Homo Sapiens
agggagaggttagcatatgaaagtgttttctttccctccctttgggctggttttacagtgctagtgtgctagtagaatggctgctttcttcagcactttgttaaaggtccctggttgggtaagaaacttgactgcactaggacacatcaaacaaccagccaggctttggtcttacccaggcactgaaaagctgagccctgtgctctgctctcccatttgccacattttgccggatgagtctggtatgcttcagacaagcagttacacatttcacgaaggaaagaggtcggtggatggcaaattaacttgtcatttttagtgggtgaaggcaaagaagacctaccttctcttccattgtgagatactgtacagcaccttcgattcatgtgcgtaggtctgaattctgttttcaggatacttagtgttgtgtttgtagaattgaggagatgctacctaggggagaccatggagatccactgaagtggctgcggctgattgtgattgaatttttaagcattttctgaagattc

SEQ ID NO: 455856 - DNA, 479 bp, Homo Sapiens
tacttttcacagggaggaattggccataatgaatcattttgataacctgggaataggcagatataaaaaacagtctggacttcctatcctgcaacaaacagtgggggatcctgggctgtgaaatctgtgctaaaattataatcaattcactcccctgtagggtttgctttgtctgagtttctgccagggctgccctctccaaggagttgcaaggttttcagcagaaaggcctgtgaggtttccttcatggagacgctcctgtccctgatgactgcaggttgttccttgaagagctgtatttactttgtctgtaagaatagatatcacacagtttacttgcagtaagagattcagacttagcatacgcaaccaaatactcttgaggaaaagatttattgtttgtcctcattttgctcaccaagatctgagattcatccttcttaaattccttaagctattcactgtttaccaatctatca

SEQ ID NO: 455857 - DNA, 380 bp, Homo Sapiens
tacttttccacaggacgttgaggatgacttttaagcctgtaacttgctgggcttatgaatgtgggttgtattcactcaaaagagaaaactagaagcacaggagcaggttggatgttgtagttggttttctggagaatgcatgcagggaggggttagtaatggtggtagaggcagggtgcagaagtcataaatttaaatttttggatatgttgaaatggtgatgcctttaaggtatataagtggagatgttaagtatgcagttggatctatggatcgggggctcggaagagatcgggttgaagatacatatttaggagttacctaaattcaaatgataattaaagtcacaggtgtggctgaaataatctaaagagatacag

SEQ ID NO: 455858 - DNA, 483 bp, Homo Sapiens
gtctctccctgaccaggccctcttacacactctgcagaattaccatcgacagtgtacattggatgagattgtgtcaccatcatgcttagaaccactcctatcactgacaggtcaatatctgagctccttggcactacacacatgtccagggagtggccagtaattagttgtggcctggagtattgagagcatcagtggccgggaacatcaggcaagatgtgatgttttaaagagccttgaatgccatgctaagtacttggaactgcattacccagcccatggggagctctgggaggtttaaagcagagaagaaccttgccttgtctaaattctgtaagtctcaacactctgcttccttcatagcacttatggaagtttgcaattatttcgtggacttgtttatttttttccatatcttccactaaatgtcaagctatgagcagaaataaatatgtctgttttgttcacattacttctcaacct

SEQ ID NO: 455859 - DNA, 435 bp, Homo Sapiens
ctacctccgcagagttaaactccaagacaaacgtgctatcacgacttactgcagttaccgggatctccaataggtggttctgagagggtgggtgggtgacccactattctgcttcacttggtggaaccccgctctgcttggcaatgtggtatatactcttagcttgcctgcatcatttgacttgatcaccctgatcacctaccccttgccttccacacttgattttagtagctgactataaaattcacatgaagggggaaaggtgatcttcaagaacgtcatctatgattaaacttgacatgatcagatcttcgaacatcagcgaggatggctgaaggcacctcatgaaattcaaggctccacgtatcagctctgtctcataatagggaaaatattccctaggactcttgcctaacatactgatataatatactt

SEQ ID NO: 455860 - DNA, 630 bp, Homo Sapiens
tccgtacttttcacaggaggtgggtcacaacactggccaggtgcgccaacccatgacagactacaggagggaaatttattacgaaaaaacccttgggagggggtcttgctgtcatagtctagggttccctacaaatagcaaccatgtaagtacctgtaattcctgagaaaggcaggtctaaagacacgtctactaaaggcagggggagaacctgtaacacaggtccaccacagaactgaacagtcaccttagcaaggagtggcaaaaccaagtggtgtcggttgggcaagttacaagagtctgaacccaaactcttaactaaaaggcttcaggacagtagatgttggggcagaaaaaacccaggcctggcaaccacaacgcctatgtcttccacaggtcaggaaccaaggaacgaagaagggcccatgtccaactctgggaaagaccggaaactcctggaaaaaggggaagagcagagtccagcagaggttgatggtgtggttttaagaggtcttacctactgaggccataagcgaaaagttctcagcatcacatcatgatacaggcacctttgagcttcatcaatgagagcccactcctcctgagagaagtaacagcaatatctccaag

SEQ ID NO: 455861 - DNA, 736 bp, Homo Sapiens
ttttgataggagagaaactaagggaaggcagacgatgactgatggtgacaggagcagcagttcttcaggacatcccgaaagccaggaggggtgtctccagggagaaggtggaaatgcttggcgacttgacattgttggatactgtggaaatttgttatttagagaccagccaggttagcatactttgtggctgcaagtttgcaaaagatccaactcaaatactgacctaaaatgaaaaactggggtttattctctcacataaccagaagtccacggctagcgcagctccaggagttaacttattcaacagctcaacatcatcaaagttccagactcttttcacaaacctttgctcagccatcctcggcatatttgctatttcctgtcaggcttctagcttgcaggctgggcctagtcctgcacataccaaagctgacgggcaggaaggggactctctacaacccaagagacctaagaaaccctcccaggaataccatctctcttccaactttcactggtcaggctccttcctaaatccgtcactgatttaagaaatgggccctccggactcggtcataccagtgctcttcatgcataggacacgcaagcgaatcaggtgtacagccgggtggggtaatgaatgaggttgtccaaatcccaacacattcacaaccaactagagaaacactgaatatatcagttagatatttaagcctgtgaaagtaggtaccgctga

SEQ ID NO: 455862 - DNA, 225 bp, Homo Sapiens
  misc_feature (36)..(36): n is a, c, g, or t
actacatacttccgaggtccctctgctctccacaangggtgacacttagcgccatctgttggtgttgtgcagagctgaaaagcttttgctctgcagccagtttcgctatttttgaaagttcatcatttgaacgttggcaagtcaaggatcttctatagttcagtttgtcttggccaacaccccgccagagaagtcatgtgtcatggtgttttgatagtaagcagg

SEQ ID NO: 455863 - DNA, 466 bp, Homo Sapiens
  misc_feature (174)..(265): n is a, c, g, or t
aaattttaaaatttttaaatgagtataaacctgtcttcttagcttaaaaattgacaaaattacaaaagatattaataaacccaccaatatagtatgggaaattttaactcagctctcgtataaactgataaatcagtcagacaaacattagtaagactatccaggattttaacnnnnnnnnnnnnnnnnnnnnnnnnnnnnnnnnnnnnnnnnnnnnnnnnnnnnnnnnnnnnnnnnnnnnnnnnnnnnnnnnnnnnnnnnnnnnttttaaaaaaagaactgaaaaagcttcatctaaatggacattgtggttgatgagagatggctgtagctctatgttattcttcccattgagaggtaggtcttcttccttccccttgactgcttagatcaatcaagtacagtggaattgacatcatactccttcagggacaaatctgtaaggactgtcagctttcattttgat

SEQ ID NO: 455864 - DNA, 267 bp, Homo Sapiens
attgcagtgttaatccacttttgagggtagagctctcattatctaaacacctcccattagacaccatctcccaacactgttacactggggattaagtatccaacacatattctgggggacacattcaggctataacaggggattatacatgctggaacactagcaaggtgtgagagttttgcttcaaggattctcatcagaattagctattatcattaaaaaccaaaattgagcctggcacagtggctcacccctgtaatcccagaa

SEQ ID NO: 455865 - DNA, 480 bp, Homo Sapiens
  misc_feature (76)..(135): n is a, c, g, or t
acacggagggaaaacaaagggaatgcaacatccttctgaatttctcaccattcagtgggcaatgcagagctcacannnnnnnnnnnnnnnnnnnnnnnnnnnnnnnnnnnnnnnnnnnnnnnnnnnnnnnnnnnncgtggggtaggggagtagggaagagtgatacaagagagagtgtggcaaagcacacaggattggggggctctcaaagagcttacagcctagtaaccaagatggcttagagtgaaaagtgatttcagagcaactcgcgaggaatatatccacatgtgcattgtgatgtggtgttctggagcaccagttgggaggaggaggcactggggccggaggtgagccttagtccactgcctttccttgcttagcaggtctcagctcctgcgctcagctccagaaaattcaggagcttccccacgctgcttcagtgtccttcactgtgcaactgcagcactctgtggaaaagta

SEQ ID NO: 455866 - DNA, 190 bp, Homo Sapiens
tacttttcacagggcacccccgaccttcaacagcctctcctcacccacacaccaattccgtggcgagtctctcggctcttcccagccacccctacaatagcaccattccctttgcattcggatgggtcctgttttgaggcttacccccgccagtttgacatctctgcttcagtggcctactaattttgct

SEQ ID NO: 455867 - DNA, 261 bp, Homo Sapiens
atgttgcaggctgatctcaaaccccgtgacttgcaagtgatccggccacctggcctcctaaagtgctgggattacaggtgtgagccacgtgggcctggcttcatgcttaaagtttaacctcgctttgaacatgtttatgagaactcctctttttctacattcacattatgcatataacatgtacttagtgacccttgttgaattaataaaaggataatgttagtatttctatacttcaatcacacactggatgtctaatat

SEQ ID NO: 455868 - DNA, 559 bp, Homo Sapiens
ttcataaagctcaacatctttggtttgaatgtccttcaaagttccttctcttaggacacttccatctttcatggctatgatcgagtcagcatgcgtcagatactgtaatttgtgagtcacaagaacgagtgtccttttgtcatcttgcaggaatttcaaaatcccctcctgcattaaatgatcactcaagtgaatgtccagggctgagaatggatcatccaaaaagacaatgttggtgttttgatacagcgctcgtgccacacagattctctgcctctgtcccccactcaggttgatgcccctctctccaatttcagtttgatctccaaatggtaataagtcaatatctggctgaagagaacaggcatctgtgacagctttgtacctctgtttgttaaaaggacttccaaaagtaatattttcttctactgtagcatttaatagccaaggcttttgagctgcatatgccacagagtacctgttcctacttctggttgcttcaaaagaaggctcagattcatttacattgctccagtgaacttttccttccaatgtctgg

SEQ ID NO: 455869 - DNA, 136 bp, Homo Sapiens
aaatattagggatttatacaaaacacataataaaatacccagtgttatcaaattacttctcacaagaaacacactgaagctctaggaaggaagtaccttgggaattgggcactatatattttcactttttttcttt

SEQ ID NO: 455870 - DNA, 426 bp, Homo Sapiens
  misc_feature (208)..(263): n is a, c, g, or t
aacactgtgcctgcgagtctccttgggaaagtgtaaggttctacacaaatgggaagtgatctgatcacaatcagtgtccccagcccagcctttcagtgccctggccctggggtgggggacaatactctcctcacccccttcactagtcttcatgaatagcaaggaggccataacataatttggtctaaaccccttcctttttaaaagnnnnnnnnnnnnnnnnnnnnnnnnnnnnnnnnnnnnnnnnnnnnnnnnnnnnnnnnttcgaagtacatttgctatgagatcacgtgcccaacttcagaacatgattatcaattcgagactcgaaatcctgtatccactaataccagtaactcccctacatccaccagtcagccagtcactggtaacctctattctacactttttccatgtggaatagta

SEQ ID NO: 455871 - DNA, 316 bp, Homo Sapiens
tagcattggaatgtggtgaagaaaagattcttactctgattgaggtggagcggttcaaagctctagctgggcagtttgttaaactccttcggtcccaaaaagataactgccctatgatgacagatctccttacagaatatgctaaaacttttggttatacagctgaatctgtctgccagattctatatcggcaaccttcacgacatggcagagtttctgagttaaagccgaaatggaactgacatcatagtcttggagacgaaatgtataaccaaaagttttagcatattctgtaaggagactctgtcatcataag

SEQ ID NO: 455872 - DNA, 396 bp, Homo Sapiens
cactttccagagtgccatatcaaatgaagtaattaatgcaacaagaactttgtaaactctaaagcactatacaaatgtcattttccttccagtcccactgcgatgacatgaattaatgttacttcctcttccaatctatacaggagcctctaactgaactatctccttcccaaattctccttagattatatattttgcaccctgctgcccacttagtcttcttaaagccttgctataattatgcacctctcctactcaaaaactttgactgccttccagttcttgaccaaatagtatacaaagtccttgacttgtaaccaagaccttgcctgatgtggcttcagattgccctttcactgtttctcactcttctcccacccaaaccttgaaaaggtg

SEQ ID NO: 455873 - DNA, 706 bp, Homo Sapiens
cgtactgacatccaaaccttcaactcaagaccatgactgtcaattacagttttagccttcagaaacactggaattaccctctgagacttcgtgactgtgtgatactattctttaataaacgaatgccatggattttagcaaaaaataggttattaaaaaacaaagccgacctaaaattacaaactaaggtccacatctattactgagcaggaaagacacaaaagacctgcatcccagtgtccagtggctctacagggcgatgtattttagtccctggcctggctgctgcttatttagaagcgcttagagaagaacagcctattttttttctgggttttcactcaacttagaattcgaagagatgttaagggtacagtgactgtcttttctgaacctcaaattgtatcacagtaactaataagcgataaaccaccagctctggggagacccaaggccagactactgccaacaccatgctatcatgtgccagtctttctgctccaagacagccctaagagggactgcaatggctctttatctctctgagtggcttgggatgaccggcattgggaagacaaagatggcattgccaggttcctcccaacagcaggagaggctcaggcttgaggctctaaggcagctgaaaagagcagggtggggcatctccttcagcagacttgctgctagcccctgtggaagtaacctg

SEQ ID NO: 455874 - DNA, 326 bp, Homo Sapiens
ttcgtccggaagcagaaaaggataagaaagggaccgatattttgatttcataatttttgtgaagttccagcgctggatgaagtgacgtgccacatcacgagccgccctcccgtagactgcagaggcaattgtcatgccagggcatccggggcgtggagtacctgtcaatgattatctagcaaaaggtttgtcagagttgaacccagtctttgtaagacgaaatgtgcagtagtcctttccatgccagaatctggtttccccatgcagctctcccacacctgtctgtaaactgcggatggacccggtattggaggtgctgctacgcg

SEQ ID NO: 455875 - DNA, 191 bp, Homo Sapiens
accggaaacaagctgctttttccaggggagacatcactattagcagaaatggaagagacgccctgccactatgtgacttgagtgttttgatcttgagagatttgaacatacctctgagcacactcaaaggagatgtcttagtccatctgtgctgttataaaataaaactattctgaggctgatactttatg

SEQ ID NO: 455876 - DNA, 365 bp, Homo Sapiens
  misc_feature (107)..(126): n is a, c, g, or t
agtcaaccacagagctcaggttttaaccttacagtatcctgactacctgtctaactctattcctcatcactcctcaacatgcagtcaaaatatactaaagaatcccnnnnnnnnnnnnnnnnnnnnaaacagtgcaccttcgaggctttgcacattctgttccctcttcctagaatacaaagttccctaaattagcttggcaaagtcatacttatcctttaagacacagcctacttttctctttgaagccatgacttcccgaggaagacttctttgccttcttcaatgctttcatttctccctgtataccatgccacaataatttctgtattgcatcatttatatatcgtacacagctgcttccg

SEQ ID NO: 455877 - DNA, 292 bp, Homo Sapiens
aagcacagacctccacacgaagcctgggaatgatttcactctcctctccaactcttgctgaacttattctcatatcaaggttctaataaagcagaaaagaatgaaaaggggtcagcaggtaaccacccagcttattctgcagcaacagttgacattccttggccaaacaatcgaacccttctgagtaaggaggttccaatctgtcttcagatggctacataagatgctcctaccaacagtgcgggtcaattacctcctgaaaggtcatgtgtgttcccaacgacataccctc

SEQ ID NO: 455878 - DNA, 645 bp, Homo Sapiens
tgactggggagcagcatatgatcatctaaaatatacttttttcattcattaaacaaagaagtaaaagtaatttgatttttgcacagtgacatgaaagctagagaaggtcctgggaaatatgtaaaagaaattttttaccttataattctttcctgtaattatgatctggctatactcattaattgtatgctgttgttaacgttaaataactaaagtccaatttactttgttaggagacatagtggaaaccttaacttgtaaaaaaggagatggccagaaaagatgtttacttctgagtgatttaggaatagtctggtcataaatgctgtgtttctacatggatttgtgcacctgttcctgctttgttctattgacagttatttaatatacataactgtaattgtagctattgaaaatccacctcaataatgggttttatgattctggatatcagtagagttacctttaccttcctcttcacatttagatatgtatgtgtatgtggttacctattcattctcctaaagaatgttaataaagctcttagaatgaagagcatatagagctattcagttaagaacaactgaattggagatgatgcctatcagagttaaactaaatttagctttttctcatgcttccggt

SEQ ID NO: 455879 - DNA, 155 bp, Homo Sapiens
tctgttcccttgatgatcgtgatatgcattaaaatttggtaaccactgctttcgtccctctattcattatactagctctctttcctcaatatttatctcccttcacctcctacttgtgacccaatcttctatactcatgtatgcttccgtcgact

SEQ ID NO: 455880 - DNA, 180 bp, Homo Sapiens
agctcatcgtgggatactccatttatcagtctcgttatcacttctctacatttttcaatgattatggaattaactaatagattgttccattcaagtttagctgtcaggtgaatgacttctgtgtctacctgaatcaccccatccaccatctagtctcagaattctttaattactagatac

SEQ ID NO: 455881 - DNA, 149 bp, Homo Sapiens
ctagaggatccttcttaaatcatataaatatagctatggtagattatggtattatttgctttttaagctgctaatctgagacctattataatgttggcattaacctctaaatattatggtaattaagttttcctaggttttagaaactt

SEQ ID NO: 455882 - DNA, 606 bp, Homo Sapiens
  misc_feature (87)..(87): n is a, c, g, or t
cttaagacggaagcagaaagatcagttagaatacatcgtccaggtggcgttgatatggtccaaaccaagccagtggggatgcagtgngtgctacaggaatggggcaatgaggagggagatgagcttgagatgcctgtgggagatctgtgcagacacaacggatgcaggaagaaaggcaaagatctgagagtgcaggctgggggagcagagccagcagctcaccaccagaggatgcgaagtcagaaggaaccgtggaagaggcagaggagagccaggacaatgtgccaccttggaagccaagttgagaggggtgcagatgagaaggggttagtcaatattgtcttattctagaaagtggtcacacaggatgggagttgagaagaggcaacttagaagatgtgcctgacccttgaaggaaggatgtttcaggacagtagaggggatgaaattcagagtccaagggactgggctgagacagaagcagactctgggagaagtgaatataggcggctcttcaagtagcttagcagggaagagagggagataaacagcagtagctcgaaggcaaactcaaacttgagagaggttaggggtaaatagtataaa

SEQ ID NO: 455883 - DNA, 458 bp, Homo Sapiens
cgaccggaagcaggctgggtgaattcccagatggatgggaggactctgcttcttccctttctgttccaaatcccatatagagtaagaagattaaatgacttgacctcaagccgacttttggagtaaacctgctctgtcaacatcatatccctctctggtttaagaggattctctgatgcttgaaaagctttaagtaggagcttagaaacattttccatggcctgaaggaggtacaagggtcatgtcaggcttcccgctgcattcagaatgaaatctaggccactgaccccagctgaccactgcttactctcacactccactgctttaccctttctcactacccatcagccacggacccccttcagttcctgggtcacttcatcttcttggcacctgtgcgcccttgtgcttttttctatctttatttggccaacactcctcctcatgcttccggtaca

SEQ ID NO: 455884 - DNA, 240 bp, Homo Sapiens
acttagaggatccctgacggaagcactagcgattaggagggaagcaggaaattgtactatcatgggagtgatgagaagtgacgttttagaatgcccagttaatacatagcccaagaaactggaaattattttcttagatcatggaaagtattttagaaaacagtattagttaaataacagtttataggctttaaacacctcatactgcactgtactacaatttcctggggttaccgaagc

SEQ ID NO: 455885 - DNA, 595 bp, Homo Sapiens
  misc_feature (11)..(11): n is a, c, g, or t
  misc_feature (45)..(45): n is a, c, g, or t
  misc_feature (149)..(149): n is a, c, g, or t
accttgaaaanaaaaccctaaaaaggtttcgtccctgtccgtaanaaaatacaaagggaaaactccctggggcggggccgggctgtccgctctcaggaaaggccctccaggtggatctaacaccatggctgcctcttcctttggtgttncccaggtctgcctgccctgtcctagctgcctgctcttctcagagcctgaggttgtgggaaggcctctcccatttctctggcaccatgaactttgcagctgccttctaccgtgccttgactgtatctccataaagctgtggggaggacctcacgtgttcttagggatcactgaatatttcttaccaagaaatgcctggggctgaaggaactagaatactaatgcctgtcgagggggactgatcttgaagcacataaataacatcagtattattcactgtatattttcctatttcccttgaaggcatctggatgaatattctatgagctcttatgccacccaaccctttgtgctcttctggaaaaagcctgtgtgggccaaggtaaggtcagatagaggcacctgctgtgaacagatttattcagcccacctgagaatgaatacaata

SEQ ID NO: 455886 - DNA, 415 bp, Homo Sapiens
gaagcagagtaggaagcatgagggaaagtgggtgggttgtcattgatgtccatcacttgcagtgaaatacgagtttctgtagacagtggaggagttccctggtcagtggcagttacagtgatgttatattctgagacttcttccctgtccagtgttctgtgtgtcaacaaccgataataatttccataggtcttttcaagtgtgaatggcagattatctggaatagaacatgtgagctaggccatttcctcctgagtcactgtcatgcacgttgaaaagtgcaattactgtacccggggaagaagattcctggactgagctggtgagagatgtaaccgtgacttttgtgcgttgtcattttcatcagaactgtcaccatactgcttccgtcgacgggatcctctagacacccgct

SEQ ID NO: 455887 - DNA, 340 bp, Homo Sapiens
tgtcatggtatgtaggtgggtggtatacatttcccatgaactgtgaagccccttttcggacaggctgagccgggcggagagaggggtccttagaatcgctggtacatgccgaggagggggctccatctcccgtactcgagttcctgctgcccagctcagttggggaggtgctcagagacgtggcagaaattatgtgtcgcccaccgccctccctccagcttgtcacattctgagggcggaggcttggtcctggcccatacgacagatctaagacgcccttttctttgccagccttgtcctgccctccagctgcttccgtcgaacgtaactctaggtcgac

SEQ ID NO: 455888 - DNA, 481 bp, Homo Sapiens
catctcccgtactcgagttcctgctgcccagctcagttggggaggtgctcagagacgtggcagaaattatgtgtcgcccaccgccctccctccagcttgtcacattctgagggcggaggcttggtcctggcccatacgacagatctaagacgcccttttctttgccagccttgtcctgccctccagctgctttcagcgtcggaaattcctcgggagagaaggataacagtcggcttgagccccttaaaccaccttcgtgtcctactggctttccattcagctgtgcccatgactttggtccacctggcactgaatttgtattctcctgactgattgactgtgtcggtttctgcaaattggagacagatttctgcaaacccggctgcggcagcgactccggcggctgagaggccgtcgcactggaactctttgggtcttgctgatcctgcttgtttgcccatcccgtcccgaaactgagaca

SEQ ID NO: 455889 - DNA, 947 bp, Homo Sapiens
tttaaagttaacagtgcatgaccaacaggccatgacaggtcaaatggcaggtgatcatactaggctggagttccataacatagagactggcatcatcacagaacgacggtatctttcttctgtcccctccaacttcattggacacctgcagagcttgacatttaatggaatggcatacattgacctgtgtaaaaatggcgacatagattactgtgagcttaatgccagatttggcttcaggaacatcatagcagatcctgtcaccttcaagaccaaatcgagctatgttgccttagctaccttgcaagcctacacttctatgcatctttttttccagttcaagacaacatccctagatggattaattctatataacagtgggggatggaaatgactttattgtgtgttgaattagttaaagggtacttacattacgtgtttgatttgggaaatggtgctaacctcatcaaaggaagctcaaataaacctctcaatgacaatcagtggcacaacgtgatgatatcaagggacaccagcaacctccacactgtaaagattgacacaaaaatcacaacgcaaatcaccgccggagccaggaacttagaccttaagagtgacttatatataggaggagtagctaaagaaacatacaaatccttactaaaacttgtacatgccaaagaaggctttcaaggctgcctggcattcagttgatttaaatgggacggcttccgggacctcatctccgatgctcttttctgcaacggactgatcgagagaggatgtgaagggcccagcacaacctgccaagaggactcatgttccaatcaaggtgtgtgcttgcaacaatgggatggcttcagctgtgactgtagtacgacttccttcagtggaccactctgcaatgaccgtaagtacctctctgagtatgaactgatactcatcgt

SEQ ID NO: 455890 - DNA, 688 bp, Homo Sapiens
aattccgaaaactttccgcggctgcctcggctccactcaccatccccatctcagccccctttactgtttctgcttcgggcccagctctgttgaccagtgtgactccaccattggcacctgttgtcccagcggctcctggacctccctccttggcaccatctggtgcttccccgtcagcatcagccttgactctaggtttggccacagctccatccctgtcttcatctcagacacctggtcaccctctgttgttggctcccacctcttcacatgttccagggttgaactcaaccgtggccccagcatgctcacctgtcctggtgccagcttcggctctggccagtccttttccgtcagcaccaaatccagctccagctcaggcttcccttctggctccagcatcttctgcatctcaggctctagccacccctctggctcctatggcggctccacagacagcaattctggctccttctccagctcctcctctggctcctcttccggtcctggcaccatcgccaggtgctgctcctgtcctggcttcatcacagactccggttccagttatggctccatcgtctactccaggaacctctttagcctcagcttcaccggtaccagctccaacccctgtgttggctccatcatcaactcaaactatgctaccagccccggttccgtcacctct

SEQ ID NO: 455891 - DNA, 313 bp, Homo Sapiens
tgtaccctaatagagcgtttgtgaatctttcacaaacttcatcatggtcattacaacttcccagagaggggagcaggtgtgtcctgaagcatgtgagcattctatggtatttgagacagcacgccctctcctccttgtggttttctatcagctgccccatagtcctacacctactccactagctttctccctcctaactcacttataccttcgtgcccttacttttctaaggctacattcattcttactttagccatatcgcaataacctttcctgccatccccctagatacatgtttcctacgttaataatt

SEQ ID NO: 455892 - DNA, 531 bp, Homo Sapiens
  misc_feature (175)..(187): n is a, c, g, or t
tcgacggaagcatacgaatcaagtatttttaaaatattttcaattaaaaaagttctagggtggtactacaggcaatgtatgatggaagtgccacattctcaaagccactgaagagagccagttgaaagttagcaaatgagttagttgtttcatcaagaaatggaagtggtctgannnnnnnnnnnnnccaaatcaaataatgcagtacagtgcaaattcttgaaagatacttttattttcaaattgtacttggaagttcttcttattctgattctgttgagcagtgcaataggattacattggtagtataattgaataaggctctgtacagaaaaactataaaaaacaattgcctattgctttatttcctgagaaaaaaaattaccttttgataaaataagtagaaatgctgaaaagaatgtattcaagttagaagtatactccccactgaacacctctttcacatttctggcccatatagcagggatcccctacctccaagccacagctgcttccggtcgacgagatccg

SEQ ID NO: 455893 - DNA, 177 bp, Homo Sapiens
tgtgatctctgtgagccacaccctattcgtactcccctccccttttgaaatccataataaaaacttgctggttttgcagctcggggcatcacggaacctgccaacatgcgttgtctcgcctggacaccaagctttaaaatttctctcttttgtactctaccctcagggtctcagccg

SEQ ID NO: 455894 - DNA, 666 bp, Homo Sapiens
  misc_feature (242)..(243): n is a, c, g, or t
  misc_feature (245)..(295): n is a, c, g, or t
  misc_feature (550)..(550): n is a, c, g, or t
ttttaccagggccctttttagtgaatccaagcagagagtcctggaagagtaggtaagctcgaacatgaagcaaagctgaggaggcaggagtgaaggagggaggggatgggagacccgcgagagggctcctcagtctagtaaagacatggcacctttctttgttggaactaaaagacgatgcagacgggctacctttaaaatgggcagagcaaagggaccacgcacacgcacataccgctganncnnnnnnnnnnnnnnnnnnnnnnnnnnnnnnnnnnnnnnnnnnnnnnnnnnncaaaatgggagtcagttgtgtttatgcctctggtaaagtgctgatgtcagaaaggttggtttgcgtgtggtgctatcagacaggaaacaaactgtccatctattccaaagccagcctgcaaaaatgccatcctacaggggcccgtgcctggcctcatacttggcaagtatgttcttggccattttggccccagctccttcctcaagtcagccacctcctggcggagggccgagttctccttctccaggaacgagngccggatggcgatctggttctctttcagccctccggggcggtccgcgggagcgcttggctgccatgttgttctttctgggcctggccccgtactgtcatcctgttccggccgacgg

SEQ ID NO: 455895 - DNA, 202 bp, Homo Sapiens
tgggtgactctacaggatcctttcgacggaagcatcttatttagcttcattttacaccaacttccagtttcttgtgccatcagttcctgagtctttggggcattctactatgtaaattatattgattcaaggcattttccattgctgaggcttcaagtttctcaagtcagttgagctggtatttcaacagtgagattttttt

SEQ ID NO: 455896 - DNA, 341 bp, Homo Sapiens
cgcaaccaataaacaatgagccaagaaccatccccagacttcaattacctctgtgctcacactttcaaatctttccagcttcatcactcctgagctacagacccacatatccagcagcctactggaccttccctccaaacccatgcctccctgtgttctcatctcagtgaatggagctccgttctgcttaatcatccacacctaaggccaagttttctcaaatctacctcccaagtgcttctcatatctcctctaccaggtcacagttctctttagcctagattacctcaatagcgtcaaaaccggtatgcctgcctcctgtctctcctgcttccggtcga

SEQ ID NO: 455897 - DNA, 472 bp, Homo Sapiens
cggaagcatgtaacttgcagtgttatgaagcagcccggcccactgcacacaacacactcacagggactcaaaggatgagactcaggatccgctgggtggaagtgaggacagacccagaaacacagggggtgggaggtggtcaaaccaggaaggctcaggacctgacctcctcctaggccctgcccctctagaactcgcacttttttctgacccagaagcggatttcactgatggaaaagatgttcagtatttctggtccagcccagtaagctgctccccttgctcagccttccacgcccctgcagacgtcacaatccctgcacccactaacctgacaagggagctatgcatcacctggagacagtcctaggcctgcactcctgtgatggggtccagagtctgcatccatttctggttaaaactgctgtaaggctggtggctgtcttggccttccctgctaccggtcgaacgc

SEQ ID NO: 455898 - DNA, 233 bp, Homo Sapiens
aataatctgttacagcttcctaactcagaagactaccctccctgtctcccactgaaataagtgatcctaaatggatagtgtactggcatgcataaaatgcaagtcagtcttaatagtcagaatagtgtattttggggatgggggagaatgaaattactttagagtctgctcacagcttaatctgccaccacaaatgtcagtggctacgctctcagttcctgcttccgtcgata

SEQ ID NO: 455899 - DNA, 152 bp, Homo Sapiens
agttacgttatggcatagtaattggttagaaaatatccgaagttcatatttaagaacctagtcatctacacaaacacaagagagttgaaagtgattgtgtctctagtcttttggggttgccacggggtagggtaggcaactacataaatcaa

SEQ ID NO: 455900 - DNA, 316 bp, Homo Sapiens
ccgtcgacggaagcctttaaacttattaaataataatattaatattgataattattgctaaattcatttattctttaaaattaggcataatggtctgaggaatttgttatatattccattgccggcatatttcaaataattgcctggtaggaaaatgggagttggctcagctatacctgatctgtaggtgcacatgcacaattcagtgataagattcagatggcaatttgagtgttgcagtgttggtgtatattccttgggaagatacctcaattagaggcagttttatttccgccagtattctgcttccggtcaa

SEQ ID NO: 455901 - DNA, 235 bp, Homo Sapiens
gatggtttttaattttaaggtcaagtttcctaacaaaaatttgttttgtttttgtgagatttaaactggccatatgagcatttaaaccatctgcttctgaaatagcaagctgaaactcaacccaaacttgaagctgtttattacgctcagataccaagtcctctctcttcatgggtggggaccgggaattcatttgcagaaagaagtgcttccggtcgacgggtcctctaggtca

SEQ ID NO: 455902 - DNA, 684 bp, Homo Sapiens
  misc_feature (99)..(99): n is a, c, g, or t
  misc_feature (394)..(569): n is a, c, g, or t
cccgaccgggagcacataatctagcatttatggtaatctcatcatattttagtttgttctatgttcagatactgccttacttgtaaagagttttcttgncggggagagatatggggggtgtttttcctggaggttatatttgcctctcttttttattgttagaagaaataccactacctgcccatccccccaccctccaaacacagaatgtccttaaactttgacattagcctatcacgtggaaatcatcgcattctttatttttaagcctgtaaccttgttaccattggaatctattccttctatttggacgaccatatttttcatatggcttttagaatttttaaaaaaatttatttagcaaatcttatataccaccaatcaggtgacaggnnnnnnnnnnnnnnnnnnnnnnnnnnnnnnnnnnnnnnnnnnnnnnnnnnnnnnnnnnnnnnnnnnnnnnnnnnnnnnnnnnnnnnnnnnnnnnnnnnnnnnnnnnnnnnnnnnnnnnnnnnnnnnnnnnnnnnnnnnnnnnnnnnnnnnnnnnnnnnnnnnnnnnnnnnnnnnnncagatgtccagagaccttgttcttaagcactattctacctctacaagaagttgctctctttcagtagtttcatagttctttccactgcttccgtcgacgggatcctgtagagcga

SEQ ID NO: 455903 - DNA, 484 bp, Homo Sapiens
cgaccggaagcacctcatcagtacctgtatcttaattatacggtctctaaactggctgtgttgtgagccattctgaaatgagttggtgccacctacggaagcaaagaagtatcacatgcactgtcagcacctgtgtgctgtgctgtcagaggggtaaatttcataagaaattacgtatattagtaactgtccctcaaatggtaaaataatactgcaggtgcttagaaagtacgggacgaggttttggttgctagtcagtggaatccgcggtggctgctataagcaagaaaaagtttattcacggacagtagtacagggaatcttcatgagggcccagagacaggccattctagagccacaaagccaggatgccgtagcacgtcacaggcccctccagcaagatatagcatatacacgctctggctggcatctcagagtcttgtccccaccctgcagacccaggttaccaccccgcctcctgctt

SEQ ID NO: 455904 - DNA, 697 bp, Homo Sapiens
  misc_feature (247)..(260): n is a, c, g, or t
ggaagtgtcaaggatcagttctgtggcaccgtttaaccacagactgggagcaacacgcatctgtggcattttaaaatggaattggcaactgcatgacattgaaaatgcgtattacacttacagtgtctagactttcctatgtgtgctcagatacaattagtgaagcaaaagtatacatattatcccctactgttactcagttgctacagagccataaatgtgaaaagcaatagtctgaaataaagannnnnnnnnnnnnngccctagccctacttagcagcacagtttaagtaaacacaaaaactgtggttgagatgcttgtctttccaaagatgtaaacatcagtcccagtgtcgtaaactttgctgtatcgaatgagacagaagatctgaggcagaaggacaatcacacgctagtaacagaagcttgcaaagcagttggaaggtttctgtagcttctcagcttcatttgtccgggggctccgcgctcgctcggaagttgaaggctggaccagctccaccatgggccgggctcaaagcggggttctgacgacggttactttcaacaatgcttgatgtgttggaagccaggctctcccgagtacgtggggagttgaatccactgtccactgtgatgctgctgctgtccatgctgtcgagccgggctgaatgggtggctctctggttgctgctgcttc

SEQ ID NO: 455905 - DNA, 390 bp, Homo Sapiens
  misc_feature (15)..(15): n is a, c, g, or t
aaatgcgctgccganaaagatctgggcccatcaatggtgcggtaaggcccttccccatcccacgttggtccagcgtgtggtgccagcacttcatgccagctctgactcctcccatctggggtgggggcagcaagctcactcttgagcagttctgtggctgtgggccgttttgctggatcgtggttcaacagccaggagatgactgatttctgctttgcatgctctccatcgtcaaagtcttctggaaacttaggcgaagtgggatctctgagttggttgagaacaaagatcctttctgaagccgtgaccatggggtgataggacatctcaaagaagataattcccaggctgaagagatccactttctgacgtatgcagatttgtgcttcc

SEQ ID NO: 455906 - DNA, 188 bp, Homo Sapiens
tgaagcagtgactagaaggttttcctttttagtgctagtcataaatgaatttattttctcctgcttctcaacccagcaacatatgtaatttaagtcaagcatgtgtttgattctgagtggaattcgaggggggagttggtgctgtgtgtttccatggctcgtggctcatttttgcttccggtcggaac

SEQ ID NO: 455907 - DNA, 543 bp, Homo Sapiens
gttcgacggaagcagaggaaattttgaaagggagtgtgggggcaatcatagaaagagggacagaaggcaacaacggacaagaaactgaaaacatatagggaaagaaagggtccttcgtggatttgtcatttcacagatttacaactggaatccaccttttatcaaaatacgtgtgttgagagacatggcattgcatttcttactacatcctgtgctaaaccctaggtgacctcttatttttggtaataaaagttataatttcagcaaataggttttatccattaactccatagcctccttgatataacctgagattaagttaaatttaaagtccaagtgagctcaaaggtgtaggtgaaggttgttgctattaggtctgactgaataatagctctctgcaaaatcccagccacataaaagcactgctctggcagtcatagcaaccttgccagctttggatgtgattgctgacagagagttcaatgatttttccatggagaatcctgaagcttgctgttcgggttgacatttttacaactgtgt

SEQ ID NO: 455908 - DNA, 425 bp, Homo Sapiens
ttaatttcatagcaacatgtttatttaagccctagctaagttttcatttacaagcaaatattttcaggggaaaaaatcacataagacaatattttcaaatgttataccatctacataaaaattaaacttgcagaatttacaaattaatattctgagcagacagaaatattatacatccttttgcaaaatccagtcaacaacttttaaaaattcatacaggcacaacacaagatagtctctctatacaatctacctatttacatagcttttcccaccacagatgataatagctctcatcatagctaccaaggttcgcaaacatagtatatttaaaatatatttagcagcatataaaaaattagataaaagggaaggaaatactactattaaataaaaacaaaattaaatggtcataatagaaacaa

SEQ ID NO: 455909 - DNA, 535 bp, Homo Sapiens
aaaaaagaacaggttggtggcccagatttgtttcacacaccatagtttgctgactcagtctaatttatccccttgttttatatataaagaaattgaaagtctggggctggaggcgaagagattctctaaggtcgagtagcaagagtgtcacactctttgtaaaggagcgttacagactcagtgatacacacacgaagatagatacaggcacacacacatactctcactatccacattgtcacttagtttctgcatgttcatattcatttccatgttgatctcacagcaactgtctccctagggaaactatgtcctgtggtgaaggacagcctcacctcaacttgggagcgacatctacactgcctagactttacctcaaccccctgacagattcaatgttttgtgtgtctcttcaaagactggtcttgccataatagctaccagctcctgagcaaagtctagagagagcccttagaaatcactctttgtagttactttcccatatattcgacgtggggatcctctaagtcacctc

SEQ ID NO: 455910 - DNA, 301 bp, Homo Sapiens
acccatggacttaccgaaattccgagcctccggtacccccccacctgccgaaatattaatatacaccgttatggccaagaaagccttttacaaatgtttaaatacccttaaaaagcacaatgcattttccactgggaagttttaagaatacattctaaatattcaggagtccattaagtggcagaatattttacatctgccccgttcctaaacagtaaaatgaaaatttcattgttctgctttagaaattaaatttgaccactttgaaattaaaggtgcaatattaaccatgtaactgtta

SEQ ID NO: 455911 - DNA, 313 bp, Homo Sapiens
gacgtggagcacctatacatgtatatggtaggaacaacactaatggttcctccagtgaatatatgttagttaattatgtgtcaatattttaaaaattaaatttttaaaaaagaatgaaccataggacttttgagtgcctttaacttctgagtgtgtatcaggcagcaggactgcactcgatgctggagttcggcgatggctaaagcacagctcctgaccaccaggggctcccagtgcagtgatcccattccaacatcaagacttattccaaattgaattctaaccatgagctatgatgtcatgaggtcctact

SEQ ID NO: 455912 - DNA, 305 bp, Homo Sapiens
ctccaacgtgcgaattatggtatgctccttataattcgctctaagaagccaatctgctgtgtgagacgaagactattttcctgtaattgcttattttctttatccatgtaaagtaccctgctctggatggaagatatcgtccatttgttgctgtggatcaactgttcttgctctatgacttgctcctgaagtttccttttttctagaagcagggtatcattttgggcagtgatctggtcctgtatgccttctcctcacatggacattaagcagcttcaataatcgcaaatatttcgcacgtggaa

SEQ ID NO: 455913 - DNA, 322 bp, Homo Sapiens
ttaaagaccttcttgttttctagcatgaaccaagggcgcgatatatcgtgagacactgagctatattatttgggggctaccagctgcatagatactctctttgaaaggtttcttcctccattactcaaagttattccaaaataaatattctccattctgttccttttatgttgtgaatactcagcataaggtaatctccttcaactctttgagagcatctctatctgtgatctaatggaaatgatgaggttattttactgaaccattcataaacgtagatactattcccaaattttttagtagcagtaatctctagatattc

SEQ ID NO: 455914 - DNA, 331 bp, Homo Sapiens
cattaacaataaaaagaaatagtgtgtaggggatgtttaattagagattcaaatatcacattttcacttttattatatacaagtgcagaaatagaattgtccatttatatgggattgtattttatttggctttttaataagttatctgcttattaataaaacccaagaaatataatgtctttggtccttctctcattgatgagatagcatagcagtgattcacctgaagtagcgtaagactccagcgaatggatccaaaggctacagacaagtttcattcaattcattcttattggacatgtacttatttttccacatataccatacccat

SEQ ID NO: 455915 - DNA, 220 bp, Homo Sapiens
ccacagtgcgaatatttttgggcatgtgtgctatgtatcttgtatgcctattataagttaatgcatcgtgtgtatatactgagtttgtgtgtattttatgtgtagaaacaatggtaaagtagcctttgtgtatcttatatgcatatgcattttgtccatgtagttttttatgtattttgcatctgagtttcaggttgtatattcgcactggagggatccc

SEQ ID NO: 455916 - DNA, 102 bp, Homo Sapiens
caggaaacggtacacatgttcacacacacttgcacaacatgctaccatgtgcacacaacatgttcacacatgcttacatacattcttataaatacacaagtt

SEQ ID NO: 455917 - DNA, 488 bp, Homo Sapiens
tagcagttgctttacagaacgctttagtccacctaaccttttgagaattgcacttcttttaaagtctttgtgacatttatgtttatactatctgaacaccttgcaacagctgcagatgaacatcatgatgtggtcagggtagatgggtcccaaagaaactaacacttctcagtgctgagctcggatgggcctccactgaccatacacggagcttgagaggaagtcaagaggtatcttggaattccacatgctgaccctgtcattcttgaaggaaaatgatgcataatctctgaataattcagaaagaacttaacaatctttccagttagtttttaaataacaattctgtttatcaaatttctgaattaacttttctgaattcacgggtttctaaaactggccttaagcaaaagtctgaaacctaggctgggaaccatgtaacccaggccaagaaggtactttaaagtgttttagagttgtttttcaac

SEQ ID NO: 455918 - DNA, 621 bp, Homo Sapiens
  misc_feature (585)..(585): n is a, c, g, or t
tcacgtgcgaatattccatacccaagttaaggaaaaggtagtaggatggcaaggcaaactattacccaaatcttagcggcagctactcagttttgggataatctaagtacaaaaaatgaaaagaagagatttcagttttgctgtgttctctggttaagttagaactctttactgaagggaataatcctacaatgaccaatccagaaggggaagaaagacagatgggaggctgtatgttgttattgcaataagccagggtgttggaagagggattgcagaaggacactctggatgatgcagagactgcaaagataagagaattaggagagcctagaacaaaactttcagctaggaaatacttgtcaagtggttcaaaattgacaaattgagggaatcacaaaggtgagaactagtggactgtaatgtgtcagtaacttttcccatctggtgacaggttaattcaggttatggatattttgggtcagccttctacttgtcccctttcctctgtaattcccatagagataggtcctttgactgaggaacatgtgttcttcatttctcctgaatctcctataaacctanctggtgagagacctgctgtgcaacttaatagctact

SEQ ID NO: 455919 - DNA, 313 bp, Homo Sapiens
  misc_feature (78)..(78): n is a, c, g, or t
atggattgagaagctaaactgatgaatcatatggccaggtataagattactgcacagttaacccttaccactagggcnatagacttttagagtccctacccaaatgaagaaggtttacccgggcacccaacctgtggactcaagttttttgtcccccttgttttgcaaagcttttaaatatactcctcagcgtttcaagccacattttgctagaattgtcatattcttccaggaaaaaagtagctctaaatgccagacccaccctctaatttctatttctcctagatatcgcactggaggatcctcagagtca

SEQ ID NO: 455920 - DNA, 167 bp, Homo Sapiens
gtgtgctttgttgcatttgatcagatcaggtctgtctgtggtgattaaggtctagtgattggaattataaatgagagtatagtcaaccaaaaagatacacatactacctgggaagacatctgtttaaagttttcttttctccaactcattatatattcgcaggtgga

SEQ ID NO: 455921 - DNA, 410 bp, Homo Sapiens
tcccgcgtattagatttaaaggtcgaatgatcttgcattgctgcctcttctgcattaggactatcagcttcagtgtctcccaatttgacagcatgcttccactgtgcatatacatgcatttcacaatccattcctaccacccatatcccatctcttacccaagagagagaaacaggcagtgaaggagtaccatcaacagaagataccaagtctatagatctaagaagaacccatcttgacttaactccttgcttgatactaccacctagtggtaaagtgatgacagctactccatccttactgttggtttgctcagtcacaattcctgaaagccttccatacatgaagatattcgcaccgactccccctgtaagaatgtgggagccatcttctacgctggaatggaattg

SEQ ID NO: 455922 - DNA, 258 bp, Homo Sapiens
cgtgcgaatatgcgatcacttcatttttagtttgagttgcaccagaagctgccgtagaaagccatgcgctactgattacctcctcccactccccctggctgcccccagcatctggacaaggctaatagccaatattacccattttgctatcaagggaggagggggtagtctgtacaacgccatgtgtgacagtcatgtgcacacatgggcgggggcttttaaaaacctttcaggaagtcaatgatttctgtgattgat

SEQ ID NO: 455923 - DNA, 514 bp, Homo Sapiens
ttttttttatatcaatattaatttaatagcagctctgtgttgtgattttaaagaacaagataaaatatgtcattcagcagtcatttaaaaaataaaagactacagatacaaggaaataaaaaacacttttaggagatgaaaacacaaagtagtaggatacccaacatgtacacatcccatcttcaaatttaaaatcatattgtcagttgtccaaagcagcttgaatttaaagtttgtgctataaaattgtgcaaatatgttaaggattgagacccaccaatgcactactgtaatatttcgcttcctaaatttcttccacctacagataatagacaacaagtctgagaaactaaggctaaccaaacttagatataaatcctaccaataaaatttttcagttttaagttttacagtttgatttaaaaacaaaacagaaacaaatttcaaaataaatcacatcttctcttaaaacttggcaaacccttccctaactgtccaagtatgagcatacact

SEQ ID NO: 455924 - DNA, 282 bp, Homo Sapiens
ccaatcttggttggctggtccgagggcactgatgtaatcggatttgccttttcctctggttgttaaggagagcactgtggggtcagatggaaacagtccagcagcaagaggaccagttcaggagtccagctgagagatgagggcagggtagcagcagtggtggtggcgagaagtggtcgcattcaagatttattgactctgctgatggattggatattgcaggtgaggaaaaaagagaacgtgggataattgccaggctttttgacttgagcaattgagtga

SEQ ID NO: 455925 - DNA, 315 bp, Homo Sapiens
cttagaggatgctccagtgcgaatatatataaaatgttttctagcaggtccatttttttctgaataaatagttttaaaaacaaatttaacaggaagcttaacaattttttgaaaatttgtacaaggcagtgctcaatgtacgggaataagagaaaacccaagagatgatgaaaaattaacacgccaaaagctcatcacacagagaaaactgcttttactctcttcttcttctagtcatttctatgccccattattatttttgcatatttgaggtgatgtggtgtaaacagtatgtatattcggcacgtggggggt

SEQ ID NO: 455926 - DNA, 272 bp, Homo Sapiens
cacctgcgcagtaattgaacctgaccattttgccagaaagttgctgaccctgtgggcttttttttaaaaaatgagaggtgagtgcagtcgcaattactgtaaacttctgtacatatttctaatatatttctattttcaagatatatataatctatatatttgactgcctcaaattccgggaatatcctccccactcccccaggatgatcatttggatctttattacaacagtgtcttcatattcgcacggtggagaggtaccgaagctcgaa

SEQ ID NO: 455927 - DNA, 212 bp, Homo Sapiens
gtttaggaaacatgaggtgaagaaagttagcttactgacgctttttgttttctagttggagcgcacctcagagtcccctccataatgcgtattaggactttctaagggaagacggggtacgatgggtcccaaatcttgtttgatcacaggacgtatctgtctcctgagaaatttctaggatgagtactctgaactcagcttcatttagtcat

SEQ ID NO: 455928 - DNA, 305 bp, Homo Sapiens
cttcgtcacgtgcgaaatattgacgaggctgtcaagtgttttacataaggtaataagaggtaccaccatcaccagaacccctacaaatttttacatttcatataaaaagagtaaaaatagttcattggcatgtaactagcatcattctctgtaatctatgagccataataagcctgaacaatttcagtctcttcagagcaaaacaaagtattttattccactagcagatgtttctccaaaaacaagaaacaaaccaatacaaccacaaatactacccacacacaaccactgaaacataagttgcc

SEQ ID NO: 455929 - DNA, 465 bp, Homo Sapiens
cagtactacaccagatagagtatttaatggaacgatgtatgtcatcctcagagtagcttttaattataaacacacgtccattcttcagattccaatcacagtctttgggattatagttgtttatggcctttagcttttgcagcacgggatgcacttctacactggaaggtgaagcactgacaggtacaacacctaacgcaaagttttcactgcccgctccattgttctggttgaagcctgctcccctgttacgaggagctacccagcgattctgcagctgctgctgttgaggctgcacttggtgaggctgggcctgtggctgaggtccttgtgctgctgtgttgtgtgctgagctctgttgagcagtggcttgcacatcgtgtggtgataatgctgagctctgatatagttgagagcaactggtggtggtgagccttacactgacctttcatccagtcaatatca

SEQ ID NO: 455930 - DNA, 318 bp, Homo Sapiens
cgctgatccggagcacagctctgagggcatcccagaccgcaaagaaaatgaggtgcacctgccccaaagctcagccaagactcctttccactgtgactcccgcaatggagggccccaggtgctgtgtaaacttctcctctcagaggagctgagttctgtctccctcccttcactgagccgggctcccaggtgctgagtgtcacagatctcaactggtcccacttgaagcaggaccctgagatgtgagactgggcccagggcacgtacctaagccttcctgtgtcacactcctgtccttatagcaccgctccggatcag

SEQ ID NO: 455931 - DNA, 177 bp, Homo Sapiens
ccccttggagagctctcttaagatgtaagcagaattttaacccagccctacgtggtcttagacattttggccattctcatttcccagcctcacctagcccttggtttcatgtcatcttcgctttcttctatattccctcctgagacacagcctttgcacatgctgccccctctgcca

SEQ ID NO: 455932 - DNA, 388 bp, Homo Sapiens
cactagtcatcacaagtccacatatcatcacaagactacagtctacctcttgtatatatgcaacccaaaaatcttgaattataaacgtacttgcttcctgggacttcagataaatctctagtatcctcaagagtctttgaatacgtttcctgtctccagcaatatctcgtgggtagaaaaaaaatagattatcactttgcaatttatgtttttaccagcatgcaattgagtagattcaattgactccaaatggtcttgcacattactaatttctgtcccctattgtcctcccctgtgtgacttcaacttaatgcataatatgatatgggacatccctcataaattccgtatcatcagagtaatgtggctttgatgatgtacgctcgga

SEQ ID NO: 455933 - DNA, 522 bp, Homo Sapiens
agagcttttggatcagggttactagaaatctcgtcagccttcttacctcccatctaactccttcaccttccctacatgtgtaattattccctactaaaagccctaagctaagtgattctccaaggtcgtcatgtttctccttaattgggataccgaggactcaaaacggtgctttggtaatttgattatattaggagtgtagcctcgcacttctcatcccagtatcatgtttcggttttgaaccacaagtagcacatgactgactcatggcacctggttacacttgtacttgcagtggtttgctcctgaagacgttctctagattaaatgtcaataaagattcttctaaattctccagaaactctcctttttactcaaggtttgaatcacttgagtacaagtggatgcgctattatatcaacaagccacgtcttaaaacccattttaaaaagtagtatcaactgaatttctttcattaggagtctcataagggaaacagtgataagtttgattctgagcagg

SEQ ID NO: 455934 - DNA, 459 bp, Homo Sapiens
gctcctggagtgccttccatattccgaatcctctttactccagaggagaacaaggataacgcccatacgttgacctgtgttactgtaagagaaaagtttattgtacccatcaaagctagaggggcacgagccattctcgattttcctgacaagctgaatttttccacttgtcctgtcaaatacagcacccagaagattctgctggtacgaaacattggcaacaaaaatgctgtatttcacatcaaaactagtaggcctttctcatatagaaaccagctattggaactcttaatgtgggagagtccatgcatctggaagtggagtttgagccaccagagtgtgggcgatcacatgtggaagacttatcgtgtgctatgacacaggtgaaaaggtgtttgtatctctctatggagctgccatagacatgaatataaggctggataagaattccttgacggt

SEQ ID NO: 455935 - DNA, 278 bp, Homo Sapiens
  misc_feature (67)..(86): n is a, c, g, or t
tcccctgtgagagctcctcaaaattaattattttgaactctttgtcacgcagttcatatatctctannnnnnnnnnnnnnnnnnnncagctaatgagaaattgtattattgtggtgatgttatgtctccctggcttttcctatttcttactgccatatgtttatttctacacatctgaagtaagggcttattccagtccttgcagactggctttatcaggtaaaacccttcagcagtcagcctatccagggattctgagcatgccatctgccaagggg

SEQ ID NO: 455936 - DNA, 251 bp, Homo Sapiens
ccccttggagagctcctgggtgttagatatatttattgctgctgggggatcattgtttctagaccctctcagcagatagagcaaggaaatatatgtgtgtttactaacatctatttttctatctttatattatgctaaatataaatttatgctgatgtctccaactctaatccagcatcacatgagttctagccgttgattttctacaacattccactccagcagtgagaaacctagctctagctctgcca

SEQ ID NO: 455937 - DNA, 116 bp, Homo Sapiens
acccggcgtaaacaccctctcttttcacgggtccccttctaaacaggttcctcttagtgcatccttaccatgctctttaaactcctacctcagccctcctaatgacctccggccta

SEQ ID NO: 455938 - DNA, 684 bp, Homo Sapiens
cggcgcatcatgaatcccatgtctaagatcttttccagatcatcaatttacaaacgcagttacctttacctgggggggttacctttaacttggcataatgccttcatgagaacaagtgagtagataatctggctcttttctagcagagtcctgaagggatgggacactggacgggttagttttgatatgcggatgagggtcttacatgtcgggagcattcgatcattccctcatttgatattcactgagcatctcccaggagggggcctactcaggctgagggctttggagacaggaggacgccaggaatctggtagacgggattgtagggagggcttcccaaggcaaaccttgtctgccttactgcttaaaactagagccatcccagagtcagggaagaacacatgtgattaagtcactgtccaataaagtctgtttccacagaccaaatccatccattccggtcagctgatgtgcaagaccctcctcacttttccagacctgcttccctctgcttccccacatgccccactgtccaggcaaatggaaacacctgtgtatgttccagtggctgaacctttgctcctctggtgcctctcacctgccccagccttgggaagcacttccatctatcgggacacccaccagtcggaacccttccaggttcatctctgattctgcatt

SEQ ID NO: 455939 - DNA, 316 bp, Homo Sapiens
taggccggaggactaggccactacttgactggtgacagagagtatcttagatgtataggcccccagacatgccagtgtcctctctcaccacccatctccactccaaagttgtctggcctcacccaccttctgtgcctggttcttctcctctgtgcttctctcactatgccatgtcctcgcctgttcaggtgtctctaagagctcatagatccttaactcttacagctttaaatgaggcacattacaaagcccgagctcagtgtcattccctgcagtctcctcttcctcccatcttatactctcagggatgtctccc

SEQ ID NO: 455940 - DNA, 457 bp, Homo Sapiens
cactcctccctggaaggggaccccagcatctccttgacccttctttcctcactcactctccaagaagaagggtgcctctacccttctttaatctgcctagagaaggtgggtccaccatcttggtcatccaccatcttgcccagtccagattgcttgctgacacccctaatccagaaatatctcattctaatcctggctccaccacttaggagttgtacgactttagaaactcctccaggcctccatttcatcacctggaagtgaggacgttaggtgtcccacctcatcactgagctagcaggacctggtgagatagtgggtatgaaggtgctttgcaaactgtcaatactgcactcatgtatgacttagtacatctgctctctcatcaactcacctccctgatcaccctccttcttctcctgctctggcctgccccatgacctgtggccttgaactc

SEQ ID NO: 455941 - DNA, 188 bp, Homo Sapiens
taggccggaggacaaattagcaactctttatcttttcgatccaagaggatatgttgtacaggaggaattaaattttcaactgccttccccacatcactgcggaatgaatcactagctggaaggcaactggcaggtagtttgtaaatataactttgcccattttctgtccaaatgatgatacatctgag

SEQ ID NO: 455942 - DNA, 282 bp, Homo Sapiens
cgtcgactctagatcgacgtagtggcaggactacaggtcatgtcacttcaggtgttcaaatcccgctggcataggctctttccttgtctgccttgtctgcaggattcagcaccaagagctctcaagagcaaatccacaggcagctaaatcaagaaggtggctctcttccctcctctttgctcccctcttcctgcagagatgcaagatggctttgaaatgtccctatcttccttcccttctgattcctacttgttcagatgcttccatcctgaacattttcta

SEQ ID NO: 455943 - DNA, 357 bp, Homo Sapiens
  misc_feature (188)..(216): n is a, c, g, or t
gatctgtggggacttgagagaagggaaggtctagggctaggcacagtggtgtgggtgagctccttctcaatacacagctccttcctatacagcagctttaggtggggtagggtcttctctctgagaccctgggggagtgaagaccctggtgtgaagacggcccatttcattcaagcctcagttacagnnnnnnnnnnnnnnnnnnnnnnnnnnnnntgtgatgaccaaattggggcatactctggtggaggccaaggaggcttcctgatgacttccagggctcttccctgacaccccacattgcatgcaggcctctcctgcggggcatcccctgcatggcacgtgtcctccggccta

SEQ ID NO: 455944 - DNA, 630 bp, Homo Sapiens
ccagaggcacacagaggaggaaggaaggaggagagagacgagaaagagcaagacataaacagagactccaagaaggatagagaaatgcaggccacgagaggggaaaaagggaggcagggagatggaatctgacgtaaatggagacaggtctggctccacacttccaggctgggggtgggaacctgcaccacatagttccttcaggcatgatgggggatgagctgaggggatggtgctgttgcgtgaaggacagaatgtgccgcccttgacagaagcacagggacagctgggccctgtggccacgctcgggaccaggccccactgctctcccactggcgaggaacagaatgacccagtcctgagagggctacggagcaggcctccatcttcagtgtcctccgggagcccagactcgagttaccgcccccatgatgggatgtctgagactaaatgggcagcgtacctgagcctctggcccagctcccttccgaacctcttgggaccagaagggggcacttgaagtggcttctctggaaccccactggccacagctgtggccactggccccctgtcagagaggaggggctaggggtacccattcctggatgtttctggctaggtgtgttcact

SEQ ID NO: 455945 - DNA, 307 bp, Homo Sapiens
taggccggaggactaggccggaggggtgttcaagacaatttttagagatggcattggcaggacttatcctacatgcagaagaggtacaagcccaagaaaaacccaaagtttctaacttgagtgattaaggcaaagacgatgctcttaaatggtttgggtaacaccgcaggagaagaaattttagtcatgttgtgtttccagtgcctgtgaaccccttagtgaagcaaaccagaagatagacatacagagtaagattattaatatcctagtagatccgtagattagtagatatgatgtcacccgcctt

SEQ ID NO: 455946 - DNA, 199 bp, Homo Sapiens
cattgctgttatcgtatttatgttcttaaggagaagtgaaaataattttattaattgattttttttggcttccatcataattatgatgctagtgactatccagttcgtaatgtttaagatagccttggtagaacgtatacatcaagtgttatattgtcctattgaatttctccaagttgttgttaatgtctccggccta

SEQ ID NO: 455947 - DNA, 459 bp, Homo Sapiens
  misc_feature (79)..(79): n is a, c, g, or t
gccatccatgtccccaggccccccagaggaaccccaaaggtctggcctgaagctgttccagaagaaccccctggcctantctgaattccttagtcccagctgaaaacgtgttctgtgtgatctagaacaccccagggcaaagggcggcacatctatgacacttgtgcttcttcaagtacttcagtgagtcccaggcctcctcttttcctgctcatccattgatatctgtgtatgggaaagggggctggacagaggggggtatctgaggacttttctagttcttctgacctgctcaggctccttctatagtgaggaggctgtttaggagtcaagaaaccactgatttctacttttcaaagagagagggaaatggaaacaggcacaaggcgctggggactccatggcaaggaaaacagagggagcctcgggaccacactgaatgctattctgccgactctg

SEQ ID NO: 455948 - DNA, 215 bp, Homo Sapiens
ctacttaacacgaatgtgaagatgtcctcttagtgcttggcagattagtactgtaagtttgagaacttaaatcactcttaaaattgagtaccattggtcgtgttgtttgcctggtttctctttacagtggcatcacatttattcttcagagcaccattagagtcataccattgaatgaaatttccttcctactcacgttcccaggagttccccct

SEQ ID NO: 455949 - DNA, 299 bp, Homo Sapiens
actcctcgttaagcaccaggtgccctggaaacagctatttcaattagtgccagactgagctgaaatgaagattaagaggtcatttcaaacaatagctcaaggataatttgcttagcatacagatctctactaccatatacttctgctctgcaatgcagcattaacctcatttactgtttagttctacagggcacatattactagtcagaaagcccccttgtttctcatatagaaaactctactgaaagtctcacgtgcacatgtcattctcagtggaggccactgatgggtaccgagct

SEQ ID NO: 455950 - DNA, 381 bp, Homo Sapiens
tgtgtgttttaccatgtaagtttaataaaactcatcaatttttgtcttttatgcttcactctgctccaactatagtaacctccttgttacctttcaaatatgctagatgacttgtccaacttcaatgtcttttatttgcctgttctctacacctgaaattctgctgtgccctggagataaatatttcatgttcctgccttcacctcttttgagtctttgatcaaatgtcagcgtttcattgagactttccctgaccactctattttatagttacaacctccccttccctgctttgttttcctctccatcacatggagctcactagacttttgagatatttattagtatttttttcagatcagattggagtctacactgggg

SEQ ID NO: 455951 - DNA, 182 bp, Homo Sapiens
agggaactcagcatgtcatttatccgttgtttttcacactttagcatatatcaccatcacccagaaagcttaacacaaataatggaacctgggaattttcatttttagtaacttcaagtaatgctgatgctgctggtctggagagactttaagtcttaatcactgttccagcccacaacact

SEQ ID NO: 455952 - DNA, 317 bp, Homo Sapiens
agggggaactccgacatcagtttgcaatatctatattttttaaaggaaagaaatataatttaaaataattgcctatttcacttgacatttgacatgttgtaggtactttgggagcaattttcaaggcaggcccatgtgacttttagatgctgggatgggaaataccacactgacactagggctgcctttggagacagaagcaggaacataaagacagatgagtggcaaggttggagttcattcctcaaacacattgtcccagtctgagtaggtaaatgaaaatggcaagactaattaataattaaggagagtatccc

SEQ ID NO: 455953 - DNA, 438 bp, Homo Sapiens
aggttctttcaagatggtttcagcagtgaccacttggcttgtaggtaacttatacattattgttaaaccaagaggtggtagtacaggcttgacttagtgcttcctgcacacttctactgtcatcccaggctcctccgcccagactccagcctgtgaaattcttctagtaagaagtgggcaccattccctttgcttgtatgcttctaaaccctaaggcatgaactctctcgttgcactgttccagtgcatcttggtgctactggttctcttagagaatccctagccaggataaaaatgcttctactctaagactttgtaaatttcagttttccatttaataaagcctagtggaaagttaaaagttaaatatgaagcacaaactcattcacttaaattttattcaacaattgtcttggtaaacctgggagctctagagtc

SEQ ID NO: 455954 - DNA, 224 bp, Homo Sapiens
atcaaaataagaccaaacaaaaaaatggggttggggtagagagaagaaagacagtcagaacacttcatgggagtaaatgagaaccctacaatgatagggaatcagagcagcacaggcccaggggaccccacccacatccttggcacttagagtgtcctacacctttgtgaaaggatagggcctagcacaccatatgctccatgccctgtcccagcctgcatggt

SEQ ID NO: 455955 - DNA, 270 bp, Homo Sapiens
ttcttttttcagcaaagggagggctgattttttaactttttgaaaatagatgaaagtaaacaataaaataataaaacctcacatgccatcgctcagcctcagtaaccatcaacccatggccaatcctgtccctactgcaaccctgcccattccctacactcacacattattttgaagtaagtcccagacaacacatgattttatttgtaaatatttcagtctgtttctgaaatgactcctttttgtaacataaccacaatgtcattacgc

SEQ ID NO: 455956 - DNA, 159 bp, Homo Sapiens
agtagtggactcagtctctatctttcacgttgtgaatttttctcaaatatatggtgatcctatggatctgttcatgttttaagagtgaggcatccaaaagctgattggaagttgtgtgtgccaactggtgagcttttccactagggtcaccaggtggca

SEQ ID NO: 455957 - DNA, 294 bp, Homo Sapiens
cggtacccgctcgcaaaaggaattccgagcggttttcgtccactctggccatggctagcaaagccttggccgccctgcacatcatgtctacgctaggtggttccaggggcgggggctgcatgtgcatgaggttgtgctggctctgctggtactgggccatcgtgaccccatcctctaggaagcttatcaagtttccaatgcttcctttctgcacagctatggcccttgctgctagtgcgtccccttgggcaaggttcgataaaagcgccatggacatttctcgacaaactgggt

SEQ ID NO: 455958 - DNA, 379 bp, Homo Sapiens
  misc_feature (21)..(21): n is a, c, g, or t
  misc_feature (32)..(32): n is a, c, g, or t
  misc_feature (39)..(39): n is a, c, g, or t
  misc_feature (46)..(46): n is a, c, g, or t
  misc_feature (61)..(61): n is a, c, g, or t
  misc_feature (66)..(66): n is a, c, g, or t
  misc_feature (169)..(169): n is a, c, g, or t
  misc_feature (271)..(271): n is a, c, g, or t
  misc_feature (348)..(348): n is a, c, g, or t
  misc_feature (358)..(358): n is a, c, g, or t
ccacccatggatctaatactngcatgcacagnattgtgnagtgggnaagaaatcgttgtantccanactctgccattttacataaaatccaatcctgtgaagaaagcagaaaggactcttaggggatatcttttgagaaagggtgtccgcctgggattctaagagcttncctggttgctggcctaaatcaggtgaccagccctttgtttctgaccaggtttctcacctgagatagagaatcatttgtttccaaatagttcaaatccccccnatccacaggcctccccacaagagcctggctgggaaattcaggagaatcagattgccgaaccaatgtgtccacacccnccactccccngggtgctgtggaagtctgcaa

SEQ ID NO: 455959 - DNA, 116 bp, Homo Sapiens
accagcagaggaattgacagttttgggtaagaaatgcaactgacttttggatacaaagcatccagcttaatataagggagcagaagtgtgaagttgaactagatagttaaccatta

SEQ ID NO: 455960 - DNA, 503 bp, Homo Sapiens
  misc_feature (145)..(196): n is a, c, g, or t
tctttcagagtgtggtttttttggttttgtcttgttgctttctagtggtgtcacttaacttgttcctctatcccctgtatttcccatgaactgaaagttagatccaaaggctgggttagacttaggttaaatttctcactgtcannnnnnnnnnnnnnnnnnnnnnnnnnnnnnnnnnnnnnnnnnnnnnnnnnnnttttggcaagactagttcctaggtgatactatgtactttgtactgcctcatgttggaatgcacacagtgtctgcttgtcttgctgttagcagcactaaggttgaccaatgaggtcatgtggggacaacaagagcaggtttctcaaagccagtgtctgtgaggactctaatagacattttgcggatacaaatgctaaacctcagaccagtcagcagaaagagagaaagagtacaagtgtgtgaacacgggggaaccagtggctgtctttctttccttctccgtccccattgctgtcttccttttttcc

SEQ ID NO: 455961 - DNA, 263 bp, Homo Sapiens
ttcggccaataggtaggcagtaagtgccaatgtttggatctatagtagattcactactcagaccatgagcctatagagctgaattaattctgtggttttctgttactatgattttgagtatattactgaactcaaggtgatactgagaaatcagaatctctctactctgttggctttatccagtgacctgaccttggcctgaaccccctttggccttacccccttgccgacccccttggccgacccccttgccgatctcggtc

SEQ ID NO: 455962 - DNA, 342 bp, Homo Sapiens
agaggacactaacgatacagttcagcaaagatgatcacattcaaaatgcccgcatcccaacaaaaatggaggatctgtcacttttctcctcctctgcattcttcctttccatcataaccaaatccatgagaaatgacatgaggtggtgaaggaaatatcaagtagaacagaatcacgctcaataaggtaagtgaaaactccccttcagttctgatgagccgctccaggtggtggtggacagtgatgtgagccgcactgcaatacattatcagaatattgctgcagagctgcatgttccctttattcagcccttctaatagctggtccctgaatgtatcgtca

SEQ ID NO: 455963 - DNA, 480 bp, Homo Sapiens
tacatgacgagtcagttcataacagactactgtgagcgtaagcgatcttgagatgtctaggggtatcgcgatcctaccaccttgcgcctcccataagtgcgtagagataacaggtcatgagaccattgcacctggccagagaagagacatcttgacttgagcctgaagactatgtacagagactgacctcacagactgaccattccatcccacagctgctggacgtagagtgatttgcagcccctcctttcagagtaccacatccctctcaagtgttccactacatctaggaaagtgagctcttaaagacagactaaaaagagtaataaatcaatacaactacattaaaagccagactagcggagtgtgaatcttggccctgctgttagtaactgtgtgagccttggctagttactcacctccttgtgtcttggttttggtttcttcatctctaacgtaagtatatctctcatgattcgt

SEQ ID NO: 455964 - DNA, 268 bp, Homo Sapiens
ctaacgatacatgcaggggtcttatgtgtgcatttaatgtttcttcaaaaaagctcagttgctttacagccagaaccccatattgcttttctattcattataatacctagcagatcattggtcttgttgcaaattcttatcaagtttaccttgaattgagtgttgagcttctaccttgaaatcctaacattctgtgttctgctcttgctggccttcctgactgatgctttgtgattgtgtgtgtgtgatggcataggtgtctgaatgt

SEQ ID NO: 455965 - DNA, 491 bp, Homo Sapiens
caccaggatgatgagtttagtcctggaatagatgtcgtacaagtcgggtggtgaactgcactgaacatgcctggagtgatgttaggaagacagcaagctgaaaattagcattccagaagggataaagccatctgcatacaatattagaaaattttatgacattatgtttctaggtagtttggactccctgagttagttgagaaacttaattttctttccatcacaaatatcttagggatcttttggttgcaagtaagagaaatccatgtgcttattaaagtaaagggagatgctttatgagtgaggcaggataacctggtagagaaattaggtgttttttccttccttctctcaaaaggctggcaaaagactagctccttattttggaggactgatgtagtctttgctttgagggagaagagaatttttaaaagtcaactttaaatatcagtttcatactctgaactgtatcgttagggatcctctagatc

SEQ ID NO: 455966 - DNA, 632 bp, Homo Sapiens
tgctgtcagaggatcctaacgatacatcagtcagttttttagttccaaaagaaaaaagatctctctatgatttgtgttaggatggcattacaattgtagattagtaggagaagaaatacttctttataaaatttgatctctttatttaaatattttattaaactatgtgaaatttcataaattttatataggatttacatgtgattttttaagttgggttgataaccattgattcaatacatatttgttgagcatctactatgttcccatcactgtgttagcctctactgagcaaaaccagaaatgacccttcttctacaaagacattatagttccctgtgggaaaactgatagcaatcaaagtacacaaagaaacataaaccaacaacagtgtgagagctacacatgacagcacagtcagaagatatggcctggtcagtttcccgaggacgtgaataacaccagctaacacatagttaccgtgtacaggcaaccttagaatccccatttcaaagatgaggaaaatgagcccgaggaacctgcagtaatcatcctgacgctaccctctagcaaagcagtggagggaggatctgaacctaggcagtctggttctggagtctgtgctcttagcc

SEQ ID NO: 455967 - DNA, 253 bp, Homo Sapiens
tgaggtgatctagaggatccctaacgatacatacaggagaatttgtatctggagggaaccttcggatgtctgttccagcttattgccatgtatatgacgaaactaaggcacagagaaggaaggaacttgctccaaatcacacagcccaactagagcttccatctcccagccagccctagtcctcacttacaagctcctacaactcatgcaaggattaagctctgtgtgtttcagctatttgcctagtggacag

SEQ ID NO: 455968 - DNA, 278 bp, Homo Sapiens
  misc_feature (161)..(161): n is a, c, g, or t
tcagaggatctcgatggatctggaggtaacatcatttttaaagtagcagaaaccaagtacagcagaaaatctggacattgtcgtagctaaactcaccttggtaggccacattttctgctgaccccaaagcctcattctgatacattctgtttcctcctggngatgcacattcaccccagtctgactctccccctccttcccggggctcccttactgggcgccttcagtaattttgagctctcatagcaccgtggtcctctctctgaagtgtatcgtta

SEQ ID NO: 455969 - DNA, 619 bp, Homo Sapiens
  misc_feature (606)..(606): n is a, c, g, or t
taacgatacatgcaggacctctttcggcttggagaggcggaagttctgtagccagaattccagggctctttaaagctaatcttcactcttttacagctctcagaaggaactctcacgtctggcctttctctgttgtctgttctgctccctgatcttcggcttaagttggggcaatagttccaagaggtttagctgggaccattcagatctgtgtcttatagctgcttcttccaagattacaattcaaagtcccagatgcctccccctgcagaggagaggaaacatctgggctggagctgcacggagagagcccagctgtgtgggacatccctcagggtaggagcctgtgagctgagagctcttcattgcagatgtggttctaaccatcggggtctgggtctcacccatgaggcttcgacaggccccaggcatgtgtgtgcagggaatctgaacagtcagcctgcaggaaagaggctctggggagttatatgtggctggtgtggtggcaagtagagtttgtatggacaccgaaccaaaatagagaaatgcgaaggcagctagacagaaagtgggtggggggaagcattccaggaacagacctctganaagctgatgttcg

SEQ ID NO: 455970 - DNA, 686 bp, Homo Sapiens
  misc_feature (117)..(234): n is a, c, g, or t
  misc_feature (386)..(532): n is a, c, g, or t
tctctagaggatccaccactgtggcagattaatatctaaaaacttcagtatgtttgctaagaacaagaatgttctcctacatagccacagtacaaatgtctcactgtgaaaatgaannnnnnnnnnnnnnnnnnnnnnnnnnnnnnnnnnnnnnnnnnnnnnnnnnnnnnnnnnnnnnnnnnnnnnnnnnnnnnnnnnnnnnnnnnnnnnnnnnnnnnnnnnnnnnnnnnnnnntaacgcacttaaaattgggcatggtgttgtgtgctgaggtgggaggatcacttgtgcccaggaggttgaggctgcactccagcctggccgacagagagaatgtcttgggggtagggggtgaagaacacttctttccccagttgtcaaactannnnnnnnnnnnnnnnnnnnnnnnnnnnnnnnnnnnnnnnnnnnnnnnnnnnnnnnnnnnnnnnnnnnnnnnnnnnnnnnnnnnnnnnnnnnnnnnnnnnnnnnnnnnnnnnnnnnnnnnnnnnnnnnnnnnnnnnnnnnnnnnnnnctccaagactctcacccatcattagatttcacctcccacagaaaccttcctgtttctcctttttattaatagaaatttgagtatcagcatgacctgcatggattaggcttttattcctgtgtgttactaatctctcctctgcacttactcgtct

SEQ ID NO: 455971 - DNA, 377 bp, Homo Sapiens
taacgatactgatggtcaaacagcaactccagggcatgtcttcttatccgaccatgcacgtcattatcttcaaaccagtcagtaatttctctggcttcttcatgcaaatgcagctttaatttactaaaagctcctagaatttcatcagcgggaaggaatgccaatacagatccataaggcattttaaactgaagtttttgtcactgccatctcacgtgaccaatccactcatctgagttttctgttaaaggcatcaggctgaatgaaaaagacaaactttactggtaacaacttgaaattcactcttataagccttgattgcacctaattctaaatctatcattatagtttggctgactgtatcgttattagtcctc

SEQ ID NO: 455972 - DNA, 186 bp, Homo Sapiens
gcaggaagctcatagtttccaaccaggaaaaactcagagatctacacctaggcatacaatcaaactcttaaaaaacaaagacaaagagaatcttggaagcggcacaagtgtcttatcacacaagagatccttgagataacacatatttttcatcagaaccatgctgactgtatcgttatgagtcct

SEQ ID NO: 455973 - DNA, 551 bp, Homo Sapiens
atgacgtgtggaacttctgtagctaattttttaaaaatttataaaatgttatttaaactcctgtgctctgtatataatacctttcaaaattggaccaaatccctccttccagtcccatctcataccactcctcaatattccagaagcttctcctatatttaacattgttacatacacctgtaacaccccatgcttactcttttgcaatactcatcataattttaattatttattcttctacattatactgaatttatgacaggattatgtctgtcaggttcactatgctatccacagcacccaaactggtacataggtgtacaataaatattagttgaataaagaataaataaatgaacaaagaaaggatgaataaatatgccccatcaactcaggactccctgtgcacacaacgctccctcaggtgagaattctctttgctttgtttacctatccagaaaattcttgctcatccttcaagaatgcagactccacagaaaatctttccctacatttctggcagttgttctgccccttcttccacacgtcaa

SEQ ID NO: 455974 - DNA, 523 bp, Homo Sapiens
acgtgtggaataaggaactgctctttaatgagtacagtttcagttttgcaagacagaaaatgttctgtgtttggatgacaatagtggtaacacacaacacgaatgtacttactaccaatgacccgtgtactcaaaaacagttaaaatggcaaattttatgttaagtacattttaccacaattaaaaatttttattaaaaaatttagcagagggccgggcatggtaagtaaatattacatgtatctgtgcgtcaaaatccaagaaatatggagttaacctaataatctaacctaaaaaattacttttcccacttaactccatgaggaaatctaaataaaaataatttctttcttacaaggattgaactgaaggtatcaaaagtagaagttttttatatttaaaaagttgtgaagtggaaatctgaactaaacaatttagtaaaaagttttccaaatgccttgtactatacttaacaatacagtccactcctgaattttctctccatagtatgttttataattgc

SEQ ID NO: 455975 - DNA, 569 bp, Homo Sapiens
  misc_feature (394)..(455): n is a, c, g, or t
tatgacgtggaaaatagccatatggtttctgggaaggattttactaaaggaataaatttaattagaagcaggaaagatttggttacatacaacaaaagccaacaaaatatgctcaaccccaagggtaagtgtaactgctggctagagatttccaggagaggacagggagtagttttcctagaatattttatgtcctaaatagcctggatgaagtcccttattcccttccagactcatcactgggaacgcggcacactggtgggctatgattccctggagagcttatgaaataaaaatcaagtgagctacgagtgcagccagaaacttgctttacccacaagtcctgaccctgaaacttaatttttgtgacttgaattgtgtctctctgtttaannnnnnnnnnnnnnnnnnnnnnnnnnnnnnnnnnnnnnnnnnnnnnnnnnnnnnnnnnnnnnagacatactcatttttaaaacgtttttattacttttccttcatcagtagtgttacaaagaatggagtgtccctcctacaagagctcatctcatgaagatccttccacacgtcta

SEQ ID NO: 455976 - DNA, 644 bp, Homo Sapiens
atgacgtgtggaagcagtcaagatcatacaacttaatatgattttggagttggtgacctgattgtccctggctttagctcaaggtctatgcctaaccagctgggagatattgggcattaggcatgccactcattgtatctgggtctcattcatgaatagggatacaaagtctacttctgcaaagttgttttgggagttgaatgagaagtggcatgaaagcacttggttaaatatgatgcgctgtttgaatgtgaggtattgctattttaccctcaaagaaaaaaaatagtgttctggttaccatattttatggtcagaaatatttgtttagtgcagtaagatgccctgtgatagaaggatttcatggtcaaagaagcctaggaatccccagatgcctttctgccttcggtgatccccagcgctcacaacccctttttctcctccagaaatacaaacactcattagcctttgaaaggccctgagaagtccagcagcaaagacatcagttgaagtgtgtgttatccggtgttttccaacataatttgcactaataaagcttctcttgtgtaacatctcaccacatctctatatacattaatactttcattctgctccctctgtggcctcatccatcacacgtcata

SEQ ID NO: 455977 - DNA, 141 bp, Homo Sapiens
tacttcctttcttagcatatcaattatatgtctttttacaaatttttgtggttcgccctagaggttgtaatataatttttaactaatatttatccttcttccacctccttccaataacattatactattccacacttcata

SEQ ID NO: 455978 - DNA, 552 bp, Homo Sapiens
aagcgggagcaaggactgctttcagaggtggactgcacatggcaggatccaggatccaattcagattgagctctagtgttcgccccgtggcaggatccagtcagatcatgcctccccagcatcacctcattgcaagatccaatcagatcatggttcattacccttcgcctataaaacctgccccagcccaccagctaggcgacatagatttcagccttgcctcctgtcttgccagtcaattcccaataaaggttttcagtgccatggtattggcttgtgtgtgcatcaggcagtgagcccattgcttgctgggtaataccagcagaaagagaacagaaatgaatattccagcctcactctgctccctgccttcatgggccaaatccagctggaccaagagggaaagggagtacacatgttcataggcgtcagccttcttggtggaggggacatcacagtcattcaaacagcgaaccaagacagcttgggatgagaatcaaaccactcatagctcactgtctatattaacatgactttactattccacactca

SEQ ID NO: 455979 - DNA, 428 bp, Homo Sapiens
  misc_feature (55)..(63): n is a, c, g, or t
ctatgattgtgccactgcactcccatctgggaaacagagcaagactccatctccnnnnnnnnngtttttctttatctttttctttggcatttctgacttaagccagtgagaattcttcctcattcttttttactcattgcttgaatttgtgttatgagaatttttttcctccaacttggatgatctttcaattttttccagttgtctatacatgtagataactgaaaacagcaaagctcttagtgattctgttccatgtctatctgttccccacctccatttcctaccacacaccccagcattcccctagtacatcactaaactatcaacagaacctaaaatagactagtttgttttaactgtatttttctttccagtcctcttaaaatgtgcagcaaaatgtccccaaaggcaagcagctaagagaa

SEQ ID NO: 455980 - DNA, 545 bp, Homo Sapiens
gaaggatgaaatgggacagtatatgtaaagcccctagcccagtgcctggcgcatagaagttgctcaataaatggcctctgttgttgtcacaacttgaacccttcgaccacctctgttagaccattgctgtagatgttgcacctgcgataagatttctgaataaactttttctttaacagctttaagattagttcccatcatttgatgtattctaaatttttatttttatattttctgaagcatactgtttatcatactgaatatgtacttattttatgtatgaagttattatatagttacatattttaccatgaatctgttaaactttgacagatttctctataagcagtaactaattagatctagctacatttttcacagctatttcttctggagagcaatgcatacatttttaaagaagttggccatgtttagattgtgaaacagatgaaaaccacagggtttcggtaggagctcccacccatgcctttagagacacatgtattatccacctagttccacacgtcatacggtaccgagctcga

SEQ ID NO: 455981 - DNA, 143 bp, Homo Sapiens
tggagaatggcattagaaactaagcttggggtcctagaggtggccgttctcttttaaaacactgctgctgccccttccactccgctctctttttaggatttaggttacatgtatgtttggtcttttctcagtattccacacgt

SEQ ID NO: 455982 - DNA, 583 bp, Homo Sapiens
  misc_feature (361)..(394): n is a, c, g, or t
tatgaggtggaagacgtgttgtgctgggttgccatccagaggaaattttgagtgggtgctctctagtcggaacgaagtagatccccaaaccacatggtgggcagggccagacagacccagtcgcactgaaaatgtatgtgttgtttttctgttgctgcccacagacttttatttataatctgtactgttacaaagcagttatcacagacacctactcacgggcacagaccggagaacgattcccttgacttcagtgttgctacagcgatcttctgaatttcttctagatctctgtgctgtctccttgccttccccaacccccttaactataggtatacgccaagatgctgtcccttcattnnnnnnnnnnnnnnnnnnnnnnnnnnnnnnnnnngcattgttttagttggtgagtcaattcactctgatagtttcagttagcacttctgtcacaaagacttgcaagactacgttttggtccttaaaagaacctttgtgacagttttcttgttccacatccctattggatatcttcacttgtttatctttccatcattccaaggcgttcagaactgctcgatac

SEQ ID NO: 455983 - DNA, 448 bp, Homo Sapiens
  misc_feature (261)..(269): n is a, c, g, or t
tatgacgtgtggaagcccttcctagagaggaacaatatgagcaaagtcaagagagcaagagtgtgtttagtgtgttaacaacaatatatggaccagaatacctttgtgagagctctgaagaagagctgagaagctacagcaccaggccactgtaaaaccaaaaggagattacagcaaaagggttaggaaatttcagtgtttggcatgtcctttcatgtccttcttcctatgtagcatagcacagagcaagttggaggaaannnnnnnnnatactgggtctactccttggacagaaacaaaagagttgaccgtgtgtccaacattctggcttgtctggggcttcctgagagactgatttctatctcatatgactcagaatactgactggacaggttccagagtacagaagacactgaaaacagaggagagcaggatgttagcactgaag

SEQ ID NO: 455984 - DNA, 186 bp, Homo Sapiens
gaagtgaagggggtgaaataattatatcaaaaatgtaagtttaaaatatctgctagggattctaacagccaagaacgtaacttagttgttaatgttctgagagcaagcaaattaactgttaagaagattccataacttgaccagatggaactacttcagagcagggactcttcaaacagtcataca

SEQ ID NO: 455985 - DNA, 690 bp, Homo Sapiens
atgactgtgtggaaatgattaagatgagcttgaagatgtacacacttccagaaacttctagtaatttatagagttggacaaggggcagaattgtataatatttcttgtaaaaagtgatcttggctctggtcctcatctcagtccacaccaatcaacaccaaagattttacaacagcagatgctaacacctatggctggaaaaatatcagagaagagtcataaggttggagttaagtaggagaagtttcttcttcagaaagttgggataaatactggttatattgaatacatttgtaattttctagagaaaagtccaaccatgctataaaacaaaataggttctttggaacaaagaaagtataaggagaacgaaggcttgttaactacaactgaccagaattataatcaatatacaacaatcaccaataagttcctgaaatggctgaaacataatgcctgtttggttactattacaaagcaatgcacacgggttttgcctttctatatcagaatcagattggatttattgatctcatagagcagttattttggcattatgtcggtataatttgattttagattaaacatgaatgtttatgtgtagattttactgtgtgaaatttaactataagagagtaaaataataaaacattaattataatgttacatattacttcacaacctcataac

SEQ ID NO: 455986 - DNA, 670 bp, Homo Sapiens
tatgactgtggaatgcagagtccagtatgaaaaggagcctgtttcagaacggaaactgtcaggtggagtggactccctgcaatggagtgatggaaagatttggtacaaccattgatgacctgagaacagacactaggaaggtttgacaagatccttcctacccccactccactggtgatgtgtcaccaagttctgctaactaaatgggtggcctcaagcaaatcccttacctccttttagccttagtttcccctttaaattggtgatggattagatcagtggtggtcagccattttcttaaagcaactgaactgtatcttaatcagaaacttaactagtaaaacaattaaaatgcaagtctgttgcttcaagcaacaccactgtggctccatggagcactaatttgaaaaccacagagatgagatcatttctaagaaaacctttcaactttgtttccatgatgctacttgccacaatcttttttacttaagcaatgataccgtttctggctgaacactcaccacacagctattaatattggaaactgaggcaagataccaagagatttttgcacttgaattcctcagggttctcttacagccctgaaaacacctcttcaaggaaataaataacatctgcaaatggtgcagctgcccctaagtattcaagg

SEQ ID NO: 455987 - DNA, 529 bp, Homo Sapiens
cgatcgatgaaaggatgaaaggaatggaacatgtggaatcacattattttgaggcagggatgggctgcggagttcttttgatccgtcctgccttcaatcatttctgattatctatataagaaccagaaggctatactggagagaactatgccctttgataaacatttgctggatggctgaaagaatgaatgaatgaatgaacctaaacaggtctagtccagatggactcatttattagctgtgagaactcatgcaagtttattcacatctttcagaaccccagtttccccatgtataaatggggatgataatgcttgtcctgccttctcggagcttctcatgtatgtgccagtgggtgttccattatttatccagacccaggaacgcagatctcaacagtgaaaccttagaaaagtgactgaacctctctgagcatgttttctcatctaaaaaatggggataatgatagaaacctcattgggtcattgtaagaatgtatttaacctggcactcaaacatgctgctttcc

SEQ ID NO: 455988 - DNA, 694 bp, Homo Sapiens
  misc_feature (45)..(45): n is a, c, g, or t
atctccaacatcctatccagcattctcccgtccacatcactggcnacatcagatttaccaaatgatcagttatttaacactcattaagcagcattctctacgatgaatctcttctaagctcacgacatttgacacacacttcgcaaaaacattatgtttcattgtggcgagctggcaggttcccagtcatgctgaacaatgaaaaagggataaagctctgcaagagaagatagagtggggagagaaagaaatctgcatcgcattgtcaggactaaacattctttaaagaaacctacagtgaggtaagaatggcatctgtgctactctagtccaaaacgtgggttcccttccccctaaaagacagacaaagacaccaaggtactgagcacatcagtataaaataggagaagaacaagacaggactgcagtaacttggtctttaaaagaatctctgattaaaacgatataaaatcatatttgctcagactttgaaggtaaaggcagagtgtcttgtaccttgatctctccactcaattattttgagtggagagtctccgtcgaactttcttattttgataatcagaaatgattgaaggcaggccggatcaaaagaactccgcagcccatccctgcctcaaaataatgtgattccacatgttccattcctttctgtcgtgagagtctcctcgagact

SEQ ID NO: 455989 - DNA, 387 bp, Homo Sapiens
aacaaccccggacaagatactaacttttctgcagtggtttgggaccaaacccacaatatatccagtgtatgtctgtacttcaaataggccgagagttaactgtctacagtctgctaagtagtcacgtaagcatgtgtgccttggaagatacgggttagtgaatgctgaagcccttattcttacaaggaatgcagagcattttcaaactaaatagttctcaccctggcccactatttacttttttagtcatatccccaggttccttcccagttcgtaacctatgcttcagtcagactgaacaattggttgttttccaaacacatcacagtatttcctaccttgatactcattgtccatgctattctatttgtgcggtgcttgtttggt

SEQ ID NO: 455990 - DNA, 552 bp, Homo Sapiens
  misc_feature (497)..(508): n is a, c, g, or t
atgacagtaagcagaaaaacaaacgagatcacttaagagagcaaccaggagtgttgggcatctcacagccattagctctggtgtgaaggaccaatctaaaagcaaggggactgtgtgttcattttctggggtcaccaaactaaggagccaagcccgtattccaactgcatatattattatctattgccaccaaaacctgttaccctaaatggcttcagaccaccataatcatttattatccatcatggtttttgtgggctagaaattcagatagggtacaatggggagggttcaccctgctccacagcatctggaagatctgaagtctgagggttgttgtcccaaagatccttcactcagcatctaaaggaggtattggctgtcagctgagacccctacacatgacctttccatgtggcctggtattcctcatgacctaatgacagttcccaaggcaagtggaggcagttgtagagagtcagcccggtttaagctgnnnnnnnnnnnnccctgacaaagccttgaaagtcacgtagcatcacttctgagata

SEQ ID NO: 455991 - DNA, 570 bp, Homo Sapiens
tgtgttaataacttcagactaggagatcatacttctctcaatcaatcagaggcttttgggaaagggaggtgtataaattaacattgattattacagacctcattgtggctaataatagtacttaatcaaaatgatgcagatccttccactgccaactgttgcttggggaagtgtgacctggctggggagacaaggccttaggaggaccatcattttgacagttggtgatcccaactttgcttttcctttgaccatacagggaaatatctctctatttccatattgatcaactaggaccaattgccacttcatgcaacttggttgtcagcatcatctagtgttcggagtactgtgctgaggcttctgcttggatctactggcagcaaggactgggcaaaggtcctgctgcatgtctatggaaccggatatgcgcacctgaatccgccctcacaaccctcattctcaagaccagggcggtgaagaggtgatcaatatcaactttccttctcattacttgctgtacctcttctcacttgtcaccattcatgtttcaccttttccaacgtatac

SEQ ID NO: 455992 - DNA, 541 bp, Homo Sapiens
cccaaaactggtgatgctgtatgcgtgagggatgcttacataatagcaacgctttattgggcaacccgaatccatacatgtctggtgtggtttgatagctgggcttgaaaaagtgcttccagttgaaattagcattagaaatcggttagaacaccaacatttcagggtgagggaggactgctacaaaggaaaagaacatgtctacaaatgcactgaaagaactagccagaatatgaattccattagtatctaagacacacaaaacgtcaggtacatatcagtcacggcaagtgtcacaacctgaaatctcaactcagacagatggtagagatgttaacagttgcctgaaacttcgatgtgctttcacgcccacaggaaaggtaaaactgacatttgtgtttctcttcaacaatttcatgatcaataaagaattgcagttggagactaaagcaaattctagtaactccttaatctaccaagttgccctatggtttttactgattgcatgtatcagaatgaggcgctctgttccacacgtcaa

SEQ ID NO: 455993 - DNA, 535 bp, Homo Sapiens
tgtggaagagctttgaaagaagcaaaaaggtttatgaaaagaaaatagtaactaacttctgtagtcatatctgccttacatttactttttctttgtgggaaaacatttatgaactaaggaggtacttaagtgacagttattttccttcttttgatagttaatgacttttactactgactctttacaaatgagacattgaaacgtcagccttcagtataatagatggaattttttgttgccttgcctttttctttcctacttaaagcatctggaaataggaagacagagaaggtagagtaaaaatggatattttttatgtactttgtatattggtaataaaaagtaaaagccataggttgcataaaactttggtctttttaaatttttttccaaagattatggagtactctgcaagtataaccaggcaaagtacatgagaacatgcctcttttcattgttactgaagtaattctgtaagcagaaccaggctttaaaaaaatgcagccattacataatggcgtttttttctagtacc

SEQ ID NO: 455994 - DNA, 595 bp, Homo Sapiens
ttttggttactgataccgaaaaattaggttataggaagttacagtattacataaggtgagcaaaataatctaatccaattaatataacgccatctgggggcttgccagacagtcacagtggcaaactgctgaaatatgaaaggctgcatcatatgtgatacatattcccactgctaatacatggtgccacacaatcagttgtgtcctgccatggtccatcttcatatgtggagggaaccttggctggattggacagaatgattgtgacctggggcaggttctatcccttgcagttagactaaggataaacctggttatatgacaaactaagaatgccaaatgtgtccagctcaattctgaagaggaattaatatacttaaaaggtccatttataaatgagattccaatggccacaattttagagtctaatctggcttcttatatttcaatctgctactcttaaaccaacaaacagtagtacacagttttattggtgcaaaactatacaaatccaggaaggttattcaatagtaagaatcattcaacgaccaattactcgcctcttatttacgaaatggtcatgactcgaatatcg

SEQ ID NO: 455995 - DNA, 116 bp, Homo Sapiens
catttactggcatactgttatacctcatttttaaaaatcaactgaatccaatatttcctgtggcaaataacactttcctcatttcataccttttctcctctattcacacgtcatac

SEQ ID NO: 455996 - DNA, 531 bp, Homo Sapiens
ggaatcccggcgagggaacgtaagccagaagctgtatgtagtcacatttttatttagagccatgaaaagggatgtttccggactctaacttctgaacatccacaactagatagacacccttgtgctttcagatctgctggaccctcagaaatgaccagaggacggcagaacccatcatcatgcagagccaagcatgtcaacctttctgcatccttagaccagaacaactcccatttcaaagtttggaattccttgcagttaaaaagtcattccccatttcagaactttatacctgatgaattcaaaatcagcaaaggtcttcgaatgccattcgatgaaaagatggacccttggctgtcagaattagtagaacctgcttttgtgccacctaaagaagtggattttcattcttcatcacaaatgccgtccccagaacccatgaaaaagtttactacctccatcactttttcatctcaccgactttctaaatgcatttccaattcctctgttgttaaggttggttttaactag

SEQ ID NO: 455997 - DNA, 396 bp, Homo Sapiens
acaaatagatacaaatacaacgtcgaccagatatgctacattaactatgtacaccttatttctctagaggcaggaatattccttatttttagacaatttatcatttacactgagaccctgaggaggaccatcagcctcctgctccccaatgctgccttcctcccttagaagcttatgctgtgctttcaactcatcactgagcaagaatcctgggaggaaaaaaccaagcccttctgaagatcttgggacttttctacccctgttctaggaacaatcaagattatttactgtgatacagcctagaaacaagcttttcctcaatgatgtccttttgtatagtaaaacgaatatgatcccttacactgttttaaaaaaaatgtttcatggaatcggaga

SEQ ID NO: 455998 - DNA, 661 bp, Homo Sapiens
  misc_feature (33)..(33): n is a, c, g, or t
  misc_feature (449)..(457): n is a, c, g, or t
acgaaggaacactgttaatttaagtctgttagntgtggaagagatgtgcgttaatgcaattggtgcctaaattcagggcagtccaatttttcccaataaggtttcactttctcagtctggggactaaccttggggaggagccagcctctcctgaaatccctccttctgtttccttatgtagccaacatgatctgattaattctcaatcagatgagcaaaagccacttgaagaaagatgagaatctttgccacatccttgtggtcacagtaatatactgtacgagtgcacatgatcagtaatttagggactgtgccctggaatgaggcctgttcttgagtctcatataaaaacagaccactgttaggcatgagggctgcccccctctttgctcctagggtccgctaggatttgtgctatggtaggagaaatgacatagaaaatgacaacnnnnnnnnnggcacgaaatattcaaaacgtgggaggagtctaacagttcacccagtcacacataatcctccttgttttttgctctgttcaagagtcatcatcatgcaaaggtgcctaaaaaacaagactggccaacatccaagcctggccttgattgtagcagtaatggatgggcaagccatcatcacacccagtgtgatttccacacgtcta

SEQ ID NO: 455999 - DNA, 234 bp, Homo Sapiens
aaggcaggactttcttatcagagaattgcctcttaaattaaatgcaatgtcattcatgcatcaagaaacatattttgagaggaacaaccctgagaaggggcagcaaagggaaggagagaaccagggcagctgtccaaagaggtctggactcccaccccagactatttgtcttcatgggactctcctatgaatgtcccctttataggcacctgatattaggaggtaccgagctcc

SEQ ID NO: 456000 - DNA, 143 bp, Homo Sapiens
ccttcctctttctctccctcattcattcattcactcatgcactgaacgaaggtgctgctgcccatctaagcccagcaccctgtatgtttgaagttctcaggcaggtggagataccccaacattctgagcctggggtaggatag

SEQ ID NO: 456001 - DNA, 306 bp, Homo Sapiens
ttgacgtgtggaataatttgaaagatgggagggagggagttgtctggctgctctaagtgaataggcaggaaggtttgtgtgaaaggtcccattcaggctgacaggcacaaggggcagaccttttgagatataatgtgcttctgattgctggctgacaaggtattttcttttctgtcttctaaaatatgcaagatgtacccatgttgtgatttacaactgggttgggattcagccacctgtgaacctttgcaagctccgtagtgagctgccaatgagaggaaagatgttctgatagacgcttccaca

SEQ ID NO: 456002 - DNA, 928 bp, Homo Sapiens
ctcagaggatcccggtcgttgtcagtgagttcacctcttaatcaccacgatcagaagggaacaacgcatcaagcacgcaggggtcaaactggaaggggcgatcgtagccaggccccaggcagtgctatcatagaccacatcatccaggaaccctgcctctgagatgcctctcaggtcataggtggtaactaaattggagcagacgtgctggtgtctgtagatggactcagacagtagaaaatgtaagttgtgcaacggcatggtggagataaggggcagcattccatcatggtgtgggatctgcaccgaaatgtggattctgttcggatgctccttatgtttgacatccaggtatttcaaggttgcggtgaaggactgagcctggaagcctctggatgtcccagccaccactggtgtgtggcagatagcactgtctgttccaatggtaacaatgttgctccttaagggggtccccacatggcccaccttgtccacagccttggccacacaacgcacatggaaccgccggctgaagtaaatgctgtccaggaccatgtggttgacactggtgaatggtgtgttgtcagtgatggtttcaaagggagaccgggccccattgccatcagtgggggcagccacttcccagctgaactgcacagatgtctggttgatgccggcctcactgcagcgctccttcatgacagcgtatctggggaaatgagggtcgcagggggtgacacagaccagtgggtagcctggggagggggatttcttgactccttccttggtaacttcttccacatggtcatagtcagcaagtgtgaccacaatgggtggtgctggcaatatgaggctccctgctgcctcctggtctagaattgtcaccgtggcagtagtcacatccccaagaactgcttccacacgtcaa

SEQ ID NO: 456003 - DNA, 123 bp, Homo Sapiens
aagaggaggtattctcccatcacagttactcagtcccagaagtattgattggaaggcactgaattttcaaaatgacttccagatttagtacatggtaataatttgaggctttccacacgtcaa

SEQ ID NO: 456004 - DNA, 340 bp, Homo Sapiens
tctttgtattagttagaatttttttggtagcaaaagacaaaaaaactcaaattgcttatacaagtaatgtaaactctttttggtcggttgtaaagtctctaaaagtaaggtggactttcaagtgtagtttagttaggactccagttctctttctctccaattgttctcaacttgtcttcttccttgtatcatgtcatcatggtttcacttagggtagcaaaatcatgtagcaatccccaattttatatctgcatcccacaaaacccagaaaagaaatattctctttgctacttactgaacaatagtgctaggcatctttctagaagcacttgggtgtctc

SEQ ID NO: 456005 - DNA, 133 bp, Homo Sapiens
tttttacttgtttcacctttaacagaattttctgcaaaaggcagaggcagctgacatcttcaaaagtttaagcctttctacagcaaaactgcagcagccctattacattggaacagaaggatgatggagggaa

SEQ ID NO: 456006 - DNA, 580 bp, Homo Sapiens
gttacgtgtggaatgggcaagtatggaggctcaccctggtaagagtgagcaggactctgttacctgcaaccccaatgctttagtgcatgcaggacaagaggccgaggttgtgaaacaaacggaaacctcaacctgcctgccatcatcacaccctcctgccctgaaaactcctggaggcctttagaaaggaactgttctaccctgttgttttactaatgaggaagtgatggtccaagcagtcaagtctgcataaccatctaagcttctgaatctgctgctgccgacaagggaccagactcaccaccacaaaccagggcaactgagaggtagaaccaggcagcccacgccacagatggcacagcaggatgaacacggccccatgagacagcgctgctgctctccgcatcacagcaaagtcaaggcaaaggaggatgggtgccaggggtgcctctgcatgaagtgctggaagcttggacattcctaggccagttaggatcaaagggtgagcactggctgcgatattagggccagttctgggttggctctgtctagccatcacattgtggtttttgctgttatc

SEQ ID NO: 456007 - DNA, 161 bp, Homo Sapiens
tttttctagtaccttagatgtgagctttgcaatttcacttactacttttatccttcaaaacttgggaagattggttccaaatgggtactgaaaatagattcaactaggctgtagaagagaaatgttcaccatgtagggaatgttattttgtgttccacact

SEQ ID NO: 456008 - DNA, 382 bp, Homo Sapiens
ccggaagagtagccgacgcatgcagcgtggtaaaatgcatcccgattaaatgcagtggattccatccagacttgattgaatgcagttgattccatggagcgtggctcattgcatcccgattaaatgcagtggattttatgcagcatggtccaaagcatcccgattgaagttagtgcattccatgcagcatcactgaatgcagtggattccatgcagcatggtaaaatgcatcccgattgaacgcagtgtattccatgaagcatggctaaatggatcccgattgaatgcagtggattccatgcagtgtggtgcaatggatttcgattgaacgcattgtattccattcattgtggcgcaatggatcccataagatcaccaagtg

SEQ ID NO: 456009 - DNA, 568 bp, Homo Sapiens
taaaattagccgacgcatttaatgacgctgcatcgtatccactgcattcgatcgggatccatttttccacgcagcgtggattacactgctttcaatcactatgcatggaatccactgtattcaatcgggatgatttgggccatactgcataaaatccactgcattcaatcttgctgcatggaatccactgcattcaatcatgctgcataaaatccactgcattcaatagggttccatttcttcacgctgcatggaatccactgcattcaatcacgctgcatggaatccactgcattcaatcgagatccattgggccacgctgcatggaatccactgcattcaattgggatccattgtgccacgatgcatggaattcactgcattcaatcagaatccactgcaccacactgcatggaatccactgcattcaatcgagatccattgggccacgctgcatggaatccactgcattcaatcgagatccattggaccacgctgcatggaatacactgcattcaatcgggatcgattaatccatgctgcatggaatccactgcatcaatagggt

SEQ ID NO: 456010 - DNA, 528 bp, Homo Sapiens
aaaatccatcctaagatttacatcgaatctcaaggaaccccaggtagccaaaacaatcttgaaaaagaacaaagctggaggtcgcatacttcctgatttcaaagcttattattacagagctacagtaatcaaaataatgtggcactggcataaatatgtacagacagaagtgcagaatagaatagcatgcccagaaataaaccctggcatatatggtcaaatgattttccacaggatgccaagaccattcaatggggaaaggacatcttttcaacaaatggtgttgggaaaaccagctatccttaggcaaaaaagctggacactcacaccatatacaaaagttaactcaaaatagatcaaagacataatttaaaagctaaaactctaactcctagaagaaaacacaggagaaacttcattggagtcagcggtgacttgggtatgacaccataagcacacccaaggcttttcccctcacgacgattgataccacggactctgtgtactagacatgacatgcgtactagt

SEQ ID NO: 456011 - DNA, 278 bp, Homo Sapiens
taacagagacagaaaaggggctttggaaagttaagaaggtatgagaagttcaacccacggtgttttaaaaaaaatttttgctacatcacaatttgctggtcttcctttctctgctacacgtggagacaccaaagtgaatgttgggaagacacttggcttagtcaaccacctttgataagaactcttccatgttcctcaacagccttggattcagaaagtccccaaaataccaagttcaaagactgatgttgtgcagcgtctggccctagataagatcg

SEQ ID NO: 456012 - DNA, 256 bp, Homo Sapiens
atttgaggtaggaccatgggctcagtcccccaggggaccatgtgtaggagtcagcagctttgaatctgccgcctccctgttgagtggcctgtccgtctcccttcctccatctcccttctctctgcctctcattctccacgtgcaccctagaggcttgtgacactgccctgcccacctgccaaagggctgggaaggcccccactgctctgaggtgagaggacagcgtggtgaaacagcaacctctggtgcccctaga

SEQ ID NO: 456013 - DNA, 231 bp, Homo Sapiens
ggaggctgcatgggttgcacatttatgaagctattgctgcctgtaattcctgaaaccaatcccccaaattgatttcccaaagcacagctttttaaaaatgatgtttcagtatctaagaatcttatcaaaagaaacatttctggaatgaggttccagctaggtggagtctttgttactggtcagtaaattacatcctgcaagtcaaagcttaaccccaaagtactatagatt

SEQ ID NO: 456014 - DNA, 281 bp, Homo Sapiens
taagggacttgaggagttagtctctgtactctgccacaccctcgactcgttcctgcatgttctgtaaccttcaataaccttcactcttcttacttctcctggccatgtgacccaagactgattatttgcttttgagcccatttttaagaaaaagaagtgagagtcaagtatgcaggccctgaaatggaaggtgatagaagaaggactactggctggataatctcatactcttgcaattgttctaaatatgtattttgttttggtctggatgtccactagag

SEQ ID NO: 456015 - DNA, 345 bp, Homo Sapiens
tgatgctgcatggccgttcttagttggtggagcgatttgaaaagtctataatttcacctcgtgatctgcgaccatcaggtgatggtgtgaaaaacttagtaaggccatcaatgagccctttggttttcttgttaactttaagtgtagaggcagaaatgtaggtggaggtggtggtgattttggtggtggcaccaggccgagtggggtctgtaacagccaatcagctgcttgagtccttccctagatgctagcatgaccagatgaaggtgtggtacagactttagtcttttgacccctaccaggtgacccccttctagtgaatgcattcatgcccctagacgggtt

SEQ ID NO: 456016 - DNA, 250 bp, Homo Sapiens
ccgaggattcgacacctctagggcaggcttgcacgtatggggtgtgagagggatctcagagatgactacggtttttggcctaagcagctaggtgttggagttgtcattttcgctggtggggaaggctgaagggcaggcatttcttgaggggatgggaattaattggaatcaagattcaaatgtaggtgcttgttagacatctaagtggaagtgttgtggaggcggttgaatacctgaggttcggggaaag

SEQ ID NO: 456017 - DNA, 197 bp, Homo Sapiens
ccttccgtttaaaagaaataaatttgtttcagttagcagctacatatgtaaacataagtaaatcagatcatcagcttatttaaaactaacttccgaagttggggataggtactctggcgcaagtcttatcctgtttgtgcgatctccagataagcctcttcactcctttagatcacgttttctgcccctagagtgtc

SEQ ID NO: 456018 - DNA, 386 bp, Homo Sapiens
tgggaaatctgcatttttatagtatatctcggtcagtgactcagcagccaatcaccaggtacctcatctttcaaggagtggctgcgtttggaactccttaccatcaaacatactcaaaaggctagagctgccctgaacccaatgtgacctgtccttgatgattcaggagacttcaggatctcccattaccactaggttatcatttactaccagtctctagtcactgtactgacaaaaccagttcaggtaaagttaataaagactttctattagtagagagccggataaaacagcttttgcttttattatcagagttcaaaaagctggttctactccagaggtctctaggggcaacactggaacctcactcggaatcctcgaacgct

SEQ ID NO: 456019 - DNA, 293 bp, Homo Sapiens
agtataatgttataacctgttacatagatttcctggtcaatcaggggttgaggcctgccatcatgaaattgctgttgtagtccagctctcctgctggtagaggaggatgctgaggttttgcctcatattatgcttctcttagtcacaaatctgaggccaaatgcaactgtactgagggccacccctgcccagcctgcccctgctgttacacctgagggcgtttgttaagagtcttcctgggtcatgtctgacctagtcctgtggttttatgcctacacatccccaccggccat

SEQ ID NO: 456020 - DNA, 407 bp, Homo Sapiens
tggtggcctaaatgggcaagtcgcatctcctagcactagcttctttttgcttcccttggaagcggcaggcataccacctggcacgtattctgatcaacccaccaacaggtcagcccttcataaacccagatgggagtccagattgtgtatagtcctcctatgactcaacaaccagttagatcccaagtgcctggacctccacagacaacctctcccagccccacctcaacaaccagcagctaatcacattttctcacagcaggataacctagggtctcagtttagccacatgagtcttgctcgccagccatctgctgatggttctgaccctcatgccgccatgttccagtccactgtggttcttcagtctccacagcagtctggttatatcatgacagcagcccctc

SEQ ID NO: 456021 - DNA, 252 bp, Homo Sapiens
tgactgcgaggtagggtgggtccttatcctaggcgtttttgaccagccccccaggtgacttgaatgccattagactatatgggttgatgggatgactttcaggatgactgccaaggaaatcgttggccaaggattacttcctggtttctagaactgcatttccggagccttatctgtgacctcatggttaatagagagtagaactctgctgctgcttctacggagccagctgaggggcactggggaattctg

SEQ ID NO: 456022 - DNA, 331 bp, Homo Sapiens
ctgtaggtgctgctgagataggtcgtggtcgtaagcggatagcagagatgggcaagccagttcttggggaagaactgccggcgtggaggtcatcatcgaggagtcatatgattttaagaacacggtggataaactcatcaagaaaacgaacttggtcttggtaattgggacccattcatggagggagcagtttttaagaggcaattacaggtgagcgcaggtggacgagtgaggaggaggaggacgggtcccgggaggagcggctgccgtcgtgctatgactacgtgatgcacttcctgacggtgttctggaaggtgctcttcgcctgtgt

SEQ ID NO: 456023 - DNA, 140 bp, Homo Sapiens
tttcctttcttaccagaaagggataaagaccactgctgtctaaggaaggagttccccctccccccaaagtgctgggattacaagcatgagccaccgcacgtagatgataccgggtttcttgatgggggagcccaaaagag

SEQ ID NO: 456024 - DNA, 212 bp, Homo Sapiens
cagtggtattacagttgtgagccaccatgcttgggccagtattcttgatgaaacaatttaccaaatgataaaggcttgattctgtgtttctctggttagtcttgcaagagggaatacgcaaggcaaggtaggctaaaactgagtttgtggctgatttacaatttacacttatttcctcaaggttcttaccatattgccttctgaggagttcc

SEQ ID NO: 456025 - DNA, 220 bp, Homo Sapiens
ctttggctaagtctgactaatttttcagatctcaactcttctgcagaatcccttcctgacctgcacagatgagggaggtcttcttttaataggctctcatggtatcctgttttccttgtggcacttacaatgataacaattaattgtacaatcatatccttaatagctgtcttccctgctggaatgcccttaaatattatgctgggctgctaacggggag

SEQ ID NO: 456026 - DNA, 360 bp, Homo Sapiens
  misc_feature (295)..(311): n is a, c, g, or t
gtggtccaacaacctggacacacagtgttttaaaccaatgctgggataaagcatccaggctcttaggtccctggaactcaatggctgacagtcttgctttcagtttttcctctgaaatgaggcaccatttattcatgcagtgtgttgtggcaccacaaggactggcctcaggggccagacactgagagggagtaggagggagaagtaggccaacacacccaggcactctctaaaatcaggcagagcaactgccagttataggcgagttgcattttatggtagaattaaaaaagtnnnnnnnnnnnnnnnnntactcccttcctcctccgtccacatctctgtcctttgtccggggttgtt

SEQ ID NO: 456027 - DNA, 235 bp, Homo Sapiens
ctcatcttcgttagtttgtctagtttcgatctttgagactgctgacccttggatggggtttttgtagggactttttttgttgttgttgatactgtcgttcttgctttctgtttgtttttctttcaatggtcaggtctctcttctgtagggctgctgcagttgactcgggggttcccttcaggccctattcatttggttcaccctcatgcctgtagatgtcacacaagagctagga

SEQ ID NO: 456028 - DNA, 441 bp, Homo Sapiens
ttaatcataagtaggtggaggagcatttaaactggtttaataaacttgaaatatgaataccttaaatattcgaataacaaagcactggtgaaacaggtttttctatggaaagaccacaattttctatccagcacatttcatttgactgggttcctttgtttttgtaataaataggactttgagaattccaaatcaaatttgcacttttgcacaaaaggttcacttggtgactctcatgcctccataagtgtgttccatctgattctgcacaacctactgccttcagggtatcctgggaccagccaaagagatgattccaaccagtggaatcatcattaaactagtggttcttagaatatggacactgagtcaacctgcatcagaattactgtagattctggacaattacgaagtacatatctggggatctctctatgtgtc

SEQ ID NO: 456029 - DNA, 443 bp, Homo Sapiens
taggatccccagtttgccttcgtaacaccgttcttccctagtgaagtccacacacatccttacatggcagctgtgggtagtatcaactggtctgaccccttttagtcacagagcctgaagtctgctagtacctgctgagcacagtgtcatgggtgagaatgggcaaggctttttctttctctggttcctgaacttcccaggctctctcacttctggatcctgaatacccaaatcccaagcttccttcccagaaccaacacctcctcctcattagaaagatacctttgttctgtgcttactttataaagtcttgctctttccctgtccactgccttgtgtcactatgtgtgtgtcttggggccggtggaaaggtgaacagaagccagtagagagtaacaagcaccagcttcacaggaatggcatgaccttaatacgatagtggc

SEQ ID NO: 456030 - DNA, 427 bp, Homo Sapiens
gttgcactcgtaagaaaagcttttcgtaccaaattttcagtgttctggttgttccaaaatagtaggagtgtaaatgttggctgtcagaaagtctcttcctctattggtggattcgaatatctagcctatctgaatcatgagagggatcgttgagatttcccattccaaagtcccttcctttttcagacgaggaaactgaggcccaggaatgttaactgaaacaataccgagggcttgccctgcacttagggtgggcatgagcatccctgggtttttagtgaatggaatgggattcttcaagcatcctagcctgcttattaattgcacgttgactccctgatgatgtggagaggctgtgagcttgactgagcgttactgttcacaagtgtatctttttacctaaggattaggaactgtgtgctgactt

SEQ ID NO: 456031 - DNA, 395 bp, Homo Sapiens
ggagtgaacaactgtgcccaggctgtcttcagcatattttctattactcaagaataagaactgtacactctacctaatgtggactacattccctaccttggatacacattttggctccacacttacattcatgctattccctttacctagaatattctttttcttttcacacttaaaaaaatttcttctggtgaaatcaaactgtctctctaataccatatccacatataatcatctccctgaggttttccctaatcatccttgttctctgttcctaatagtttggtaatgcttaatttttattactccagggttactgataacataattgtatttagggtacttattttaatacacatcttacgagtgcaatctggggatcctgctagagatcg

SEQ ID NO: 456032 - DNA, 692 bp, Homo Sapiens
agattgtacttcgtaattaaaactctagcgggcaaggtcagaatgctgatgtcccaggttggaactaatgtacggggttggaattctgaggtgcaaggtcagaacacttcggcagtcttcatgatcagaattctggcaggcacattcagaagactggtgtttggagttggaagtcttattccctgcttgttatattgggagtctcatctcttctgtgtgtccttaacccttcatcatccgtcttcctggcagcagttattgaagaaatgcaaatcacagaagatccccaaacccccatttatccagcggggtcctgatacataggcctctctctcttattgtgtctgatgcccatccactcaggtcgtgctgataagggcgacaggatcctcaggaaggtgaccaaagtgtggcccccttacctcacccttgccaaagaccctggaacctgttgtcaactctgtttatatccacccttaaatccatcttgttggctgacctggagcagatccaagtaagcagctctgccaagcccctggggggcacctggatgatctcactgctccatcatccaaagaaaggcaaacactgtcaggcaaggggcagaagaaagtgccaagggcttgcggctttccagcccgggagatgggctggcagcagaacgttacgaaggcactggggagtcctctaga

SEQ ID NO: 456033 - DNA, 373 bp, Homo Sapiens
agcttctttagcgtgtgatccccagtacagggaagtacaagctacttaaactagaaattctaaaaaatatgccacctgctttattcagtgcaagaagcttaacccctttagtgcttattattgactcatacagataacttagttttatgagctactttcccaatggtcggtaaagtcagtgttttcattaaaggtcagtatgaaagactgttaataaaggaggtcatatttcttttcctggtgtgttctccgatggggcacactgtaccctagggtaatatgatttttggaataaaacaggcctggattcaatcatcctgttatttgctagctgtggccaatatacacgaattacgaagcaactggggatgcc

SEQ ID NO: 456034 - DNA, 591 bp, Homo Sapiens
catacaggatcccagtgcacttcgtaaggcctattttgatctctgaaatcaggtttgtctaagtaaatacagaacttagagtacatctagtagttactttatggcaagtcttagcgctattcaaggcactttagatgcacaaactcattgtgttctctcaacagccatgtgagattaagtaatattactttgtttgatagaagaagaaactgagggtctggacaattggtagtaaagggcaaagttaggaactctgaacagatcagacaaagccgtgtacttcaagtgttctcctaatgtctgcaatagaaatgtggatggagaggcttctggtcagctattctggaagctaaaaaaccttgtcaatagaataacattggaaattgtgaccacatagccagacaaagccatgagagaaattcagtcagtcaaggatcagaaatatctggaagagttgattgttctacgagacaatgtgaaagaatatgacattctgccaaattcaaaggtatttagatttagatataaaagacagctacatattctaaaaggttacgacggcaactggggatcctgctagagacgaccact

SEQ ID NO: 456035 - DNA, 736 bp, Homo Sapiens
  misc_feature (398)..(497): n is a, c, g, or t
gggatccccacgttgcctcgtaatttattaggtatatttacttattcatatatttacttattcaggttaataaaggatatgtttgacacaatatcagactgaccttctttcttggcaaatactaccttaaattctctagagctaattccatcaccagccattcttttcaaggacagcttgttattattctcttggaaacaacagactgtcatacagaataacatgtacttcatccgaaattctttattgaagaaggcctagaaaacaaagtgatttcaagctttgactcttgagatacgtaatttcagaaaacttttcctctgtacttaagttttagaatattcaaattttgtgagaacacattgtactaggaaaattattttcaaaggaaatccatnnnnnnnnnnnnnnnnnnnnnnnnnnnnnnnnnnnnnnnnnnnnnnnnnnnnnnnnnnnnnnnnnnnnnnnnnnnnnnnnnnnnnnnnnnnnnnnnnnnngcaatataataaatgaaaggaaatccaggtcatatcttattatttcttgagttcagcctaaacttctatattatttccatagatatttactttgttggataatggaatctgatagctcattgttaacataaacatcagtcaaatcatgaaggatccattttggtttaatgtttaggacttcttaatgctgaaaattgaacaaatattgtgaccctcccaccccttacgagtacaactgc

SEQ ID NO: 456036 - DNA, 147 bp, Homo Sapiens
agatctaccctggtcacatgagacaacactatgtgaattttcagatatacatagaaaacgtttagaatggtattaattcaagaccaagctcctaatgtctttccaagttagccggctgtgcggtgtctgcttagctgcactagaccc

SEQ ID NO: 456037 - DNA, 472 bp, Homo Sapiens
tccagaggatcccggagaggcgtgagccatgtggatgtattttaaacgcaagtcggctcacgtcctgactccaggagcacagattgctgtggagtgtcagtcacaccattatttcgacatgctgggcgcctgtctagcctgctttcccctcctgcctttcctgctctcaattctctctccttagttcttgggtttatactctgtcctatggggattattattaatattaccttaattgtgagttctgaggtgtaaagaatgggcaatactacttgcagaccttaagagccagttttaaagttacgtatttgtgcgtctaagatgtaatgtctacttagccattaatgtagctccttggggtaaaggtaacatgttaaaaaacatacatatggtgaccagtaatgcatgtatttctttcctttatatattttaaatttgtcatgtgtttattttagttacattgaatatagat

SEQ ID NO: 456038 - DNA, 398 bp, Homo Sapiens
aagtctttgtagacacacaaaggaatggaagataagacgtgcaccctctatttaatcccaaagcatcaatttcatcatgtacccattttcctcttatcgaaaaaaagcaactttccaactgtgtccagacagtaaatggatagaccaaaagaaagacgaatagatgggcagatatgttttctctaagactaataggcagaagggaggcctcatatggtgttgagtgcagatttttccccccaaaagtatcaaagcaactagaagagaccagctataggagtgcttttcactgaagcatcctagtcacagccttttaagcacacctctcagtttcctcctttcctttctgtgctttcaaggacttgctttctacctactcacgccgctccgggatcctc

SEQ ID NO: 456039 - DNA, 290 bp, Homo Sapiens
cagaggcgtttagtgcagagtgtttgcagatgagcaagttttgggcacagagatggaaagtaaggttagttagaggtagagggacttgagaaagagaaaacttgtgaatagagaggaatgagtcaatgaaaaaggagaaaaatgcaagggacagaagagataactgacaagagaaagccccagggggcagcaaagggaatgtccaggaaaagacaatacctctgcagatgtgagatttggccactgtttctgtgaagtttgcccttccctaacgcctcttgaatcctctg

SEQ ID NO: 456040 - DNA, 278 bp, Homo Sapiens
cagaggcggtagatttgttagtgctatgaagaaataggcagaatttgtaaagccagccagaacattccagagatagtaggactgctgcaaatagaagagtgtaaatctaaaccctgtaaagcctgtgactagaagagtgaaaatcacttaataggaagcagctgtgtgttccatgctgttcctcatctgctgtgaacatctgggccgattcctaagacatacaacacttggacatgccatccaacatgcaatctttatttctcagcagagtttctggc

SEQ ID NO: 456041 - DNA, 461 bp, Homo Sapiens
tcagaggcgttagctggtaccctttctgagctcctggattcatttgctgaattaatagcttcatactctctgtagagaggaatactttaggagtctcttttttgtttctgccacatttattaaattgtcacattttaacacattttaagccattttaacatctcttgagagaaggtaggggctgtggaatgtgtataaagagaccatatcttgtttttcttggatccctagctagcagatgtgattacagtttcttatcaagaactcagccagaaaataccagccaaaccctcttcctccattggattatctgaggcagcattcgtatctggtggcctctctgctctgagcagtttgtggagctccagaagatgtctctgatgatcctcttttcttcctttcaagggatttcctagattattcatcctcacgcctcttccggatcctctggacagcctccc

SEQ ID NO: 456042 - DNA, 141 bp, Homo Sapiens
acaagaaaataaacttctgttctttataaattacctagtctcaagtattctgccatggcagcacaaaatggagtaagacataggatgatggcgctacagaagccatagagaagcctaacgcctctccgggactcctcggag

SEQ ID NO: 456043 - DNA, 480 bp, Homo Sapiens
gaaaggaggcccggcagagagcagtgtctagacggagagaaaaggtgccccgttaaatgagctggcatgtgttttccacgttctggaggcatgggagacataaaagctaaacgcccttctcaggaagtcctccgatctccctctttattgaggtcatggcttctgcctggtgtgtatgggagggaggttgatgttggaacaaacacctgaagttctcatcaaaatggcactttttgttgctttcaaccctgttccctctaactgcctctcaactttgcctgaagtgtgaaagtcacgggctttgggctgatttccttcccaccttcctttggaaagtaatttcctcagccaggtattcctttggcagagttttcatcacacacgggcactccttaactatagttgcctacaggaaaggcctccgggaaaaaatgctatttctacccacccttacctctactaacgcctctccggatcctc

SEQ ID NO: 456044 - DNA, 205 bp, Homo Sapiens
atgtatatccagggaggaaattgtgtgttctctccagtcttgttatattggtccacagatcaaagggcagattcacatcatatctggccactgtttatctcccgttgttaacaccgttagttccaaaccacaatgatttgatgcgcggagtggaatgtttatacactgtccgtagaaatctacttaccgggggggcggtgttgga

SEQ ID NO: 456045 - DNA, 455 bp, Homo Sapiens
cccagttgcacttcgtaagattgataggttatatgattggaaaaagagtcctgactctgatgtggctgctactttaaagaagcagaaaaagaatacaaaagatgaatttgaggagcgagcaaaggctattattctagaatctgcacagcagggtttgaatgctgctttgttttatgagaataaagatccccgcacttttgtgtctttggtacctacctctgctcatactggtgatggcatgggaagtctgatctaccttcttgtagagttaactcagaccatgttgagcaagagacttgcacactgtgaagagctgagagcacaggtgatggaggttaaagctctcccggggatgggcaccactatagatgtcatcttgatcaatgggcgtttgaaggaaggagatacaatcattgttcctggagtagaagggcccattgtaactcagattcgag

SEQ ID NO: 456046 - DNA, 198 bp, Homo Sapiens
ccggcagggttgatgttctgaagactccagtggactgtactcacaaattgactggacaccctatgaaagtgggtagacctctcagcggaaaataagaagggcttttacctacagggcaggacagggtcccatgagagcagttctgtggagatataaaaagaatggaagaaggaatgccttatagtgatattgtgacat

SEQ ID NO: 456047 - DNA, 559 bp, Homo Sapiens
  misc_feature (251)..(251): n is a, c, g, or t
acagcatcaacgaagatgagtttgtggagccagaaggaaaggccatgtccaaagagcacccgctggatgccatcatgaagccccaggtcctgtaccacagtgggaagccgggcccgacgaagaactggtcctggcactgcgggctcagctggccgaaggctggcaagaagcactggttcatatgtactatgattggattggaagatggtccagtcatcaccaggcagtggccctggttctaggcggctggngcgtgtgagatgcagtagcggggcagaaggattcactttggtagtcccggagccccaagtttgagtgtaaaaaaaggggaaagcccttgagctgggcgctcagtaggctgtgctcgtgggctcggaaaaagccaatgatgcccacaccatactctacgcagtaccggtctagcagttcccgactccaggcatccaggttgacatacttgagcaggttctcataaatgaccaagacatagcggccatgggtattatcagtcaatgtgggcatgtcccctcggccaggtgccaactcagtgcataacgaa

SEQ ID NO: 456048 - DNA, 370 bp, Homo Sapiens
  misc_feature (156)..(198): n is a, c, g, or t
aagcctacacccactatgatcatttaaatgttagacttctgcacaggagacaccataaattatgaccagaaaaagataccgaggaaagacatttgccacacagtagcagactcagatttagttccaagtatattaaaaactcctacccttcagggnnnnnnnnnnnnnnnnnnnnnnnnnnnnnnnnnnnnnnnnnnntgaacaattcatcggccaatagtcctaaaagaatattttaaaggtaatcagggcaatacaaattaataacagtgggatgccacatcgtatttattagttgacataaaattaaaatctgacattaaagtgttagtaagatgtaagcaactcttgcatactgcaaggtgaaatc

SEQ ID NO: 456049 - DNA, 115 bp, Homo Sapiens
tagcctggtcccggaacagtagatcaggaggagggagggcaggtgcaggattgctcctcagaacgagcagtgactcgggctgggctggagagccctgaacttgttctgtctaaag

SEQ ID NO: 456050 - DNA, 151 bp, Homo Sapiens
gagtcggtcagattcaccggcagagtcacaaacacatttgaagaggctttttctcaggattcttaaccttcccaaaggaagtcccatggatgggtttctagaagtctataaatgctctgaaattgtatttttctgtggaaagcataacttt

SEQ ID NO: 456051 - DNA, 618 bp, Homo Sapiens
gatccccagatacggcatatgttttaaagtatgcctggttagagagtatttaggaatgcttagctattatttatctcatcctcatcaataaaatacaatgataaacctttttacttaattagatatgtacaccattaagcacatatccttaatttaccaagttttatgtaattaatatatttacaaatcattgcttttccactttaattagctcacagttaatttctaaggtaccaaaaattgagactcttactgatatagattctcatcctattttatttattaaattataccaacagtacctcttaagagtttacccggtgaatttcttttagatgaaaattctccctcagttattcctgggttggtatcttgactgagtgtcttttcttctttatttatctcaaaggtgagtttcatctgcagactctaataaataatgattagtttcaaatcatagattccattttaactcttaggaagggaagtgtgaccattcaggaatgtggtgttcatggaagcctgtgaaaactttgtgtttgggtccagtcgtttgttcacaccctgtttaagacttttgtctcctgatgccacatgtgcatacgataaacaccggga

SEQ ID NO: 456052 - DNA, 827 bp, Homo Sapiens
cgggcagtacggatgtgcctgtgctgtaccacatcactggagccatttccttcgtcaatgagattccctgggtcattgaacctgtctacatctcccagtgggggtcaatgtggattatgatgcgccgagaaaaaagagataggaggcatttcaagaggatgcgttttcccccttttgatgatgaggagccgccctcggactatgctgacaacatcctagatgttgagccactggaggccattcagctagagctggaccctgaggaggacgcccctgtgttggactggttctatgaccaccagccgttgagggacagcaggaagtatgtaaatggctccacttaccagcgctggcagttcacactacctatgatgtcgactctctaccgcctggctaatcagctcctgacagacttggtggatgacaactacttctacctgtttgatttgaaggccttctttacgtccaaggcactcaatatggccattcctggaggccccaaatttgaacctcttgttcgagacatcaacctacaggatgaagactggaatgaattcaatgatattaacaagattatcatccggcagcctatccgcactgagtacagagattgcttttccttacttgtacaacaatcttccacaccatgtccacctcacctggtaccatactcccaatgttgtattcatcaaaactgaggatcctgacttgccagctttctactttgaccctttgatcaacccaatctcccataggcactcagtcaagagccaggaaccattgccggatgatgatgaggaatttgagctcccggagtttgtggagcc

SEQ ID NO: 456053 - DNA, 424 bp, Homo Sapiens
gtgttttgaggctgcataggaagccaaaggcagagcttccaaaaggcagtagaattttagtaggaaataaacaaacaaaaggacttggcagcctggagacaccaaactcaaacataccattgaactctttttgaagatatttaccaaattttgtagctgttagggccctaagataaagaaatgagctgaaaacttctgaaagagaactttttcagggcccagaagataaagatataccaggctttcagtcaaaatccagggagtgtcatggcttacaagtatagataaacaaggggaagactacattccactaaaactgcaatctagccccaacccagctgagtccttggttggcttgagacgtccagcctctgtctcttctgcttaatatcgaaagtgagaaacctgctcttgtaggaaagcc

SEQ ID NO: 456054 - DNA, 341 bp, Homo Sapiens
ccgtagttcttccccgaactgtggatcacaatcggctgatgtggactggcagaagctgctgaggaatctcggctgggagaggaatctcgtgaagaagaagggtccgagtacagggaatggggagacattggacttcccagaggggaaacagcaaacatatctcctgggatcatgagggaaagagcactggcagggagggactttgtgactttccccgagattttcttttgttctgtgctttctaatcgctgccgagccatgtgagaagcggtttcactggatggctttgaggaattatctgtactgtccacacactcgcgtcgtccatttattgatccaag

SEQ ID NO: 456055 - DNA, 399 bp, Homo Sapiens
ggtgtggatcatacctttctttagtctgtcctttcgctcacgtacctgtgagcttgtggttctcactgacaggcacccacttggacaaactcagctatgggtaaccaataaaaccagatgaggttctccttctgtctggattttgtgtcttgagagcttgactttgatccatctggattttgtgtcttgagagcttgactttgatccagagacagcattctctctggctttctgcctgctgggtggcattttttgattggtacacctccagataaaattctgacgtacaaagtgcttcactaaaagattcattgactagagctaatgagcaattcgacaattgtaagaaagaacacactagactcatttttctggagaacctccccctccatgctccct

SEQ ID NO: 456056 - DNA, 388 bp, Homo Sapiens
  misc_feature (276)..(343): n is a, c, g, or t
ctgtgtttttaaaagaagagacagcatacagtttgataagaacaatttttggtttcttggtttttggtagacttattagactagtatactgggataatcccatttagttttaaaaattgctagagtgtctgtgagaaaacgctatggtagaattgcctgattccttattcagccatcttctgttacatctggcaatgattgttgaatgaagtatcaaagcactgtactagattaacaataataataatacgaataacaacttaaaataattagtgnnnnnnnnnnnnnnnnnnnnnnnnnnnnnnnnnnnnnnnnnnnnnnnnnnnnnnnnnnnnnnnnnnnnaacaaacccaggcagtctgaatcagaacccacactttaacttcca

SEQ ID NO: 456057 - DNA, 415 bp, Homo Sapiens
  misc_feature (347)..(347): n is a, c, g, or t
tgtggaagccagagtgggtacaatagtggtgtagcccgggtgagccagcaggcctccagtggcgcggaatatttatccctccttagccacgggatgcctcctgttcattcatagatggaaaatgagttgggcgttttcattgaagcattccattgtctctgtcaggagtaaaccaaacaaacacacagaaagctaagatgccagcagaaacctccgcctcagacccagaaagttaaagccttaccccatactactgaaataaagcactgctcttactctttttgtttcttacattatgaaaccaaaggaaagtgaactaactgaactaataaaaccaactctcttanaaacatgatggagttcatctagctatctgtgtgagtgcatctattccacacgtatacggaccggctga

SEQ ID NO: 456058 - DNA, 603 bp, Homo Sapiens
tattgcttttggtttttttggcgaacaccgtctctggaagacacaaggaggaaagtaatcccacctccaagacaggaggtgggattactttcctccttgtgtcattcaggacgactgctccgctctttcttgtaagccctttcttttttgaaatcacatcatcagtcttcactacctcatcttcctcttggcaaccttcagctccccttccctgtatccctctccctgcacgtgaagaccagcagccagttcctggtctgtctgtctgtctccatacaatcattatttcctgtattttctctccatccacagacaccactcctgtttttacatcctttatccaatccctggcctggcattatagtcactcactcatgaatacccttaactgctcactccttcattcttccatcagtctcaaacttagaggaactctgcctccaccttccccatgcctgcgcatgagcaccttaccatggctggtgaacgtcccatgccaagggcacagttaacatgcgtctgctggtcagggccagctgagcatcctacactgggcagaagggttgctgtttctctgataacttctcctccttatcctcagtg

SEQ ID NO: 456059 - DNA, 577 bp, Homo Sapiens
caacattaacatgtgtaaaagtctttaaactgttcttataacaaaaattattatatcaagtaaattacccataaagaaaaatgtattatcacaagttctatcagtatttattgagccttcattttatactatctacttgcatttatctgtcacaaggcaaaccactctgccgatgatgttctctctccaccgagtttttaatatagtgggaaaacagatttttccacatacaatggagataataagactaaaataattctcacaataatatgggaataatcaaaactggtaacttccaaagttatgctcagctctggaaattcaagaccagcatccagtgacctactatgaagctctcttgaccatctctgtttatttacgtaagaggcacttcaagctttgcacatgcctgatgggactcctaatctccattgcccaccacacttgctcttctctcgctgttacttaattcttcctcattcccggttgtcaggccacgcattgcagtcatccatgactttctctttctttcactccccacctccaatctattaccagcagatcctgccatccttcc

SEQ ID NO: 456060 - DNA, 139 bp, Homo Sapiens
cttcctctttataatagtggaaaaggtgctgaaattatgtgttttgtcgaaagtagtagaattatatcgtgaagtgctgttccaagtacatgagtttgcatacatttccgaataatattatatgccgcgttccacacgt

SEQ ID NO: 456061 - DNA, 465 bp, Homo Sapiens
tcacaaatctagtttctttgaacatttccatatttctcctgtgaagttgcatttgagtttgtctttgaggttccggaggtgaagaatcagacaaagaaaaacaggaaatgtttgcagttcattctgtcaacttgctgttgaaaagcataggtgctactctgactgatgtggatgaccctatattcaaacttgcttattatgaaattcgatatcagttctacaagagagatcagcttatatggagtgttgttaggcattacagtgaacagttcttgaaacagatgtatgtccttgtattggggttagatgtacttggaaacccatttggattaattagaggtctgtctgaaggagttgaagctttattctatgaacccttccagggtgctgttcaaggccctggaaggaatttgcagaggggttagtgattgggagtgaggaagcctctttgggacacacagtagg

SEQ ID NO: 456062 - DNA, 633 bp, Homo Sapiens
ccaccgagtccaaccccacaccatgagaatctcctaaacacgacttgctctgggggctgcctggctggttccttgaatgcctccagtgagctatgggctccctacatcccaaggacatccgggaccagtctcttcagaaagccatgacccaaaggacttggacaaacagtttacagaagatataatacaatttgttaacaaacataggtcaaagtgtacactcatcattagtaattaaagcaatgcaagttaaagtaatgcaaaagtactttattacagagactaactagccatatcttaattatatgtggtcatacattgctgaacattgttaaatgctgtaagcttactgaaattattctatatccatacttagatccttagcctttctttcaagagacttaaccaaaggaaattcattcattcattcaccaatccatccttccgcctatccttccaccctcttatccatcagccaaacactcactcactcgctccttcctccattcttccatccactcattcatcatttatttatagtctacaacatgttgggcatcagagatacaaaggccaattcaataagctccttgcccttatggggctcacagtctagcaggggaaactgatctg

SEQ ID NO: 456063 - DNA, 223 bp, Homo Sapiens
ctcttggctgccctaatggaaaggctccaagttgcagctttagatacaagggctggcactatgagcaggctataacttcttgcttacaccttctctcttcacatcgggtgccgcctgtcaggtgagggccacagtccttcattccaggtgttctttgccttcagccttgctttactaccatgtttttctccttttctgtcttccatctgtcctttatcgaatc

SEQ ID NO: 456064 - DNA, 182 bp, Homo Sapiens
cgatcgatgaaaggtgaatgaaaaactgttatcatccaaaaaagctaaccattcctgatagaatattcctggcagaatcctagcctgtgtctttgaacaaaataactgatcatcctgtataataatcttcagatgcaataatgtgaagatcctcagattctgccatctgagaatccttgggg

SEQ ID NO: 456065 - DNA, 310 bp, Homo Sapiens
  misc_feature (114)..(132): n is a, c, g, or t
cgatcgatgaaaggtaagttttgaaatatggtcagttcgtgtttagctgtacagaagatgggtggactgcagcatggcaaactcagtaagcactgctgggtagcaggtgatccnnnnnnnnnnnnnnnnnnnggcaagtccctgggcaaatggtgtagccaaaggtgatcattataactagagacttgttacataattacttgttaactcctgacaaatagatacacagctacaaaatgccatggttaccctagccattgaagctaatgtagtctggtgcaagagtcaaggtgtctccccctcatcgatt

SEQ ID NO: 456066 - DNA, 320 bp, Homo Sapiens
gcgatcgatgaaggcatgaaggttaagaacacaggttgagcagctggactgcctgagttcatattctggtttcatcctgggaccatctgcatggtactaactctcctcattcttgatttttcttatctgtaaaaatgaggtgaataaatgagacaataccagtaaagcatttcatttagcacaaagcctgacactaaatgtgttagctaatattatccttagagatcaataaaaatgcttgcagaatacatagttaacattccaataaataataccaagatgtgtccactttttttgtgcccctctccctttcgtcgatt

SEQ ID NO: 456067 - DNA, 410 bp, Homo Sapiens
agcaaggggcgggagtagtgtggacaacacatggccactaccagactcaggccttgatagcaaataaaaaatctttccgatcaaaagaatgaaagagggatctaacctagagggcaaagcatccctaattttggcaggaccatggttagatgatgaaaatatgaggatgccctaattaaaatttgaatttctagataaataacctaacattttaaaaatgtaagcagacctcgagtattgcacaggatatacttatgcgtaaaaataaaattcctggttgtttgaaattcgtatttaactgagcagcctgtatttttacttggtaatcctacgcaggaccccaaggtgtgtgaaaaggagcacagctcacctgatggcttctgctatccgagtgctctccttcatcagat

SEQ ID NO: 456068 - DNA, 628 bp, Homo Sapiens
aaaaagatacagacagagctgggtccgtgatgtagtataagtggatctagcccaatcaagtgttacaaatgcttcttcaggaaatgatcacttgaacatggaaaacgagaagtatgtctcttacatttctcctttaagtgcagtttctgtcatggaagataagctgcataagcgaagtccacctccagagactataaaatctaaacttactacttcagtagatactcacaagataaaatccagcccatcacctgaagttgttaaacccaaaataactcattctcctgattctgtaaagtctaaggccacttatgtgaacagccaagctactggtgaaagaagattggcaaataagatagaacatgagctatcaagatgcagttttcatccaattcctactcgaagcagtacattagaaactacaaagagtcctcttatcattgataaaaatgagcattttacagtttacaagagatcctgcacttattgggtcagaaacaggagctaatcatatttcacctattcctaagccgagcatccattttacctcttcacatcactcatctcatagaacctgtttaaatccaggtacccatcatcctgcaaatgtggggggatcctgctagag

SEQ ID NO: 456069 - DNA, 150 bp, Homo Sapiens
gtgtgaggtgattagaggatcccgatttttaattgcttatcactgaccgaatagctacgttatggggtccagtttcctaaaacgtagctattcgtcagtgataagcaattaaaaatctcaagatccagtgtggatccagtgtggagagag

SEQ ID NO: 456070 - DNA, 215 bp, Homo Sapiens
ctcgggagtgtagtttaaactgctccttctgtttcctactgctttgttccagcaatcctttgtaaatttagatgaggaacaaaaccttcctcaaatatttctccaaaggaactacacattaagtaaataggttctacagataggactgccaatgccaggttttaaagttagttaggaaggtgcatttatgaaatgcttacccagagtggagagag

SEQ ID NO: 456071 - DNA, 635 bp, Homo Sapiens
tcagctcggtaccatctctccacactggtatttccctcatttcctttcaagccatctttctaacctatttgataccccttttctaccccatcatcttcaatgtctctaatttttgttgctgacttgacttaaatgatcctatctctacagaatgcaacttaatcatggtgtacccactcatttctgccttttgccttaggggaaataccatactaaagccggtgtgttaaagagacgcccagtcttggttgaacggtccctggtagtgattcacaaagtgaacatgtatcagcattcgtcatgagcccacctccagtcttcgatacacttctcatcctagttctcctggtgtccaacataataacctgcatccttatgcatagtaggaactgacattctgtacggattgctgatgaagctcatcccacagaatccgcgttcatgaacctatctctatatgggtccgataattatccagactcatagcattcattaagtgtgttcctcatggatgcctctaaggtacgcgcacctcatttcctatgacaagtactttcgatatagatgtcctcctatgccattattcacatactgtgtatcatgggccacgagatccaccatgcgtgtggagagag

SEQ ID NO: 456072 - DNA, 173 bp, Homo Sapiens
ctcctccacactggtgcagaaggctgggggatttggaggtgggaaccacaaggtgtcctgcaggatgaagtctatcttttcagtgaagtgcaatggccagtgcccgaaggtgagagtaacagtggggagatatcgaggtgagagtggaaatgttactaacccgtgtggagaga

SEQ ID NO: 456073 - DNA, 362 bp, Homo Sapiens
gaacaaaagcagatgtggagaccaagccgatgccaatagacgaaagctttgagaatgttcttaaagaaggaacggagaaaggaacccaagagattgcagagggtttatctgagaagtccgggaaacatgtttctgcagaagaaaaggaaaaggataagagtaagctttgggaagaaagcactgctcaggtgaaggacaaaaaggcaggtctccctgggttggaggaaggtggaaaggattcattgccattagcctatgtcctggctcttggtgcaccaacaatgaatttcatggtggatgatacagcagcaatcaactctacaaggattcccagcaattgtgcaaagatgatccgggtccga

SEQ ID NO: 456074 - DNA, 385 bp, Homo Sapiens
  misc_feature (335)..(335): n is a, c, g, or t
aggaatctttgcaatgatggaaaagacaggtggcagtgtcttggcagggttcaggtttcagctattttttcttctgtggttcttttactccagaaagtccagtatctttaagttctgagaatagacagacacatcctttgcaactccagcaagaagcttacacccaggatggatgcggtcagctcttgtccatggttttgtgttgtggggttgtctgttctgtgtttacccgtaggtgccatcattgattcccaaaagcatcaagattacactttttagaatggacaaattagaacattgtcctgaagtggaggaaatggggaagaagtgaaggncaggagcctgctcaggcatcattcttgctgagcacagccatgcagtcccc

SEQ ID NO: 456075 - DNA, 397 bp, Homo Sapiens
acaggcctgcacgtccttctcaccctccaatctcagcagatccagtcacagcaaactccgtgctatttcttaaagatgctccatgcttttttgtttacatgcttttgtgctgtaacactcttgtccacacagatcgccctcccttgtaagcccaatgccactactctctgagaagccttccagtaccctcctttcccaccagctaagttctccagccctccctctgtacccccacagcactgagtacacacttccagggcagccccgcttcccacactgcagagtaatgacctgtctcccccagagcctgacaaagcacagggcctggcacacagtgaggtgttcagtaaatgtttgagagtgacaagcaagtctgctcagctaagaatcaaccggt

SEQ ID NO: 456076 - DNA, 330 bp, Homo Sapiens
  misc_feature (110)..(177): n is a, c, g, or t
ggcacgattctttagcgaaagatgaggagatgccaactgtgttgtagataccctaatgctggcctgaggactttgtgcctccttcggtgggcagtgaaaaccactgattnnnnnnnnnnnnnnnnnnnnnnnnnnnnnnnnnnnnnnnnnnnnnnnnnnnnnnnnnnnnnnnnnnnngtgaatggcatggctaagaagcagtctgagcagtgtttctgttgttgtttttaaataagaaaattatctggcatccagtgtgtaggccgaattggacctgagagttgaagcagggagaccagttagagattatagaattgtcttgtgtatgtt

SEQ ID NO: 456077 - DNA, 436 bp, Homo Sapiens [sequence omitted]

SEQ ID NO: 456078 - DNA, 255 bp, Homo Sapiens
cagggtcgacgtctagtaggatccctcggcacgagttcgtttgcttgccctagctagaaagctcagtataactgaggaaaattaagtttctgtaaaaatgtttaatgaataacattgcagggtaaagtttacacttaggatgtgaaagaggacagggcaaagaagaaaaaggaccacagacacactatttctaccccccaagctgtcaaacaactcaaaaatttccagactcaggtagtccttcactggcgaaga

SEQ ID NO: 456079 - DNA, 637 bp, Homo Sapiens
  misc_feature (625)..(625): n is a, c, g, or t
tagcaggagaaggagctggatcagactagacagaatttcactcagactatttcaaacaatgaggagccttgacctcattcccaacttttagccgtccatagtgattagatttcttgttttctctttctctctttttttaacagaaactcttaagctcaaggctaaattacagtggggactatgactttgtctacagtccatggtttctgtattggctcaagccttgaaatcttgaaacaagcctaaattaaaattttctcttagcttaagaaaaaaagttacatattgtcaagacccttatgtgtgtggtccattaaaaaggtcttgatattagaagataacagcaaattgtttcttatcccacaacagctttgcctttcagtgtcctttgtggtggttttcgtaggtcagtggtacaattcaacactcttccaataagccataataataattgttggcacaactgttattacaacaggacttgcctggggttccatctattaatttttacagacagtaggaagctcacaccgagggggacattgggtaacttcctgggacaaggggcaaaggaaagggaactaggcatatttgttacatactgtgttacgtggcacaggaacantgggtctgtgcc

SEQ ID NO: 456080 - DNA, 569 bp, Homo Sapiens
tcagccggtccctctctccacactgggttctaaattgcttaagccatacgttctcttaaacaggatgtttttttcttcctttccagcagcctttttcttctttgtctgttatggttaatactccatagattttagaaattgagaagttcttgaaacattttattttcttgagttcatcacttttgactcttgtatgagatgtgatttgtcataaaagatagccttccactacttcactaaatgaatttcagagtaaacactgtgattctgtagagcggattcagtaggctttccaatgttttctcctgctatacagtgcctaccaccttgagggcacttcagtactagaggatgaaaactgaaacgttgttttgatgtttattgaataacgagattagagaatatttgatttttgttgtcagtgtattaaagaaattttcacattgataaatgttctctaggaatgtgtctacattcatcaggtgtgaactcttgtacatgaattttgtaccttgaatccacatatatattaagtgtatcatcaatataaaaataaacattatttgctt

SEQ ID NO: 456081 - DNA, 340 bp, Homo Sapiens
gaatgaccatataatctggacttactaactttaggtaacagtaagttaaaagatagaataagggtttcatattacaggaattcaaaaattgaccatataataaatgatgaagaaaactgacaataaacaggacaatgttcaaatagctcattggggccaaaagatcagcgtatatcctgcatcatctttcatgcaatgtctcagctttttttccctcaaacataaaggcagattaatacaaattagccttatttagaatattcatttacgtttccttctgaaattgatacttgagtggaagatgtattaatactcgtgtttctacccagtgtggagagat

SEQ ID NO: 456082 - DNA, 423 bp, Homo Sapiens
gggactcgaaactgccaccctagtaatattctgcctcttgatctggttacacacgtgagttcattcaagctgtatgctgacaggctgtgcatggtatatgaactacactccgacaaaacccgtcctcaagaaagctccctcactcaggtcttccccagccaaccgctccctcctgtcctatcaggaatgggaggatttgtcccccagactatgtttcctctgatggaacagctttgtcacatctcttagtggtctgtgttgttcacacatagaagccgtactgtacggggcagtcctgcacagtctcactctgtcaacccaagttggaaatgctgcaaaaccaaggctcaggacagtgtgtggattatcaccaagagacctcaccgcaaggcccttcaggtcacacagcccgtgcacagcatc

SEQ ID NO: 456083 - DNA, 209 bp, Homo Sapiens
actactagaggatccctctccacactgggatagaaaccataccaaatgcgatagagtgcgggaaggccttcagccagagctccaacctcattgagcaccgcaagacccacactggcgagaagccctacaaatgccagaagtgtgggaaagccttcaagccagagctcctccctcattgagcaccagtgtggagagaggtaccggctatt

SEQ ID NO: 456084 - DNA, 371 bp, Homo Sapiens
cacgtattctttgccttttggattctcttttaaatgctttcatagtctaaccaacttacatatattttgaaaatgttacgtaattacgaaggagaagtaaaagtgaataagaggaaataatcttatgatgtaattctatgcattttgaaatgtaagtgctaggacacagggaatgcaaaagctacaattgaagactcagacagagatatacgttgtgtgggccattcagattcctgcagagtgttccacatggtgacatggtattttttgaagtactgagcaactcctggtgacttctgaacaaaacaaaatgcagtgtttctctccttttacacaaaggttgtattcctggacaatcagttacttgtgcc

SEQ ID NO: 456085 - DNA, 254 bp, Homo Sapiens
  misc_feature (71)..(80): n is a, c, g, or t
ccgttgtctgtgtgcttagtacaaatatatttatatacagccacaggtattggggcttgctaatttaggcnnnnnnnnnnaaataaagcaagtgttttattttcactttgcaataaataacaacacttgtttgttcctttatttcaactacattaaaattaaggaaaacagaactatcatctctaatttccacagtgtttgatatcatttgatttctgtgctttcatggcctgctggtaggcaaagaatgcgtg

SEQ ID NO: 456086 - DNA, 449 bp, Homo Sapiens
  misc_feature (434)..(434): n is a, c, g, or t
aataaactcataactgaatgtggtacattttcataaatgatcaaaaatttgtattagttcttcaagtttttattgcatttctgccaatatctaagcagtattcccagatgctgaaaaccaaaatgatcaatcatgacagaggtccagcctctgaggacccagccaagagactaagtccaggtagtaacagggtggatggaatgtcagtctcagaataggagaagttcagctctcatcctttccagagccttgaccttttactgaccctcagtgtatcacccacattgtaaaaatgagacaataataagtaacttcgtgaagttgttttaaataccgaaggcataatattcattgatttgctctattcattctacaaatgttgattgtagtgcctacaatgtttgaagcactagttttaaggtccaggatgctantagtaagctaaagaa

SEQ ID NO: 456087 - DNA, 287 bp, Homo Sapiens
cgattctttgctcaacgtaaccgaaacacctgttggtggtttctggtactttcctcactacctcatccccttgacttcccctaataaatgttacagccttccttatttaactggaaatgctttagaactacttttttaaaaaattattcagtgatttagaacacaagaaatagaaatgcagcaagctacctttatggctaaccctagcattcacttagttaccaaaataaaacaaggcaaaagagaccgttttataggagtattccagtaaatattgaagtgttgca

SEQ ID NO: 456088 - DNA, 379 bp, Homo Sapiens
  misc_feature (62)..(96): n is a, c, g, or t
tggtttatgtccgtgtaaaccatggctgggtgtttataccaaaagtttcatgatatatatannnnnnnnnnnnnnnnnnnnnnnnnnnnnnnnnnntcattaaaactttaaaatcaggacatttttggctgggcatggtggatggctcatgcctgtggtcccatcactttgggggagattattcataagataaatcgtttgcctgcactgtcttttggttagcgttccatcccatttctcaggcaagaaaaaatagagtggagttctttgctgataaatttccacggttgctagaaactaggtaaaatctgtctcctttggaaattataaacatttgatgtgattctttgtgatgtaactgtgatagtttatcagcata

SEQ ID NO: 456089 - DNA, 410 bp, Homo Sapiens
tcacgattctttgcgggctataagagtgctttaaaaatgtgaattcagcccacattctcactgcagagaaaagactaaaatcctctcagcaaccacattcaggaactttgccaagaaaggcaggtgaggactccattgtgcctgtcatccttcagcatggaagaactagtaactgcaagggctatgatcgtagctgttgttccaacagttctgtgacaacacgtacctcctcaaacacaatgcaacagtgaggcctaatgtcccaggatttattttcattaagtcgatgcttatggaagacctaatatgtgacaatcactgtgcctggtaaatcatgttggaaagaacactttgctcagtccctgagggggctatagttcagtgaggcagagatgcacatatactaatta

SEQ ID NO: 456090 - DNA, 362 bp, Homo Sapiens
cttctttgcaggcaaagtcaaggagtgggagggaagaccattgaaggcaacatggtagcagctgagaagtgaggcacaacacattaccacatcctgctgaattattttccagttgcctagcactattctaagcactttacattcattactatgtttcatccatacaactccctatgatgggtgctattgttatacccaatgtagagattacaaaactgacaaagtagtttaattatatcgcttaggtcactcagctaagaagtagaagagcagtaatcaaacacaaatctgtctaactccatagcacatgctcaatgccattctgatatgctgcttctgacatctatccatctcggtctgta

SEQ ID NO: 456091 - DNA, 419 bp, Homo Sapiens
cacgatttctgcattatccatctcttggaggatcattaggaacatttagtatttccaccttagtgctattttcttgaggcaaagaaagattaggggaactgtctgatgaatttctttgaatgaccttcgtgtagttttgtgagcaatttttaatagtgtctcacattgtatgatgatttttagaggctactttcagttaataaaggccatgaatgctgaaattgaattaaattgtagttaaagataaaaattgtaattcattccaattataggaggttaaaatattgtgctgttggatcaacatttgatctccttatttttagaagtctgccaagttttgaattgtaaaaccttttaaataatattgaatgagtagagctgtatagtagttgtgggtttatatttcagcaaagatatta

SEQ ID NO: 456092 - DNA, 200 bp, Homo Sapiens
ctgaattctctgtttctatctgtgaccctaacccctaagaactctcaggaacagtgctccctggctggtttaagctaaaatttgcaccctgtggcagaggagatccagtggttctcttctggagtttacttgtcaccacctttagtttcctgggaaaatttgatatagaggattgggatcctcagagtcaccacaaactg

SEQ ID NO: 456093 - DNA, 186 bp, Homo Sapiens
tctctgctattacacttttcttttatagccttcaataaagatttttaaattctcagcacagcaataccagttgcctacttacctcttctaacctcataacctgatactaacataatttctcagtctagaataattatctttactccttcacctcctttacctaatcactcctaccgactttcaaag

SEQ ID NO: 456094 - DNA, 573 bp, Homo Sapiens
ggatccccggtttccattcttgcatttgacggcatctgtaacaatgtatagctctacctcctcctgctccccatccccagcctaccactggagcatttttcactaaatgccgaaggtactcttgggctttacctacttcttatttttccaagctgcatggcctcaggtctgctccttggtgattccacctgaaacttctggagtgcatcaggctgaatgagaaaaagcattcagccagatccaatcttgtagccactgctcccagttaaaaaaccagtgaggggccagactggaaatgatctcagagaccatctagtagaaccccatagcttttaatatggcgaatccaaggccacatggggagtgacttgcccaagcccatctgtagcaaaggaggtgggtgggatgctagagccaggtttctcctggccacctgccttatttcttggatgctttgaccagcaggatgggcttcctttcactattgccatctggagagccaagtctgcatttgactacagacatgcatctctaactctggactcgaatatttcttacgaattagatggtaaa

SEQ ID NO: 456095 - DNA, 214 bp, Homo Sapiens
ggtacgattctttgctatttactattgattaggatatttacgactccatcagggatgttaacttttaaaaaaccaatagccaagtaaattattccatccaacagcaaggcagatgcgtatgtctgtagagacacaaatgatttctgtcctgtaaaaaagatatatctgcagtctggcacggtggctcatgctctgtattccagcactttaggag

SEQ ID NO: 456096 - DNA, 560 bp, Homo Sapiens
  misc_feature (65)..(178): n is a, c, g, or t
gcacgattctttgctagccatgattagctgggattacagatcctgccaccaagcctggctaattnnnnnnnnnnnnnnnnnnnnnnnnnnnnnnnnnnnnnnnnnnnnnnnnnnnnnnnnnnnnnnnnnnnnnnnnnnnnnnnnnnnnnnnnnnnnnnnnnnnnnnnnnnnnnnnnnnataagccaccacaccaggcctcttaaaactttttcataggaattttgtttagtgctttaagcagagagtacactatggtgggcatgggccatttctgtgaatatgcatgtctgccacacagacggtttcagtataatttgaattagttgccaatatttaaaatcagatttcaacaatttaaaatatcaatgtttatcttctgttttatcaatttaaactattttgacactgggcctgtcatatatctgtctctgtttgtgcccttcctgtatattgatatgtcataacatctaatcccaatctgatggcatttggagttgtggcgtttgggatgtgattgggatcatgtgtcccttattatatgcggtcccagagagcttcc

SEQ ID NO: 456097 - DNA, 684 bp, Homo Sapiens
gactctgaggatccccggtcgattctttgcctgagtggggtactggaagccattgtatgaagagatcactcctttggagtttttccctctggttcccttgcctttaagctgactgtgtgatttaggtagctcagatttatttactgagagtggatgtttttgatctcacaaactctctgtggctctcaaatctggagctcacaacttctcgatttctgtttgcagtttggctgtgactgcaccaaggaaaggggtgcttacacataaagacaaaatgttaaactaactcattatgaaaacagcctggttttaggagaaccagccaacagtctagttttgcaaatagacttctagtttatagtaccctttccattaagttctttctagccgccttctgtttttatcttactggagtctgaagtgatgatctttcttttccttcctaaatcccatttaatagtagttgaaaatgatttgcagtatagtctgggcaataacagcgcttactcatttttcctctattcagtttgctttttataaggattaatttgggtataatattatagcaagtttttctgttggtttgtatgaactcccgagttgcatatagccgttacctgtgacctgggtacatgccagtagtaagagatgttagtcctttaacttgtattctgtcttgcaaag

SEQ ID NO: 456098 - DNA, 410 bp, Homo Sapiens
ggtacgattctttgctaattagtatctaagtatacatttacatattattaatctaagtctattataaatcttacctagattttataccatctgatatttggtttattgagtgtcagtttcccttcatattactgtagtataatgtaatattttctaaaatctatattagaaagagaaggtcagtttattcaattctcttctgcaaacatattttgattctcaacagatcctagaaacttgaaaaaaactgattttcattatcagtagtggtgacaagtgctaattgctggttagtagctctctaaatctatctacctcatctaactggactttggccacactgtctttctaccacttacgagaacaggccaacctcttccctacctcaagatccttggagctgtcctctc

SEQ ID NO: 456099 - DNA, 330 bp, Homo Sapiens
gaggcagggtgtcactctctctccacactggggcctccagccacctccgccagtgttccggggctgacagagatttgaattctccctggcatggaggtcttgaggtcctgcccagtgaggaaactctcaaccgtggcctccagccacccgcccctgctgttctcaggctgagagagatctgaattctccctggcatgtagttctcaagatcctgtccaatgagggtccttttagctggggtctccagccaatcccaccggtgtactcaggctgacagagatttgagttctcctggcatggagtctttagtcctgggtcctctagtcagcc

SEQ ID NO: 456100 - DNA, 454 bp, Homo Sapiens
ggtaccgcacgattctttgctgagtgctgtggaaacagtgatgtgtaagatactaatggaacttagagaatgttgtgggagacaataatcagataaatattaagatatataagttctaaaagattttaaaaagtactttgaagaagccaactatgatgaaatctgcaggtagacctaatttcaataggtgcaggataatataagctgaagccaaaaagttggaaaagaatattccggcagagcttaggtctgtacttcctgtgtctgggaaatgtccagtgaacaaagaaacaaatgaagcccagtgtggcagaaacttcatgaaagaggggtagaagcaagaggtaaggttgaagaagagggccggagcacggtgtgcagggccttctggcatatgttagagaactagtattttacgttgagtgcaagaatctaccggtgccagctcattcta

SEQ ID NO: 456101 - DNA, 355 bp, Homo Sapiens
atcgagctcggctaccggtacgattctttgctgagtgctgtggaaacagctgatgtgtagatactaatggaacttagagaatgttgtgggagacaataatcagataaatattaagatatatatagttctaaaagattttaaaaagtactttgaagaagccaactatgatgaaatctgcaggtagacctaatttcaataggtgcaggataatataagctgaagccaaaaagttggaaaagaatattccggcagagcttaggtctgtacttcctgtgtctgggaaatgtccagtgaacaaagaaacaaatgaagcccagtgtggcagaaacttcatgaaagaggggtagaagcaaga

SEQ ID NO: 456102 - DNA, 382 bp, Homo Sapiens
gactctagaggactcccggtagattctttgccttctgaagaagaaatctatgtcttctgtggaacccaggacactaataaaatctgagcctgtaagtccaaagaatggtgttttaccacaggctactggagaccagaaatctggtggaaaatgtgaaacagacagacgcatggttgcagccagaacagaacccctaactccaaacccagcttctaagaaaccaagagtccacaaaaggggatcagaatctagttctgattctgactcagattctgagagatcatcttgttcttccagatcatcttcttcctcatcatcctcttcttgctcccactctcgatcaggctctagttcttcttcatcttcatcttgttcttcagca

SEQ ID NO: 456103 - DNA, 309 bp, Homo Sapiens
tacgattctttgcctcggggtgccagcccagcacagaccttgcttagtccaaatgtccggccactttgaggatgggggtgccagaccgctctgtgatgaggatgttgtctggcttcaggtccctgtgcacaatatggtttttgtgcaggaaggcaatggcgctcgtcagctgtagcatgaaacttttgttggtggctgggtctggcctccgggacaggacatactgattcaggtctccaccttcacagaactccatgacaaaccagagatagcaagggctcctcagcataacccaggatcctttctcct

SEQ ID NO: 456104 - DNA, 539 bp, Homo Sapiens
cgtatacttcacttttgtatctgatatatctttgaacgcggccagaaaaagtacatacatctcctatatacattcttatatgggaacaatatccagtaggcaccaaaatggagacccgtttttcttgtagaacataatttctcctttgaattctgttttctcctccagtgacttttctatttgaagcatcagttgctcattggtttcaaccccaaataagaacttgcagctacaactcttctgcatgacttcagttcgggcaaatccagcaagctcgcagaagccatcggaacagtagactatggggaaacccttagccacctgggcattggcaaggatgaagttgctatgtgttccgtcaataacgggtggcgatggtgtccaggaaggtgttttgcggcgtccagtaatcctttcataatccggcatttttccagcgtggtgtgatattctccatctaaagtttgtccagaaggatgattctataaggaaagttccaagaagggcaaagaatctagccgggatactactagagtcga

SEQ ID NO: 456105 - DNA, 324 bp, Homo Sapiens
tggaatactcttttagccaccttttgtttttgcagtataaggaggaatgagcattgaatgaagacaaggcatgaagactgaccatctaaacatctgttagtgatagtttgggttttattttggggaaattcagtgctcttgcaaaaaccaaatggttttgtgggtctggcgctggactgagcgttgagaatgtggattctggtctctgttttgtcattaacagagtggccagttttgggagcatcccttacatctactctctgcttcatatttactgcctgaaatagaggatttcttctgtttgctttcaaccaaagaatcgtg

SEQ ID NO: 456106 - DNA, 164 bp, Homo Sapiens
tacatctatgcatcctcattttaaggactcctgtaaacgttaacgtttaagtcggaaattgtagtctgcaattcactttctgttatagttcattttgattatataaatccttttctgaaggaatttttgccagtctgtttggacctaccaaatggagacctgta

SEQ ID NO: 456107 - DNA, 410 bp, Homo Sapiens
aaggaggtagaggagccaggtgccgatggcactttttgactcttgatagtagaataaggttgagtgtgagggcaaatgtgagagcgaggacagctatggagagatttattaaacattttcttcctgtccctctggtctatcagtgtgttaaactgaagaaattagaggaatcaaaacacctttcctgtcgtgaaaggagtgaatctgttcagggaagcaagagttaaattatcaggaaggtttcttaaccgtcagttcttcagttaatttacctacaaggaatttgtatgttggcccaacttaggtggttactatgctgagacaaaagttgcagagaagtatcagatgtaagagaatcacacctagatgtagtcagaatttatatttgagaaagatgcaaagaatgcgtg

SEQ ID NO: 456108 - DNA, 120 bp, Homo Sapiens
tcacgattctttgccaactatttaatttcaacatcagaaagaattaatctcgcttgaatagcatacatagctaaatttaataaattacttcattctgagcagctctatcaaataatcgtg

SEQ ID NO: 456109 - DNA, 449 bp, Homo Sapiens
gggtcacttctttgcgtggaagaaattgctcctgtacatctgatgccaccccagtaactcatggaactgaaagctcttggcatgaaatagcagctacatcaggtgctcatcctgagggtaatgcagagctctcagaagatatatgtaaagaatatgaagtaatgtattcttcatcttgtgaaaccacaagaaatactacaggcattgaagaatcaactgatgggatgattttaggaccagaagatctgagttaccaaatatatgatgtttccggagaaagcaattcagcagtttctacagaagacctaaaagaatgtctgaagaaacaattagaattctgtttttcacgagagaatttgtcaaaggatctttacttgatatctcaaatggatagtgatcagttcatcccaatttggacagagccacctttagaaatggggatcctcaga

SEQ ID NO: 456110 - DNA, 145 bp, Homo Sapiens
tgaagagataagaataattttaagtattccattaatgttgagatgcaaatttatctttttataatgagtgagggtataagaaaccagtttatgtcctcaattgtttaaatcaccaggtaaccccctgtgatgcaaagaatcgtcc

SEQ ID NO: 456111 - DNA, 215 bp, Homo Sapiens
tcacgattctttgcctccttctccatctagcacactggtgtttacaccaggttttttcttgcctgtaatgaagggaggataaatggctaaaataaaccccttctctctttcaaaatctcaatttgcttttgactcaggcgctcctaacagagcaacaatcaagcatcggtccccaggaagacaaggctgtcacgactggaagaaagaagacctgc

SEQ ID NO: 456112 - DNA, 437 bp, Homo Sapiens
cacgatacattaagaccacaaggggaccatctccccttttgctgtttcagttccctctctacccttccaaaaccattgtactgttattatcggggtagagttggagaatgatattgtgcctgtgagatctacatctcctgggaacttttttattagcgcaacaagctcagagatattgataccagcctttcacctactgggtacccagaatattcaggctacaaggtggttctggattaagagaacgccggtcttcctggttaggtagtggggtaggttacagctcaggagttcaggatacactatgactgacaacttgatattcccttgcccagggtcggctgcaagggtagctcaaagtgaacaagaacaggacaacggcaaagcagaggcggcaccaaacgaaaagcactagcagctgtaccagccataaggcc

SEQ ID NO: 456113 - DNA, 123 bp, Homo Sapiens
ggcacgatctttgccagcctatcagctataaaatcaagccattcggttacctcctaaagtgagaaagttgttatttctcccagttaactagtttttatatcctagttgttagcaagaatcgtg

SEQ ID NO: 456114 - DNA, 170 bp, Homo Sapiens
gtgactctagacgatcccctttctccacactggctagccggacaggttgcagaacgtgtctcctccccatgtcgctctgtgacccgaggggtgcgcatggcatgagcgctcactcactcctgcctggaagtgaagggctgctaggtggaggtcagcaaggatgttgagtg

SEQ ID NO: 456115 - DNA, 338 bp, Homo Sapiens
ctctctccacactggctgcaaaagtccaccccctctagacctctgcaaccacagaatccccagcccaaaggcctttgctggtttgagttgaattcagtgtgaactgaaggaaaaacatcatctattcacacctcagagtgaccatccgagctcctggtgactggaaaaaagaaatgggtcaccctttggcctgcgaggactgggcgggaggccccagcccaggcgacacaggagcttccacctcccgtccccgcacctcccatctctcaagttctggtacacacactgtacgcactgccattccaatgatctacccatgttgagagaaatgtctcagt

SEQ ID NO: 456116 - DNA, 595 bp, Homo Sapiens
actctagaggataaacctactttagggagagaggaattgagggagatagtgccacacaatatacaaatccaaatgtttggtgtccacaagtggttggtttgcagtgtttattgtggcaaaagatgttctaaatattataaacgtatgcaatcgttgtcctcttccttgattattgctcatttctaaaactcttgaaacatgacaactgcttatttattaagaaaacctgacaaggtttgtcttgttttccccaaatcagctctgccagatagatgaactaaagaacctgaggttagcagcaaggggaacagttgaaagtatgtgaatacagttaagatgacagagccctcacagggaagagtaacttcaaatcagttctctaatggggtgaacagtatcttttgtacagtaagtttctaaaggaaataatcctggtccatcttttttaagctgcaatttagcccatgaatgaaagctgtttccttgctccttagctggcatttcctttatacgtctcttcagaattgacagtcgaatgtatcacagtgatcttaaaaagatgtttctgaatgtaatgagttgattcaaattactt

SEQ ID NO: 456117 - DNA, 150 bp, Homo Sapiens
tttaatgtgtttcatttaaagcagaagaagcatggtaagcagtgtatttaagtggttccattccacacttctaagcagtgttaccttcatcatgttttgcaaaactctgaattgaaaggtacacctctctacctcttatagaaaaaaaga

SEQ ID NO: 456118 - DNA, 396 bp, Homo Sapiens
cccgttacagccccagcacttagctgagtgactggcacctagtacgcactcagtaactgtttgctgaataaatggaagaatggtcaaaaggctcttcttgatctgatccctgcttgtctgtctggcctcatgcggccactattcctcactgcaccttcagctcaagaaaaacctctgtacttgcttctttgaagtgccccttgggcctctgtgtctttgtacctgttgttccctttgcctgagaacaccctttgctctgcccgtctaacatggtgaattcctaatgcattgatgaagtctcagctcaattggctacctcctctttgaagctgtgcctgagggcggtaggcagatgttctttccgccttcctggtcttctatccgcacttttgtatc

SEQ ID NO: 456119 - DNA, 511 bp, Homo Sapiens
acgcactgtggatcagtttcatcttcccactgagaacattgtatcttcttctatgaagtacttaagtactaaagtactccttaatgtactaaaactaatagtcagagactatcatcatagggataggaaaaaaggacataccataccttatgggtcagcatccccaactcatggggtattatatcccacttaggcttggtgaatgattgttcggcagtcatcaaacaggcaggaggctgtgatgggtaggccctcttgtaactccactgtgtcccgtgtgcctatactcatactgtatttctcaccacaggttgggatatatcttgctgtaaggcaagtccctacccagttcttctttggctttttttagccaatttcatttctacaaatgtcttagaatcagctagtcaagatacatacatgccatgcattaaatccataggtcagtctaggaaggaaagtcacaacaatattgagtcttctagtccaagttgcgtggggtaccgagctc

SEQ ID NO: 456120 - DNA, 266 bp, Homo Sapiens
aggactctcacacgccactgggcggggttgcacaagagttaagcctataagagttcattaagctatacatttattttatgtggttttcaatatctgtgttttacaactaaaaagatttttcttaaaaagttatagaatccccattgcctacaaaataaaacccaagatactaagcataaaataaaggccttttataatctggtcccaaattagacttcatcttcccattatcatgccctctcttatttcccttatctgccaccact

SEQ ID NO: 456121 - DNA, 290 bp, Homo Sapiens
gtactgataggttgtagttttctccgtaaacatgcttcgtgaagccagagaactcccagaagatcgagttagtggagaagagcacctttccaaaaattcgagggaactgtcttcatagtctgaatagtctgcaacataagatacagaaagaaatattaataaagtgtcagataattaaggtcactataaaaataacgaaagtcatgtttcaggatacaccaaataatcatgctaccactttcgcttctcatccatggccaagttgcgtggagatcctgctagagtcacct

SEQ ID NO: 456122 - DNA, 411 bp, Homo Sapiens
tccacctggaataatttgtttttaatttgttttgtgtgtaatagtcccactaagtagttgttagctagaagttaagaaggacttctcaagtgccctgtatggctcagaagagactccatggatattgaagggcctgtagtaaaaatccagaatgggtcaggggtttctacgttgcatagtggtcaaagctgcccaggtactctagtgcggcacgataggaaaactgatattgatcctctgtctgtaccatagctggtcgttgtgttcttaacattttgacagtctggaagatatctacaactccttcatatctcattctttccaaaacaatgcttagcgttatgaagactccagttcttccaacgcccgcgctgcaatggactgaaatgggtccatcttggccaaactgtt

SEQ ID NO: 456123 - DNA, 723 bp, Homo Sapiens
  misc_feature (118)..(285): n is a, c, g, or t
ttgtgtataagaatctgagctggtattataagaaagatgttaatggctcacattcttcaggctgacaagcctgtgccaccatctgctggacttctagggagggctcagggagttttannnnnnnnnnnnnnnnnnnnnnnnnnnnnnnnnnnnnnnnnnnnnnnnnnnnnnnnnnnnnnnnnnnnnnnnnnnnnnnnnnnnnnnnnnnnnnnnnnnnnnnnnnnnnnnnnnnnnnnnnnnnnnnnnnnnnnnnnnnnnnnnnnnnnnnnnnnnnnnnnnnnnnnngataggccaattaataaccctataatagcttctaagtgttcaagtgaaaggaagagttacacatctctcactttatatccaaaactggaaatgttgaagcttagttaggaaggcacgtcagaagctgaaatgggtcgccagctagatctctcgcagcaaacaaccaaatcatgaaagccaaggaaaagtttttgaaggaaattaaaagtgctactccagtggacacatgaatgataagaaaataaacagccttattgctgatatggagaaagtttgagtggtctgggtagacaatcagaccagtcacaacattcccttatgccaaaacctaatctaggaagcaggccctaactcttcaattctgtaaaggcagagaggggtgaggaagctgcagaagaaaagttggaagctagtggagagtgagtaaggagggatgag

SEQ ID NO: 456124 - DNA, 492 bp, Homo Sapiens
cttttcttatcatgaagcactgtaatattatcttgctttccattcattttgcacactgatattatatttgttaagttttaatttggaggtattttatatatgccaagctggttttttgcttttgtgttttcagaatcatttaatgtcattgcccttgtcccaaggtaccagccatacataaattaattactttgaccagaaagagtactaatgtctctcagcactgtggaatctcatgaactacagggaagccattcgccttcttgggtctcaatttcctcttctgtaaagccagagggtagcattccagagtgtcatctggttctgagcttatagtttctaaacatgaccctgagtttctgagcttgtggactaggccagtgcaatgaaatactgtgcaatgggtaacactaatttaacatgtattgacgttttttcttttacgccctttgatttgctccctgcctcaaatatgtggtgtttttatactag

SEQ ID NO: 456125 - DNA, 174 bp, Homo Sapiens
aatggatgttcacccttcttttcctattataattcattcagatatatgctgctggattataataggaaaagaagggtgaacatccattaggtgaaaagagcagtccagaagaatataaagtaatgccagtagattcattcctacactgtcagtgtaggatgatctaccgggccg

SEQ ID NO: 456126 - DNA, 473 bp, Homo Sapiens
ctccacactggggagtgataggattgcggatgcccgccttactcttcaagtttttctatatctgattgggtttcctgaccctgattgctggtactgggtaagaatgactctgaattcctgagaaaagggaagagggttaggacagaggagatggaatgatttagtcaggtaaagggagcaaagccaccgaaggcagtggttggaggtgtagatgtgaggaagttgggttgtagaccattcaccatcaaggctctgaagatgagtgtctgtttgtgtgtgtcatgttggctgtgagttgcagaagagagtatctggcctctagttgaggagcacttccggcctctgagctgaacatggtgtagaagagaggatactccatcctcaaccctggctatctatgcagatggactgaccagttctacccatgtacccttccttccctcacccttcctcacaaaccagtgtggagagag

SEQ ID NO: 456127 - DNA, 581 bp, Homo Sapiens
attgaccactgtgcgctcattccctcattatagtgtccagtgtgcactcacctggcctcatcatagtgtcccagtgtgcgctcacctagcctcatcatagtgtcccagtgtgcactcacccggcctcatcatagtgtcccagtgtgcgctcacctagcctcatcatagtgtcccagtgtgcactcacctagcctcatcatagtgtcccagtgtgcgctcacctggcctcatcatagtgtcccagtgtgcgctcacctagcctcatcatagtgtcccagtgtgcgctcacctggcctcatcatagtgccccagtgtgcactcacctagcctcatcatagtgtcccagtgtgcactcacctggcctcatcatagtgtcccagtgtgcgctcacctagcctcatcatagtgtcccagtgtgcgctcacctggcctcatcatagtgtcccagtgtgcactcacctggcctcatcatagtgtcccagtgtccgctcaccgagcatcatcatagtgctcccgtgtgcactcacctagcctcatcatagtgcgccagtttccacttacctagcctcatcatagtgtcc

SEQ ID NO: 456128 - DNA, 237 bp, Homo Sapiens
gcacttctcaacagcaagcagtgatagcacagcctccgcagccaacgcaacctccacagcagccgaatgtctcctcagcataaagctttcttaagcctcattaagaaaaaaactgaaagcaatctatccttgtgtgccactggtgttctttccactttatacgaaagcaagtagccatgctttggttgtgtgtttgcccttttcagtattagacaatcatttctacaggtccgagcc

SEQ ID NO: 456129 - DNA, 450 bp, Homo Sapiens
actccagcactgacagaatttctgttctttgaagtgtatatatcggttataaagtgcctttagttcaacagggatttggggaaaagttttatctgacatcagtatgtatgctgttgatccaggaatgagggagtccactcggctttggtattcttgccacctggagtccacttccgtagcactgatcccttctccaccctcaggaactttagggaaggcatcataaatcgaagacacataagtgattacagacttttcatctggagatggcacatccacatcttctgcatccagcaggcgagtgacccccagtctttctgccacttcaaaagcttgttccagattctctcggttacttgggatttgcaccctctccatgtctactagatcgggtcggtatcggtgaatgagtgcattgaacatcttcccatcactccagtgtggagagag

SEQ ID NO: 456130 - DNA, 590 bp, Homo Sapiens
atatggtctattattaaagatgtaagatatatatcacagagaagcccattaactttttaaaagagaggaaaagttgagtgtaagtagtgagcccatggtgaagataaaatgcactccaaaataggcatcagagagcacataagtagaaaaccattaagattgtatatttaaatccaactacatcaaaattacattaaatgtaaatagtctaaacacttcaatgtaaaaacagatttttcaagatgaattaaaaaaggctgtctagaacaaacccattttaaataaaagacagattaaatggatggaaaataatatacaaacactaaaaggaggctggagaggctgtattaatattagataaagtagactttggaatgaggaatactatcagagataaagagggcattatataatgattaaggggttcattcaccaaaaagttttaacaatcctaaatttacatgcaccttacaggaggttcaatacacatgatgctaaactgtaaaggagaaataaacatacttaccattatacttggagacttctactcttctctcaatgatctatgtacaaactttactcagtaagga

SEQ ID NO: 456131 - DNA, 190 bp, Homo Sapiens
ctctctccacactgggaatagtaaaatgtttgcttttggccaggagctgctcacctgtaaacaggcagagtcacagggccagccaggatgcaggtcaacgagccccaccccagcacagacccctaggaccagggacctaagagttcccacatcttcctccgtcacagcaccagttgagaggggatcctct

SEQ ID NO: 456132 - DNA, 140 bp, Homo Sapiens
gctggtgatctagaggatcccttatttatttttatttccaagcacactcaccataacatttatttagaattgatgtatctatgataatgagtgaaactggcctttcattttcatttttctccctgtttggtttggttatc

SEQ ID NO: 456133 - DNA, 498 bp, Homo Sapiens
attgaaaaaggtagtaaaggaaccctttaaagtaattaagaagctccttaaagacgcgaagaaatcatctactcctctctcattgccacttctatttctgtgtacaggaccatcatttttattgccctctgggcttaaaatctcaaagtagccttaacgtcacaactccccagttgtctcaaattctatccattggctaaatcctttctggatgacccagtgaaatagtagtcttacaaaaatccgtcttttcccttattaatttcagtacctcaattgtgggctttcattattttttatttgaattattctaatgtacttatttctgggtccttacatgcagaatattccccacatattatttccagatgaacctcctgtcaaactttccgggtatgatgaggccccaacttatttactctgcatgtatcttctcaactctttctctttagtttctgtcaaactccagtgtggagagagggatcctcagaacacgca

SEQ ID NO: 456134 - DNA, 509 bp, Homo Sapiens
acagatctgaggtcagttttggcttggagatatttggagaaccagaatctattttctatggtttaagagccaaattttagtctaatctgcactgttctgataaacaaattaaaaatgtgtccgacccagaatatggcactattgcctcttagcatttctcttccagttggaaaactgccccatattccatgctactttgttgctaattataaactgacctatgttgtttaaaattatttgtgagttatgaatatggcgtagccctagctttcatttcagatatgtttccatttacttgtcttttcaggaaaacatagctgttatattgtatttcaaatagaaatagaagcctgcatatgactatctatggtccaaaatattctctaaattttttccattcctctctgtaaataggcatctattacaacttttcatttggggaatagtaatatagactttgagaagccccagggtgaaagaagagctcatttccagtgtggagagtggat

SEQ ID NO: 456135 - DNA, 362 bp, Homo Sapiens
ctctctccacactggctgggcccaaggaataaggaatgtctcacacagtgtatccctgcgtggttgtccagaaaatgtaatgaagataaaaattcactaaaacgagctctatactttggttacttatgtacctgttaccactttcaaaatctacagacactccatgtggataagaactaaccactggtcatcaaataaaattatacaactgcaaaaacactacaaagtgatgacagtactactttcatcacacctgactattctaaatggatttcatttcagccacagctctgattattagcaagtattgcccagtgttagaaaactttgctttggttaagaagagaggtttgtatctattg

SEQ ID NO: 456136 - DNA, 589 bp, Homo Sapiens
cgggttataatactatgtctctcataaacttgtatcttgaaaaatgtataaataggactaacactctactctgtaggatgaagaagggaaaaccacagaaggcagagctctgtgcaaatggttttcttcaccggccagtagtagccgtattcaagaattcatcctctcttacaattgagatttctcagttaaaagtttcctgacctcccactttctttgcagttgttctgaacacttacatataccagatacacgccaaaagtagaagaaaaaaagttaaagaaaaggcagcattaaatttaggcaaggcttcgaagagttgatcatctggcaacatggctaaccggatgggttcattataaaaccggaagtgcagcattacaacatggggggaaacgggcaaggacagggaaggggtcactagtgaagagcccatgttaagttgattttaaaaaagaaagctagcaagcttcacacgatcttcttaatgctattacgtttgaaactgccagcgcttctttgcttatgacacttagctttcggataccttgcgagttcgtccactgttacagtgaccagtgtggagaga

SEQ ID NO: 456137 - DNA, 661 bp, Homo Sapiens
  misc_feature (216)..(225): n is a, c, g, or t
ggtcggtacctcagatctccaaactcttatctagccccaaagtacaggtctgaccacaggagggagcagcaccgcggctccagcatgccccaggcccggagcctgtgcctccctgtctcagtgcggggtgggcgcgttgagctgctttttttggagcaacttatttcgagaattattttaatccttaaattccatatttcttcagcttccctttgnnnnnnnnnngggaaatttgtgtttttaaaacagtgttagttagtatttttgtcctttccaaaacatattcacttgtgcttactgttgtgagacacacatgtatttttctagttcccatctattattccttgctgtctgtttctgacctgaaaagcagcttccagtgaagagctatcactagaggaacaggacttggctgaatgaattaggtttcattgagtttttaatttaatgtgggtaaagcaggctcaggagggctgaaatggacgaaacactggcacaactttattacttttctccagggtatggattataggggatcttttagagtaaagaaacactaagattcttggcattaaaatgcttcgattccctatttatagcagtgatgcatatttaattttccatattggactgtcataacggtttcctgatagaaatcccg

SEQ ID NO: 456138 - DNA, 214 bp, Homo Sapiens
ggtcctatactgacctttttggacttcaggtggctggagtgagccctgctcccccctggctccttcccagcctgggcatccttgagttccaaggcctcattcagctctcggaacatctcgaagcgctcacgcccacggatctgaagggtgaaatattctccatccagtggtttcttctttggctggggagaggagctggtgttgttgggcagtg

SEQ ID NO: 456139 - DNA, 238 bp, Homo Sapiens
caggtcgactgctagtaggatccaccggaaagagggtgcatgcctgcaaaacctctgaagaggttgtcacacgaacatgagtgaacgagatgtccttctgggggccccacggaggtagagattactgggaatgaggttgggtttgtttcctcatttgtctgcctgtctgtccgccatccatccaacacttagtgagctttgctctgtgctgggcatagagaatctaacagacgatctg

SEQ ID NO: 456140 - DNA, 587 bp, Homo Sapiens
tatattttcagtaacttccaagaactatgtgtaaattgtcttttagcttatctactagggagatttaatatagtgatttttattttaggaactgaagaggagtttggaggtcttgtatcagctaatcttatacttttgaggtacagacttctggatatcttgctaaaactaattgtatacatttaatagaaaagacaagcattaatttgcaagcttgtgaagaactggtgaagacactgggttttgaccggatcatgatgtttatggaggaacacttacatttcaccacagttacagcagccatgaggattcttgttgtcctactaagtaatcagtctattctcatcaagtttaaagaaggactcagtggtggaggatggcttgtatacagacagattctgtcttaactaataagagttggcactgtattaggtatgggacttttctagtcagctgcttgtaactgtgctggttgtgttttgttttattttaaattttatgtaaacttatcctctgcggtttgatcaccagtaaggagtatagttatgtctagtgaatgatagataggcagagcatactgatttcaa

SEQ ID NO: 456141 - DNA, 219 bp, Homo Sapiens
agttcaattacgtggcacctagcacagatgactctgttctggcctgtgggggcctattgcagaagctcagtccagaacagtagcctctcatacattttatttaacagcaggattcttgctaaaatagggtggtgcagagatggacctggaggtaaaaaagttaaggtctagttgggaggggatacagagagcctgaagtggttcaagaagactgatcgg

SEQ ID NO: 456142 - DNA, 405 bp, Homo Sapiens
ccattcagttcatttatttttttctgagcttgcatgagctgggatttctgagagccaacttactgtactgaaaacccactccctatactaacctattttgtagatatgaaaaggaattgtaatcttaatttttttcaaggaataatgtaactaacactttctttacattgccagctcatttgttctaaaatcttatctaaagatacatgttatggactaattgcttcagactttgaaatctgtattgttacctggtgtcttgatattctttattaattatgaacttggatgtatattccttatgaaagtggatctaaaactttgtatgtatgagaatcacatggggcacatactgaaatacagatacagctctactccataagaactgaaatgaggggatcctcc

SEQ ID NO: 456143 - DNA, 626 bp, Homo Sapiens
  misc_feature (89)..(98): n is a, c, g, or t
agctaatgtataaatatttctaaaggccattaatagtaacaaaataagtaggggaaaaaatggaccttctgtataaaaaccccttagcnnnnnnnnnncacaagttataagtggaataagttaataactgagctcgtaagtgtatctcataactataagagctacatgaagaaaataggaataacacacctggtatttaaacacaatcttcaaaattcttgcaacattaaacatagtaaaatgccagaatataaaatgaggtgtgctaatggtcacaggattgaggccagcattacagtttggggtgatttttcttttatttgctccctcactttgtttcctagatgctagtaggggtatctgggttgcttgagataccattttgcaattgccccttctctttctgcctaccatctttctcaggccctgatggagcttattggtagggcaactggggctgctttaatgttgaacttgtacttctttagaaactgaagtggaatcattgaaaactttcaataaagctttaaagttccatttacttttgaagcacagctaagctcctgctgaaggcagctggtttgttgcaaacttaaaattgaactgatatgagccggtaccgagcc

SEQ ID NO: 456144 - DNA, 519 bp, Homo Sapiens
tgtcttccccagttctaaaaagcattttaaatatttccattttcctctagacctctgaattgttttttaatttcctaatgaggcagcgggaaaagggtgtatgtttaattcatgtctttgtgttttattgttgacatgataaaaacattttttaggatgtgtgtattttgcctgtagttaatttctaatttcctggagcagaatggtctttaatatatcataatatatcttactaaagtcttcatatgtctttgtttaatatgagtaagtttaattttaaaaattaagacctatctcaaatctccgtgaggcagaaagactatagagtttagaaatgtgatcatgacacagtatcaaagatacttaggtagacatggtgtaactgcacagtcagccatttataaagctgaaactagaaaccagagcctcatttgttttatatacacacacaaatggatactgacactctaccaatatcatgcattacaacaattaagcacttcaccctagtgccgaatt

SEQ ID NO: 456145 - DNA, 521 bp, Homo Sapiens
ttggctgtcaggtaattttttattgaatgttggaaattgttaattttacatttggggtttagattttgttttcctttacagagtgtatggctctgttctaggggggtggacagttaattacttgtaaagccactttctattaaggtggttccagagaagcctttaccctactaaaattctgctaggtgtggcctttctagggtttctagtgaatgagttgagtgattactgaactcaccagggatacctctggctgaattcaaacaattcctgagcctatgtgagttctgcgaactttcagctcactgctcacaggtagatgtttgcctgcctcaccctacacatagatgtgtagagattcaccctacacatagatgtctttgtgttcagcaaagacccaagtagagggaggggggctctatgccgattctcgggctctttttctgtagagccccgttctctcccgaactcaaccctcagattctctgaactcatatactgtcctttcaactcagcaaatc

SEQ ID NO: 456146 - DNA, 154 bp, Homo Sapiens
aaggccaaggagcaaaggagaaaaccaatgtgcatccctgcagctgttgtctagcatataaaaaagatgctattattaataacattttgtcttattaacatttgtcctactgtgatttattggcagccagaagcccaagctttaggattagtca

SEQ ID NO: 456147 - DNA, 141 bp, Homo Sapiens
gtaccccacgtagacatggattttatttccagaaaatacagccttctaatgtctagcaaaggacacaagaaaactgtccacaacatgtaagaactcggatcctataagcacttcctgaggaatttattgggatcctctacg

SEQ ID NO: 456148 - DNA, 191 bp, Homo Sapiens
agtcttatagaagttcagaaggctaactgtgcagccaatctttttgccatctacctctcccattttcatgcagtccctgtaatctaacaacctctccattagacgagttacagtagcaattaatgaaacgccactttcccgccatgtttcccgctcaattttctttagtagaatactgttggaactgaaat

SEQ ID NO: 456149 - DNA, 440 bp, Homo Sapiens
ctcatttcagatctaagaagataagaattatgtgggttctgtttacatgttatatgttctgaacaacccaagataaactacagtatttgaatataataactggttagcaataactcctgaaataacattctcaatcacaaagcaaggtgcaaacagcaaagccctcaagctctcaacacttggttctgtggcaagcaaacactgtcatcacttcatctgtatcaaatctaacagtgcataaaagtatccagcccctccccaaaacctccagtctaacctcatctccaaaacttcttgccgggtctcttcgtatttcttcttccattcatttgcttcaatctctttagtaattatctagagtacaataaagcttagttttacccaatctattacaatttgcatttaagactgggatctcaggtcagccgtgtatactctgg

SEQ ID NO: 456150 - DNA, 393 bp, Homo Sapiens
gtactctgtctccagctcttccgggtcggtgatgttgtaggtgtctgcggccgtggtgttcctgcttcggctggacatggtggtgttgttcacttgcatgacatctctccgcttcctttcaggtctgggcacgaagatggagttgtgcaggaaattctcaaagactttgcggtattcagcctcctccttctcggcctgcttctcggcttcagttttggggcaggcgcagcaaggccctttctccccaccgcacacctcagtcttggggttctctgtgacctcctcaatgtcgatggtgccgtcggcatacttcctgatggggattttgtctttggagcagtaattgtgccggtaaaggtagccgtcctgagctgccgctgccagcgcacaatt

SEQ ID NO: 456151 - DNA, 389 bp, Homo Sapiens
gacaatatattagcagaatgataccacacaaaagtattacaggattaaggcatgtaacttctatggtagtccttatgtatcagcgtatacccaagttcagaaaccacaggtgcatttttagacctttacttagagaactaaaggcagttccaaccatcagcccatatggcgggattaatgcatgaaaaccctcagagggtgttgggacatcctacttccctgtcctcacccagtggaactctggtgtgtgccttgaggataaggaagtagagtggaaactcatcctatcattgagtattctcaatattttggccttccctctggaattatgagaaatttaacaaagtctccaggaacctttagaatccattgtccaacactgctagaaa

SEQ ID NO: 456152 - DNA, 344 bp, Homo Sapiens
ccgttgtcagtgttcgagagcatgcgagagcacctcaagttcccaatggagatgtacatcaaaaagcttatggagatcatcactgtggagaaccccaagatgccttatgagatgaaggagatggcactggaggccattgtgcagctctggcgcatccccagctttgtcacagagctctacatcaactatgattgtgactactactgttccaacctctttgaggaactcacaaagctgctgtccaagaatgccttccctgtgtctggtcaactctatacaacacacctactatctcttgatgccctattgacagtgatgacagcccgaggcccactgacacgcct

SEQ ID NO: 456153 - DNA, 522 bp, Homo Sapiens
gggatcatgaattttttcccagccatatggaagctcatattctttgcactcttctggagtctcaccctttttcccaagtcgtggaccaagccatgatgttgtctttgtgttatggtcaatgaagtagacttcgcccttctctgtataggccatttcccagttatcaggcaatgggtctggttcctcattgtcttcaggtttagttggctttgtgtcatccatctgctccttcagctcctcaggctgactgtacactggtgcaggataaggctgggagggcatctcccctgaggcacctgcacttttgtcttcatgttcactggattctggtgttactactactccatttccattgaccacaggcctctcttcctcttcctcctcaggaggctctatactggctttctccatgttgctcactgatttattcctcttccgttttccttcagcacttggagtggctcctggaagtatctggtctgttacatttaacaataatggtgctggttctgctggcggctt

SEQ ID NO: 456154 - DNA, 825 bp, Homo Sapiens
  misc_feature (225)..(519): n is a, c, g, or t
catcaaaagaagtgaattattttattgcttattactattatcaatattccttcgtaatggaataatgttacctcaatatgttttttatattttccaaatgtgcctcattgattataatatttatgctctgaattgaagtttgatattaattattactatagttagttgatatagggcagtgttaactaaaatttaagtgacatgtttctctctctctctttttgnnnnnnnnnnnnnnnnnnnnnnnnnnnnnnnnnnnnnnnnnnnnnnnnnnnnnnnnnnnnnnnnnnnnnnnnnnnnnnnnnnnnnnnnnnnnnnnnnnnnnnnnnnnnnnnnnnnnnnnnnnnnnnnnnnnnnnnnnnnnnnnnnnnnnnnnnnnnnnnnnnnnnnnnnnnnnnnnnnnnnnnnnnnnnnnnnnnnnnnnnnnnnnnnnnnnnnnnnnnnnnnnnnnnnnnnnnnnnnnnnnnnnnnnnnnnnnnnnnnnnnnnnnnnnnnnnnnnnnnnnnnnnnnnnnnnnnnggaacatgtttctcagtcttctttgaaatctggtgtctggtgaatgtgaagaatgtgaagaacacgaaggcagggcagagacactgtgctggtgttactactactccatttccattgaccacaggcctctcttcctcttcctcctcaggaggctctatactggctttctccatgttgctcactgatttattcctcttccgttttccttcagcacttggagtggctcctagaagtatctggtctgttacatttaacaataatggtgctggttctgctggcggctttggggtaccgtagtaattgtct

SEQ ID NO: 456155 - DNA, 504 bp, Homo Sapiens
  misc_feature (367)..(367): n is a, c, g, or t
  misc_feature (457)..(457): n is a, c, g, or t
  misc_feature (462)..(462): n is a, c, g, or t
  misc_feature (470)..(470): n is a, c, g, or t
  misc_feature (479)..(479): n is a, c, g, or t
  misc_feature (488)..(488): n is a, c, g, or t
aaatgacacagtcagtgtttttctgaaaataattgccaccttgttgctaattaaacatgatggattcggggtcctggtttgccatctgggccatatgtctcagaacatccttttttgtgatgatgccaagaagtctcccgctccgcgtcaccaggcactgccgaagccccagtttccggaagatatccaccaccgtttccatcggagtgtggtctgtcactgtaaacgggctgaggttcaggatgcgccgcagcttcaggggatgtgggctgttggccggcagctcggggggttcctccgtgaagtacatgatggaattgctcacaatgccctcctgcctctgtctggcgttctttatttgcgagantcagttccctccttttgggcaaatccaatggagggcgctcggagtctcttggagaccaccaaggggaagccgtttgtaagtcggttttcntggangaagcgtntgccacgtncttgagagngatgttgttcctgggt

SEQ ID NO: 456156 - DNA, 194 bp, Homo Sapiens
agtgatctagaggatcccatatggttttgatgagaaaaactgagataataagtgcaagtgattagaacagcccccaaataaggagctgaggtgtttctgggtcaaagttagcaacattattctactcctctaagccagtttgttttccatggtaaatagaattccgaccattgttttgggtaatatatttagtt

SEQ ID NO: 456157 - DNA, 580 bp, Homo Sapiens
tggcagcctcttcctgaagttcttgcagccggggatctggctgattcttctcatctcgaatggcctgcagttcacttttcagctcctccacctcacgggtcagctgcttggtctgcagagccaatccttccatctgttcagctgcatatgctcgtcctgccaaggcttctcgggtctcttctaacctaagctccaagtcctggcgctgggtcctctcctcctgcagcagcttctggagctcacgcagcatcaaggcatggtcactctgctcttgggcccgatcatgctgctgcgtgataagccgggctttggtttctgctatctgctcctgcagccccttcaattctccctccaggcgggccctctcctcctccgccttgttactggcatcctctaagtcctgtttcatctttttcttgtcagccaagtaagaagcctccatgcgggacttctcctgagtgactgtagccaaagaactggtcaaagtagccaactgagtcttcagctggtgcagtcttttgtccacctccccacctgcaaatggcccatccccactgacaacgggatcctctagatcacc

SEQ ID NO: 456158 - DNA, 263 bp, Homo Sapiens
attttcctgttcaaactgtgaggaaacagacacactgaggatgagatcatactgcacttgggccagagtctagcaagaaagcggacctacgctccaggaatcactgccgacgcccccatttccagctgcggcaacgtggcagccggtgctggacgaccgttagcattagtgtgaacaacgtccctgctttcaggagaaagttttacaaaacagctgtgctgcctggtaattgacttctgcatctcaaccactgacaacgcgct

SEQ ID NO: 456159 - DNA, 212 bp, Homo Sapiens
cttctgcacttcctagtacatgagccaataaagctcttattttttaagttatttccgattgggtcactatcattcaccataaaagattcctcactaataccgttcacacctcactaatttcatgcttcttaatattgcagcaattttcacaaaggcgatctctttctactactagattatgcatttcttgaaggcaggaaagacatgtctag

SEQ ID NO: 456160 - DNA, 596 bp, Homo Sapiens
gggctatacagtgttaccataaacattctttcacatgtattctaattaataggtacacatttctcttgtgatatgatgtggatattttcagctttaatatgatgctttaggaagataatcctgacattcttttcagcccatctgctgaggtttttgccttcaccacgccacagaaatcacttgtccagagtgctaaatgacatggccacttctcagtgctaaaccttacttggtctaacagtaccatcacacaatacccacctttctcttcctttcaaacactgtctttatttggcacctgaaatcccacttctctggttttctcccttcctttccagcttcatctcctgaacttctattagtcaattctctactctctggactctaaaccttggagagccctggggctcagttcttcatctcttctcttctccagtgacacctacaccctgggtgatctaattcaggctcatgaccttgaggaccctgggaatcgctgatggctcagcccagatactgcctctaacttgaggcccctatcctcaactgcccctcactaagcctccataagaatgcctccctctccactaatcctc

SEQ ID NO: 456161 - DNA, 478 bp, Homo Sapiens
ccaggatccacggtcagacacaccgagagctcccgcttcctgtgtccggctgcggatcgcctctacgttactcacatccatctccaccacttctgcagtgggtccttcatatgacattcgctcagtcctccagacttcagaggggccgagttttatgtgccttgcagcctggctcacatcctccagcacctgtgactgggcaaagcctgtggggctgctgacctccacagtggccgacactgggccctggggagtgcgctgtcccgagctgtgagaggccccaccagcaacctcgctctcgcctgaagggatgtacagctcccgggtggcccaacgcctgaagcgaatgccagcagccggggcctccgctccaccttcctcatctgggctgccaggcgctgggctgcgttgcctgctcaggctctcccgaaccaccgactccacagccttctccatcagcactaactacgggtgcgag

SEQ ID NO: 456162 - DNA, 230 bp, Homo Sapiens
tattagacatcagcccatttgggttctaaatgaaaagctaggtggcaagtcattgacaaaatcacccaatgtctacttaaatacatctgatatttcaaaatattacagcaatggtccttagaccagcagcattggcatcacctgggaacttgttagaaatgcacattttcaggttccaccttaaacctaccaagtctgatgtgctgggggtttaacaggcccccccagat

SEQ ID NO: 456163 - DNA, 169 bp, Homo Sapiens
cggaccctatagacatcagctacaaaaggatgggtggtccctcgggatttgtacccaaggctcggtctcacttagctgttttttctcttactttttttccccctagggaaagcaatatgtttataatttatcatttttattatatcagaattcgctcctgttaccttta

SEQ ID NO: 456164 - DNA, 174 bp, Homo Sapiens
catctagaagagatgataaatgtagtctcagataataggaatgagtggatgaaaggggctgaatatgagagaagaattgatcatgttatagtgaccagcttcaaatttccgaactgaaataatattatgagtgaactgttttaaatcccacccagtgatgtctaatagggggta

SEQ ID NO: 456165 - DNA, 283 bp, Homo Sapiens
  misc_feature (188)..(224): n is a, c, g, or t
ctccatatagacatcataggggagtggttgtttccaagggttaagagtatggctattgtagtctgatgcctttgttcatttggatcgtttaactctgttttttggagtagagacttgtcaagcacccccataattcctgtataattctctatacacaaaacagtgcaacaattctacagtctacaagnnnnnnnnnnnnnnnnnnnnnnnnnnnnnnnnnnnnngtgggtcatagtagatgtttatatttctgagttacataagatatttgatacaggcatac

SEQ ID NO: 456166 - DNA, 285 bp, Homo Sapiens
ttggtcttcctgcagggcaaagccaacttctcggagcagaattccgattaagaagtgtttgcgacaaaattcatttgtgactgaatattcaggcatatctttgtgaggaaggaaaataactcatgttattgaaaatcagatgatcactttataattgagacagatataccaaacaactaccatcaacttcttccaccactaggagggattcaggaatacagtcttgctacagaaatgaggtgtgttgtatcctcaaggagcattcagtaaggggatgtctaatag

SEQ ID NO: 456167 - DNA, 399 bp, Homo Sapiens
tggaccaagagagatgatgtccaactcaagtcaggcagagagacagaatcaagcttcttctgccttttggtcaataaatattcagaccctcacttggggaagggcaaacgcttaagtgagtccaatcaagttaactgtttaactggattcaaatgctaatctcttccagaaacgccctcacagcccaacccagaaataatgtttaaccagatgtccaggcagcccatggcccagtcaagttgacacataaaattaacaaagttaaccaaagcaaaagtttgtcttctttttctagggaaagggatgcattccacagagtcctaggatcctgggagacaggcctggagtggtgtgttccttctctgacccccaggtgatgtctaatagggggatcctcta

SEQ ID NO: 456168 - DNA, 604 bp, Homo Sapiens
  misc_feature (102)..(112): n is a, c, g, or t
agctcggtacctccctattagacattgatgtaatgaaaaacaaatgggagtgtatatattcagcccataccataagattctgttctccatgaaccatgtttnnnnnnnnnnnctattataataatttggcctgttgccctacgaatttccctcctgcctttcttcctccaagcccactcactagcccgtggatacctgcatgatacacaaaaaaggatgggagtgggaacccctgagctgtccaggctccagcatccagctgggggatgcagcaggtaatttaaactctctgagcctcagtttcctcatttttaaagcaaatacagcagagtttcccacatttactggttgttctgtatagcagaagagatacagcatgtgaaagcatttgaagacttgtaaagcccatgcatatattagttatgcatctttatggttaaaattgcctaagagaaatcaaggcctcagggatcctaaggggctctcccaaggtcacgcaggagtgcaaagtcagagcaaagattgagatagaaactttggactgaaggaccaggaaaataaaatttcatagttcacaagagaccatgagtgatgtctataggga

SEQ ID NO: 456169 - DNA, 281 bp, Homo Sapiens
tgttctagaggatccctccctatgagacatctcatgggaaatttaggaccaactttttccgactccagtaaaatcctatttatagaatttctttggtgttcatccttctctgtgcagaatagaagctttgtttttcttctggagaggattctataatgtgaaagctaacaaatgatcaatatttatcttttaaaaaccacactacctaaacatctaagggggcagaagacactccagtttaaatgtatgacttcgaagccatgatgtctattgggagtccg

SEQ ID NO: 456170 - DNA, 944 bp, Homo Sapiens
  misc_feature (161)..(224): n is a, c, g, or t
gcactggagaacatgttgtcaaactcaatgatgagatcatcctcccggtcaaagcgctcaaatcggaccaagggagaagcgttcatatcaggataatcctcatccaattccatctcagagccatcgtcgtcatcgtcttcatctccctcttcaccttcatnnnnnnnnnnnnnnnnnnnnnnnnnnnnnnnnnnnnnnnnnnnnnnnnnnnnnnnnnnnnnnnnatcctcgttactgccactgctgtcctcttcctgagtgtgctcctcctcatcctcagggtccaggatattcatggaatcttctcggttggcctgcaaggtggaagcttggctgaggttggaaggagcttcatccatcagcacgtcctcttgtgattcatcctctccacttctgctcactataattgtactgttcccagatccgccatccctctcaagcaactcatctatcaggtcctccagctcattctcaacctgcatctcttgtgaactgagcacctcaggctgcccagcaatcaccactgagtcggtttcatcctccccatccatgatatccccatctgccacctctgtctgagtgacatcatgatcctcctcctgcacttctgcttccccaggctcgcctgggtcctgctggttgctactggaatcttgagaggctccttgggcatcctgctcagacttgttcttgctagaagcactcttgctgccaaaaaggctactgggctggttcacaatccgggaaagtgtttccaaaggcttcagagcagcattgactgtgttggccatgttgggactggacaggtctaagctgtgaggtactctggccaggtcattaaccagtcccttcttcaggaaaagccgaatgatgttgttcatggcattgtgctgggtcttcgctgtggccctgctgtagaagctggaggtgggaggagaggaagt

SEQ ID NO: 456171 - DNA, 260 bp, Homo Sapiens
tcaagcaaatgtatgcctaatctccagtctcccctattcccaaacctaattgcctctgtcttggtaaatggcaactccatccttcaggatgttgaagcaaaaacaaccggagtcatcattatcacctctctttcatagcccactagtccctcagcaaattctgctgacttcaaaatacacccaaaatctgatcatgcctcatcacctctaagttacctatccaatcaatattaacaattaatcactaagacctatctatt

SEQ ID NO: 456172 - DNA, 144 bp, Homo Sapiens
tactagttgggttttaagtaagcttttgttcaatcctataggctaggaattcatggtcctgtgttgtaagaaataggtgattgctttaaataaagacatggaatattaattcaaatcaaggtaggttattcctttaggtacctg

SEQ ID NO: 456173 - DNA, 245 bp, Homo Sapiens
tcccgtatgtagacatcaggccagccagcaaatctgctaccctctgaccaacgtccctgattacaggagcaccaaactcttagagtcacagattcctaaggtcaacggcacctttaagttcattccgcccatccttcccccagtagttcagtctcctcttcgatatccctgccaagtcataaatagccccttttaaaatttctcaaggatcagagaagatgtctaatagggggatcctcgagagt

SEQ ID NO: 456174 - DNA, 310 bp, Homo Sapiens
tatctttcttaataatgtccagagaaagaaagatatttaacatttgccccaacacaactttttaaaaataagagctcatattttccttcacttatttcacttaatactctttgcagttctaatacctaaccttgtttttactaaccttgttttcagactgtccctttctcccttaatcacctagccttgtttccatgtgaataagctctcccttagctgagaaagccggaggaactccatttggttccttcatttacaggacatcagactccttacccaccccgtgtctaatagggaggtgatcctctag

SEQ ID NO: 456175 - DNA, 341 bp, Homo Sapiens
cgcacctgtacctgaacccttattttcttcctcagtgactttggtatgatcattggtcaaaaatgtttggaaatctttcaggtccactctgcatttcttcagctctctgtattaacttggcagctctgccagtatctacaagtttatggggagttggaagtggtatgtctaacagaagccgctggcattccgtcaaatttctgcttgaattcttcagccagctctggtgttttaaattttgctgccaaccgctctagtttggcatcaccgtcagagaaatcactggctgaccacatccatgctctatctgatccagagaggggcttcaggttcattgtagt

SEQ ID NO: 456176 - DNA, 418 bp, Homo Sapiens
acacttttagtacttgttctcttcgcatcagcattcttagtttgccattgacctcgttttttgagaatttttaagttccccaagcccctttctttccactgccttacctcagcatcaaatctaaatagttttaccccctgtgaatacagaactttttcaccttcttctcctgttacaagttctactttttcaggcatttgaactactggttcaaaatggatgtcatcgctgtcctcagtcttataggcatcatcatctttctcaaagtcaccggaagtgtttgctttattggccattttaccgtatcgtgatgagaataatttttctccagcacctgaaaatcccttgaaattgaggtcttttttgccaaactgaaatccttctcctgaagttgagaaagatgatgatgtctaatagg

SEQ ID NO: 456177 - DNA, 711 bp, Homo Sapiens
  misc_feature (297)..(341): n is a, c, g, or t
  misc_feature (423)..(528): n is a, c, g, or t
ctcccgtatgagacatactgtttatctttgtgtcagtatcacattgtttatgttgctgtagcttttaactctagattttattgacatttcgtgaaaaatgaaattttttgacccctgagcaagaatatgttgaagagtgtgtttcatatacacagttttgaatttgccagtttgacttttgcttttaattcctagtttcattcagtttttgttagaaaacacacagtgtgtaattttagtcttttttaaatgattgtttttgttgttttgaggcaagattttactgtcacctcgtgnnnnnnnnnnnnnnnnnnnnnnnnnnnnnnnnnnnnnnnnnnnnntgggctcaagtgatccttttacctcagttttctgagtagctaggactacagatacgcactagatgtctgtttaatggttggnnnnnnnnnnnnnnnnnnnnnnnnnnnnnnnnnnnnnnnnnnnnnnnnnnnnnnnnnnnnnnnnnnnnnnnnnnnnnnnnnnnnnnnnnnnnnnnnnnnnnnnnnnaacagcattttcacccaatcacgtatttttgaatttaataaaacttggtatgtgtcctaacagaatacaccagatgcaaataagaatattttgtattatcttggttttgactggaaagttttgtatgcatctgtgaagcctagttggtctataatatggtttggatatccatgttctccaaac

SEQ ID NO: 456178 - DNA, 222 bp, Homo Sapiens
tccctattagacatacttccttagcccccatcatagaaaataaaaacatttaatgaaaattatttaaataaagacatagataatcccactcagttaggcgtcccagagcaaaagactaaaatactatttgtgaccattctgaggccaagcttcattgttaagaacttgtcctggaacccattgcatgtacaatcaaatgttaaatgtgatgtctagatggag

SEQ ID NO: 456179 - DNA, 179 bp, Homo Sapiens
catcctattggttattttttaacaatgctttctccagttagtacatacattccacgagagaaagaatttctgtttgtgtgcagatttcactcactacctgaaacactgcctgcaagtatgttctcttctttggtgacttcccttccaattctctgctttctgccatatagcttctctgc

SEQ ID NO: 456180 - DNA, 249 bp, Homo Sapiens
  misc_feature (183)..(195): n is a, c, g, or t
gtcactcatcaaatcttcctgttgattctacatcactgaccttcctgaccatgatacgctgtcaaaaacaccatgtatctgttcttcctagaacttacacaggtctattttttatatttatttgtataattgtcttctctctcctgttcatcccatccctacaaattatagactatatgtccnnnnnnnnnnnnngggagggggggaccctcaagagctcgacgggcgggcgtgaaggcggggcagggg

SEQ ID NO: 456181 - DNA, 638 bp, Homo Sapiens
caggtatttggtttgatctttgtgtctattactatatgtgctaaatagtaatgttgttctaggctatgttccaagagttagcaacagtttgctttgtttcctaagtcttaaatctatgatcttaggaagtgtacagaagaatcacctgtaacactaaaaattatatataccttccctgcttaccccagcgatattctgatttcagagacattggagattttcaagaaaccatgtttttaaaaaggtgcaaatatgacaaacataaccctaactgagaaaactaccttactgaattcatacataaacccttatatcattttgactataataactgcacaaatgcatataatacttggatggcattggttaatattttatgctattatgtgcacttttgtgtaactttttgcaaaaaaattacaaaataactatctctgagatatgtcacttgcatatgttagtttcttttattagaaaatgcattaattaactttaaagaatgaagaacattgagataatcattgctatttatgtattgcatttatagtcctagtctatatggaagtatagcttcctttaattgaaagtattatccctatcagctttcctgaagtcctgtatgcttgattactatcaag

SEQ ID NO: 456182 - DNA, 217 bp, Homo Sapiens
cctattagacatcagtctgtagagctttttcacagctctcctatgacaacctttcaatcacttatcctcaaagaagtagacatttacctagactctgtgtttgctaaaactacccttggtcctttttattttgatattagctgaagtccttctctaacgtagttagtttatttgacaaatatttgttgacacctactgtgtgcgatgtctattggac

SEQ ID NO: 456183 - DNA, 299 bp, Homo Sapiens
tcatattagacatcatgtggtttcagtattaaaaacttaaaatattcagtgaccaattaatttggaggcaaaattggccaagtataaagttatgcaggggagaattcagatttgaacacagctaacttggaatctgagttcatgtacaacatatgtatatacaaacccacatgttgcatttgtgaatgtaggcacagagtgaaaattctccacgtttaggtccacaacacagagccatgtcacgaagaattaacacatgttctaattctcaccagaagatgtctaatatggaggtccgc

SEQ ID NO: 456184 - DNA, 250 bp, Homo Sapiens
ctagaggatccccataatcaggaacccactggtcacgtttgcttttgcccatgctctgtgtttggtgctttgaataatatcaggcggagccctttgaggggctgtaaatcttctccacaccatggcagtgcactcagaggggctgtgtggctcatgactgcagttggccacagattaaaaagctctaggaattatacctctcagcatctttacagacagagcctagaaggatgtctaataggggaccgcc

SEQ ID NO: 456185 - DNA, 294 bp, Homo Sapiens
cggacctcctatagtcatcatgtgtatgtttaacccacattgcttattatacaataaaggtatatgtagtagaaactacagacgttatgaaacatgttgtgcaccatggttatgaagagtctggcttacaaaaaatatataaactgcttactatgtgaccgacacttgttaattaaaaatataatccttaaatgacaattatttttattcttctgtatgtgtttacttatcctgtttgctactttgttctacttgatttaaaataacatttaatttggggatagtttatcccag

SEQ ID NO: 456186 - DNA, 312 bp, Homo Sapiens
ttgacactttactgttttcctctgccaggagagtaaatgagtggtttgccctctggtgcacaatccatttaaaagcgaaactattttaaatgcatacctttttaccagacagaaaagaatagttcttagtagtgggggagtgggtaggatatatgtatatggaagggcacagtgacatgtattagtatagggtcttgtttacttgtaagtattttcttcctttttgtcattcctcacaccatttacatggttagcactggtgatacaaagaagaaagaaatattcctaccgtcacgtgatgtctatatgggg

SEQ ID NO: 456187 - DNA, 235 bp, Homo Sapiens
ccactgggtgggtgaataactaactttggaaaaccaaccttaatacctttcaagtttttagataattgctagagcagttatatcagccatgttgatttcctctaaaaatgaattccagtgcctagtgtctttaaaaagtcaaaggcacaagagaaaacacaagtaaacaaggagactccgtaggattgaagatgtaatgacataatgagataagatgtctataggggtccgagcc

SEQ ID NO: 456188 - DNA, 464 bp, Homo Sapiens
ctcggtacccatctgggttggataggtgtttaaaaccagtgtgttgggtcagtctgaaccataggagggtacagagatggagagcctggcagggaaatacgctgacagattccacgtttcccacagtccattcattcactcattcattcattccacagatgtcatacaagtaccaactggggtcaggcatctgctgggtgctgggggcatagcagggaaccttgtccctgccctcttcagagctcaagtctggtggcaagattgttggtttaaaaaaccaaggtgtaacacatgtgactatgatcactgtaacagtaaaacagacttgaaagaaaaagtagcaaaagaaataggattttatgagcagaaaaaaaacctgacattacttttttcagtattttctatgagcaaattcaaacgtggcgaagctgaaagaattttaccgccaatagtactcatacacc

SEQ ID NO: 456189 - DNA, 443 bp, Homo Sapiens
attaaaatgctaatattagaataagtatgcattcataattatgttcttgtctttaaagttaatttttcaaacagaactaaatcagttttatcttcagtagatcttttagaaaggaagcaatcctacctcatctaattagagtttagtcctactaggaagatacactacaaatatttattgtggcaatctttgaaagcaaaatgaaaggtgattttggtttccttttctatatgttcttgtattacatttttcaggtttttctctaagttcttttctgtgatttttaacatcagggaggaaaaattcattcagtctacacacttaatatttcttctacacgaagtatcctcatggctattttgttattttgtttcacttaggggaaaatggatttgctctggcctcactatagctgctgtacttagactggatgtctaataggg

SEQ ID NO: 456190 - DNA, 501 bp, Homo Sapiens
aagagctaaaataatttccatgtcctgtattcaacttgtgtctacttaaaatataaattttaaatttatactaaacccaaaagagttataaaacttcatctgtgatatatgccctaatcattcagcagacttgtaattcctatcatttgagaaacttctaatttatttcgtttcatgattaataacagacttccggaaactgaaacaacatttctgtagggatatttatcagtatgtctcaaattaaatgcgcacattctttgcctcagcagtttcatgcctagaaattgttttttgaaatactgacacaaatgctcaaaaatgtaagtgtagggatgtttactgcagcactatttgtaatatcaactattaagaccgtccccaaggacccttaatagggtcatggttcaagtaattataggtacagcatattaacggagtactatcagacagcttataaacatgatattcagatggactgatgtctatcggcgggaccct

SEQ ID NO: 456191 - DNA, 192 bp, Homo Sapiens
cgtgtgctgtaggtcacatagccactctttcctggattgaggctttccagcaaaggggcagggacgtaaggctggcctgctggtgtggacagagattccagcaacatgcatgacctgggggtacaaggattgcttcctaaacaatgataagcacacgcgactgagcacacgcgactgagcacacgcgactga

SEQ ID NO: 456192 - DNA, 162 bp, Homo Sapiens
aggatgctctagacggatccctccctacttagaactcgatgtagtattagaggtgtactcaacggtgaagaagttcttaattctgtctagatcattcattaattctgtctagtaaaaatgtctggtagtcattaattctgtctagggaatgtctaataggga

SEQ ID NO: 456193 - DNA, 216 bp, Homo Sapiens
cctattagacatcagagatactattatctgtttgtagttttgggtagttctttgtgataaaataataaacaattgggaataaaagaaactctaaagttttatgttaagtcaaataacttttttctaaggaattattaaataattgcttcgttcctttttctacctcttagatctttttatgttaggtttcctgaaggcacaaggtacttctacagc

SEQ ID NO: 456194 - DNA, 351 bp, Homo Sapiens
atctttggtattctaattcatatgttcctgatttgtatttttatttttacatttctaaagttcatttagcttctgtttgaaaaacacaggtttgctggcaatagattctgtcagtttttgtttattggaaaacatactaaaaatttttgtttggtagctatcagcattggaaagatgttgttctactgtcttctggtttcttgttaaaagtcatgttgttgctctttcaaagggctttaaagattttccttttgtctttgtttagcaattttactctgatatgcttagatttggttttctttgtatttatctttcttgaaatctatgtgtcacttcatgatactgtggctt

SEQ ID NO: 456195 - DNA, 251 bp, Homo Sapiens
aataaaatttttattaagctgtgaatttgactgccctgacaactggtttgttcagggaaggggtggcagagctctttggtttcattgagagtttagagctattcaataggtagcctcctatatgcaggcagttagttgtaagtcattcaaagaatgaaaccacgagtagaagttaaatcactatactcattgggagcttaaaaaataaataaatatgattaaaagatgatgtctatatgggagtccgctaa

SEQ ID NO: 456196 - DNA, 481 bp, Homo Sapiens
  misc_feature (407)..(416): n is a, c, g, or t
catttttagtgatccatgtgaggtgtatgttctaaatttcatctcataaaagccaaataaggtctgcatatccaaccaagccacataccataagacatcacttctttttctataataagggccagtcttctgcttttagaaatcaccggctgttatgggatcacctccataattcttaatcccggagtcacttacccagctttgtctctgaccatcacctaagaataacctccagtgtgctgtggctaccaggttaaaataagtcatttctagtttatctagctgccctgagatataacccggatatgtccagctcagttagagaagtcatatttcactggatttagtatatatttactacccagtcaatatcggtactcaccaccccagccatactttccatcacnnnnnnnnnngagttggagttttgctgttctcgcccaggctgagtgccatgtccgatgatctctatcagcgatgg

SEQ ID NO: 456197 - DNA, 362 bp, Homo Sapiens
tcagtaacttttaagaaactcggggacaggatatggtagacataggtcaagatcactctaacagtaaacctgtgtgtgactgggacaaaactgcagggaatctcgacagattggtgttgaggaaagacagttctttcttgaacatatttaatataagattatatccatacagaagtgctcggttggcaaaagcccactgaagagagaaaaatctttaaagatcttagaggctatttctcaggaaagtgaaataatcttaagaaagtgtatgtcattcatgtgatacagataaagtgataactggagagattattctagttcatagaattggttccaaatgatgtctaatatgggagggtccg

SEQ ID NO: 456198 - DNA, 345 bp, Homo Sapiens
attacgctataacgacagaagagtttaaagttaacttctaaacatcatcgtggcttttttttccttgttattgttgtggctgttttgttatgctggctgccagaatcatggaattgaagcatggaatcggcactttgtttttcacatagtagatttttccttgaatttctgtgagatcatctatggattcctcctcaataaatcattctgcaaatatctgtgaagcacctattgtgtgcagagcactgtactaaagcccttcagtagcattggaggagtctaattggaggagacagaaaatgtaactaaggcatgaaagcctttctcatagatctctaataggga

SEQ ID NO: 456199 - DNA, 336 bp, Homo Sapiens
acatgtatttttcagataaaattagccttgttattttttattagaataccgcatctttgaaaattctaagtattctttttctcacaatagatacgtttctgaagagttctatagttttcatgcttttaaaaaataagccaaaatatgaatttgaaattatgtaacacatgtagcaattttaagagacctataaaccttaagccaaaaaaacccctatgtaaatagccttctttcagtaatttacatttatatgtttatcttataggaatgtatcttccacatctcgtaatgacacatatttatgatgtctaatacgggagggatcctctgaacagc

SEQ ID NO: 456200 - DNA, 457 bp, Homo Sapiens
atgttgccttggacataaaaagcaatgagtataaaatctgtagtttgatgacattttttcccttaagaaatttatggatgtgttagcagaatatagcatgatctcctgtactctctgtagttaatatttcagtcagtattaggagttgcttcattgaccttgaaaattttcttgttcatgagccactgcacccagcccagatggatttttgaaaagcctttcttatttccagagtcagaggtataaaagtctcaatgaacagcgtactcagccctaaccttagctgtgagcatcagacttagaatctttgtagatataagagaaacaggtaactgaagctatatggataaaggaaggacccatatactgcatatcttagattcaagagtacatcattatattgtctatatatttttagtaacattctccttgcccctcagattctgattggagggac

SEQ ID NO: 456201 - DNA, 182 bp, Homo Sapiens
taatacaatccaacttttttattgaaaattaggaaaatgaaaatatttataagctccagcgtggtcactgatggcctttaagtggctactggtggctttaaaaattaagattctaaaaagaaaggtctactcaaacaattgactacggactgagatcccaaacaaataactataagcccggt

SEQ ID NO: 456202 - DNA, 377 bp, Homo Sapiens
caatggtaaaagaagttataagaaaaagcagagcagtgttagaaagcctaaatctccccactatgtggaaatcaacttatgtaagagatcataaatattcataaaagtattggagatatgatgcaaaagttcattaaaatgtacaaagaaccagatttaaatggtttcatcctagaatagcacattattgaaccatataatacattaggattattataagaaaaattatcaaacattttataacttttcctaaacagcctaaattaatgatttatttggtttaattaaatggagtttattaaatgtttttaagtagataaaagcatgtaaagtctcttggggggaccttagctaacttataacttcttttaccattg

SEQ ID NO: 456203 - DNA, 405 bp, Homo Sapiens
ctcccgtattagacatcatatcggtctggcaacaaaggaatcaccagtttaagtaatatattttttaaaaatcaaaagcaaagatgtctgcagagtaatgagatttgtggtgtgattcataaattggcctaaaatcaatgatcagagttgcagagctagtagcattaaagaataattttgtaaaataacttgggataattaacatacaataaactgcacatttgaagtatataattatggcaaattttgacatatgtgtataactgtcaaactgtcacccctagttttggtagttataaataagatagtgaacatattcatcatctctgaaagtttgttcaggctcttttgtaattcgtcactgtcttacctctatccgttgttcctagatcaccaatgatctgc

SEQ ID NO: 456204 - DNA, 161 bp, Homo Sapiens
attttacaacgctcccaactgcttgtgttttgccattttgcctgctttgttggacttgtaagcttcttgagtgagggggtcttacatattacacatctttatacttccaattttgcccaccagtgtgctgccatcccactggatggatgtctaatcaggga

SEQ ID NO: 456205 - DNA, 518 bp, Homo Sapiens
gcgttctagaggtccctgccctgattagaatctttgttaatctaacaagcggctgagtctgtaagttagtttcattgaacactattttttctgagtacaggctgcagggtagattttcctgtttctttgtatactttgtataaaaggtgtttgaatataatctctgcccaatcgctggttgatcactgagctgagaaaacacagggatgacccctaggaagccaggctgaaaatatatatataagaatacaagaaccgagcaaagaatacaagtagttacacaaagcagagaagtattgaattctttatacaggtaagatgacagacataatacacagaaggaaagaatacagagacatatttgtataaatgttactatagcagcctagaggagaccatcaccagaaagcccagttagatcaccaggggagcttcagaggagacttggaactttagctgtgcttagcaccaacctcaactatgcatgctgagatacatagattaagggatgtctaata

SEQ ID NO: 456206 - DNA, 193 bp, Homo Sapiens
ttttgagtacactaagaaatgcctgcacagtcaatacctttcctattctgaactgtagaatgaagaacacttctttccagcaagaactgcctgttctaacccttagatctcaatccatcctctttctccatcctactgccacacagcccgggcaaccaacatccttcacctgatgtctatatgggggaccagc

SEQ ID NO: 456207 - DNA, 548 bp, Homo Sapiens
tactagagatcgatctgacagagcatcagattatatagaaattaaattaacaacggggaagactatgggtcttcacgcacaaagggtaagctaactgaaatcactcagatttattgggtggaaaaatgcacctttaaaatgcaaataattcaccccacagtctggaatcgttctgtctgtgattcctctcgtctggatgcacagctccatttaaattaattgcctaaagacctctttatcccattgccaagaacagcccatatgaggacaataaagagctgcctaaataaatacatggaaaaaataactttgagtcatgtttttccccagttaaaaagaagcatggtttatgaatgtccctgaaggactagtaatacctgcagaaattgcattaaaaaatagatacaaataaaatcgcttctgttcccaacccgtccagtcaggaaacatgaaatacacgtgcacttctccagttttctcagcttctggtacagcaaccgtttgcgttctagttttgttgtcactgtcagctttcagtccctggcctg

SEQ ID NO: 456208 - DNA, 371 bp, Homo Sapiens
gagctcggtacccatccattttagttttgtgtaactgattctataaattctttaaattggctttatttaactttgtacatggcagaaattttgccttgacattcaaatgagatcattaggagataccagtcagaaccaccatgtatgttggttttaaaagacacgagttaacaacatggatgatcctttaaagcattatgtttattatattaaatgtctaagaaaggccaatatataaagacagaaagtttggtggtgcctagggcaggcaatggggataactgtaaaaggacatgaggtttctttttaggataatggaaatgtcctacaaattagattgatgtctaatcagcgagggatcctctagacag

SEQ ID NO: 456209 - DNA, 514 bp, Homo Sapiens
  misc_feature (408)..(445): n is a, c, g, or t
cggccccactagacattttctagattggttctatcgttatagatagaggtcttaacctctttctcaatcttcaatattcatttgaaaaatgtagttcatagcatttgccactgcaacaagacactgagaaaacactgaaatagtaggggccctaaggtatttaatttgcagagcatgtccagtgcctgaatgatgctgaaaatattttttgatgttgatgaacctcagtgttcttaaacagaaagtttcttgacatgtggacaagctattcagctcttttttccagtaagtccaaacaggattgtgtactaatagtataatatggagaggaatatggaacaaatattggggaagaatgagctcaattttcattaaatgtatttcatcttctaagctcttccaaggacnnnnnnnnnnnnnnnnnnnnnnnnnnnnnnnnnnnnnnaagacaattccttttgggggccgggctggggggtcccgccggtgtatccccgagacttgggggagaggc

SEQ ID NO: 456210 - DNA, 446 bp, Homo Sapiens
agaggatccctcccgtattagacatcctctgcatgctgcatactcttagttttgctgtgtattcttttccattattttttaaatgctgggtcatggcttaaacttctcccttgccattcatttgattgttaacagaccataacagctatttggtggcttagccaaagaacctgcaaacacgtggggccatgatggggctaaaaggcaagattgaccttggaaagctaagattttattcttatcagtggttcatatacagcaaggtttcttagtgtcagctctactgacattttcttgtaggaaactgtcctgtgttgtagtatggttagcggcatctctggcctctaccaagtaccatccccccacccccagttgtgacaacaaaaaatgtcttcaggcattgctagtttctttgtattctttgtagtcctcttcccacttaaatc

SEQ ID NO: 456211 - DNA, 468 bp, Homo Sapiens
ctacaaacataaaaatatatatcttatcaatcttcctgtctcacatctatacagctcgagagaggcacctgcaccaaatcagccatagagagtctgtgctatattgctctaccactgacggttctactacatcttcatgtttgggcattctgccatcattaggacatttacccacgcacatctctcatgctacagaacacactccatttacacacagtgtacacatgcacacaccaagacacatacgcacacacactgcctctcaagaacacttggcatgaaatgaccagactggcaatcctaccaagtgttggctagaatgtggaataattagaaccctcaaacactgctgatggcacgcagaatggagcagccacttcggaaaagagtctggcagttcctcaaggctcaacatagagtgaccatatgacacccagccattccactcccgagtatatacccaagaga

SEQ ID NO: 456212 - DNA, 420 bp, Homo Sapiens
attttacaatcagctgtatccatttatgtcttcccccaccagaccgtgagttcctggaaagcaagagctgtgtcttattcatcttcatgttcccagtgcctgactcaaccaatgctctataaatgttgattgacagagttaattaagtctctgtttctttggttctgtctataccatagtttgcaggctacactcaacttatcccccaaattacctaacttatgcttttctctcttcccttaacctgtctttctaagatattaaggtttctagtatgaagccccagaattaaaacatctttcagttcccgtgggctccatgctgattggctggcccacacactggcaccccttcaggctctgcacacggcttccttagctacttgggcccacctattgcatctacttgtcaggcaggaag

SEQ ID NO: 456213 - DNA, 277 bp, Homo Sapiens
tcccgtattagacatcaagttgttctcccgtcaaaagaataaaaatggctatggcagttttaggtctcacatccacacatctctctgcacggaaggagaagagcttatcttctgccaactacccaacattctaggcttcattctattaggacaaacataggttaacaaaaccatctctgatccaatcactatggccagaagaatgccatgttctgactggctatcacctggattacatgcctatccccaaaccatcaatcagagaaagaggacaagg

SEQ ID NO: 456214 - DNA, 237 bp, Homo Sapiens
cctatagacatagtgacaatgctctttatgccagtgactctgaagaagaaggagggaaatcctgtaccctttgcaagagcctgcaggtgattttgaaacaaccacctcactgatctgggaattggtagccatatagggtcgccatagacgtttggggaggaaggaagtgttgtaatcttatttttattttatttatcgctcaaggcattatgtggagaattgatcaaagtggacaag

SEQ ID NO: 456215 - DNA, 284 bp, Homo Sapiens
ctagaatattcggttcccagggttacagtatctagatagtaaataattcagggaagttagtggtaagagatttctggatcatttctactgagaattttatttaacaagcattccttatgaaaaataatatctatgaaaaatttccttcatgaggaacgaaaactttcatttaatgaatgacaagggtatagttttaaaataaagggcaaaaatcaaaggttggtaaacgtgtgatctcagctctggaaaccccattatgcttatgtcacgtgatgtctgataga

SEQ ID NO: 456216 - DNA, 449 bp, Homo Sapiens
ggtcacctcccatattagacatccaggtgggttggggttatatttcagagtgttaaagccattgtttaatttgttaaactttccttttagaccaaaggggagtcattaatgctttttatgcaaggaagtaacacaaacagttctgattgtgatgtgaaaaggtgccctctaaagttgagggccaatagtagatttgaagactatttctattgttaaaatataatatcagctgtcactaattgaataacttactctgtgctttgtacttatactatgctaagaactttgtgcatataaagtcatgggactttaaaggacagaaatattaaaatctcttttttaaatatgaagaaaccaagatttaaagaacacagaatggggaaacagggacagatgtagataatttgtgccatttagacatgttaagcttgaagtgttgactgagtatt

SEQ ID NO: 456217 - DNA, 296 bp, Homo Sapiens
cgaggacccccgtatagtggctcaaatcgcaaacctgaggatttccgcggccgccggcagactcggccaggtttacaggaaatctgtcattttttattaaaatggaaaactgtgaagaaagaaaaagatagcagttgaagtcaaaattctcggatgactattttgcttttgaggagtcagcatttaaaaacgatatgctgatttggaaggtcctgggagtaaactgcaaactttattttttccattcaatcaatggattttttaatcattccttggagtcgatgaagttcggaaac

SEQ ID NO: 456218 - DNA, 586 bp, Homo Sapiens
tgtgatgcacagagttgtctttcttcgggatgacatttctgacatcatgtctggttactacagacataatgactccatgatattccatctcaatcacaccatatgacttaaaaattaaaaaaagagttttagaaagaagaaattgccatttttttctgcaggaaaggggaactgcttgaagaatttgaatgatgtaagtttgtctgaaagctttaaagatgataggtatcactttttacccattagcattataggatgatgagatcctgaatgtgccttgccacttcaaagggtcactggactacagctttcagaaaagactgcctgcaagattgtgaaggaggttcaattcccttcaggttcttctttcagtgcacttgtacatggctactacttttagaattcgccaaagtttcttaatgtaacttctaaatctttctatttctgggtcccccttgtacatttccatatagaacctcagatttcttttgtccttcttcaggcctacttgaatttctaggacttagaccggcttctagcctctctgcttacatatttatgccttatcactctcagatgtctaatc

SEQ ID NO: 456219 - DNA, 273 bp, Homo Sapiens
cctatagacaccttctcaaggatctccatcctggtccaatagtttcatgtatttgcatcataatattcttaatatgcctactccagcataagccccttgagaacaattcagcagagggatgtttttggcagaaaaggggcttctgcagatgcaatggaggggaggaggggagagaacagttaggagcctgctttcctcctccagcaagggtttcatggcaagagctgttgtatgtcagagttttcttagattgttagttttctgctttggttt

SEQ ID NO: 456220 - DNA, 280 bp, Homo Sapiens
taggcggacctcctatagaatccgtcagttaattcaacacatttctttttgcacttaacaggtgcttgaagtggcaggctccttcctctaaaacattttaaataacactagtagatgaattccagttaaggggaaaaggtatgtgctgaaagtaatcttcaaggccacagtatgttctctccaaacacatgttttcaccacgagggatgtagatctgtgtgcccttattggctttactttttcacttactggcatctcttctgaccaacatctttagtca

SEQ ID NO: 456221 - DNA, 213 bp, Homo Sapiens
catccctgcctagtaccatatgttgatatggtgacgtcctggtgtttactcccctttcctagatagtaatttttgttgcagtttcttatttttcgtcataattgaatgaaagcttcatatcaccaatctgatatcccacagcatctccttttagttatgtattattcttaaaatacaactccataagacacacccagtggatgtctataggga

SEQ ID NO: 456222 - DNA, 277 bp, Homo Sapiens
gatcggtgtagagaagctagatcgtgtgctcaaggcttcagtccaggctcttggccctgacacgatgctgtttgcctgttgaagatgtgtgtgcatgcatgcaccattcacactgtgaacgtgtcccagcatggccacaccccctccccgtatacacatatggccatgagcactcaatctccaaggtcgtgtatgcacatgcctcactcctatgcatggacggacactcggcacacatacttgtctctgcacacacacgcgacagcacacgcgactg

SEQ ID NO: 456223 - DNA, 517 bp, Homo Sapiens
tccctagtagacatccttccacgcatctactgatatttattggcacctactatacgcttgctctggacactggggaaccaaatgattatctgaacccatatctatctgatcctgaaggccattctttttccattagagtctagtgaataaactcatttaaataatttcatagaaaattatattactctatgattagacaagatattaaagagatttttatggggtggtgagactatgggaacacataaaaataggcatgaaagactgaataatgctagatttagacacttggcagggaagacccaagccattttgcttgataggtacttaaccccagaaacaacaaaaataataacaaaattttacagtcacattttctgattatagaactttggaaaaaattataaagaagcaaaatttatttttaatgttataagccagagataataactgtaattattttaaagtatgttctagtttctcccccattccttggctgcttcatagtttagctggc

SEQ ID NO: 456224 - DNA, 336 bp, Homo Sapiens
tcgctgatagacatcagagtcttttatacatgttttgaggtgctataatctctgtgtgtgacggtcagtctctcaggttcattagatggacagtgtaaaaggtattatgaggttttacatattatttatctattaagtaaaagaaatatatggaaattgaagagtagcttttatctattaaagaaaagaatgtatggaaattgaagggtactttctatttgtggaaagtcttaacattttaatttccttattgatcttgtcacagaagttggaatttaagttttgcctgtcactcaaagagaagctttttagacatttgattgagggattctagta

SEQ ID NO: 456225 - DNA, 287 bp, Homo Sapiens
aactacagtgccctttagaaatgtactgctatattataccttcatgggaaagtcatggatatactctcaatggcatcagaaccaaatgcatcaattcagattaacttatgaatattacaggtagttcttaaggttcttaaggtgttagtatcattatgatattaaaacacttgaaatagaagaaaatgagttttccaatggaaaataatgtttcaaactaaaatacataatggacccggacagatcgagtcttccttaagagtatgtctcatagggagggatcctca

SEQ ID NO: 456226 - DNA, 302 bp, Homo Sapiens
acatctccccatcagcaaaaccatttgaaaatggaccatatttggacatttatggaattacaagggaccaggctggggaatatgaatgcagtgcggaaaatgatgtgtcattcccagatgtgaggaaagtaaaagttgttgtcaactgtaagtgtcatcaccttttatcacgataagttctgagaaaagataaaacccttgaaaaattctgactgaaatttatgttgctgtttttaagaggttgtctattggtaaatcacctactacagcgagacgtgtagatgtctatatggaggtccgcc

SEQ ID NO: 456227 - DNA, 268 bp, Homo Sapiens
ggagggcagcgtacttcacaaggcagacgcagagacacgacccacgcaacgcacatggacgacaatgagaaaattgagaggtcttaaaacatatcaagcaaagaggaaaatgcagtaatattcacccaataacatgcattcttccataagaaatggatcattttaaatagtagaattatagcaccagtcaagctaccaaattatcaaaatttcattcagtttcatgaaatactccatgtagactgtaactgatgtctatatggacgta

SEQ ID NO: 456228 - DNA, 412 bp, Homo Sapiens
taaaaggcaaatactttttaaatgatactcaaatagacattcaataaaaccacacctttcagacaacataatcatttgcatcataaaaaactctagtggttcaaatttaaaatattggttaaaaagcttcagttggatttcaaattagcctaaaaagaaatttccatcttaataaaataggcaaaactttccttttaaaattacaacttattttgttaaaaaatgtgttcactattcttgaaaaagacctaaaatggatctttcagaagagaaagcctctcctattttaaattgaacccagtggagcatggaagacacgattccaaagcatccagggaaaaagttgaataccaaatccatgattcacatgtactcaaatacccagaatttggggtatgtctatatggaggcc

SEQ ID NO: 456229 - DNA, 230 bp, Homo Sapiens
ctcccgtataagacatcaatattcttctgaattcgtcatcttgcttgatagctagttgtttccccttcatttgctgactataaaaccgacatgcagattcactcagtcttcgtatttgcaagacttttagaacatattttttccataccactctgaacattaagcaaagctgttattgcttgttttaaacattccttgtcttcttgatcttcacttttttcttctaactg

SEQ ID NO: 456230 - DNA, 328 bp, Homo Sapiens
ctattagacatccaccaagagctgatttaggccaaatctccagaaaaacataaagcttcaataatgaataaaagagaccagaggatgccaaattccacaggaatgtcagattttataccacctcatagagtaaatgggagccaagttagccagaggtagattgattaagagtaattatgaagagatgaaataccctctgactctgaagacactaatgtattaatctgtggaataagaaagaacataccagaggcctcatctgatgctacacagtgcttaccctcactcggaatcgatctctattctaccgtatatagatgtctaatca

SEQ ID NO: 456231 - DNA, 411 bp, Homo Sapiens
cctacagacatctatttgtagtagttacggatttctgttaacaggtcttggatgtgcaagtgacaagttctacttaattatttgtctgtaaccaaactcaagttctattttgagtcccattcattatctcagtaaaaacttaatctgaaccaatttagaatcctcctaagataggtcccactatatacaagatccagtgggtatataaaaggtgagagtacagggtagtaattaattacctgtctggtaattaaattgtgtctataagataaatactgaaaaatccatcttgttcttgatcttagtccacacattttagtaagccatccgttttcctgtttctatgggttagttagtttaggaggccataaagggggcacagaaatgtttctgttgctgtgatgtcttatc

SEQ ID NO: 456232 - DNA, 406 bp, Homo Sapiens
ctattagacatttcttgtatcctctagtttagccttcagaaattttcttcatccactaatggcaggaaggtataatatataaacctcatctaaaagtaccataaattacacatatttataccaaatgccatggctcctggcattagatattaataagcttttacatttggctatcagtcccatattcattgaaaataacccttttaggattccattaatacatttaacattatttttgtctgccaaattagtctactctggaatatccttgtattataaagaattttcactaaatagctattttaatgaaaaagcattccggaaatgctttggaaaaaagctttggaaaaaagctaatatagtcatacttaaattttaactcatcttgaataactaatcacctatc

SEQ ID NO: 456233 - DNA, 321 bp, Homo Sapiens
tggcgttctagaggatccctgcctatagaatcaagagattgaaatcaaatatgtttcagcaaaatatgccaacacaaagtatagaataatgactctgtaataaacctaataatgaatgagtaaattacaaaaattttatccctagctagtggtgacttctaaaggggcaatttcagtaaaaattttaagttcaaaaaaatagtatctttaaaaatacaacgaagacatgaaactgggaacttctaagttaaaaaaactgttgagacaacatttttcagaccagaatatacaatggtttctttgatttttattccctcacaa

SEQ ID NO: 456234 - DNA, 214 bp, Homo Sapiens
ttctagaggatccctcgccgtattagacatcattcccatggaaaatcagtttgactccatttgcatattcatttcactattactggacaaataaatttggtttgatccccatttcaactgtttataatgttttcctagctccctcactgaatgaggtaaataaaatctttagtgcatgttcatttgtacatctgcaggaggtatagcctgcccg

SEQ ID NO: 456235 - DNA, 300 bp, Homo Sapiens
ctgttcctgttttggtaacttgtgtttttccaataaattgtccctttcatctaaattgtcagacgtattgatatgaagttgctaatgtccttttaatgccagcagcatctgtagtatctacccttctttcatgtccttatgctgatactttgtgttttctcctttttaaaaaaaatcagtattgcccgggcttacccattttcattaatctttctaatgaccaccttttgactttgttgatatttttctgctttttcacctttacttatagttgatgtctaagtagggagatgtctaata

SEQ ID NO: 456236 - DNA, 256 bp, Homo Sapiens
tctagttaaataaaaacataggtttcaaatttcaaatcacatcacatctaatttaacttttaattttaagggactggtccagatagtagctgagaaccattgtggagacacaaaatgggaacaagtttcctaagaaagctaacaggccatctggggcataatctaacaatgaatctcatctaaacccaatgtcccttggaatgaagtttttcctcttaggattaagacatttagttctatctctggcctagaactt

SEQ ID NO: 456237 - DNA, 412 bp, Homo Sapiens
gtttctagaatagaccacactttttcaccctgtgccaaaatgagaatgtcaaacataatttgaactgtttttgggtgactcgggaacacacaggaacagccatcatatcatacctgtgttttcataaagggcccttccgccaccccctgccttgactaccgcaaagtggtcccgtcacccttgttttctcttcacttttccccctgctgtcttcccgtcttgttggggctgggaaataggagctacttgggatttttcctgctctttcaccagcaatgccgggcaaatgtttctttcttctgctggtcaatgaatcaatcatagaatatattttgcagtttaggatcttaactacttatcattgttgtgttttaaaagtcttccatttcccctaatggatgtctaataagga

SEQ ID NO: 456238 - DNA, 536 bp, Homo Sapiens
ccgggtaacactgaaagaccctacatctactaaaacaaacaaacaaataaaagttttcagaaccactgaagctcctaaaagaaggccagccccagctgttgtaacaacgaccctccgtagccatgcggccctgcagtgccagagggttgggaacttgtctcagatatttcccattcataaagggacaggaaacagcagctccccttgctcacaagtacctgcacgatactattcatttcagtttcacacaaaccaacggataggtttgaacactatttttatccccatttcattcacccggaaacttgcttcatgaatttaagaaatttggcccaagtcatgcactactgagtggccaagtagggaacagaaacccagtttttgggctcaaagccacaactcatgaccactgaccccgactatgtctctgcctcccctgctatcctaccccaaacctgcctgatgatgcccttaagtcccagccgaagaagttctaattcatccttttcttcttgtttttttctggtatcctctag

SEQ ID NO: 456239 - DNA, 515 bp, Homo Sapiens
  misc_feature (109)..(122): n is a, c, g, or t
  misc_feature (413)..(413): n is a, c, g, or t
  misc_feature (460)..(460): n is a, c, g, or t
ggagtatgttatttattgtaagacatcatttttattaaatacactgtagtacaagagactttccatgtcaggttgagagaagctggtcacatgatttacaaacaaaacnnnnnnnnnnnnnnaaacactgtattcaggtgtcactttgaaatcagccaagatgcagtgggtcttagtaaagcaatggacctcaaaacagattgcaaaacaagaactggtaagtattagcacagagacatcacattaaaaggaagataagccaaatgaaaaggagagttccaaataccaggtcacgattgaaggggaaatatatctgtagagagatatggaaatgtgtgtgtatacggcctgggatatatacaaacatctctccaggatacaggaaggcaaatgcaggaatgtccacatctccnggggcaggatttgttaaggtcatagggtaatgattccaaggaacgcngggggaggcattagtttccaccataattttgggtccttttgttcagggggtttac

SEQ ID NO: 456240 - DNA, 475 bp, Homo Sapiens
  misc_feature (185)..(186): n is a, c, g, or t
attaggatacaccaagaacaagggaggaatatttatccctggatttagcaatgtgaagttcatgggtgatcttgacatgactagtttagctgagtggtgtgggtgaatacataactggggtaggctgaagaaagtggaaggaaagccagtacactcaattcttttaaggaatcttcctgtaaagnnaaaagaaaataaatgagacacttagagcaatatgaggtcaatgtgatgaggaattaacatttttacatggtgatggagtttccattagaacaggaaatactcatgaggagagagcataaggatgattacggctctgtatgtatacttctagacagagaggggatggggaatgagatctagtgcccacatgctgcgcttggcccttgctgggtacatagtcattggtagatcaagcagagctatgcagccaacatctattacacctgcgggcttgtataatgcctggact

SEQ ID NO: 456241 - DNA, 855 bp, Homo Sapiens
acctctacgaccgaacccaagcatgtctagaggacacagcacacaacatgtggcccaatcccccatgacacgcacctctgttgaccaatgacgtcctcacctcactcccgccatcacttcatggggattcactacaacttagggggaaacgcagacctgatttgtggatgggttgcttggtatactggtgcaggcctcactacagcctcacataggaacagcctgaaagacagaggtggagcagagccctgggcagggtatctggtcagctctgtgtgggggggaaaacaagttgcctgtgctgaggataacagggtcctaggcaggcacaaacggctggtcaggatcctggagggaacaaggtctaggtgagaggcagacagatgggccttgggaacaggcatggggtacaggcctttgttttgcaaaccaatgctcaccatggggcactaaaaaccaagcactgggataagtcgaccaacagatattggctagcctctgtcctcaccagacccagtgtccacacagcagacctctggatagggtgaccatcgtggccaagagcctctcagcagcatgatccagtcatgaccactgacgattatctaccgggaatgaacagacagcaacactgggcttccatctggtgccatgccttggggctgtcaaccagccacctagtggtaagctgattatatcagaacaccctctcctggaaagggcagtgatttgtctcatctgggatccacccacatcccaggtgtgggtttgcctttccttgtgcagtaccgtgccggcactaacatctcagagatttaccaacacaggattccatataacatcagcttcgagcac

SEQ ID NO: 456242 - DNA, 357 bp, Homo Sapiens
cacattgagtcattttaaaatcaaaaagcaacttgtcatgaacaagagatccttcataaaacagtggatttcatagcagaaaccttgccagatggccagaagggactgacataatatattcacagtgcagaaggggacaaactgccaaataagacatactatgtccagccaaactgtccttcaaaaatgaaagagaaataaagaccttcctaggcaaatataagctcagggagttcatcaccgcttgatttattttcaagggttgaaagggattcctctcacaccaataatcccagcactttgcctagtttccatcagatgtagccaaagagacaaaaaagagatgtcttataggga

SEQ ID NO: 456243 - DNA, 371 bp, Homo Sapiens
tgttatccagaggctcagttaccctatcaacttggtggtcctgttgtctcacacttgtatccttctgcccgcgagacctgagcaagccaggcctggctggctcaggtctatgctttaacttcttctctgcccggtctgccgttttgcagatggggtgccaaacctcggaacctgtgaggtacatttccttctccttcggtgaacatctggtggcagcgtacacacctggcacagtttgggtggtagtgcttccctcctgcctccaagactctgctcactgatgtatcggtcacaagtctcacatttaatgccaaactgggcatggtagtcggactcacagtatggaacaccatccttgctgatatactccc

SEQ ID NO: 456244 - DNA, 338 bp, Homo Sapiens
cgccgccttaaatacatgtgaacctgcataaacagagggacactggagtgtctctgttcaacctgttgttagctaacaagcagcacggtatcactagtatttatgaattagtgattggaaaattattcttagcacattttggatttaataggtactgggaatattttcaaacatatatgggatagataatcccgtttcctaatgtactctctggagtaatctgagattacttaatgctaacgttaagatgcagatactatataattcatggacccagccggaagttactgtcttagtccatctatagccatttgttcttgtgtcttttagttatttac

SEQ ID NO: 456245 - DNA, 752 bp, Homo Sapiens
  misc_feature (690)..(690): n is a, c, g, or t
gtgctttttgattggagtcctttgttgagtactttgttaattgaacactgcctttctctggagaaggcccagtgctttttagctccctctcactcctgccctttctagctctctctcacccagcgggtcagggatagcacctcttgtctccactatgcagatgggaactctgagccacacagaggtgaagtagcacttcagttactcaaggtcagtactctcggtattccaagtgacttagccacatttccttcagtgcaataggtgggtttaatgctctttgtacacagatgtattggctacatagcgtgtaaaaaccaagactgggaagccattcactaaaatccctcctgactcaaaggacctgtctccagatggtacagagtcccttgatggcattttacaaaaccagctctgacttccttatcctgaacagggagtttattttaaaaatgcttcatgcacctgttatttggctgaacagaaggctcactcctcaatccccttctcctcgccatcattagaggaatagactcagccttcatgtttgtctctggaagacgattggcgatacttgcaggaatattgttgatgcagccaatattaatttgagctaatggattgttaattctgaaacgaaaactgtaactgtagagcaggcttttactatgagaggtactactttttatnaatagaggatgtgggttgtgtggggttttttttgaaccgataacacaacatgacccttacct

SEQ ID NO: 456246 - DNA, 764 bp, Homo Sapiens
cggaagatacaatgctcttctttaatgtgagccccgctcagcactatgtcctggcgccgctcagcatctgcttggccaacccttgtaattccatctttgatgtaataaagtaggcactcagacattagtgggtcttcattgaggttaacaagatgtggggtctttttaggtgagaaaacccctagggttcctccatcttcccgaatggcaactcccatctcagccaacaaagcctctctctccattctgatggcctctgttttacgaagcttctcttcccaagtttcattcaactcagcaatgatcttctctgattcctttaaacgttccatagcttcctctcctccaggtgtagacatgatcctctcttgaatactggtcacagacgtcaagcccacctgactactgagtgagcaggaagatggggatgaagtgagggaccccatggatgctgtggaaaaatggccagggcgttgattctcagaggctagcaagtatctatgcttattgttctgaaaatctttcagatatttgcttccacttccagagtaatcatcgatcaatggatcaatatcaataatatctcccaggccctgagcacgaagaaggtccttcagccgtgtcacctcctcctttaattcacgaaccagtttggcattggggtcctcattgataacagcacttgcatttaatttgttttgcacgatctgcatatctcagagtgctcaaagtctcatcgtagttgatatccgctacccctgtag

SEQ ID NO: 456247 - DNA, 460 bp, Homo Sapiens
tgggcaggacacgagtgccccaccaatgacccagacgcttgatccccaggtccctggacctgacgggccctcttcttctgggaggtgtccccaacctccccgagaacttccccgtatcccataaggacttcatcggctgtatgcgggacctgcacattgatggccgccgagtggacatggcggcttttgtcgcaaataatggcaccatggcaggtaggcctgaagcttccaccagcttagcccatggccctgtccccatcatagggaggaagtggaggactccatacctgacttcaagcctgtctcctttggtggcaagcaccatgctacagcccagattttagggcctgactcttaccaaccccactcatcgaaagaaaatgggaaactaggggctgagatcttggtctctttcagcccctctggacactaaagtcctgtccagcaactagtgtccgtg

SEQ ID NO: 456248 - DNA, 682 bp, Homo Sapiens
  misc_feature (18)..(18): n is a, c, g, or t
  misc_feature (85)..(85): n is a, c, g, or t
  misc_feature (91)..(91): n is a, c, g, or t
  misc_feature (96)..(96): n is a, c, g, or t
  misc_feature (109)..(109): n is a, c, g, or t
  misc_feature (354)..(354): n is a, c, g, or t
  misc_feature (356)..(356): n is a, c, g, or t
aaacacccaactaagagncaccctgcctgccccaaggcctgtgggaaaacaacctttggatgttccaagaaaaggggttccattntccaanacccnggtgccttttttnatatgcaaatcctgaggtgtttccccgttaagaggagaggactatgcagatgatcacatgcagatgtctctgagctgtgagcccgatgacagctttgttggtacactctggccagccatttcacaacgcactatgaagagctgaaacctctgtttttaatctcttgtgttgtgggaatttaaagaggtgagaagatcacaaggatcacttctaggctcaaacttatgattatatgatagtttccnanccaagggcaaaaccaaatgtccaattttcacgtctccttccaaattcaatgttggaaggcaggtgaggaggtgaggagaagggcaggtcaaactgttccttatagacataacagcaaatttagagaaggagtactttactgaatggattgatttctgaatcaagtcacttttataacaccaatgtataagccctcagtaatggtaactgttaaaagtggttatttgacaaatacccaatattttagagaagttaaagaaagatggcatataccagaaaacaagagattataactacattctgagaatttatcttattcatctgcat

SEQ ID NO: 456249 - DNA, 670 bp, Homo Sapiens
gtaatttcatttagtttattaatatgatccaaacagatttagcttaagagatgaggacaggacataaaacaagatttggctgagctatataaagaaaaccaaaagagtgacaagattttcaattggtgacaatttaaagtcatttattaactaatataaaaataaatctacaatagaaccatgacttaaactgagccagtatgtggtacatgtgtcacccaaagtcagcaaggaaccattcagaacttacaccctcctggactggctcacacggcctgtctttgatctggaacctcatataagtcacctcacagcactgggtttgcagccagctacattttttctcctcagcctatgatcagttattaatacataccatttctatgtttcccatagcctctttcttttcagatagtgacagagctctagaaaaaactcatctggccagtactaaacagggaaggtgaaaaaaagtactttaagatgggtgtggggtcatttggggtaccaacagactcagataaacaagggaaccagagtgggcatcaacaaaaagcattgaggtaaggggcccagtggtaattcacagaaaagaccagaactggacaatattaaagtcaggaagaatggctgttacacttgaaaagtcacactagaagaacaacaaagc

SEQ ID NO: 456250 - DNA, 420 bp, Homo Sapiens
cgtgacgtggagtctctcatagtcatttttgaacgatctggtggcctctgactttcatttatagcatatttgtttttccattgtttcttctcttttctcaattcttcttttaacatttccctcagtttctgggttttgtatattcggtatctgtctgagcatggctgtttctcttttgttgaagtggcagttggctgtggagccgtctgtgattaattgtggataagggatgagattctgaaggaacactgacactagacttaaccaggctagaagtacttgatattcgctttcttctctgtgaaacagtagaggaagatctactggattcttcaacatcattgtcaccaccagtcttttcagtactgctcctaggagccttttcttggggctccgctccaccgaaatcgactgtgggca

SEQ ID NO: 456251 - DNA, 257 bp, Homo Sapiens
agaacgtgtgtgtgtgtcagggttgggaccagagcaggaacacaacgcaagaagggactgagaattgtatcaacgagtgcaaaagaagtcaaaggaattacttaggcataaaatgaggagtgttcctcagagatgatgtcagtcctgagaagccaaccaagccgggtactctgagtctggatccgacctctgctagatatatggtctgaggcagcagaggtcctatgagagtccacagaagtccagtatgccggtcc

SEQ ID NO: 456252 - DNA, 400 bp, Homo Sapiens
gctttcctcctagagatttctgccgagaacatacagaggtgcctagaagactcctggcttatctaaactgtagacaatgaatctctattgggaacctgtttttttcaccaacccaggtttcttggactacctgatcataatctcttctgattgtgtgaacacaggaataagtcagaacatagcgctgcctgagcctgtatctgtagcacaaaccagttccttaaccaattctgccctgcatccccacccatagttcttgatagcatctttctcttttctgcttttttcttccccacaaatcctctttcacgtgtacacagtgtgcccaaggccatcctttccagtgcctgaatccagtgcctactagaagtcagactgttaatgagtacaagactcacga

SEQ ID NO: 456253 - DNA, 472 bp, Homo Sapiens
ttttactctgaaggtaaatgaaattcgtgacaagcaggggcacatggaaagttctatgaggattagttcaatcccattggagaatccagaaagatttcatggatgagggaggatttgtactggattttgtttgagaaaaaaagactgcctagccaagttacatagaaggtacttggtaaatgctaaatggaatatcaataaacaagtaagtactgaactagatcgtggctttgatgtgtaagctcaagatagagtcaacagtacatgtgcatgagtgtgcatgcccgtgtgcacgtgtaaatgagagcatgatctgaacacatgtgtgctggagggtgtgcacgtatgcgtgcatgtgtgtgtgcagatgagtgtgcccgtgtacaaatatgtgtgcatgcctgtgtgtgtgcatgttcttctgcacaggtgacctgccctccctcctttgtgctacacacagaccgagccg

SEQ ID NO: 456254 - DNA, 270 bp, Homo Sapiens
caagcagcagcagcagcacccaggatttgtcagaaatgcagaatttcaggccccaccctagacacctcagacctactgaatcactatctgcattgtatcaagatccccaggtgatccacgtgccaataaaggtgaatactcactttactagaatattttggtggttcactgactcttccattcccgaatcatccactatctgttaacacactttccttgttatagactaattatcatattcaattgtttaaatctagttcttaccccaca

SEQ ID NO: 456255 - DNA, 434 bp, Homo Sapiens
tgggcctctgggacccgctccttccagctctgggacctgatactagccattccctccagccttgtcttgtaagatgtacatcatcttagcatacttaagaaattcagatagtccaaggaatacgtactagagtccaggatatcctgaagatgtgaggccactccttaactcaaggttcttgagggagtacccaggatccccgggcctcagcttcttcacccctgcaggacctgccttgctggcttctggtctgcacgtgagttgatttgcgttgcctgcctgggccacatgggcacagcaggtcctacccacatccagcctggctccttccacctgacaggccccctctgaattctcttctggggcattgggcatctttggctctagtttgctagccccgcccacttaatggaaggcggtcctctccgcttgtc

SEQ ID NO: 456256 - DNA, 405 bp, Homo Sapiens
tgtgggtgcaacaatcctgtcaggtgggcattgtcatcctcactttaaagacgaggacaccaaggcagcatagagattaagtaactcacccaagggcacacagctgcaatatttcatcaggcctaggaagcacatttttcccatattttcatgcttctgaaactgggatgcatctcataatcagtggcttgtcatagcttacttacagcattttcccctttcctcatggtacataaaatgatggtatgttttacaatcaagggcatcttgatgagatatggcattaagtggctggccttagaggtctcccttacagttcactcttgtgttaggcctgttggttgtaagtgacagaaatcccactcaaagggaaatttactggcttggtaatgggagaggatcctc

SEQ ID NO: 456257 - DNA, 485 bp, Homo Sapiens
tgttatgcacaagaaggttggtgggagagatgagttatgagccaggttctaaagagaagaatgctcactgttgctcatttataaaacaatcagttctggtatattttaggtatatagttgattctaggctttgaatctaaggtttgtattttcttcacacggctgattttaaattatatgagaatgtagcagaaactagaagtgtattttaaaactgattttggtggtagaacagttagcttaaaaataccagttaaataaaatttaatttcaaacacacgaatgatgaaatacacatatcccagaagtttgtttagggataagatcagcgaacttttaatggttcaattcaatttttgtgttcagtttacatatatgtttttctctcatatttgtttttactcatattttgtgttacccaagttgatgtgttctcaaaaatctaaccttcctagggcctagagcatttctttgttgctacccac

SEQ ID NO: 456258 - DNA, 388 bp, Homo Sapiens
gtgggtagctactagaataatagagaaaagtttaatacttcaaacccccttagcccagagagtaacaaaagaaacacagctgcacagtcaccacaaatagagaacaaggcagttctaatgacttttttgagttgttgcttttttacacactgtgaaactttgttctctaaaatcagttattagaaatttgctgtttgaaattctatcagtaagaaatatcagaaagactgaaatatcccactttcacctggagggcttatgtaatattttgacaccaagaagaagtatccatttacaacccaggtgctgagtttcaaagaaaagacttctgacacaacattccacatctactcaaatttactgttttccaaggaaatgcgacaccgtc

SEQ ID NO: 456259 - DNA, 390 bp, Homo Sapiens
gtgatagcacagaataataaagaacagtttaatctcaaccccctagcccaaaaaacataaaaacacagctgcacagtcaccacaaaaagaacaaagcagttctaatgacttttttgagttgttgcttttttacacactgtgaaactttgttctctaaaatcagttattagaaatttgctgtttgaaattctatcagtaagaaatatcagaaagactgaaatatcccactttcacctggagggcttatgtaatattttgacaccaagaagaagtatccatttacaacccaggtgctgagtttcaaagaaaagacttctgacacaacattccacatctactcaaatttactgttttccaaggaaatgcgacaccgtgttgtgcacccaggta

SEQ ID NO: 456260 - DNA, 396 bp, Homo Sapiens
  misc_feature (288)..(356): n is a, c, g, or t
agaggaaccaacagcagttaagacgtgccaatgcgctttcagaagatggaagcgaaaggaagcactagcagagcagatctttacaagataagattagattagatgagaaaagaaaatatccaaagcctacacagtaactgagacacaagccaattagagcccaggagcctaggacttgaggcagtgagtaccacaaaggtgagcatgaggcagatagctgaatacaggaggacttcctgacctgtagaaggaacagctaaagtccccccaggtcttcttcccacccannnnnnnnnnnnnnnnnnnnnnnnnnnnnnnnnnnnnnnnnnnnnnnnnnnnnnnnnnnnnnnnnnnnnatgacaaagtgagactctgttgttgttgttgttgctacca

SEQ ID NO: 456261 - DNA, 357 bp, Homo Sapiens
  misc_feature (337)..(337): n is a, c, g, or t
tgggtagcaacaatatctcctcttccttttagtcttctagcaccttcttattcgtgatcaagaggagagcctaattcccatttccttgaatgtgagtgggcagcaaaagcaatgctatgacatcttaggctagattgtaaaagcttgtgagctagaacaccccacaagtgaagtactgggctgccacgtaagcagtcccaccaccatgaggccaccatgccatgaggaagcccaaaccaaggcacatggaaaaacatgtggagaggccatgggacctcatgaagaggagatggctcacaacccccatcattccaactactgtctgactacaactacntcaagaccccaagccagaat

SEQ ID NO: 456262 - DNA, 262 bp, Homo Sapiens
ggcatccctgttggtagcacaagtgattgtgattgaagaagaaaagaaattcttgaagttacttgagcttctaggccattatcaagagtcaggatctgtcattatatttgtggatagcaggaacatgctgatggtcttcttaaggatttaatgagagcatcttatccttgcatgtctcttcatggaggcattgatcaatatgacagagatagcatcataaatgactttaagaatgggacctgcaaacttcttgtggctacct

SEQ ID NO: 456263 - DNA, 475 bp, Homo Sapiens
gtagcaacaaaatggagacagaaagctgtaggaaagctatcggcctagttctgcagtaataggcagcaggatcagcatgaaggttgggagaagcagcagcaagagatggccaaagaaacattctgaagcaacgctcaacattgaatcatcaggggtgagcatgggaacaggctactcagggatcaaagagcatgaagcctttgaaaagaagaacctgaggaagaatatggaaacaggtctagaaacagcacagagaactgacagaagcaatcagaaaagggagctcctaatccaggggagctaatcaaagatgagctcctgaatcttcaaagtaatgtaggggaaaaaaggtgtctgcaaagaggaaggcagaaatccaagtgaaggggatcatccccaaatatgtgactcatactgggcttcctgtctcttcagaaatgcataagcacttgtgctacccacaggtaccgagccc

SEQ ID NO: 456264 - DNA, 427 bp, Homo Sapiens
cacgaaatacaatcatcttcctgaggcagattctcactaggactgcattcaacttagagccaactgttaaacaaattgagacaaaatgggaatgactacaacgtgggcactgacctgtccccccgagcccaaaagcttctagttacccattgctctcatccccaggtgattcagtttgaatagtccgctaaccctatcaactacagtccgtcatccccaacaacgatagtgagaagcttcatttctcatgttatctggaccttgaagacggactgctccgagtacctatgtgcaagtgacctgtgccatagctcatctccaggacagtcctcctgattgaggcttctcagtgagctagcaggatagtatataggctctctcaaggcagaatgggatacagaggatgtgtgacggggatcctctagta

SEQ ID NO: 456265 - DNA, 458 bp, Homo Sapiens
tattgatttttaaatagctcctcccacctcagagaactttgtatttttcatttattccagtagaaattagcatcctggcatccattatttttactgccctgaccttaactagacatggaacattttaattcattatcttccttacaattgccattaatctttactattacctagaaaagtactgagaattcgtaacctcttcaaggtgttttgagtctggttgaaagggtgtaaccattataatttttcttcataacaattattaattacaaagagagaattattcctattttttaaatgtcagattttcttagttgagtgatatttaattggttatttttgtgctaatacatatataactcataaggcttgctttgtttttttcagttctccaaattctagtagctggtaactctgacaacgtattagtatcaatttcaaactgaaatgctattagg

SEQ ID NO: 456266 - DNA, 308 bp, Homo Sapiens
ttttctgagggagaaaccttgttgtaggaagacagtgtttgcagcgaatgtccatgtattttccgggcattatctgtccctgtttagctttaacaggctgcttgagagagaatgccagcttctatcttgtgcaaaccaacagcagaattgattaattagaaataagctgaaccctagattcaataagaactgggcttaggttcagaaccttggagcaagagatacaccctggaagagccaagaaaaatctagggagactttttatactcggagttgaaaatgttgtcaaaggcgacaggttctctgtc

SEQ ID NO: 456267 - DNA, 304 bp, Homo Sapiens
  misc_feature (86)..(86): n is a, c, g, or t
cctcttcctcctcttctcttgtatacaggcaagaagagtcttcgtagtctgactcatgaggcacattttctttattgtcatcacantcaatcacaacagttggcacttgtcttatttctggaaggcccataggtcctgctttggtgaccccatcacccgagtgcaacccagagctgtggtaagaagtggaacaggggacccgctgctcagagctttccagcctctgcatggtcatggccagcgttttagttgagctcgtctatcattctgcagcccgaggggtgcatggggagggagcctcatg

SEQ ID NO: 456268 - DNA, 361 bp, Homo Sapiens
ggagggttaagaggcaggctcgcattggttgtgcctagcttgttggcagccacacaagtataattgccgaagtgctcctgtgtcacgttggtaacagtgagaatggatcttgtgctaaaattttgaataataattccttgttggccattgaagagcttcttctctcctttgtaccattcaaaggctggaggcggcacacctgcaccttcacatctagtcaggccactgcgtccgggggtcacggtgccagatttaatttcctgaatagtaggagcaaagtggacaacaactttactattcctcaagtctgggaatgacacatcattttccgcactgcattatattccccagcctgtcactg

SEQ ID NO: 456269 - DNA, 540 bp, Homo Sapiens
gacccatactggccaggcctggaccttttccttgagtgctttatacttaggctgcttcagttaccaactggatgttgatggcctacctctagatctctaggtcagacctcttccatgtacttcagactcatgtatctcatttccacagacacctcagacagtatggctgcgacagactgtctccttccttctcacctctcctttccttctctttccttggcttggagagtggcagtgccatccatcaaaatcagacactaggcctcatccagtgtttctcctgatttttttcagctcccaaatctgttgctttggcctccttgtcacagcctctccctcagttcctctgctatgcctctgccaggttgacctcccaccaccatcttccatagctgagtaggtgctacgccagtgtggtttttgctccctctcaatttttcatgaatctgcctcccttctctgcgtctttgtctccacttccatcaccttagtccactctgtcatcatctgtcccccctggatccttgcaggagcctcatg

SEQ ID NO: 456270 - DNA, 165 bp, Homo Sapiens
gcgattttatcaaaacatttattggtggtaaaatatcacaccaaatgtgtcatttgaactggtctatatagttcagtggtattcagtgccttcataatgttgtgctaccaacaccatcatccagctccagaactttttcatcttctcaaactaaaaatctgtact

SEQ ID NO: 456271 - DNA, 348 bp, Homo Sapiens
ccggctcatttcagtttatcattccagaagagcagcaggcagaaccttcacctcccaagagctgcaagtgcgctgtggcaggaaaagaagatctggcgtctgaagtcagctcctgctctccaggaaaagagggacgatgacataggacttgagcaaaatgagagccccgtgatgggagagaacaactgatcaatcttgctgcaatggaaaggcttggtcccttgagtctctgtgtttgcttcctatggctgctgatgacaagtcaccatacatctagtgacttcagacaacaccaacttgctctcttacagttctatatttcataactcccaccagagggctgacgtt

SEQ ID NO: 456272 - DNA, 433 bp, Homo Sapiens
catactggaccttctgtatttaacaaaaaacaaaaggacaaagatttcattcattctaaagctgacaaaggaatagttcacaagttgttcaaaagccaataaccattccaacttcagaagctgagtttctcagctctctgttttaaactctcctctcaaagttctttgcacgactcacgctgtcagttctattaacagtgctgattaaggcttatacttacaccatcatcctctgagcatcctccgagattctgagtctttggccatggctgccagtgagggagggagcacacttccacagctgttactctgtcctaggggcagatgggcctgcgggaagcaggagggagtacttcaggcaagctgcaggctgaatggacctttaggaaatggccacatccctgtttccaaagctcctatctaagtgtacagg

SEQ ID NO: 456273 - DNA, 204 bp, Homo Sapiens
ggctaagtggaactgctccgccatttcttccttctgattccatcatcccaaatttccatctctccagttctttggtcctccaggtctcatggtttttctcatgcccctcagcccctctactcactttttctgaaaccacagacttacccagtgaccgtaaattaagctcttctgtgatcttggcctcccgagcagttccactat

SEQ ID NO: 456274 - DNA, 720 bp, Homo Sapiens
  misc_feature (204)..(306): n is a, c, g, or t
gagccacagtgggagaaggtgttttggggtatcggtgggtagttgatgctgctgtggggctggagctcatggtctctggcagggtaggtgttctcaatgccgttgccgggctcgtggcctgcactgtctcctgggaggaaggggccgtagagctggctggcatctgactggaggtctgttgagttctttgcgagataaccgatnnnnnnnnnnnnnnnnnnnnnnnnnnnnnnnnnnnnnnnnnnnnnnnnnnnnnnnnnnnnnnnnnnnnnnnnnnnnnnnnnnnnnnnnnnnnnnnnnnnnnnngggtggtggtcatccccgggcttgtgaaggtgtagccagggatagccacagtgcttgaactgcttgaaattttcataagatggtcatgtcccgagcttgttggggtggccacaggatgcgtcgaagtgggttgtcgggggctaagtggacttgtagggtgaggggtcgtcagatgttctgccttagtggatgtgaggtctgtggtcacactgtggctgcttttccccccagagtttgttgtatcttctgctccattctggctgcttgtggtgttaggtttagctgtggctgtggaggttgcaactgtagtggtgtctgcactttttgtgctcttggggctctcgatggtggtagtagggttgcctgagctgcctcctcaagtgggtctctgacccctgaccccgagcagttagc

SEQ ID NO: 456275 - DNA, 176 bp, Homo Sapiens
gcctaagtggaactgctccgtctgtgtgtgcgtgcgcctcgggacacatgtgccctgtgcgccggagggtgggtttcttgcacgtcggcctttcttctggtcagcctctccccgcgtctctgcctgggtcgtgtgccggttgcagtcttcgctgccggacggggttcctctagatc

SEQ ID NO: 456276 - DNA, 246 bp, Homo Sapiens
tccaatcaaaagctgctctcctgtgaaatcctcactaacgtttcagacccaaattgagctaattttctctcctctgccccattgctctgggctcatcttgcctgatccccaactccttgctaacaccctgcaggtgccagtgcgcctccagggaggagctccattgtctttcaccgcaccgtgaatctctccgctctcagtttcaccattgctaggtccttcagtgaagtcgagcagtaccactgt

SEQ ID NO: 456277 - DNA, 302 bp, Homo Sapiens
atagtaaagccaacatttgttctctcatcaaaccccatgccaaattcatcatgaagaaagctcagcataagtaattcaaatactgcttataattttagaggggggtagaatttagtaaatattccagccggtcgttttatgcacaaggcttcagtcagaacatagaaaaaaattacattctgtgaatgaaatattgtatgttcagattgttataaaagacatttttaaaagcccaatttacagccgtatattttcttatgatgtaatgtatggaactagagtctatatgggagggtactcta

SEQ ID NO: 456278 - DNA, 501 bp, Homo Sapiens
caattaaagacagttactcagctgagttttagaaattgcttatgacatcactcccatgatagaaattaaatcctaagactaactgatggattagaagtagttatcttcataagacattcagtaagcattcactaattcaatattggttggtacctattatttgtaatgtggtacctattatctgtagcctttaagactacactttattttcatttctgtttcttctcccatcatctgtaattatcactgttaaatatgttaatcctagaagccaaactgccttatagctgtgtgaaataaatactatgattatgttagtataaagaaatgtacacaaatcatctcttatttaaccacaaagagttgtttatacttttcagtattgttaacccaggtatagaactcattgttccattgagcaagttaattaaagttctgtgacatgactgtaaataaacagactgcttcagttcttctagggtagagatagatgtctcatat

SEQ ID NO: 456279 - DNA, 268 bp, Homo Sapiens
acgcctaagtggatgctccggttgggagtcatccccctatgtatgtcttgtagggctcactgaagagagagtaactagaattacactgtgccatcatcctgttgagtttcttgatttcttctttctcgttctttcctccgtaatgcatttctatctggttcatagacactcctgcatctgctggctgatgactgaaattccacaactagagagtcattcctctggtttaagatgtctatcaccccacagtgactcgaggtcccattcc

SEQ ID NO: 456280 - DNA, 600 bp, Homo Sapiens
tgccagtacgttccatgcaggtgctgtctgaatgtgcagtgatgccccatttcctccatttaccgtgagtgacttaggcaccttccccctactttcctttcctaaggatccacttctgaaaagcctgggattttgcctccctaccgtaatcctatgggttggccttgataagaagcatgataccaacttccctgagatctgataaaaccccatttggggaactctgatttcctccttccccttttctgcatcggaccctgtacagacactaagctccccacaacttcatgatgttctttcccctcctgcaccacaaatctctttcttttcccatcaacttccctgaccccactcacatcacaccacctccatgtggctgctccactccaatgtctcactttttccacacaaggttcacatttaattcctgcaccactgtttcctcccactttcatcttccagacatgctccacctcctcttcaacatccagtcctgcgtgcctgtctccgccaggtcaatccacagactcaggaatctttcctgaactctgaccccttcctgcctgcccccactgatacaccactgtcgggctagtcggg

SEQ ID NO: 456281 - DNA, 387 bp, Homo Sapiens
gagtgacttaggcaccttccccctactttccttttctaaggatcacacttctgaaaagcctgggattttgcctccctaccgtaatcctatgggttggccttgataagtagcatgataccaacttccctgagatctgataaaaccccatttggggaactctgatttcctccttccccttttctgcatcggaccctgtacagacattaattaccccactattttgtcgatttccctcagaggatttgtcattttgtcctgatgagtttccgcagcataatgatccatcctatgtatttttcttcttcttttctttggaggagcaactggtctttcctgtctcctcttaggggcaactttcctcttagtctcttaccggagggtaaggcc

SEQ ID NO: 456282 - DNA, 204 bp, Homo Sapiens
gagcttaaaacagacaaagttgctaatgagatgttttcaagcatcctaaacatgggtcttcactgaggtaaacccaaggctagccaacatcctacccacaggagggctattgtgtgctgcctcccagccgctccacaccttcttcccgaaaatgacaaatctttcctcatggcaatgaggcagtctcggagcgctccacttagg

SEQ ID NO: 456283 - DNA, 228 bp, Homo Sapiens
  misc_feature (164)..(165): n is a, c, g, or t
gaggatccgtggcactctccccgtgtcccccgcttcccctactgcatcctctctggtaatcacgttccttctcatgtgtgaatcagtgaccatcagagccggccttcacatctttactatttgtggattcaatatctcatgtccagcgtgccatccgtgtcacnnctttccttgaatatgccactaaacgtggactcacctcaacgcggacgcagttccactttacgg

SEQ ID NO: 456284 - DNA, 361 bp, Homo Sapiens
  misc_feature (343)..(343): n is a, c, g, or t
cagccgtgggagcagccacaccctcaggtgagcatctgacagcctggagcagcacctcacacccacaggtgagcatctgacagcctggaactgcacccacacccccaggtgagcatctgacagcctggaacagcaccctgcacccccaggtgagcatctgacagcctggagcagcatccacacccccaggtgagcatctgatagcctggagcagcacccacacccccaggtgagcatctgatagcctggagcagcacccacaccctcaggtgagcatctgacagcctggaacagcacccacacccccaggcgagcatctgacagcctggagcagcacccacanccccagcccaggtgagca

SEQ ID NO: 456285 - DNA, 398 bp, Homo Sapiens
gtgcagacggagcctgaccagctgcccagggtctctccagccatccacatcacagctgccaccgatcccaaggtggagatcgtcaggtacatatcggcgccagagaagactgggcgtggggagagcctggcctgccagacggagccagatgggcaggcccagggtgtagccgggccgcagcttgtagggccaactgccatcagcccctacctgcctggcatccagatcgtcaccccagggcctctgggccgattgccagttccactgaaataatccagcttgaaccaagagcacacttgaagcattccttatcaaatctgtagactggagacaggatctcaaagaatttcagaatactttcttctctattaaggttggcaaattgtctaaatgtttgt

SEQ ID NO: 456286 - DNA, 320 bp, Homo Sapiens
  misc_feature (31)..(31): n is a, c, g, or t
cccacaaaagactgcccagctaggttggtcncattaatccaggcttctgcatggggcacctcgttctgcacatagcatgggaacttgtaccaagctgtggacccattcaaaggcttgcccttgggtttattgaggcagtaacagagtcccatcttctccagcagctccagcaacagctgcaagtcctgctgggcctggacatgaggcttaagcagcaaccgaatgacatgagctggcaaggagcccatgcaacagaaagccctccacatactgatggagctgggtggcccggagcagttcctggccgactgtcatctcag

SEQ ID NO: 456287 - DNA, 305 bp, Homo Sapiens
agatgcggtgcaggagctgccactgctgcaaggagacaccgatccgtttgtagaccatctgcaggcagtggtgcagcacagagtagcaggcaggggtaggcctccgtgtacttcagcttcttgtggatcaactcatacatctgggaaggcactcttggtgtcgatgtggaccatgtcaaacctcctggctagctccaggtcatgctcattccgcaccatctcgaagaagtctaaatgtttgtccaggatggcattttcatgttgccggagcagttccacttaggccggagcagttccacttaggc

SEQ ID NO: 456288 - DNA, 175 bp, Homo Sapiens
gtttagaggatcccgctagtggattgctccgtatggtgctgcgacagtaagtatgcagtcactgttattattttaaaaattagctaacttctctcacggtgtcctcccaatatgcaccttttgctcctagtgtccagatacctagctttgtatcattattttttctgatgcccac

SEQ ID NO: 456289 - DNA, 358 bp, Homo Sapiens
atgcaccttgggaagaaagtgattttctgaaaagctctttgctagccttaaaattctgtgggtttatgagatcctagcaacagaaaggcattttattttgttttgaagcagctttttttctggacattcccatgcaagtccagggcacatgaagcttggagtcatagagtttcctgtccccccactccaggtaaaggtggttttgatcttcattttatgactgagataatttagtcacattgattctaataagatgataggcaagtggcatcttgggctaatacttagattgtccattgttgcctaggcccgcttcagtggagtagtgtatagaagggaaatgcagtcttcactgcgg

SEQ ID NO: 456290 - DNA, 498 bp, Homo Sapiens
ctggatcagtcggctcatcccctttgcttagcaagtcagctgcagcttgctctgtcttgggaaaaccactgtctttctgaagagctgcttcagctccaaaactgataactctggaaggagcagccaccagccagtcagaactgagctccgaattaacacatgaaggagactttggcctcttgagaccctgaaatacaagaagatggtttcatgtcatgtccaagaatgtggccacaaatgctacctcagtctcgggctgtctgcattgttaaatgacctcattatttttctgacctgtgggccgggcttcgttggcatttccttaaggcgtgttattgtggaaaatattattcaagaaagaagagcatgtggtttgcttggttactgagctggactggccctgggtgaccagagctctcacgcagaccgtgcacggctgctcccactgagaccagcctctgcctcgggatggtctgacccacggagcatccacttagg

SEQ ID NO: 456291 - DNA, 533 bp, Homo Sapiens
tggcccgatacatggcctggacccacaggatgcggtcttgttcatcgtcactggcaaatatcacggtgtctccctccttgacagcattgaagaaggctcggccacccttcatacctggctgggggtcggtgtaatccacagtgtagccatccaattgcagaagttcctgaggctccgctttcttctcccgataactgcacatggcaaacgtgtactgactgacctgcaccaatacaaaaaaccttttcttccatctcttccagacattcttaccgatggcccataaatacccagaatgcttcatgttttgaggctatccattcggacagcaagtttgattttgagatcttggtcggggcagtttttggagactgtcattttgtgccactctgactgtttggggctgttcggggtgggatggagaataacccgcccaagctccttgtcctccaacgccaggacgcctgtgctctctgtgaacagcttcaccttcacagctggcagtgcatgggttgtggagaagtcaccctggg

SEQ ID NO: 456292 - DNA, 632 bp, Homo Sapiens
tggactgcccggtgttaggactgtgcctgggaactggcttatccctctgcaagacaggaccctgtatggcagacttatcaggattcgccgccctgcttttattcttgagagcacggaagagaagtctctgagtgaactgctctagggacacacaccatggagtcacgctcagacccactgacgtgcaacacaaggaatgtgttcggggagcggaagtcggcatctgttagggctgccgttagcttcattaccacacggtgacggtccacgcactctcttcactgctggtcacctacacaagtgctgcacacgaagtaaacggagccgggacctggggtcagctcccaatccccgaccctctggaaaagactgttcagctgtccgattaccttcaacttccggttgcatgtgctccaacccctggttctcacgttagctcagttgatgatgtgctccactaccaaggactctagagaagtgagaaaagccattccaagaagacattcctgcaatcagagcaccactcccatcttggaaatcactggcacagtacagagtcaaagagcccgtgtgtcctgctgggctccagggcagtgcacctgggagcaagtctcattatccctctctcccgt

SEQ ID NO: 456293 - DNA, 428 bp, Homo Sapiens
gattgccgctgcgctcatgctggacagcaccttcagcatcctgcagacctgggacaccatcaacctgaacagcttcttcacccagttcgagcagttttgctttgtcctgcaacagcctatgatttatgaaggacaggcacagctgtggaccgatttgcagtacagggagaaagaggtgaagagatacctgtggcaacatctgaaaaaacacgtggtaccattgccggacggaaaaagcacggactttttgcctgtggactgcccagtgaggagtaaactgaaaacaggcctgattgtcctttttgtagtggaaaaaattgagcttttattagaaggcagcctggactgagttgtgtcacctcctaacctctgatgccagctcaccagatgagtttcaccgtgacctaagccacatccttgggatacct

SEQ ID NO: 456294 - DNA, 441 bp, Homo Sapiens
ggtgatctagcaggatctcttacccgcgtcatcagcccctggggcgtttcctcgacactgatacgggcttgggctggggttacgaaggcactgccctgtagcttcagcgcatacgttggcgcaagcgattcgcgcaaggataaaaatgaaagctatgcatgccggctccaaacgcctcaaaggcatgggcgagatcaagtcacgtccgcaattgggggtgagtgccgcctacaacctcggcggtgtgatcatcggcgccaccctggaacatgcgcttgaagaagataaacacaaggaaaccggcaaggcttttacccacctggagttgagcctgggtaccaatctctatgaaggccgctacggctccgtcgatgccgccatcaacagccacttcggtgaccgcaactacctgcaaacctggtacggcgtgactgccgacca

SEQ ID NO: 456295 - DNA, 250 bp, Homo Sapiens
aagcggatcttccccggggagcaccgttcgatctgcaggtactcgaaaccttcggggtctcgccccagcttgccgcccgctacgtggagagtggctggctggtgcgcatcggccatggaatctatgcatttcccaatgacaacttcgatgtcaccggtgcgctgcggttccttcaacagcgtgttgctggcttgcacgtgggcggtaagagtgctctagcgacgcattgtgtgcggcacaccttgagcaa

SEQ ID NO: 456296 - DNA, 305 bp, Homo Sapiens
aagttaacccagcgtccactctaagcctcaactcacttcatccattcttgccctctccaatctcctctcctaagggtcaccttctccttgtgtgtgctgatcacttccaacttctttcctgtggccacaggccctgcatgacctggcttcagcctgcccctcttactcagctcatcctacattccctttcactatgcttgacctggtcaccattctgctccttaagtacaccaagctcctttcctaactgggcgttatgcatatgccatacccacgcgggtgacttacgggatcctgctagacag

SEQ ID NO: 456297 - DNA, 572 bp, Homo Sapiens
cccgaagtcaccgcgtgaggccaagcaccatggtcagaacctccttcaataaacaaggttttgagctgttaagcccttaaccagatggaggaagtggagttggagatgtgtgtggtgtgttgcactttgccatttgtacctggtcttgaaaaaatactccagagttatcagttgattgaggagagcaaggtggaaggtttgcagacttggtgatttcactggggtcttaataaaaaggggtgggggatctgaaaaatgccctcctggcctgaactgagcccagtagaagtcccatccttggagctccagggagggccagagtccactgcctcggggatgtgcaagtaacagagcttggctgctgtgccacagtgacagagatgatgtcacttgggcctttgcagcctgcaaacccacccccattactgacctggaacttcaggatgatccttctgaccttttcagagaatgtgctcagtctctgaatcacccaggtaggtggagtttggttaccgagtgccctagatacagacacatgcagctgaggccacttttggttatgaggagacgcg

SEQ ID NO: 456298 - DNA, 726 bp, Homo Sapiens
tcggcttcctcatatcgttgagctttttccagcgcctttgcatgatcatcgaacatgtcttggatatcctgcggcgcatgccagggtttcctggagaaagcctggtatttacgggtttcagcttgttcgccatccaatagcgcttgccccgtgttgatgctggtgtccagatccacagctaccggtgcgcttggctgcgatggggctttctgccgtttaacccagactcccggtgccttctcatgaaacgtggcgagcaccttgccggtcatgtgtgccttgacgtcgaccaacgaactgtctgcttcgcggggctcacccatcaccaagccgtgatgacgtgtcttgatcacttcacgccttggggcgggctcggccctggagctgccgggcttgggctgctgggcttttttccctcgcagcaggtaggccaggtcgtggatggcccgttggctgaactcgcttatttgcaggcgaaaacgttcgaggcggggtttgagcaagtgctgcgggtagtcggcatgcagatccagcaggcgttggtcggcgctggaaaattgctcaacgaggctgttgagcacctcgatacgattatccagcgaggcgccattaccgcgttcaataatctcactgaaactttcaacgttgatttcggctgaatcgacgatctggcccattcgctcacgcacggtgacgcgggtgacttaaggggatcctgctagatca

SEQ ID NO: 456299 - DNA, 659 bp, Homo Sapiens
acgattcgacccggacccgaattcaccgcgtgcttgcatgaaagcagagagaagaggatggctaaggccaagccctggcccacggccttccagtaagcttggtacacgtgcaaggccacggcgccctccttcttgctttcttcctgcagcaggcgaccagatgtgctctgctcctcctccagcccctcctttgttttctctgggttctgtactgactgggctgtggctgagtcagactcttgtccattctcagcccaggctttggggacagcttgtaccagtggcagaatctcagagggaggtcctggagggtagaaggggagattgggagaggactgttctgagtctatactatgcctttctcagtgcgtgtgcagatcccacctctcatcctctcaggcctccccgtctaacccaccctagcaggatacccctagacctcgagcaggactcttaggcctccctctctaacccaccctgctctggatacccctagacctcgagcaggactcaagtccatccttgtaaaccttgattccgaccagcagagagggacgaatgtccatccccaagaggaccgccagagctatgcctgccactctgtccagggttacttctcattactacgcggtgaacttcgtgatctctagactaccacc

SEQ ID NO: 456300 - DNA, 165 bp, Homo Sapiens
ataccgcgtcgataccctgcacgtccgctcgcgcgtgcgattgctcgccctcgccgccctgccggcgctggcgctggaaccgttcgtcgccagttaccaggcctggcacgagggccagcagctcggtaccgcgaccctgcaggctaagccgaccggcggcaacca

SEQ ID NO: 456301 - DNA, 569 bp, Homo Sapiens
tctagaggatctctaagtcaccgcgtcacctaccgtcctacagctgcagcgcgaagttgcgcagttggatgccagctctggttctggggaccatgaaccgccctgtcattcccatgcggcggatatagggatctacacgtgaacgatgttgggcctcatacagtgccagggctgtagtgggggcgccgcgatttctatccagtgcgtcggccagcgtctccgcgcccagcatcgccaggctagacccgttgccgaatagcgaagcgcatgacgcggcatcgcccaggagtgcgactcttcggtctcgccaacggggcaggctcacgcgacatactgcgtcgaagtagacatcctcggtatctgcataagctttgagcagctcctcggttctccaccgtccaccggcatagcagtcctgcagcagcatgcgctgcgcatcgacatcggtgtgtcctacccttgctccactgcggaacaggaacatcgctaatgcagaccctagggcagggtgtacgacgagtgcacgatctggctcgttatagatgagtacgcgggtgaccttcgggtac

SEQ ID NO: 456302 - DNA, 322 bp, Homo Sapiens
attcaccgcgtgtgtcaggaaaataggcgtctacgctcccccctacggctagcggccgccttccatcaggcttacttgccttcagtcaacgcgttgtagctggtgaacaggttgcggtagtccggaatgtgattggagaacaacgtccccaagccctcgatgtcgttgcgccagtcgcggtgcagctcacaggccaggccaaaccaggtcatcagttgcgcgccgttggccgacatgcgggcccaggcggactgttgggtcagttcgttgaaagtgccggaggcgtcggtgaccacaagcacttcaaagccttcggccaggg

SEQ ID NO: 456303 - DNA, 548 bp, Homo Sapiens
  misc_feature (23)..(23): n is a, c, g, or t
  misc_feature (49)..(49): n is a, c, g, or t
  misc_feature (55)..(55): n is a, c, g, or t
  misc_feature (71)..(71): n is a, c, g, or t
cctctgtcccaacttcaaccccnagaacactgagctctcagtaaagggnacaggnaaagcccagagaggcnatcatctctctcagctcacaactggaatcccaaagcatttgcacaaaggaccaggaccccagacggcagccaaatgcagccaaactgagcagggcaatggaggcctgacatccagccccggggcccacagatgatcagccaattatggagcaagtgcagggaaaaccgcgtggggcactgcagaaagcaggggaggcttgaggtgtgcccagaagcaaggtagacccagcaggaaaccagtaaccagtgcttttgtgaaggcctccaccaggggtcccagcaaaggccctgcctacctaaagagactgcagggcggcctgtgtctcacccagagctacttcatcataggctgaagtagtccgcagccagtcgcccgtagatgtccgtggtccagagcacatgggcacggcctgaggctagaagcagctggtgcaactcagcttctacgcgggcaaacttctcctcattgatggaggc

SEQ ID NO: 456304 - DNA, 238 bp, Homo Sapiens
atagtttaatcgcgtggcgcgggcttgaggcacacgctgatacaaggaaaatgcaaaaaccaaaccagggctccgaaaagaagcgctaatgccctgaaataagggtttcaggcgcgaaactgtggcgttctgccagcctcaacgggaagtttcgtatccaaaatgggactgggcaattgagaatgggtgcaggctatcgcaccaatatagtgcggttttgtgacgcggtgactaagga

SEQ ID NO: 456305 - DNA, 116 bp, Homo Sapiens
cctagtcaccgcgtctagaagacatgtatgtttgtagcatccaagtattcgttttcaaatgaaataaccccttctatcgcgggcgctgtttgaaaacctaagttgtttactaaccg

SEQ ID NO: 456306 - DNA, 269 bp, Homo Sapiens
cccaaatgaacaggcattgggtgtgtgtgtgagacacgaatgagtttttggtggatcctttaaacattacagttgattgccacaagtctcattttatcaggtacttatttttgaattggtgacatttcacgtgtgactgtgtagtagtacttcacagttccaactgcgatattgttctttgcattagactgaatatgtcatgttaaggtttcattgcgtttatttatacttggagattaaactaggattattgggcgtacgggggggta

SEQ ID NO: 456307 - DNA, 150 bp, Homo Sapiens
accagactatagaagggacactctgatgtacagctctgagagggcatatggttggctggccagaactgtgcataatgtaaagcctgtcctatctatgttacaatttaaaatctggggatgctcacaaaattgtcacatagaaaagcatgc

SEQ ID NO: 456308 - DNA, 510 bp, Homo Sapiens
  misc_feature (322)..(322): n is a, c, g, or t
  misc_feature (330)..(330): n is a, c, g, or t
  misc_feature (492)..(492): n is a, c, g, or t
taagtaatttgtcaaaagttgcaaaggatgcctggagtgaatgcctacagaagatactataattcaggtttccttcaaatccgtagggctgttctcgggggaccgtccccctgaagaaaaagtaataatggtttttaagttgttactgccccccgaaaatactcttcgaatcattcttcttattcttttcttatatattcgaagaccccatttcagtcttatcggctggtggctgttcttccatgtgttctgttaaaacagtgatcctgttctagtgtgctgtttaaccactcctcttagctacacatgaatacctttactngtaaaagnggatccagatctaagcctctagtcatgaccttctcctcacaccaagccaacattggacatctccactggggttgcacaatgaaaagtattcttttcctctgctacctcttttaagttcctcagttggcttaacagatcctctagtcaatttgggctagaaantaccctcccgttaatttt

SEQ ID NO: 456309 - DNA, 369 bp, Homo Sapiens
tccccgtacgcgccaagaggtgatcttttgacatcagagggccaaaacactcctccctcagatggtgctgacgccaccattttctgcatgtgtcctatgaggaaccacaaagctagattatgcttgcgtggaagccccaattacctcatctttcctacccaccaatcacctcttcccacactttagaccaccctgctttctactgcctaagtacccccaatccctgttttcaaggaggtggatttgagacctgttctcctgcctccttgcttggccacgttatgaataaactctcacaaacccatcatctcagtgattaacttgctgtgtgtggtactgaatgaacctggttttggcgtacggggaaag

SEQ ID NO: 456310 - DNA, 163 bp, Homo Sapiens
tatccccgacgccaattctgggcctactcaaaacggcagctttaacatgtactcagtttggtagatgattgcattactggccccacttaatggctgccatgtatctatacactttgacttgtaactctatagtccctttctatctgttgttgggcgtacgggg

SEQ ID NO: 456311 - DNA, 413 bp, Homo Sapiens
cccccgtacgcccaaacctgagactccgtttttgccccttttgtagcattcccatacctaactgagggatccttgaaccatatgaccttcaaaaacacgcctcatcctgcttccccagtctcgtttccactcttcccaacaggaactccttcactcctatcaaaatggtttcttccggctttgccacacctgtctgctgttctcctgcctttttccgtgctcctgacattctctttgcttctccatttcttcactccttgctcaaatgccattttattcataaaactttgcatgacctgacatgacatctgcctcccctgcagtttatttctatagcaagtaatatgtgagtgatctgagctaagcaacgtaagtgatgcatctgcctctttgagcctggtgtgtaccacgcg

SEQ ID NO: 456312 - DNA, 313 bp, Homo Sapiens
ccccgtacgcccaactgcataactgactgaaatgttcatttttatacaatcatatggtaacttacagtacagatctagagaagtagcaaaatttggaagtaagaatgaacaaaaatgctcaagagacattttaatatcttaaagaaaacccccagagaggcatctgctaaaaacataacatagttttaagttctggggtacccctctcccctaaaaaaattggatttctaaatagctacatttgtaaggtcttcctgattattccagaggcatttctgtcacgtgactccatactgacaacttattcttggcc

SEQ ID NO: 456313 - DNA, 234 bp, Homo Sapiens
  misc_feature (33)..(33): n is a, c, g, or t
gaaggttatggcaggtataaaaaccccataaanacaaagcaaaacgtccagtgaggaacttgtcttttataccaactcccaaaacaaaggccacattccaaaacgaagtctgtttgcttcttactttcctaatataaagggaatgggtgattttttcccccaaatgcagtttcatgttggtgaaatcagaatacaacagtagggtctctagcggcagaattgggcgtacgggga

SEQ ID NO: 456314 - DNA, 363 bp, Homo Sapiens
gcagtatgccttataattagcttgctagcctgatggtattttgttgctaaagtataatgatgtccgtgatagtagtaacttattcatccagcaaacattcagtaagcattcaatgaagtgctgggtattctgtgtggtacttcggtttcagagttgaagagacagtgcctttccttaaggaattcccagtctagtgggacaacagacaaggagatagatactatctgtctgtctattatttatgtgataaactgctgggctaggtatattttcagagtgctgtagggccacagagaagggatgacgaatattatcttggggggagtcagagaccagtgcaaaggtatcctactatagccctga

SEQ ID NO: 456315 - DNA, 292 bp, Homo Sapiens
cgccaagggacttggctttgatcgtataggaaatggagagatcctgagcaggagaaggaaatggtcacacttgttgacaggattgtcgagaacagttgagagaaaggcatttaagaggctctttcagctgtcttgggtgtgacacaagaatcaagttaaaagaggatatgcagaggctagtttgagagaagttaaggaggacaaattggcaatggatggactatggcaggaaggagagaaagagagaggcggtggagatgatgttcatgtccctggcttgggcgtacgggga

SEQ ID NO: 456316 - DNA, 225 bp, Homo Sapiens
cccgtacgcccaaatgttttggatgaatgaatgattgaagttgctctgctggatccttatattgtgtcttgggtatgtgtcgtcttcccaactgcactcgaagctacgttgtaaacttgagaagcagcagctccattccatttactagtataggcgaggtcccagttagggttgccgtagatgtttgtatgtggcttcagtgagcgtgtgtcttggcgttacggg

SEQ ID NO: 456317 - DNA, 423 bp, Homo Sapiens
gcctagaggatccttccccgtacgccaaaagcagaaagattttcatagatccaatatgcaaatagttctgctgtgacatagatcagaaattgtctgttccttaatatttgggggtggaggcaacaaaactgaagcatatttctgattggttagccattttggcctgtttcctcttgcatgttttttagggagagagggaaacagtcctgtatttcttctgatgccctttggggaagccgacgaccactgggcatttctcactgttactcctgttcaagagagggcttctcagtctgcactgaaaaatgcatattaaactggatctttatgtcaatgtgtacatagtacaagcttttttactggaattgaggtttaaaaccacacactgcccttttggtggtgtgcctgttgggcgtacgggga

SEQ ID NO: 456318 - DNA, 338 bp, Homo Sapiens
tcatagaggatcttatcccgtacgccaacctgcttcacctacgtctcttctgggatgactagcaagttttgaacttgaaaacagggtggtgtcatttattaaactacatgagcaaaggagaagcaggttggggttggtgctgcggatagaggagatgttgagttcagtgttggacttggaacatttcagacagctgcaatgagatgtctggagaaaatacgcagctggcagctgtgtctatgggtctggatctctcaactagtgattcagtgcaaagattacacatttgggcagataacagtagacaggtagtcattcaagacttgggcgtacgggga

SEQ ID NO: 456319 - DNA, 423 bp, Homo Sapiens
tgctctagaggatcttccccgtacgccaaatcagtgcagtactcttcatagctgtgtactttgtggactgtgtatttagctcctccatccctcctgagaattatggatactaatagtatgtgccagttaagtgttggtatgaaccaatcgatgagacagtcaaagtaaaacatctgggacatagtcctgaaacgttattagcttaccatggttgagtgaataagtacgggccttgacagctcagctcaggtgtggcattccatttcactttgcctgattttcttccagccctcctcccctttccccagatcccacatcagaactcatgttaccctgtctttccctgaaatgtttttcatacagagagtttagtatacattaccattgatctacttttctttacgtacgttgggagtacgggaa

SEQ ID NO: 456320 - DNA, 387 bp, Homo Sapiens
tccccgtacgccctaaaacattgtcattccatttttttcaatgagcatctgttatgccattgtgatacatctctgagtaaagcaaataaagacctcaccctcttagagtaaacattaatcctggaaagaatcagggttgggaccaaagagactcccctcggtgcccctcttcctttaattaggaaggaaaatcttccccaggagcccctcagtagttttgcgtgacatcttcctcgtttctctagcttggttctttggccaggactgggcctggttgctggagccatcactctcacaggaagctgagaatgtgagtggatgagttcgtagggttggctggggtacagttggagttcttttaccaacggtgctgttggcgtacgggga

SEQ ID NO: 456321 - DNA, 464 bp, Homo Sapiens
cagggctttatccccgtacgccaaatggtgagtgggagtagaggctgtttggaggctttctagatagtaaagctaatagattgtgggactgtttgggaataaggaagagagatgttagcgacatctagcgcatacccttctttctccgtgtgggcacatgggaggcttacacttctctgctccctttgtaggtagatgagtccatgtgactagttctggccagtatatttgagcataaatgaagtgtcacttctaggctgatgcatataattgtcattggaagaccttccagtattgtcttcctcttgaatgataatggagaaggctaaatgttaacactccacacagcacgcttgtgtcttccatttctttcatttgttgtcctagcgtcctgtgtctttaaccctccatcaccttccctctcccacagatgtgctaagtcattgctattgggcgtacgggga

SEQ ID NO: 456322 - DNA, 270 bp, Homo Sapiens
agatcctacgaacttcggtgcatccctcttatgatgaaatttcccggcaaaatgaaaactgaaagggagcaatagaataattatctgtacactcattcacattttgcgaaagtaggctatgttgagaatgaggagcttcctttttaaagaataatgtgcatatctctttaggagcctggattgtaatgttaaccatgtaggatgctctattatcctatgaggagtttcagcagatcactggagacgccgatatgccttttcctgcgctga

SEQ ID NO: 456323 - DNA, 362 bp, Homo Sapiens
tcgtcttttgatagggggggatgttcaaacatttattgtgataaagttgttcacaagatgctattgagatatttatagatattataacttcacttaagaactgatgaatggaaactcaaattatgttttgactgagcctaatcatgttgacctgacttctctgagccttcatgttgtccctctctatagaatgtgaacaatattctcttgctggcaggtttgttgtaaaattagatgatgcacatttaccctgtatggtctttgcgttacagcatatgctcagtcaatcagacctacttattttcctttcatgattgtacctctgagttggtcctatcaaagacgagggatcctctagatcg

SEQ ID NO: 456324 - DNA, 214 bp, Homo Sapiens
tcgtcttttgataggggaaacaagatgtatttttatgagcaattaatcaaattattctacatgtgtatgtggggaatatgaacaaatcttcaacaaatgtatcaaattcaagaataatagcctatagcctatttctgggtcatcttatatttcagcgaactagatatgatccaggcttacctcaattcactgtcctatcaaaaggcgatgggat

SEQ ID NO: 456325 - DNA, 363 bp, Homo Sapiens
ctagagcctcccctcgtcttttgataggggagttcatcttcaatgataatgggttaaagttttaataactgtaactcactaggctacgatgtgttcctaattgtttttattttattattgggcacaattttatactacaatccaggacagcttcaaatagtgatagaattatattatttcacataaatgctactgggaaaaaaattatgccttttatatgaaatttctcatattctactggtttctgatgctaataacccttccttgctttgaggaagatattgaactgttgaactgtgcatatgaatacagcacagaatagctttgcataatgtgatatcctatcaaaagacgagggtaccg

SEQ ID NO: 456326 - DNA, 355 bp, Homo Sapiens
tcgtcttttgataggtccacaggtaaatgtatctgtaagactaccaaaattcataatttttgatttaaaaaatcagcacataaaaataattgcagggctttaaatgagcacagcgttaagttgggctgctgtctctctccgaataagtgctaagtgacgcaggaatgttttaatggcatgaggccctacacaccaaaatggcattagcctctgagtaaatatcactagttggatagagttttattctacaaagtaaatacttaggaaattaaatattaattagtacttacatttgcaatactaagaataaagtagaatcttctttaccctatcaaaagacgaggggatgctctag

SEQ ID NO: 456327 - DNA, 312 bp, Homo Sapiens
tcgtcttttgataggttcttaacagcattgtccctctcccagctttccaggattaaagtcttattttagttatgatcacacctctgaccccttgccccccaaaacaaaacacaactattgcttattaaattttgtgtgaacttatcaaccttgatttttactacccttccaaaagtggatggcccttatcgtattttaatttagttaaatatcagcagctttccaggctatcacttcttactgacacaaatcccgttttcccttacatgtggattgccttcccattatttgcctatcaaaagacgaagggat

SEQ ID NO: 456328 - DNA, 722 bp, Homo Sapiens
ttttgttcccccttccctccagggcctgatggagctatttctgattccaaagccaaaaagaactggccttattgttatgggagaaatatgtttcctagactgattgcgcccaacattcccttcatatatctttcaagagtgatggagaatgatactaatgcccaagtatcatttccttttttggatcctttcaaattagacagaacaatcggtgctaaaaacaataggaaataattgatgccctccccagaggatctgaattgggaacggagttttcccggctacgtgaagcctttgagagcagattttgctgctttgcagtgggggaagcaactaactcagactgtcaattaccttacaaagagctagacgctaattaatttgagatatttctacaatcccgcctcccacatgtgtattttagaccagatcagctagattttaagaaagaaaagaaagtattattttattgagagaactagctagttttttaattctgttgaataaaagaagttaaacatagggtctgtacttgctccaacaaattctccataagccaatatttattaagacataggaattaacatatatcttaaggtataccatgtcaatcacagcaagaggtgcaaagagtgatggctcactcctcaccttgagaagtttacagctgtgttgggtagacaaaattgatatatagacaacagcagggatagccaacattt

SEQ ID NO: 456329 - DNA, 520 bp, Homo Sapiens
  misc_feature (408)..(408): n is a, c, g, or t
gttacattatatatgtattgtgaactttaaaagactattttgataaatttataaatatataaaattatgtaaaaactacactatattttgatttagattttcctgctgtttgctaccaaaaatttgtattttaaatctgtttagttttagtatggttttgtctctaatgaataaataattccttcttattaagaagaagtaagggagaaagtttttagaaagtgatttttatgctcgcactataaatatggcaggtcggttcattcttttgggaagtcagtttagttactctgagtttatccaagtttatctctaccaagagtataatggcatgggatggcttatttaggacaattccctttcccattgtttttgttgctgagccaatttgagttagttttgcatccntggggggctttaaaatacagcctgcagtgaaagatccagaattcactgaatatttcttctgagagcatggtttcatggtttttctctatgaaatgactcaatattccaaatg

SEQ ID NO: 456330 - DNA, 518 bp, Homo Sapiens
cagcctggggtgctgggcagtcgcgtgctgccttccagcatggacaatgatgagaggtcggatgaaccctctccgcagtggctaaaggaattgaaatccaagaagaggcaaagtctttatgagaaccaagtttgaccaggcagggaacactgccacatctacgtaacagaagccttaaccatcagaacccgcagacgaggccgagctgctgccgtttcttcctgcacaacgcttacgtgcctgggcccttcccattggattgagaacgctatccagtgcccctgtcctcgccaggctctccctggatccagacgggaagacccaacctccaggagcactcgctcatctccccagacagcacttcaggctgggaaaggagccaggctgcccagaaacgtccatgtgggtggttttgctttttatgtaaaaatttgcatttctacctattttagacaccttcatcagctccaagaacacctctgattactcctgccatcatgacccttggccataatagt

SEQ ID NO: 456331 - DNA, 705 bp, Homo Sapiens
  misc_feature (15)..(15): n is a, c, g, or t
  misc_feature (24)..(24): n is a, c, g, or t
  misc_feature (33)..(33): n is a, c, g, or t
gatctgggaaatgantgcttgagncccctcaanattagcagttaggtttgggaaatgccatttttagtctttgcaaaactaagaaaaggacaacatgcaagtccgaatggaagaacccatgggcggtagcaggcaacagctaagtaggacagacctagcaagagtaaagtcagactgagaactgtggtctgaacctgctgtcccgccttgcaacgcggtcctgtctccgtggtgtacacttgaaaggcatacttagcagagaaagccgagctaaacacagtgttgtttctgagatattctaaacacatctgggagtataggcagcatttccctcacctcaatgctagatactcagctctattgacttaaaatgcacactgaagcaagaaaaacagatctgtgagctgaaattccaggctccttggaaagccccgggatccattttaggaaagcaccaagaggtatcctgatagtgccccgtcccttgctacacacaaagtcaatttcgaaagctctgtaaatctcttctttgagtgggaagttatcaaagcattttcacaaaaccatttcaagaacacagagaaatcactgtttagtcccttttccaaagtgtttgaattttcttaagtgttgcatttacattctaaagatatacacatttcagcaacattgaaaggaaatagagtgcacagaacatcaccacca

SEQ ID NO: 456332 - DNA, 539 bp, Homo Sapiens
tcacccgtacttctataatggcgcatatgacattggtctaaattgacttactttgaatcttgtctctgacaccacactctgagcacctggtactgtgactggaacattgtggacaatgaacaaatgaaataactgaacctactcaaatttggatcagtcgtataatgatatgtactgaccttgattaggggccagcacagtggctttattgcctaatgaactagacttttcttaggactcaaatgcaaagttgttaaaaggcccttctaattaactcaaaaacagataaggcagtttgaaggagagctggctgtgaatttggctccgagtttatgtactagaatctgacggggtcctgagaggttcaaagcgtccaagtcctataaggaatttcggaattggaagacaaaattagctaacactactgagaagacaaacaagaaatccctgcagcatggccgacaatcatctgcactttgtttataccttaggatccgtttttttcacatgcttccatgaaggcgtacgtgggtaagctc

SEQ ID NO: 456333 - DNA, 502 bp, Homo Sapiens
tcgtcttttgataggtggaggatgtttctgtagtcctaggaatccacagtgaattcgagtctagactcagtcatttttcagggtcaggggaggagggagaagtagcaaatcagatatgcccaaaacgttacaggggtaacagtgaatccaggatgctgctatcagcctgtgcattgtgaagaaggcaatcataggcgagcagccgcgggagcaggaacagcagcgtgctaagaagcagtcacataaacagcagcaggagtaggcctcctgcttttcaaaagcagagtactgcaggttcgcgaaatgcaagacactcagatgtttgaaaatctcccgagttgagaatggctactgtaaaagcgtcaccaagaaactctgacgatctggacagtcctaactctgtgttagcatacttacttccggaagattaatgctacttcgttgtagattgtgcataataggaaaccccccttgcaagaagacgacgggatcctctagatca

SEQ ID NO: 456334 - DNA, 375 bp, Homo Sapiens
  misc_feature (326)..(326): n is a, c, g, or t
acgtaacgccttcgaatttatactttttcctgagatttcaggagggaaaaatgagtaggagatgactgagagcttaaagtttgggagtgtcaattaactcagcattcttttaaaaaacatgtgtcatatattacagcatattcttttatttgaagtgagtaaatgtatctttttaaattccttagtaatttttgagcactccatatgtataaagcatgtgaatatttggtagcattttacaaatgtccagagatttgtgagagttcctgagatcttcatagggggcccacaaagtttagtattacttttcacggtaatactaaagngtattttgcctctttttactttttctctttatagcatacagtggtaact

SEQ ID NO: 456335 - DNA, 337 bp, Homo Sapiens
tgcagaggcgtctagcctgcaggcattctgcgcacgcagctcactctgctgtgggtgtagtggactcttgaatttcactcccaaccacccgcttccatgcttccctcgggaagtgagccctcttccaccctttgcaccaggttaaagccacgtatcggcctagattcgcgacttgttcctcgctctctacagcatgtcttgcaagatatcctcgcaagagctaagcccttactcttcacgactatccacctaagacgacatcatctgaagaaaccaatcatttgcctattagctaatccctatacacgattatctagctctgagggatccttagagt

SEQ ID NO: 456336 - DNA, 462 bp, Homo Sapiens
  misc_feature (418)..(418): n is a, c, g, or t
ctcagaggcgttagggccatctgtaccatttacgttttgtgatgtagagttacccttggtaactgcttgtctctctcccaagttctgaggactccatagagggcagagctacacctcctccatcagagttagaaattcccatgataggtaggaggtatacttccttcccacctctgtcattgcacctgtcttagagatagttactattgcagctaaaaccccttgtgaaacatggattacatcagaagtgatgcagtgcacaataaagatcacagcaggtggctgtgtgctcgtgagagaacaaacgtgagttaccactgtggctgatgataacccaagtagaccctaaacccaatctaagactggtgctatttgccagcttcccgagcttaaaggcagtggctaccagttgcctgangagaagactaaacggcctctgcaggtgtaccggagctcgaaatt

SEQ ID NO: 456337 - DNA, 228 bp, Homo Sapiens
taaagaacacgaaatgtattttcttcacactttttggaaatcccaaaatcaaaggaactgggcagttcaagtgttcttgttgagggccctagtcttcttgcttcccaaggtgacaaccttgaaccctgcatcctccagaaggggaggacacctttgtgtcctcatatggtagaaggcagaaaggcaagaaagggaccaaacttcttccattaagtcactttatgacag

SEQ ID NO: 456338 - DNA, 248 bp, Homo Sapiens
ttcagaggcaaaatagtcctgtgttttgcatggaatggtctaagagctttgagtaggttctaggagtccttgtgtgtgtagcctagctccttggaggtctacattgggtttagagtctgaagcccatgcctttgtagttcttgtcatttgagaggacatgagagggacactggagatggatgagctggtctagagtaggattgggtgttcctagttcctggtgatatgtcattgactccatcctaagt

SEQ ID NO: 456339 - DNA, 426 bp, Homo Sapiens
cggtacccaaagagtgaacggacccctggggttattacatagactacacgggcatgcaggaagatccggggaacccggcagggggctgttcaaccagcagtggggtgcccactgggaacgggccagtccgccatgtccaagaagggtccagagccacaatgccccaagtgcccggtggttcagtcaaaccaaagatcatgtcaccagagaagtcacacagagtcatttctccatccagtgggtattccagccagtcgaatacacccacagcactcacccctgtgcctgtgtttttaaaatcagtgtcaccagcaaacgggaaggggaagcccaagcccaaggtaccagaaaggaagtcctctctgatatagtcagtatccatttcctcactcgtccgtttactctttggggatacctctagagatc

SEQ ID NO: 456340 - DNA, 420 bp, Homo Sapiens
  misc_feature (65)..(128): n is a, c, g, or t
ttatccccacgagtaccggagcccatttctgttttgtttttcgcacaactctccctctctctgtnnnnnnnnnnnnnnnnnnnnnnnnnnnnnnnnnnnnnnnnnnnnnnnnnnnnnnnnnnnnnnnngtcctgtggcctctctgccctttggctctctgtttctccttccttcttgcacctgtctttttttgctccctctcctccttcccttctccgctcttctcaccctcgctttttcctttcggccttcccctggcttccttctctgtctctgaccctccctgggcctgtgtctgtgtccttgcgtccctgtctctctggatttccctctgtgcccatctggtgtgccctcgctggctcacgcgtgtccctgtctctgggtaactgtctgtccatctctcccccgtctcccttgtcc

SEQ ID NO: 456341 - DNA, 419 bp, Homo Sapiens
taatttttgtaaaggtagtttcaatctctccctttgggtttcataacaccttattcttaaggtgtgggctataaggatggaaaaaggatgacgacccactttaacttcttcctgctgacaggggatgtcgtgggggtaggtgctataccccaaagtgtgagtggaaccactttgcagccatctgagcatgctcacataggctgggttggggttcgaaggcttgcatgacaaacggcattcagtattctcatctatagttttagtacagtatttaatattctatgcgaacagcatactatagtttttagcacagacacagtgaactataaggtaaataatgagtcccaggataaagagtgaaagtcttagcttcagaagcctttgtagaattgtctaagctctgaggatacagtacacgt

SEQ ID NO: 456342 - DNA, 428 bp, Homo Sapiens
  misc_feature (222)..(252): n is a, c, g, or t
  misc_feature (258)..(374): n is a, c, g, or t
gagccggcaccggttttttactgtagcagatgttaggatatgaatgtgggatggtttctttcagagaaacgctgataatgtgatcatttgcagtgttattacttcccaattcatcaaatacagtcatgtctcaaatgagcataaaaacctagtccaaagtgatttttaaattagctgtcattttgaagtgttcttgcctttcttcctctccactagtacaannnnnnnnnnnnnnnnnnnnnnnnnnnnnnnagacannnnnnnnnnnnnnnnnnnnnnnnnnnnnnnnnnnnnnnnnnnnnnnnnnnnnnnnnnnnnnnnnnnnnnnnnnnnnnnnnnnnnnnnnnnnnnnnnnnnnnnnnnnnnnnnnnnnngtgcatgccaccacacctggctaaatttgtatttttagtagagatggggtttca

SEQ ID NO: 456343 - DNA, 487 bp, Homo Sapiens
atacgaatcgagctcggctaccggtcttttactgtagtgccccagttgacagaatcatgcatcagaagcttttatgtgaaagtggaatctttgttctggagaaaatcaaagtgtgactgtatttgaaagccagctcgttgaaggattccttcttctaatgagctgcgccagtagtaactgaggtgtggtgattagcgaaaggtcactcctgccgtgccaccttccgtgccgatttccctacctaacacggggccagggaaggcagcgagcgcaataaatcagaacacaggtgcccattaacctgccgtgaggaacggtcagagagccttttccttgtttcattccaaaaaggtggggggagagagcaaggagaacaggtttttggcatattagaaccaagcacggtttgtgttaatcaaggacaccctgaatcagtgcaatgaaacctacatgtacagtaaaaaccggtccgagctcgattcgtatc

SEQ ID NO: 456344 - DNA, 480 bp, Homo Sapiens
tctttttactgtagttaaggtacattcttccactgatgatttttttcttacatttactcacagcttccacctccaagaggaaagtggggggtgctctgaggaagcatgggaactacagatgacttaccacattgtgacaagtgtagtctccacagttttggggctgtgacagcaagaacgtgattgcaggtgcaggtgtgctgagatggttatgctccagtactgagagccataggacaggagagggaaggagaagcttctacccccgtttaacagagccacagtggatgagtgatttctgttcaccagacacgcctgtgacatgctacctgtttttaacttcagacctgagaaggtgatttaacagtcactcaaatggcagtaaacacgacaaaagaatccacatggcatgcccagggctagcgtcagaagagacacatagagactcataatatacaaagagcagcgtgcatcatccac

SEQ ID NO: 456345 - DNA, 411 bp, Homo Sapiens
caaaatatgggtgatgcaacagctgttcacatgtcagcctttcagtagggtccatgtggagacagccctttaggagccccagggcaggataagagatgtttgggaattttaattcaagtggttccatatcttcagggtctggaattttcactccactgaagtactgattcgtgctaaacacttgctggtgcctaggaatgagatcccccaaggtcttcctaatcagatacagctgatccacatccgattttcctggccacagaggcactcctgacagcagctcagcaaagacacagccaattgcccaaacatccacccggggggccgtactgcgtgtcccccaccagcagctcaggggagcggtaccacctggtagccacgtagtctgtatagtagtcactccgtaccgta

SEQ ID NO: 456346 - DNA, 343 bp, Homo Sapiens
gattgggttggccatttggttcttaaatctacaaccgattaggcctgccaagctcttgcatttgagaaagtaacctcctcttctgttgtaccccagttcctggtggcaactcaaggggtcccagaggcctgttggggaggcttcattatttttctcagctggtaactgaatttctgtagaggctctttaacaatgatgtgaaatgtggggtttctctctgataaagccagtggaggaaatggttttagagcacagagcctttcttagtacctctcagattctcacagatgcctgtctttggtattaaggataattagacaatacagggtccagtcattcatag

SEQ ID NO: 456347 - DNA, 584 bp, Homo Sapiens
  misc_feature (427)..(466): n is a, c, g, or t
  misc_feature (561)..(561): n is a, c, g, or t
ccgcgcccggctcagaaaatgatctttttaaggtctgttcttccagagtgtagctcttatattaacaaccattacatccacatatcaagacagattgtttcaattaggtcaatgaggcccacgtttttgagagctgttaatatgtacatgaggcaattactgtaggcagagttaaaaggtgtgcctttgggaattttagattgagattatcagtttcattcatgagccaagacagaagccatgagaattgtatgctgcatttctctgcaggtttgttcgctagaagcctctccagtgcccacactccaaaggttatgaagttgccagattcctttccttggtccagtcctcataccatctcagaacagtgccttcctttgtattcattgagaaccaggcaatatgctgaacatttgggagtttcatnnnnnnnnnnnnnnnnnnnnnnnnnnnnnnnnnnnnnnnngagagaccaacagagtgaatcttaacccaaatgtacatcagaattaagtgggtacttttacatgttccaaagccaaatttgagtaattttcgttnattccttattactggtaaatgaa

SEQ ID NO: 456348 - DNA, 468 bp, Homo Sapiens
tggtggtggctgctacagatgcggagggatagcaagaaggcagtggacactggaatgggaatgcagaactgaaccagcccacagtaggtagggcaaggcaacaggttcgggtacatccaagtagctgtggctagcaggcccaatgaggaagcaggagtgacactgcaggaaagcagagaccactaacaactcccagaatgggtaatatttagagatccaggcaggctgctggcatcaggctaatatctcagagagtagttaaactttaggctcttgattggggttccaggacaggactctgtcactgaaagggaatcctagttctcagcatactaggaaaaatagccaagagaggaacttatgcccgtaaagaacaaggcatgaatctaattagcagcactggggtccaagatagagctagacaaacaacaaggataactcatcccaaattctggagtgcttatccga

SEQ ID NO: 456349 - DNA, 377 bp, Homo Sapiens
caatgagaaacctctagagggtgttttaactccagaaaactctgtaaccagtgctcttcagctgtctgctctaggctgccaccactctgtggagtgtactttccgtaaaactgtttcaataaatctgtgctttcattgctttattctttcatggctttgtttgtttctggacttgtggtcaagaccctgcatcagtaacaatattggaattttatctgttatattaaggccattaattccacatgggtataatttctgccctattaaggcaatgtcttccctattcttaagctcttggtaggcatctctcttgctaacctcatgcctcatgttttactttcccagtatagtgaccgctcatctccactagcctcttc

SEQ ID NO: 456350 - DNA, 527 bp, Homo Sapiens
gagccgcctcccgtgatcagaggctagatatactatggaggcatacaacagctgcaggtcaggttattgtgtcttggcataaagatcttaagtattccaactggctgcatgtagcttgatccccatttttaaaagcttagaaggactgtagcactttcctggcatgtgggcagctctttgttgaatagaacggctattaatggaaaaaaaagtcagctggaacagtgtgctctctcagcttttctgggaaaggaactaaaaatgaaatgattccatcataagtatgtttgcaactttgacctgatattttcaaactacagctctaccaattatcctcttttctaaaccacatttttttagatcataaagcccaaccagattctggggttagaaaaactcaatactgactattggccattgcctgaaatctgtcattctctaagtgtgtgatatgtatatattttgtatgtgtgtgcatgtgtatgtgttaggtatatgggagagttttaataggtagcctctgtatc

SEQ ID NO: 456351 - DNA, 604 bp, Homo Sapiens
gctagtactccaataccatgctgtactcttcttcagtaacagaacactacattttagttggacacatgatctgcctggctgctgattacactatccagtcttcccagttatagttctgactaatgggatttgagaagtgatcttaggttgtaccttctgggaaaggaacgtgttctccccttccttctttcccttggctaaaatgcagatgtgctggtgggagctggggtagatatcttagactagagagtaaaagttatgggttagggttggcagagtgacaaggtagaaggaacttcagtccccaaattcatacacttcgtggagaagaggtgtcttagcagctgacagagagaacacacgacactatttgcaacagtagttaaagcaataacctaatatagataagtaaaagaaatctagcagaattcaaagttggctctacatgtcattacagccatgttgaaagctcaaaatataaataggatatacacttaccagtgacatctgtacagttgtcatctgaatcagactccccaggatcaaatacttggataccctgagcctgtagcctctgtattacggtagcgagctcgactgtatt

SEQ ID NO: 456352 - DNA, 694 bp, Homo Sapiens
cgagctcgccaccggtgatacagaggctaggtcaccaatgtgaacttaggctttcatctttatgacgatatttgggatcactgcaagtattctgaattttaaatggcattcagtgatttgataaaataggaattttgttactctgaactgggtagtgtttcagcaactggctactgtgtcattatttctataaattcaaaatgtagaaggaacatttaccttttaacaagggagtatcccaggtctcagttctcaaccgtttttctaggtgcactcatgcttctgtgatctcatgaagcccaatggcattaaattctatgtatatgtgcatggtccatgaacacatatttccagctcctacctctcctctaaaatttagactcatatctaattatctacgaattatcaccaattggaagactaatagacaactcaactatcacacatccataagggaaatcttgatcctccaccttcaacccctgggcccaacactcctcggtcatctccatctcagtaaatagcacctccagcgtaccagccattaggccagaaaacttgccttgacccctctgtttgtttcttgcacctcatatcagcatacactgttgaactgtattaagaatctgagcttcccttgtcacacccattgtgtacaacctggttcactttacgtcatactgcatagataccc

SEQ ID NO: 456353 - DNA, 503 bp, Homo Sapiens
aacggatccgaatgcagagcatggaagggtgttaatcgctctggtcttgagaccgattccctgttaacctaatatcttctctctgtagctaagacttacaccagccttaagctgccttgccttctgaaagtttctccattgattctttgcccgatagaaacattggcagcccttttgtgcatttttagtatccagcaggactcccttctaattctctgctccctcagaagaaatcttttcttttctatgcaggataaagctggcatccagggtagaaaattattttgaatgttgtttccctcggtgattatctccctttcaattcaatttcttctgagcagctcagtgataatagggctccactcctcacatcagcaggaatccacacttttgaagacagcatgtgaagacgcagtgctagcccattgccactacttagcaagacccagaagactactcagcacatagcacagtagcctctgtatcacggtggcgagctcgat

SEQ ID NO: 456354 - DNA, 566 bp, Homo Sapiens
taaaatcgagctcgctacccgttatacagaggctagtagcacagacctgacctcacccagagtgatgggcaggcacctctgtggactggggcacatcccctccagccaccagtcaccatcactgcagagactcatgcggtggcaaaggctgcttccccctccttcttactgacccccaccatccttcctttatgtgtctttaaaaaaatcccaacagcacacaatgcttcttattcctttttcttctctccatccctccatcactgccctagttcaagctcctccccttcctgcctgggctgttgcagggctttctctcccagtctttctgcttctggccctatctgtctccatccttgctacacacagctactgggaggatcattccataacacaaatctgagagagtcttcccttgccctcagcataaagactagactccagccaggcgctaggaagccctgctcaagccagagtccacctacctgggccctctctcctatttcccattctgctactcgtgcttaacacacatggtatttatgccatactacttggtgctctat

SEQ ID NO: 456355 - DNA, 682 bp, Homo Sapiens
gactgtattacttattgaacaagccactcgccagattttcagttatacagcaacgactagtacttattctttgtcatagctatctcctgtgtaaatgggaaaaaagctgacctggcagtcagaaaccctagcttctgctgtcaactacaaaactatcccactcagtgtcttattctgtcacagattctctagctttaatataggaaaggaatttgtgattgcttaggccctttccacctcagaaaatgttaggagtcactgtaacacatgtagaaacaaccaaccctatgtaaaaacaaccaaccacgaagttgaatctccactttagtcaacatgtgatgcattatttagacttaggaaagggatcgctggtgctcattatcatgaagacaatcagcttttggaggaaaatttaaaactccagcaaaaatcttagcatggagagcacaagtcatctacatagtcacagagatggcttctagaacatgttggccactgtaggtgagctaaccactaccccatgccattcagtgttagaacccaggactgcctgaaccttaggtggataactgctacactatatggcagttgacatataatttacttttaatgtttaacctgatttccagtgaatcagtcgctcagttgtaaactagcctcagtatacgggaggcgagctcga

SEQ ID NO: 456356 - DNA, 543 bp, Homo Sapiens
gtatacgaatcgagctcgcaccgtatacagaggctaacaagtaacccataaggtggtttactcaaaaaggtgtactaagtccaacaaatactcagttaggaatgtttaattgaaaagcagttcaaccgaggcaatgatcagtgaaaggggaagctagtgatttatgatgtaaaggaggcccgatgatccattgtgagtctaatgccagctgatgtcattacagaacagaaactgagggcaagaagaagctatcaggtagaaagtatctcaattataaattagaggtcaaagtggtgatttgagacagaaggaacaagtagcacaaaagaaacagcgttatcttgaagggaaagctgtagagatccagctccttagatctcactcttccgtatttatcacacagctttttctgggtttctatgcacatgtgtcctgttacctaaagtagattaaataagtctctgttcctgcaatcagatttccttacaaacaaaatgtttgttcaacaaacaaagggaccattttttaaattgttttactata

SEQ ID NO: 456357 - DNA, 622 bp, Homo Sapiens
ccctgtccctgaagggcccgggaacaagaaaaaacttcccctaaaatgaaaaaggttggcccactgaacactgttcctcctaatccaaggcaagagaagatgttttaagggactgaatttctcaagaagaccctcccattcacctggtgatttgtctcttgcttcccaatgtggcaaatggtaactgctagcataagtatattagactctagcctgctcgccctggaacagtggcagagaccagctcttaccttctcacttgaaaagtaaatctgaagaagtgcatttgcactttgggcaaaaaagagccagcaaaggatgcagacagtcacaggtaggatgttaaatgcctatacagaatgagattgaccaacttggaccaaactcagcacagagatgacaaaaagtcactggttcaggttgctaaatgttttgaggcacagggaagttaaatttttcagtgtaactgatattcccattaggcaggaggggaggaaatatggtgacgtttctccaggcctcgttttggtggcccccaaagtccagttcctacttaacttcctgttctagcctctgtgaagctgacatcccaagcttttcagtagatcccagtcgtttggag

SEQ ID NO: 456358 - DNA, 949 bp, Homo Sapiens
tactctagaggtatccccgcgcaaggatctgtgggctgctggttacacatgaccacggtagtgttacggggacatgtaccccatgactgtggggggacacagatcgtgggctcgctgtgctgccatcgctggggtcctcatcattgccctgcctgtgcccgtcatcgtctccaagcttcaactacttctaccaccggtgaagacggagcatgaggagccaggccagtatacccacgtcacttgtgggctggctgcgccggaccttagcggcaactgactacggacttggcaaggcctgacttccctcgaggctaaccgggaacggagacccagctaccttcctacaccacatcgggcctatgcagagaaaagaatgctcacggaggtctgacccatgcaggcagggcctgcaggaggggagcactgagctaacagtctcttaggcttccttctcatttccactactcactctagcttcagttgacttcttgactctctcccctacacccactacctggcatccaggacccaatacctggactatcaaccttgttgcttaatccctgcagcattcaaggttaatccatctaagtgacatttttgaaattccagcggtgccacccaatcatgcccagcttctgtcatatgaatgagatatacatttatgtctgaccttccctcaagactgatttttcatgtctgggacttacaatatctcaaggaacagcaatgtcaacaggatggaaaccagccctatctgagtcttcgctccctccttagtgttctatgctttgggtcatgtgcgtttcctagcttcaggctacttggtaactggaagaagctggaggacagaagcagtactcaacttgctgttattccagtgccctgtaacaatcactggtcctcctgcagatgaccctgctagagtctttatttgcatagcctcagt

SEQ ID NO: 456359 - DNA, 436 bp, Homo Sapiens
tgctcggtaccgagtgatgcatgtggaattttctacaactttcctctagttccattagttacctcctaccccaggactgggcttgataagcctcatgagaggctgagtagatatttaatctctagactaagcctattgatttcctactttctgccacttggtcaaactttggtctccttttataataatgttcttatataataaacttgcattctttcctttttcttccccagaatactgacctttcatacttttaggaactgtggatcagtatttaaaggcaagattttgatcttcaaaaatttttttctccttcttaggcaccagactcttacagttcatgagttagcaactcaagaacaaatacaatactttggtctttctggttctataggagtgagagagagagtgatactgcatgctacaaatactagcc

SEQ ID NO: 456360 - DNA, 410 bp, Homo Sapiens
tcgagctcgcccgttacatgtgcgccagggtctacctgctctcattctacgttgcttttgccacattaaactgcctctctaaatgttcatccaccaacaagagaattgggctgatccatcaaccccctccaattgagaaggaataataagaataatgccatggagaaaagataccatttgttgagttttatgtgtgaggcatgcatcatcttattctcacaactgttttctaagatgagtagtaatattctctccatttaacagaggctcagagacatttactagtctgctcaaggtccaaacagcttataacaatggagccaagatctgtgacctcgtcacttgactctagcctaggacatctccatcgctgagctagaaccctgacctggagaaccaggtaacgtaca

SEQ ID NO: 456361 - DNA, 580 bp, Homo Sapiens
aatagtggcagctcgtctaatcttgtacctcctgcggaccacatacatgcgccagtacttttgaatgatggttgctgccttggttctgcgcagaaacttagcatagcatcgggcctggtagccccgcacgtatctctgcatggtgatggctgccttccgcatgcgtaggtacttctttctcagcagccaccctcggatggtcttctggatccggatgcaggcagctctcagtttgtcagctctcaatttttctagataggccacttgaccggcacggaaaaagatctttgtcttaccaaactggtatttgtccttgtccagtatcagtttctctaacacattcttgcatgtttgctttctgtcactcagcacatctttctgcttcattaggacacggtagcggctgaaaaattcttggtaagtccaccgtgaggggaaaccggccgcactgattcggatggtttccaggacaccacatgctctcagctgctgcactgccctcttctcatcaaacgtgaatgggaacttgaagtcattaggcttgatacagcgcacatagtgaggggtagtggcattgagt

SEQ ID NO: 456362 - DNA, 353 bp, Homo Sapiens
gagaaaagagatggctctaccaacaatgacccttatgttgcctttcggagaagaacagagaaaatgcaaactcgaaagaatcgtaagaatgatgaagcctcttatgaaaagatgttgaaactgagacgagaatttagtagagccataacaattttggaaatgattaagagaagagagaaaacaaaacgagaattattgcacttaaccttagaagttgtggagaaaagataccatttgggagactatggtggtgaaatccttaatgaagtaaaaatcagtagatcagaaaaagagttatatgccactccagcaactcttcataatggtaatcatcttcgttagcggggatgctc

SEQ ID NO: 456363 - DNA, 167 bp, Homo Sapiens
cggacaggcaccaaatgctgacagatgaaggactttcagataaggagctcatggtatcttctcaggccctaagagaacttaacgcagaaaacgcccttttgaagtctgaaaattctttggcagcctctttctaacctcctccttagtcctaccatggtaccgagctg

SEQ ID NO: 456364 - DNA, 351 bp, Homo Sapiens
agctcggtacccggatactgtcatctagaatacaaacggcccctgggaatttagttctgagccctatacttgcccatttctggaagaccagaggcaaagcacaaaactggaacccaaggtaccaaacaaccaaactgttttcttgggtgccaaataaaaggaaaaggaatgtcaacatttttccctggcccattccacagggtcctgcactgtaactgctaatataccatgtttgctggtacataaaaaatccattcagcattccccctttaccaaaaattgctccacctcatagcctatgttcctgaaagccagccattaaggaaacttatttttattgtttgagacaga

SEQ ID NO: 456365 - DNA, 417 bp, Homo Sapiens
tgagggtggggtgacagataaaaggtacaggattttttggaaggatgaaaatgttccaaaattgtgctgatcgttgcacaattctgtgaaaagactgaaaactatatgcgtgcattaatatagaagtcactgccacagatagcaaacagcttcctgtgttcccagcgcctccgggcacacagacaactccgtgcccacatgcagcgcatttctggcttttccaggctgtggcaagagttcttcccagaacagccccaggaagtcccaggcaaaaagaaaccaccagctcccggccatcagcccttctcggctgcctttttccgccactctcttgggaaccggctgacagggaatcagagctcctcagaacttacggttatgccgatgtcatggtaggtgaggatgacagtctaccgg

SEQ ID NO: 456366 - DNA, 495 bp, Homo Sapiens
aatgtcatcctactgctgggagtttgtttcccagatagggagccggcgcgctccagtagtagctgtgcggcagggcttgccgggcctccgcgttactgatgctgatctgctgaggtgagtccaagtcgtcctgctggggagccactcgaatgcggccaggaaggtcagtcagataccagccactcatatcttgtattttgccataggtccagtaggaactctgacatctgtttgaaacccctgaacagaaacactcatcgcagcctttccaattatcctcttgcaaattgaagaagccggatttgcaacgactacagtctcctccttcaacattttccttgcagataacaggggccaaaacaaggatcctcatttttgctccctaacccactgcagttacaggctttgcagtccgggtagccagtgtagccctggcacaccgatcacagctcacacctccaaaaccagttttgcaatgacagtaccagggcgcag

SEQ ID NO: 456367 - DNA, 596 bp, Homo Sapiens
tcggctcggtcccggtactgtatcgacaataagaggtgaaaactggtttgcagagagatttaaataactgtttgaaagtacatccagtcatgcacagtccttcgctaacttcaagaagagcacattggtgttaagtaaggggaaagcatcagattgataagtaactgataatgatcagcactgatgtttcggaggaaatatgtgttgcagagaggcagagaaccatggtggcattttgcccagtgagatgtgtcatgcccactacaggcccctcctttagagagggcaccttctgccatcttcatctctccccttggtttttattcattgttccttccagtgcaagaggatgtcacatttcatagatatatgtgaaccacagagacccaccttcatccagggaactgcaattcttaggaaggcactggggcatactcaaggcaatgagaattctttcacaacagaactcctgtgtcaacaggatggaacttaacaaaggggactgccctttcagaaacagtctgtcctgcaacagcatggagatgacaatcagggacaggtttacttagtgatgacagtatccgggtaccgagctg

SEQ ID NO: 456368 - DNA, 368 bp, Homo Sapiens
gagtttggagtacaactgtggagttgccctggagattatggtggggttttctgggcttcacactagggttgctctggggtttttatagggttactccaaaaggccacaggcctgtgctactacctggcccagaggaagggagggagataaggctgtaaaagaaagctagggagtttggagggggaaggacggaggtgacccagcttcctagaggaggggataatttgaagttgcagagcagcaaggctctgctctaccccatcttggtattcaagtcccaaaccctggccaacagcctcctttgttggcagtgagggtctgggaatgaagaaggctgctagctccctggagtgatgacagttaccggg

SEQ ID NO: 456369 - DNA, 541 bp, Homo Sapiens
aaggaaaaaatgatctctgtatcccgacatccgtatgacagtacactgaaatttttgaactcattttccagagctaaaatctgatcccctcgttttaatcgtccgtcatctgcagctgctcctctgtgtcttctggatggtgttcagcagtgggcgaaccaaggtggtagcctgtagacatgttttcaagctgagctgctatggcgcttatattggtatctgctacgacctgcaggataatgcgcccgtaggcgttcttcagcagattaaccacatccgcgtgagacagcccatccaaaggttgcccgttaatgctgacaatccgatctccaactttaagcttctgtgtccgtgcggccactccgctagcctgaatcatggcaataaatacggggatatctcctaagggacttcctcttcctccagcaatactgattccaagggcatcactgagctccctgtttatctcaacagtcccccttccatatctgtgcctgaatttttctgggaaggatctgaaactctttttgtccaaacccag

SEQ ID NO: 456370 - DNA, 357 bp, Homo Sapiens
ccggccggatatgtcatcttttaggacaagtattgtaaaattatctgttttagcccatgttctgatgacccacagctctgtcacctttgtagcatcatctccccattctagagtttttttcccacttcattcctaaccctgcctctttgaggaagcccattgacggggcaattgaaaccttctcattgctcctgagaccagaacggcaagatgtttcctttcagaagctgagagccacaaggaggacagcagtgagcatctgcacagaaacgagctcagagacgcccgtgttcagtggagcacgccgatggggtgggcgccctggctctagacgctctcctaacacacctgtgcttt

SEQ ID NO: 456371 - DNA, 323 bp, Homo Sapiens
gtcccggtgactgtcatcgtccccatctctgtgagccacaaccaacagcaggacccaacgcagtgtctgagatccttaaatcaaggaaaccagtgtcatgagttgaattctcctattatggatgctagcttctggccatctctggctctcctcttgacacatattagcttctagcctttgcttccacgacttttatcttttctccaacacatcgcttaccattcctctctctgctctgttgctttggacttccccacaagaatttcaacgactctcaagtcttttcttccatccccaccactaacctggttcacagtctccgg

SEQ ID NO: 456372 - DNA, 388 bp, Homo Sapiens
aaagacacagaaaatagcaagtgtgagcgaggatgcagaaaccctcatgcacagctgctgggagtatgaaagggtgcaaccactgtggaaaacacgttggtagttccccaacaagtggaacaccaacaccatgtgacccagcaattccgccctgcgtatgtatccgaaatagctgaacacagactcaagcggatgtgcgtattcccacgtctatagcagcgttgttcgcagtgaccaaatgtggaaacaggctgtgtctgttgatgggtgatagacaaacaaagtgtccgtacactccgctggagtattactcagtctggaaaaggaaggaaattctgggtcacatggtgatggtgttcactattgggaagaccaacgtgttgccacc

SEQ ID NO: 456373 - DNA, 964 bp, Homo Sapiens
atgtgtgctgagcggtagctcctcagaatgatattcgtcctcatgggcaggacgtagcctatgaaggctgttgctataacggtaaatagtagaactactccaatgtttcatgtttctaggaatatataggatccgtagtatagacctcggcctacgtggatgaataggcaaataaagaatatggatgctccgtttgcatgtagatagcgaataactcatccgtaatttacgtctcgacagatgtgtgtaactgatgagaaagctgttgttgtgtctgatgtgtaatgtattgctaagaacaggcctgttaggatttgcaagattaggcagatgcctaagagggaaccgaagtttcatcatgatgagatgtttgagggggctgggaggtcaatgaatgcgttgttgataatttttattagtgggtgtgattttcggatgttggtcattaaggttcttgtagttgaagtacaacgatgatttttcatgtcattggtcgtggttagattccatgtgagaataatgacaatatatattgcatttattttaagtactatttttgttattgggtttgttggtttttcttctaagccctctcctatttatggtggacttgggttgattgtaagtggtggagttggttgtggcattgtattgaattttggtgggtcttttttaggtttaatggtgtttttgatttatttggggggtatgttagtggtttttggttatactactgccatggctactgagatgtaccctgaggtttgagtttctaataagactgtttttggagcatttgtttctggtttaataatggagttttgtatggtttattatgcattgaaggaagaggaagtagaaattatttttaagtttaatgggcttggggattgagtaatttatgatacgggtgattcccgtcctgttcgcgtgggggatctctagatcgacacgcggcaagctg

SEQ ID NO: 456374 - DNA, 275 bp, Homo Sapiens
atattgttctttgtgaatttctttagtgtataatgccccacttaggtaattgggtcttgttcaattgattgttatgaagtgtctcttagtctagttaaacacctggcctgaatagcctacattttaaggattatattctccctcctgttatatctttaacccctatgccacacaaatccccgtccatgacatgaaaatcatcgttgtacttcaactacaagaaccttaatgccaacatccgacatcccggggactcctctagagcacatcatgcg

SEQ ID NO: 456375 - DNA, 1471 bp, Homo Sapiens
cccgacactctaccaagtcataccattgaggggagatttaggctcccgatctctaacttaaaaggttagtgctgactagcttctcaatgaacctgttaatattgatgttgaccatttttcgaagtactttaatgggacaagttcaagtacaatgggcatgaagctgtggtttgatccacagatttctgagcactgtccgtaataaaggccaggtcgtgtggatattagagttgtttggtttagtcgtcctgggatagcatctgtttttaaaccgagggatgggacggctcatgagtgcagtacgtcttcagaggatactaatattcggattgttatttctattggtagaacaactcgattgtctacttctagtagtcgtatttctccaggtttaagatctgatgtggggattatatatgagtcaaaggtgaggtcttcatagtctgtatactcatagcttcagtatcattgatgtcctatggtttttacggttaaggctgggttattaatttcgtctattatataaaggattcgtaatgatggaagggcaataagaattaaaataatagcgggtaggattgttcaaattgtttctacttcttgggcatccattgtgctagtgtgtgtcagttttgttgttagtataagtgaaatgatatataacactaaagagctgattaagaatacaattattaaggtgtgatcgtgaaagtgtaggagttcttctatgatgggtgaagtggcgtcttggaagcctagttggaaagggtaagccatagaggcatatagggctttcacctataatataacttcgacaaagttatgtaatattttactaatacctcgattatcgagaaagacatagtggttatgacgttggcttgaaaccagtgggagagggttcgattccttcctttcttatgcttattttaggttgatatatgttggttcttcaaatgtgtgatagggaggaggacatccgtgtagtcattctaggtttgtgcttgtcagttctactgcagatacttctcgttttgatgcaaatgcttctcagataatgaagattattaatatcactgctgttagtgagatgaatgagcctattgaggaaatagtatttcatgctgtgtatgcgtcaggataatcggagtatcgtcgaggtattccggatagtcctagaaagtgttgtggaaagaatgttatatttactcctacgaatatgattacaaagtgaatttttgctcatgcttggttgagtgtgtacccggagaatagggggaatcagtgaacaaagccccctataatggcgaacactgctcctatagataagacatacgttggcagtgtgcgcctacatactatgtatcatgtactacaatgtctcgggaggcacattcaatagtacacatgcccgttagacctcctacggtgacataggacgattttataccccagagctcataatatttgc

SEQ ID NO: 456376 - DNA, 252 bp, Homo Sapiens
ttggtggcttcatcagaactcaggttctttaaagatatttctctttctccagcattaccgtttagttcaccatagcctgttttcttcttcggcgtttcctggtgctgctggagggtgtgtttctgctcatgtttcagcggctttggctgggccttggggctgccctcggttccatgctgcaggtattggtgaggctgctggtgatgatggtggtggtggtgcttgtggctgtggttgtagaaataataactg

SEQ ID NO: 456377 - DNA, 323 bp, Homo Sapiens
aggatccccggaggttggagtccggatgaactgaagcgaatgtctgtgacggagggtggcatcaaatacccagacacgactgagggaggccgccccaagcttggggggctgatggacccgaggcagggggtgattgagcggactggccgctgccaaacatgtgcaggaaacatgaggagagtgtcctggccactttggccacattgaactggcccagcctgtgtttcacgtgggcttcctggtgaagacaatgaaagttttgcgctgtgtctgcttcttctgctccaaactgcttgcggactccaacctacggtagcgagctc

SEQ ID NO: 456378 - DNA, 160 bp, Homo Sapiens
ctaatattaaatataaaagtttatagcatcacatatataatgctgttgattagaaacatcaagaaaagtaattgactggaggggaactcggtgtgaccagctggttgaacatctggatggcatccaaggggccggaattgaattcccaatccatcccttg

SEQ ID NO: 456379 - DNA, 563 bp, Homo Sapiens
ctatagctacgatccggggctgcagctggggaatagcctcaaattcctcattctcttcttctgacaagactgcgtgttcagctatagcttctacattaggatgggggaactggctcaccttcttgctcctgtaattcatggttcaaatcctgtggtactgaatactctgatacaaaagcagaatcagtagaaacagatgcaatttcctctctttcttcctcagacaaagcaacatgttcaggagatgatgctgccaataatggtagaataagctcttcttctttgtgctccacttcaggggacatatgtggtgggaagggcttctcggaaaccaatgggctttctgggtaatcaagttctacgatctcttcttctactaaattagaatcttcaggttcaggggtaatagctatgggtagggaagtttctatttcttctttctctggttcttctaacattagaggttcagaaagagaaatggatggctcaagcatgttttcctccttctctcctttgacactggggatcgaagctttaggggatcctcagagtcaccgacagta

SEQ ID NO: 456380 - DNA, 201 bp, Homo Sapiens
acatatgcatgcatgtatctttgtaatagaatgatttatattcctttgtaatcccacaaacatttattaagaacctactggagaaaagatggggggtcacccaggttgccatcaaatcttgtattttccacaactactttctgtgctttagaaccatggttcccaacctaaggcataccagaggtcccatggtgactcatg

SEQ ID NO: 456381 - DNA, 476 bp, Homo Sapiens
tcactgtatggacaatgtcgcagcttatttgtggatatatgctcaatctgatttcgcccagacacagagaaaactaccgcattttctttgaccacgccaatgaggccattagctgtggcatcactctgcaaagccacttgagcactgtggctcttgtctctgaccaggaggttcctttgcagtctcagcatccagcctcttctaaaggtcagcagctgtgagaccaatggttttctcaaggctttttaaagcctgtgtggtggttctgctattcaaacagatgccagcaactcccagctcattttcagcaatattttgtggttctaagagttttcgttcattcagaataatgaggatgaagtttcagattaggggtccaattttcccattgttggtatcctccataatacttaggagaacaagatgctggaattagtgcctttgtttctgctgatgctgacatggcagtcatattg

SEQ ID NO: 456382 - DNA, 590 bp, Homo Sapiens
gaggattatgtttcatgacgtcacctaggcaggacacatatgataggaggctgcacaagatgccctgaggtctggaagaggaggaagaacaggcagaggaggcctaggaagaggggcctgaggcaggaggtgaaggacatggtcctggaaaaccaggcgaaaatgcttgagacagagcagggggccacatccccatagaaggtcaggggcagaagagccactgtttgccttcacaagagtggccttgtgacgatggcagctctctagtggggtgacagacgagagaaggttgaaggaagcatgggaggcgaggaaccagcaaggggaagcagctctttggtggttttgcttcatgaaggggagcggattacttttccttgtgtaatggaaaattcggccttggtttttgagattgatttgaattttgatgtgtgtaatagaatgcgttcatgtttctatgctgcagcagatgcctgtcttttccaaatgtggcaaaccctcagctgcatggggaaatcgaggtcgagggtcctgttcttcacgcccatttcaatgagtccttgccaggggctgcttgagctacccgtgac

SEQ ID NO: 456383 - DNA, 472 bp, Homo Sapiens
agtccagtgggcgtggacgcaggcatccagggagccatgactatagccacgatcacagtacccacagttcccaccataaataaaagctccctgagacctcccctgaagcagaaatgtgtgtgcagcacagcacgggtaggggaagatgggagtaactctgtaactctgtcagggtaatcaagaaagtctacatggaggaggcaatactgcattagggttttgaaggatcaataggagtctgccaacatattttgtataattggatcacattctctttctctctcccttggaagcattttatggaacatacattgcatacatcactctccatgaggtagagagaagaccggtctgtttacaccaaagcaaagatgtcacagatgaaatgtccttggcaaaaacaactctataattaatgagtctcagggtcctccagttccgttcggcccccagtgactcatgaataatccct

SEQ ID NO: 456384 - DNA, 518 bp, Homo Sapiens
ccattaattaatatgccaatttttcttcccttgtgtctgtttctaaatgagaatgctgcagcctgaaattgcctaaaataaaagaaacaaataacttacagggaaattaacaaaggaggattctgaaataatctcattcacagtcattatttattgaaagcctattacgtgccatgcattgggctaggtactgggggatggaagggtgggaactaggcaagcacagactttaaaacctgcacagtctaatcatttaattacaaaaccttaccctaacaccttgaaacaacccactagatgtagccagtgtttttggatgaaaacgttttgtttcctttaagttgtaaaaactaggagctatatactttattaattcagtaaacaagtcatatatgtacccaactttaaagtgatgactcagatattcagaaaaaaagtttggacttctaggagtttactcaaacacaatgtctgtcctttcacttatacctcagtgaactcatgacacgggtaccgat

SEQ ID NO: 456385 - DNA, 351 bp, Homo Sapiens
atgatgcgagagagacactgagctatctagaagtagagaccgacgtctataacaaatagtgtcagttgctgattctatcacaactttaaagataagggaaatcttcaatttaagctggttaaaatttcaaatatgattcagtcaatgctacaagtaagtggcattagtgggtctgaggaaataaaatcatcttctagttcaattttatagtacagcttggataagggctgcctctgttttagaaaactgatggaaaatgcaaccttcacaaacatctttcattcatttttatatatttatgatggatatgatttactgttatgaaatgtgggcatgtgggatgacaagaag

SEQ ID NO: 456386 - DNA, 626 bp, Homo Sapiens
  misc_feature (41)..(50): n is a, c, g, or t
atgcagtcactggccaaagcaggttcagtatcttcaggcannnnnnnnnnaagatcaaagagcttcaaatatgattgaagcagcgaatttgaagggggcataactagagaggaggtgggagagcttggcatggaccatcataaccacgtaaggagtaggggctggagccagcagatagcagagagccattaactttaaccaggttcgtgcatgttcagatttgccccgtaaatggtaagtgctaatgatattagctatgattaatacattacattcctttaggcaatacaaccagtgttgtcattaatagcggtcactatctaagaagcaatttccaagggaaaaagaagaaagaagaggctggctggggtgggtggtgtgaccgtggccaatggtcctttgcaatcaacattctttcaccccaaaccctccatcccagttgtatctttgtagtcctactgtaactttcatcttttttcttccctaaaccagagatctgagaaacgagtaaaataaaaaagacagggaaatttcaggaacacagaatccagggacccgggagctgcaggtcatcggtgggcctgtcctgttgcctattgtgtgaactcatgaacgagatcctcgaa

SEQ ID NO: 456387 - DNA, 443 bp, Homo Sapiens
cccagccatgcagaactgtgagtcaattaaatcacttttctttatacatttacccagtctcggggagtttatagcagtgtgaaaacacactaatacattccagttcatttttatttaaactttgacagaattgtcaagggagtatataagagaacaacaatcgtgtgtctggatatatatcctttctccatgttaacattttcagagattcttctttatatggttatttgctcaattagttatacacctacaactttaatactacaacttttgagtaattatggcagactagtcagacataatttatcttcttctaactcctgaaaagcacacaaaaatggtacacagttgaccaagaagtaaaatgaaaaacacaatgggaacagagcatatgagagactcagagtagtgactcatgaacggatcctctggtcagcctcaga

SEQ ID NO: 456388 - DNA, 509 bp, Homo Sapiens
  misc_feature (181)..(201): n is a, c, g, or t
ctcgcgaacgtgttatccatttctctcaacgcaatcctgtggggggcttctcctcaaagactcataatcatcggtcctctgcgtgttctattgtactgatagggtagagcgcatcaccaaaatcaacaggcagcacttgtggaggcagcagcaagccgctgtatattagctgataaacgcnnnnnnnnnnnnnnnnnnnnnaaataagatacaatgttttcactaatgatctttttaccatacagaatgctaaaagtaagaggacaccaggcaaaatcccctgaaaatcactgcagggacgctgccagaccccaggtggggcacttgaaacagaaagagggcagcggggccattttgaaagggaagaaaaagggcaactgggagcggaggttgaggacagagtctgcggagcataggagcaccatgtacacagcagatgctacgacgcccaccgcaacgtcgctctacatcacgtccctctacttcagagtagcgccaatgtgtttaga

SEQ ID NO: 456389 - DNA, 537 bp, Homo Sapiens
tagacaaccaaaatctaggacaatgcttacttgtagaagggaattgtgactctcatgaagaatcttatggatttctgaaggtatcgtccagggactcaccacagtctcctctctttcatactctacacacacctgcttggtttgaggtgcaagcccagcacttccatgtttttttgtatgctgcagactatgacacggagcattagagccttttaagggataagaacaaagcacacattgggattgattcattcattcattcattcatttgttaattgtgacttttatcatcaaagccaaggtagtcacattttaaataatatttgaatcacaaggtctggaaatggttcactttagagttcgaacaattcctgtcctgtcactgtacgagatggaaactgaattccagcctttggatttgaaaactattagtaattaatctttaagacaagaaaatctagggaggagaggccacagatataacagtacggtggagaggtagttgacaccaaagttggggactcatgactaatcctt

SEQ ID NO: 456390 - DNA, 264 bp, Homo Sapiens
ctcggtacccgcgaacatgcggcatgcggcaatgatataatacttttaactctcacggcaaattagtcacttgtcaagtccattgagagaccaatggagtcttgtttcatcattttatatcctgtataatttttttctaacttgagcgaagttttatactgtatttagttcaatattctacgttaaataaaaccagggagttcccgtcgtggcgcagtggttaacgaatccgactaggaaccatgaggttgcgggttcggtccc

SEQ ID NO: 456391 - DNA, 202 bp, Homo Sapiens
cccagaaagatcttattcctgggactgtgggatttaggccattggggattacaatccaggctcatcatattttatttcatgtgaatgtgttctgaagaaatagaaaaagagggagttcccgtcgtggcgcagtggttaacaaatccgactaggaaccatgaggttgcgggcttcgatccagtaattcagtacgaggggatcc

SEQ ID NO: 456392 - DNA, 339 bp, Homo Sapiens
ggtggtggtggtggtggtggttatggttgctatttcttgggccgctcccgcggcatatggaggttcccaggctaggggtcgaatcggagctgtagccaccggcctacgccagagccacagcaacgcgggatccgagccgcgtctgcaacctacaccacagctcacggcaacgccggatcgttaacccactgagcaagggcagggaccgaacccgcaacctcatggttcctagtcggattcgttaaccactgcgccacgacgggaactccagcatcagtaattctaaatcaaggtaccagacaggatacagttgacctgggtccttgtcctggtaattcg

SEQ ID NO: 456393 - DNA, 526 bp, Homo Sapiens
  misc_feature (307)..(465): n is a, c, g, or t
atgtcccaagtttatggaatggcgtccctttccccactcaatggctcaagaataccactgttatatatttgtttcctgtcaattgtgtttcgtgactctggaaagatactggatactttcaatatctaatgtgatatgatctcatgatagtgtcatactatttttgatatctaatatgtaaaattaagtaatctgatagttctaatgttttaccttgcagagaaattaatctatagaagtgccaggaagattcaaggaattggaaattatggtttaattagtgggtatttagaacagctcttctcannnnnnnnnnnnnnnnnnnnnnnnnnnnnnnnnnnnnnnnnnnnnnnnnnnnnnnnnnnnnnnnnnnnnnnnnnnnnnnnnnnnnnnnnnnnnnnnnnnnnnnnnnnnnnnnnnnnnnnnnnnnnnnnnnnnnnnnnnnnnnnnnnnnnnnnnnnnnnnatttacatggttattggaaggaccaagaaagacgaaccacagagcctcctcttcgtctttt

SEQ ID NO: 456394 - DNA, 502 bp, Homo Sapiens
agactaacccactcaaggctcaagaataccactgttatatattttttcctttcaattgtgtttcgtgactctggaaaaatactggatactttcgatatctaatgtgatatgatctcatgatagtttcatactatttttgatatctaatatgtacaattaagtaatctgatagttctaatgtctacttgcagagaaattaattatagaagtgccaggacagcattcaaggcaattggaaattatggtttacttcttgggtatttagaacagctcttctcaacaaatcacctggacaacttgttgaaacacaggctgctgggtctcatctccacagttgctgattcagtagatctgagtggggcagcatgatttgtactcttactaactcccaggcaatggtgaaggctgcttgtcctgggaccacacttgagaaccactgatttacatggttattggacggaccaagaaagacaaaccagagaggcctactcttctgtcttgc

SEQ ID NO: 456395 - DNA, 289 bp, Homo Sapiens
cagacctaaccccaccaccagagacactcagtgttggaactcggttgtatttctcccccagactaactttgtctatgtctgtatctgtatctctatagagacactcagtgttggaactcggttgtatttctcccccagactaactttgtctatgtctgtatctgtatctctatagagacactcagtgttggaacttggttgtatttctcccccagactaactttgtctatgtctgtatctgtatatctatagagatcattcagcatttcatctgaagggtcctctaagg

SEQ ID NO: 456396 - DNA, 141 bp, Homo Sapiens
cagacctaaccccaccacctatcctctatcagctgttctcagtagaagatagattgcaaagtttgtgtgtaagagtgcatctgtctatagctactggctgtgatggggttagtctggggatcctctaatcacccacacagc

SEQ ID NO: 456397 - DNA, 275 bp, Homo Sapiens
cagacctaaccccatcccaagtccatgtgtgcttcctgcctcagcacaccacctggaaagcaaactgccctgccctgcctgagtccactgtgagattcctcccctctggctctcacaagtttctcatgatgttgatgtttgaacctttaaggaatagactgagggaagggggcagtcaccagactggaaatacgggaccaggctcagcgacgggtgctctataccaccctggcaagctcctgttcctctctggttattttgtgttcgttgtagtt

SEQ ID NO: 456398 - DNA, 390 bp, Homo Sapiens
agacctaaccccacctaacttggactgtacgtcctcttccagtgaatccagccagggccaattagaaatgtgtcttaaattggtgtcaggctcaccaaaaacaaaaacaggatccatgggggcctgtgaaacttcgagtgccattcatgctcggttcagtcatctgactcgtcaggatgaccagcagtgctccctgtaactcgccattatctgaccaattactggagctactttataatgaggcttctggagctactttataatgaggcttctgtttgctgtcatggtggggagtttggaattgtggcttcttgcctaacaccaatgagaggactttgggacaaacccccagagccaggagtgttttgaggcctagtggggttaggtctg

SEQ ID NO: 456399 - DNA, 677 bp, Homo Sapiens
agggcttcagactaacccaccactctttatagatgtatgtaccactaatataaacagctaaaaaatggggaaatgtaatgttacgcctgtgcaatttttaagtggcatattatggcagattaaaatttagatacttggcttttcttgggcaagccactaagttgtggcggaatgttttctggtgttcttggactgcaattatgcactattaaagtagtggcctgctacataactgcatttagccagcatttctgcagtgcgtaactgtgaggaacgtagtaccgcaaatggcaatggacattaggacccggatgtagtattcctgcttgctccaagattctcattgccgactgcatacaggtaggtaacaagcaatataatctaacttggtgacttgtatgtacttttattccgtgggcattctggcatcacatttctgacaatgatattacagtgcagcacctaacacttgtatggtaaagctagcttacatcaaaactgtgtgggtgtggggttagagctgtaatttgtcaggcagaattcagtgctgttgcagttctcagataaaaagtgcaaacttgattctttggtatatctgactcagttgtgtggtttcctttagttgcattgtaactgaagataacatggaacacatcagtggtgtggggtgaggtctg

SEQ ID NO: 456400 - DNA, 414 bp, Homo Sapiens
gagctcggtaccccagacacttaccccactacttcctccacctccaggaggcccctaaagaaggccatatatggcccaatcaggcctttgtccattatcccaacatcatagatggcctgacaaaatagctgctcgctcatcaaggctgtgctggacgcccagtctttgggtgcttcaaatataaaaaacagcaacagtggtgtcttaagcacaggattaaagattgagtcatttgactgcggtttttttcacctccccacccgattctccagttagctactcagaggcagccttggaggtcaagaatcaaagctgacttaaaccacaatgagcacccccatgagagtgccagccggtctccgtgggacagagatgtcatttgaagcacagctgattcattcgtgggttagtctg

SEQ ID NO: 456401 - DNA, 425 bp, Homo Sapiens
cagacctttccccactgtggtgacggagcggcagagaccgcactgcttgtgactgcttcagggagactactaccctcttcaggtggaggaggagtcttgctgtggggcttgatgttctagcacgctgaacccggtcaatgtccccattcaatgagccctatagcagcaccccttcctgccgtgctgcgacgagatctgtgtggacacacgtggatggggctcctgacatcaggaggcacaccaccaccgccgaagccacggtgtttcagttttggggtctgagctcccagcgtccggtgggaggatgacgcccctctgcccctgctctggtttcactaggctcatcacgtacacacaggtgccaacacctggatttcagcatgtgcaggtgtatgctgtgggttagtctaagatcctgcagatca

SEQ ID NO: 456402 - DNA, 418 bp, Homo Sapiens
gttacttgaggatcccccacagcatacacctgccacagcgaaatccagggtgttggcacctgtgtgtccgtgatgagcctaggaaaccagagcaggggcagaggggcgtcatcctcccaccggacgctgggagctcagaccccaaaactgaaacaccgtggcttcggcggggggtgtgcctcctgatgtcaggagccccatccacgtgtgtccacacagatctcgtcgcagcacggcaggaaggggtgctgcttagggctcattgttggggacatgaccgggttcagcggctagaacatctgccccacagcagcctcctcctccaccgaagagggtagttgtctccctgaagcagtcacagcaggcgtctctgccgctccgtcaccacagtggggttaggtctggggatcactctata

SEQ ID NO: 456403 - DNA, 435 bp, Homo Sapiens
agacctaaccccacaggtggggaaggactattccggcaaagcctaaaggaaaattccagctggtgacattgacaacgccgggtgagctgccaacagcaacagcagagagattttgtcccctggcttgggcctggaccacaatgccaaccctcagggagtggaaccagcaccagtagagactacaggggcaccagccaggtcactgggcaggagcaaggcagagcccccgggaaaggaatgatactggccattctagccccacgtgtgttagatatcggagtgcgggcacctcatggtagtgtggacctactcagggaacaggtatgggagtatagtcatcccagaaaggagctgaggtctacaaggcacttcacttctcagacagattattctggtagtggttagtctggggtcctctagatcacctacagcaca

SEQ ID NO: 456404 - DNA, 371 bp, Homo Sapiens
ggctgacctagaggatccggaacacaaaagcgggaaggggaatacttgggcagtggtgttcccatgtactgaacgtgcttgttccatctcactgagtccctggggccgaccaaagcagtgctatcgctatccccattttacagaaagggaaggtgaggtcgaggaagtgaagtcactcctctccaaagcacgtaagggaggaagagcagagcgggaagtgaggccagagcctggaagctgctattctgcctcctgccacctggggccagtgtggctccaccgtgcctcctccaaagtgcagccttcgggaagaagggagggaggctggatcctgtcttctcacgggccgcttttgtggggtaccgagctcg

SEQ ID NO: 456405 - DNA, 263 bp, Homo Sapiens
ttctacgaggaccccggaacacaaaagcgggaaggaaagaaaaattttaaggttggaagaaaggaaaagaaatgagaagcagaggattggaaaggaagaggcaaaacagttgtttgcagatacatgatggtctatgtagaaaatccaaaagaaccattaagatgaacatgaaaatggagaaaggtttctgtgtaagaccagatacaagactcaatagcaattaagactcatgtacccattacacatggccgcttttgtgttcc

SEQ ID NO: 456406 - DNA, 707 bp, Homo Sapiens
ttgctgaggtagtctagaggatcccggaacacaaaagcggtcgcaaggtcggctagaaattggtcatgagctttctttgaacattgctctgaaagcgggaacgctttctcataaagagtaacagaacgaccgtgtagtgcgactgaagctcgcaataccataagtcgtttttgctcacgaatatcagaccagtcaacaagtacaatgggcatcgtattgcccgaacagataaagctagcatgccaacggtatacagcgagtcgctctttgtggaggtgacgattacctaacaatcggtcgattcgtttgatgttatgttatgttctcgctttggttggcaggttacggccaagttcggtaagagtgagagttttacagtcaagtaatgcgtggcaagccaacgttaagctgttgagtcgttttaagcaaattcgggacacacttggtaaatagcgtcgtataaaatatggagttcgcacatcttgttgtctgattattgatttttcgcgaacccatttgatcatatgacaagatgtgcatccaccttaacttaatgatttttacccaaatcaagcatttctagatcagagttcggtacccattttcttacaatcagctttatcttcagagtaatatgtgtatatttaactctgaagataaacctgaggtgtaagaaaattatgaattgagtgcttttgtgtgagtat

SEQ ID NO: 456407 - DNA, 376 bp, Homo Sapiens
ctgatgagaggtcaggtagagaaaatggattcggtgatgtaaagtcagcaccgtcctcacaaaaaaactatttcagtggactatgggaactgaagccagattggcatactctagagaaaagaaaatacagactataagtatagataactcctttaaaaaaattgggctgtggaagaaagaaggcattcgctggaggagaacacaggatcggtattttttaaaaattattgatttaggtttgttttcatatgttgattgcacaaacttgtgaatgtttaaaatacgatgggaaggaatcatgtaaaaggaagaggttgaatatgtaattctgcaaaggaatcatctagtttatgatgccgcttttgtgttccgggat

SEQ ID NO: 456408 - DNA, 377 bp, Homo Sapiens
cactcatgtgcacatgcatgcttaatagcacaagcataatacagaattcaaccttttaattatccaaggattagccacagaactcaaaagatcaaatcaccactaccccacaggtggtatttttttctttgacccagctacaagcagacattttttcccccaagagaggcttaacttattattcacttagtactaacaggtactttacatttgtggtctcattttatcttacaacaactttataaggtcagaaactaaaaaggggagaaatttagcaatttacccaatctccagagttggtgaatgtcagagccaagatttggccccagattactggattattttccagctcccctttccctgtttcagtgcacaaa

SEQ ID NO: 456409 - DNA, 257 bp, Homo Sapiens
  misc_feature (23)..(23): n is a, c, g, or t
ccttgcatgtacacgggggaggntcggtggagtcacatgcaaaacagcatgctataaccactgttgctgctagtttattacctccgtccttgagcggcttcaaggagtatcggaatgcccagtgcgcccgccccgggcctgccaggcagccgcggcctcggagctcggacctcagtggtttggaggtgcctcaggaggtctgttccaccgaccctttccgacctggcttgctgtgcccgcagccgcagactgcaacg

SEQ ID NO: 456410 - DNA, 438 bp, Homo Sapiens
tgcggatgggcaatacattcagtagtgagcttgtccggcgtgtcagttcgtccagcttccacttgctccggttttctagcgtgttgattcttcagctccgctgtgctccatttcctcagtgaaatgagctatgtgctcctgactttctttctccacgtgattcacgctctccctgctcagtactaccagacacaatatccattcttcaaagcctgttggtaggacaggggtgccctgaaaaggcatttatggggtaaggagaggtgagatgcagaattccatctgtctctatttctgctctgggatacagaactagaattattcctgcaaaatggagtgttcatggtgagctgtgagaacctacagcctgacttccctgcaatatagtgtaggcagagactcaatgagctctccctgcttactcctatgcagagtgaa

SEQ ID NO: 456411 - DNA, 481 bp, Homo Sapiens
  misc_feature (51)..(51): n is a, c, g, or t
  misc_feature (74)..(74): n is a, c, g, or t
atccatggctttagcaagatcccagtgtcggaactctcctagcaacttgtnttcatccagtgatactggttctntggggggcacttacaggcagaagtccatgcccgaagtgttggagtgagccgtagatccccagccatccattgacaggcagaacacccagtcagatattggtggcagcgtaaaatccacgcctagctggtcaaagaagtgaggatagcattgctgaccagatggcttacagttatagaggacctcaggatttcaattcttttgtcctcgagcagcatgaatctacaggtaaaatatttccaacgtgtcatggtaagtaacacgtgattgcatccatgcctgtctaggttatgtagaccaagctaggttagccacacttggcaatgaatgaatttcataaatttaattcatatcatctaaatttttcccccaaaccaaaagttgattctgaacttagctgcgttgttca

SEQ ID NO: 456412 - DNA, 517 bp, Homo Sapiens
  misc_feature (207)..(215): n is a, c, g, or t
atctaaataaacatttgtgtagagactggatctgtgcatgtagcccagtgctagctctgcaaagctgcctggcttcaagcaatcctacctgcctcagtcttccacagcactagaattaggcctgagccactgtgcccagcccaatattgtattttaaataaatgcagttttgattttctttaggacatgatagttacttcggaagcnnnnnnnnncaaatttccaaattttctaccttctacttttattaatgtttcttcagttttattgtttggtagtcaaagaatttggccttactactttttagagagtctattattcagtacttcttacagttttttccttggcctcccatgtatttaatttttgtggcttttttgttggaaaactacattctctgcaatgtaaaggcttcagtggacttttattagcccacctgattcatgataattaatcctttgtatcaatatttatttggtttttattttatctgacaaggacagtgaaagggatgggt

SEQ ID NO: 456413 - DNA, 438 bp, Homo Sapiens
  misc_feature (95)..(104): n is a, c, g, or t
agggtgtctaataaatgtcccctgaagccttttcattgcagagaatgtagtttttccacaaaaaagccgccaaaatttaattcatgggaggcccnnnnnnnnnncttttataagtactgaataatagactttctagaaagtagtaaggccaaattctttgactgcccaaccattgaactggaggacatgtattaaagtagcaggtagaaaatttggaaattttgtaaaaaaaagcttcctaagtaactatcatgtccgaaagaaaatcaaaactgcatttatttaaaatacaatattgggctgggcacagtggctcatgcctaattctagtgctgtggaagactgaggcaggaggattgcttgaagccaggagtttgagagctagcactgggctacatggcaagatccagtctctacaaaaatgttttttaaattggc

SEQ ID NO: 456414 - DNA, 415 bp, Homo Sapiens
aaagtgatggtagatgctcacactggccaacgttagcaagtactagaagggtcatttggcagtagtcattcacgttttaagcatgcagataattttctcaagtaacttaatttttagcaatttatcctacaactaaaatgtatgtgcaaaactgtatgtacgacagtgtttaagagaaggcctcaaagaaaaggtggtatctgaacaaagatggacagatgatgcagcattttaggtaggtatctggaaggattgttctaggaaatggtaacagcaagaataaaggccctgaagtgggagttaaaagacaatgggaataggagtagaatctggcgtgatcaaagtgggcagggagcaaattacagagaagatagagccctttaaagaatctggcttggccggcatggtcggggtc

SEQ ID NO: 456415 - DNA, 718 bp, Homo Sapiens
agtagacagccgagacaatgtgccatatgtttggacgctgaaaaggacttggccctgttctcttaggatggacaatgcgacacacaatcccaaatcacaggctataagagaggtggcccaatcctgcaggacagttcaacgtttcagatttgaaggggagtgagagagatcagaactggaggccccttgtctgagcccccgactatggtggtccacgtcactccacacgcagcaggcactgtaaatatttcaccttctctagacgacaggagttcctcgagaacaggagcgctggggtaatgcatatgaagctcttagcacagtgtctggcgctgcttcaatgatggctatatgatcaattattcttactcctttgaattcttggcaagagctggcagggaactttgtacacatcaggtacaaaaaaacccatccgcgcagtctaagatcaagaagctcttggcactctctgacagtcctcgacaaagctattggatttctatgtaacacagggtccgtaaaggagatgatccacaaggaccggctgagtggataagaagacagactggctgagcggccgaccctgccagacgacaggctgtgcctctataacacaggcgctgccgttcccaaagtcggcctcagcttggtcctaggctggaagctcgtagcaaagtttggtggatcagcatgacctagtcggtcgtcgggggtacca

SEQ ID NO: 456416 - DNA, 560 bp, Homo Sapiens
tggaaaaggcctattgaccacacctactccagtaaaattgttcttcatttattccttaattttctaaatctgacccctttaaagcaatctagcaaattgagaatcctcagctctccttggatacctgatattttatttcaagaaagagacaaagaaggaaaattttatttattttactacccacatatataccgaagggagatgggactacccatacatttgctgctcaattttgtgtcttgtgcttgaaagtctgccctaatgcataacatttactacttgtctcctaccttttgggatccctttaacaagtatttgccttctgaactacgtggataatttcaaaggcagagttccagaccagagaggtctttccatacaatgtaagctataactagctggttgtgtttgaccactgctatcacgctatcctgggactgcatagaactttgacaaaagactagatcttcatggtacacaacttcaacagattatctgtcatattgtctccagcacatctgcatgtggctttgtgtttcccttgctctcgtgccagttcc

SEQ ID NO: 456417 - DNA, 706 bp, Homo Sapiens
gtccgcaagaatcggccaggccctcggagcatcggaaaacctcgtctccaccaaccggacatcccgggctcctggactggttccgatgatcaggcgaggagtggggcaggcggccttgcgcttcagaggctcggacacgcggcccatccagatgtcgatgttgttgggcgtgccatactgctccatcagtttctctcgccaatttcaggttcctcagcatcccggtgcccagctggcccacagtttcacggctgcgggagccacacagtagcgcctccaggcattgtatcctgggaggccgtggtgccctctttcgctgcatgttcagagcaggcaggtccagcccaatcctcatgacctgctcttacaatcgctcccggatctcatccactgcaatttggttctgacgattcagcttggcaggggtggccatgaggccccggaggatggggtcaatgccaccttccagcacgaccctccaggaggcaatttagaccctgctgagggggacacgggggttgggttccatgggctggtaccgattgtccaggcaggaacatgaaggcgttggatgagggtgtggccgtagcaggaaggcattggtgaagacgttggcgatgcgtgggtccactgagtcattgtaggaacaggtacgtgggcagtacttcctcatacgccgcgggggtactaacccgagtctatatga

SEQ ID NO: 456418 - DNA, 625 bp, Homo Sapiens
tagctctgatgtagtacccccgcggctatgaggaagtacatgcccacgtaccgttcctacaatgactcagtggacccacgcatcgccaacgtcttcaccaatgccttccgctacggccacaccctcatccaacccttcatgttccgcctggacaatcggtaccagcccatggaacccaacccccgtgtccccctcagcagggtctatttttgcctcctggagggtcgtgctggaaggtggcattgaccccatcctccggggcctcatggccacccctgccaagctgaatcgtcagaaccaaattgcagtggatgagatccgggagcgattgtttgagcaggtcatgaggattgggctggacctgcctgctctgaacatgcagcgcagcggggaccacggcctcccaggatacaatgcctggaggcgcttctgtgggctcccgcagcctgaaactgtgggccagctgggcacggtgctgaggaacctgaaattggcgaggaaactgatggagcagtatggcacgcccaacaacatcgacatctggatgggcggcgtgtccgagcctctgaagctcataggccgcgttgggccccttcttcgcctgcatcatcggtacccagttcag

SEQ ID NO: 456419 - DNA, 658 bp, Homo Sapiens
atgcagctgtgaggggacacgggggttgggttccatgggctggtaccttttgtccaggcggaacatgaagggttggatgagggtgtggccgtagcggaaggcattggtgaagacgttggcgatgcgtgggtccactgagtcattgtaggaacggtacgtgggcaggtacttcctcatggccgttggccccagcaccaggggcaggtagtcccggtaagtgatgatctggaccatggcccccacgatcttccgggcttcctggtagagcctctccccatcccacctagggttcaggctcttgagctctgtggccagccggttgtgctcccgaagtaagagggtgtgcatggaggtgagctcgggcatctcactggaacgggtgtcccctgccaggaagcaggggatgcgcgctgagcggttggtgaggagacaggggtcatcgtgcaggttgtcaaagggcagcagggcccggccgttgtcttggaagcgctggttgacggccagcagccccagctggttggacatgttgcgcaggttcctggcaaggggctcctcgctgccgtacaccatgctggcgtacacgaagcccgcgagcagcgttgatctcgctggcggatggtgatgttgctcaacagcgcaaccgggctagaaacggaag

SEQ ID NO: 456420 - DNA, 636 bp, Homo Sapiens
gctgtgggcatgtcttaggcaagcccccctgtgcaagttcccatatctgtgcctgcagcttgatttttcaggctgttcttttgtttaaaagaattctaccgagtacccacccttactgcctgcctgactggtttcttcctttctcctctctcactccttctccagatgaggaaacaagatcagagagggacagtgacttgccaagttcacactgagatgagtccaccctgtaccctcccctcctcaaaagaggaccttaccaaagggactgtcatcgggggccctcaacatccatatagtgatgacacttgggaagagatatgaacaaaagcaagaaacagaatcctaaggtcttaaatgtaatgttggaaacaacattagagctggaaaacaacttaaggaataatggtaatgaggcatttgcatcattgtacaatgctaatgttattttatcttgaaaacaatcttgagaagtaggaattattgtcctctttcacaagacaggaaaaatgagccaagggttagtgacttgctgaggggaccacagtgacagagtggtatcctggtccctgtccctgacttcttccctaggctcctcctcctgtatctcactgcataggtcgcggggtactacat

SEQ ID NO: 456421 - DNA, 237 bp, Homo Sapiens
ctttccgattagatccttgtcctaattattttttatggatcactacgcagaatggatataaaaaagaatggctttaacctttctctcaagctgattagtgttttactctttttgctcttctcctttctaaatcaatgaaaaaaagtttgtctaaggagcagtaaattgagccactgaccttttgatatttggataaagcaaaaggtaagtgattgtctttagatgatcatctaagcg

SEQ ID NO: 456422 - DNA, 246 bp, Homo Sapiens
cgtcttcaacttgtactccgtactgactgtagctcctgtgggaaaatatagccatggatagaaccactaagatgcccactttgtcgcttatggcaagcttttacaatttcccagttagatgacagtagagtgcaatattggtgacggttgtgtcactgggagataaggacaaccccacgaacaccttccagttcagttataaggtaagtatggccagccatgagttctacaagcccataaccatcc

SEQ ID NO: 456423 - DNA, 207 bp, Homo Sapiens
  misc_feature (104)..(104): n is a, c, g, or t
ctttccgattagatgtttaatggcagagctattttcttctccaactgttcaaaatgatgaacgaagatgcagctcagaaaagcgacagtggagagaagttcaantggcagtagtcagacgaagaaaaagacccaagaaggtaaattgctggaattaggcatgtctgtatggtctgtatgtatgtacatagatgcgtctgtgtgtgtg

SEQ ID NO: 456424 - DNA, 382 bp, Homo Sapiens
aggggaccctgggcaaaatcttcactgcctccaatgatgaaagtgagtgcaagaaaattagtgtgcacacctgggagaagtcacagaatgctgggaagtctggaacttggaaatcagtgaaataggaaatccctctccaacctcctatgactttccagaactgagatatacatgctgagaaaactgaaaaatacaaacatactcggaaacaaacaaaactgagcaggacagaaatgactgggagaaatggaggctgaaaaatcagatagtgggacaatcccaaaaggaggaaagttttcaaaggtcctttaacagcgaaatataacgtctacaaacataacagcactgagtaaatcaggctcctagggatctaatcggaagt

SEQ ID NO: 456425 - DNA, 531 bp, Homo Sapiens
tgacaactctaccaagtggggtgagagccgctggtctgggagaggggaggtcagctggggcctggagcctgcacttcagggggaagtgcttgctgtgtcgggtgaaaggaaccctggggccttctccgtttggctctgcacagccatccagtgggcggccctcagggaccctcgatccaacctcaccttttacagatgggcaaacagaggcacggagcaggggcctggctggcccagggctgcacgttcttgagcatgccgtcacgggcacctctcgcttgtctcttgtgcctgtcagggagtcaggagacatcgccttccatcctgaccaaccgtgtgtccttaagcaagtgctttaatatctctaggcttcagtttccctacctgataaatgtggctacaagccccgtcctgttgataagatgatggatgactaggggtgggtcccctacattctgactggtgcctaagtgagacagtggatggtttacgtgattcttggtggctgggattcttgggacttggtagagg

SEQ ID NO: 456426 - DNA, 346 bp, Homo Sapiens
ctccacccgacggggtgggcagctttattctgcctgtggcactggcctaagagctcagaaaggtttaaaaagataagacagcccactgaatagccagggacattcaggaggctgcacacggaggtctctcctcccaggctgcctgctgtacagtgggcacctctgcctgctgtgtgaggtgtgagctcctccctgctctgctgctccctgaagccctaccctggcttgacacatgcagtgcagccacctgagcctcagtaagcccctccacaagctgccgcctcctccggggtcccatcttcctgaaaatgggggcacagccctgtcaccccgtcggtgagcgggc

SEQ ID NO: 456427 - DNA, 258 bp, Homo Sapiens
aggatcttaactcagggcgagatggaccaggctgtccttgcccagcagaccacagaagggatggaggtggtggaggctgtgagatgctctgtgtgggctgatggctgtcgagctggactgatattcgccttggagacacaatcaaagaaatctctgaacagaactttgtctgaggtccactttcagccccaggggggcatggaggacgccctggcagcccatccacaggaggcagtgtcagcaccccgtcgggtggag

SEQ ID NO: 456428 - DNA, 302 bp, Homo Sapiens
tccatcgacggggtgcaaagtgctgggattataggcatgagccaccgtgcctggccagaacatttttatatgttgctttgtgttctttgttaggtagctcaccccactccactactgatctgctttttgtctttactagattagttttgcctgctctataaaaagtttacataattagagtcatacagtatgcactcctttgtttctgacatttatttttgttgtggtacattatactcttaaatttgaaatcctaactcaggcttcacccaatccctaccccacccgtcgggagagcgggg

SEQ ID NO: 456429 - DNA, 188 bp, Homo Sapiens
tacccgacggcgtggggttgaagggacaggtgaggccctgcaagtatgaatacaataatcacaacagctaatgtttatcaagtactaattgttagtttctctgctaaccccttcatgtggattatctaactcaatcaagcaagcaaccataggagacaaaggcattatttttttctgagacggaattt

SEQ ID NO: 456430 - DNA, 270 bp, Homo Sapiens
taatcagctcggcccgcttaccgaggggtggcaggtaaggattcaagggcttctggaagactctccactgcccacaagctggggacctctccccactagatctagatgaagtccaagaagtggtccacatttgccagccctttcttgggttcttacaggcatgtggtgtgccttccaacagacttcatctttctaagtaagatgagaatccccacttactggaaccctactgagcgagctttggagtgttagttaaatttagtatttgga

SEQ ID NO: 456431 - DNA, 452 bp, Homo Sapiens
ctccacccgacggggtggcagatatgggtgcttttgctctgggggtaagataataaatatgatagttaagattaactgagctacataagtaagattttaaaaaaataagacagctgtgaattttttgaaatgttaaatgatactcaacataacatgagaataggggaatctctgttcatcaaattctcaagaaggtacccctgagaattttcctacctatatggacacaaaaaaatacctttatggagtgaaatggtgattaaattgagaaacgccaaaagtgaggcgttccttctctttttctgatccagtaacaaaagctgtccaagcccaactttcagctcctctccctttccactttggctctgcccatcaccccatcactcgcccttctcctactcacagggcatggcagccccactcccaccccgtcgggtggagcggggatcctc

SEQ ID NO: 456432 - DNA, 175 bp, Homo Sapiens
agacacgccatttgcacacacgtgcattttagacgcagtgtactgaatactaacagcatccacgttaagatgtgtgcctcagcgtgcatgaggacattgctgtgggaaacacggtgggcccttcctgtctcttctggggagaacccctcgtgggccacgagctgccacgctgtgg

SEQ ID NO: 456433 - DNA, 545 bp, Homo Sapiens
  misc_feature (379)..(379): n is a, c, g, or t
  misc_feature (505)..(505): n is a, c, g, or t
gcctaatcatagggtatcataggggacagggagcagaacagttgtacacagcgaggcaccacccggcttggcatctgcctcggtggacttactacctctagaaggaaatacctgagttcctctggcctcagctcctagagtgactggtgtgctgtccctgttactcttctgtcaaggtgacaactgtgtgacccatcatctgtgtgtcaaagcaaggccctgcctgggcctctgctcctgtgctgaccccaaaggcaaatgctttgctagtttccttccagttaatttcacctatgaatagatgtgtgaaaactgttcaaagccatacctgcacatgtttgaacttcaaaccctgtgggtgattcagtggcatctttcntctaacccccagcctcccttcccacagaggccaccgtcatggccagttgctgcagtttctttccagagaacctgtgtatgtgtaaagcctgtacaggcgtgggtacaccacacagcctgtcttgcntgtggactgtgagtactagtacatctaggtaagctgccac

SEQ ID NO: 456434 - DNA, 240 bp, Homo Sapiens
ggttcaaggttggactgctactttctagctatgtgaccccaggcaagtgactaggcctctctgtgctaagtagatagaaccagtgtctggcccgtgggaagaactcagtaattgctagctgtgtcacatcagcagcgggctggcatggctcgaagcagcaccctgtgagctacgggggctgctgatgtctttatagcagcgtagagtcctgggcaagtgtggaggaatatagagcgccgt

SEQ ID NO: 456435 - DNA, 314 bp, Homo Sapiens
cgtgacgccttaaaagcctgcaagtgtagcttagggcaccaatacgcatttgggttgatgtccttttcatttccagaggagaagttcgtggtcccgatagaaaagacaacaagtaaaaatcagttccagtactgactagctgcaggagccacttgaccctaaccagcccatgatcaccctctggtacgtgactccctgtctcagaattgttctgtcataggttccagattccatgcttcattagtatcctgtaggctggtcctacgcaggccttatacttggctgaatgcagtgtataaatacggtaacaccca

SEQ ID NO: 456436 - DNA, 445 bp, Homo Sapiens
cccgtatgtggtgtaccgtgtaatgagtatttcattttaccacttcactgttttgcttgactaactgcccagatgtgagagttgcaaccttgtttgagagctcccatgtggttttagttctcctgcggtaatatttgagtttctgaccctaaaacctcaattacttaggcacaatagcattgggttgattcctttcattccagagagaagtcgtggtccaatagaaaagacaacaagtaaaaatcagttccagtactgactagctgcaggaccacttgaccctaaccagcccatgatcaccctctggtacgtgactccctgtctcagaattgttctgtcataggtaccagattccatgcttcattagtatcctgtaggctggtctaacgcaggccttatacttggctgaatgcagtgtataaatacggtacacacagtacgggga

SEQ ID NO: 456437 - DNA, 296 bp, Homo Sapiens
tgacatgtacagttgaattgtggtttttctcactgccacattgtgtgggtggagggagattctaaagggttttaggaatcggaaaattagggagaatcaaatcatgggtgcttaaggcctcagtgaaacactgtaaattatactgctgacggcgaggaacctgcttggccatgtggcaaggggattttatccactcaaccaacacgtctgagtatttccgaataggttttattaccaggtgcttaaagaatgtgtggtgacataaatgggttttatttggggttctgttagtacaa

SEQ ID NO: 456438 - DNA, 230 bp, Homo Sapiens
cgtactgttggtgttaccataaacccttaaagagggagttcctgtcgtggagcatcggaaatgaatccgactaggagccatgaggatgcagattcaatccctgggctcgctcagtgggttaacgatcccgcgttgccgtgagctgtggtatatagcttgcagacacggctcaggatcccaacattgctctggctgtggtgtagcataacctataggtcacggtaacacaa

SEQ ID NO: 456439 - DNA, 374 bp, Homo Sapiens
tactgtggtgtaccgtctttcctttccaatagttcttcatgggtgctctttccactactgtaccgtgttcgaaaccaataatgacgtctgcagctctgaccgtggataggcgatgcgcaacggaaatgattgtgtgcccatgttggatctgtaagcatgtacagggcaccattaagagaggctgtaagagtagacgatgacatttggcaggctcagaatccaaaagtaaggcaaaccctcagtccctaggaacatcctttaatggactgtgcagaaatgccagcctacttagaaaatgccagcagcctttcctgtggctaaaattcaccatcacacgttggtcctatgctgctatcaatcaacagctaaagacc

SEQ ID NO: 456440 - DNA, 218 bp, Homo Sapiens
  misc_feature (49)..(111): n is a, c, g, or t
gtcctgtggggtctgttttgtaagggtagatttaatttgtgccatatgnnnnnnnnnnnnnnnnnnnnnnnnnnnnnnnnnnnnnnnnnnnnnnnnnnnnnnnnnnnnnnnttagtatgagaatctctagttgcatcttggcattgatttcctatgtaaggaacaatacatctgacagcagtaacatgacaccaaggtattgcttggaagttacacac

SEQ ID NO: 456441 - DNA, 242 bp, Homo Sapiens
gccacagcttgatgtaggatctcaggtcccagacaggaattgaatctgggccgcagcagtgaaagtgctaagtcataaccagtaggccatcagggaactctcctttaatttccttttcagtcagttttagtgattttttgctttcatttaatttcttcgtctcatcttaattgatataacattcttctaaaatacttttattatctgtatgatacatggtgatgtcctcgcttttatttctg

SEQ ID NO: 456442 - DNA, 227 bp, Homo Sapiens
  misc_feature (140)..(140): n is a, c, g, or t
  misc_feature (203)..(204): n is a, c, g, or t
tacgtggtgttaccgtgagggtgatatgatgatggattccttttcagttcccttcagaatctagttaaatggagaagaaaacaatcatcataaatcacacatgatgtcttgagatttaacatttttcatataacctcaangctactctagataatagacacttgacaagacacgacacataatacagggatatgggatctccnnaactattaacactcagggcacgg

SEQ ID NO: 456443 - DNA, 266 bp, Homo Sapiens
ccagtaagatggaaagggcttgtttgtggaagttatgtttctatttccatgaatatgatatttagacagaatgcaaagatgggatgttgtcattgcctcacacaaggtacaacagaagcagagggcagacaaacttcctcgtcaaataccctcatgtggatccagagctgaaagtaaatttctttcatgactcaggagaattagatagacaaagttaagttgcttttacctcatcagagctaaacagcggcagtggctgacgtacc

SEQ ID NO: 456444 - DNA, 201 bp, Homo Sapiens
gttaccgtggtacttacatttcacagtgccctggggagggccatttgctgctgcagtgggtggctctatatcttcaagagaaccgtattccaagcactacggacatgatacatcagcagaaaatgatggcattatgtgtacaacctgaattggagctgtaggaagagaagcgtgcgataggcggtatggaacggatgggga

SEQ ID NO: 456445 - DNA, 231 bp, Homo Sapiens
tcttatttgaatcactgatctaatctcctgtatatcaggatatctggaccatctgcatttacatgaaaggggtataactcctccagggaccacccgcctaggtgaggacctccaagttatctcttcatgcagctgaggtcagcaaggttgcaaaaactagcaaggtggaaacagtcccggactctgactgctgacatgcagaaggcagatctatatccttcgttctagagt

SEQ ID NO: 456446 - DNA, 257 bp, Homo Sapiens
accgtcacaaatcacagtaagcggtatgaggaggtttgggggttttttgttttcttctggcattgctgattgactccattacaccaaaactactttcttaagaagggattcatggtctgaatctaatgaaaacatgtttttgtttaaattttcacatttttaaaaaggctatccattttacaaggcaaaaactttcattgaatctgcatcttccaagacagctgtttctaatgtaaggttgttcctaatatgtgcat

SEQ ID NO: 456447 - DNA, 285 bp, Homo Sapiens
gaatttctcaacatcatgtccctgtagcaatgtccacctaaactaatctgacgacagtctgctctcaggtcatagtctcgacactcacccaccgccccacccataagaaaacaaaaaagaaagccagacccagaaataaactgagggctcagtggtcctcgagggatcacaggaacagaaaacgaagcactttaaaactaacggatggtactatacagttaattgttgcccttcccaaatactgcatttaagtggttgtagaaagacgtacaccacagtacagga

SEQ ID NO: 456448 - DNA, 264 bp, Homo Sapiens
attcgtttgtatgtgtgctgggtaaaaatgatgttttcgttagcttgtaagtggcagttaagtcttaattgtggaaatcatcgtgataatcgtgatctcactctttggttgaagtaccgaggttaatttgtgggtctaagaagggtaagaggatacatatccttggtatttataccatttggaaacactgagctctcagctatctctgcctgtgccctttcaatcagcttggctctacggtacaccacattagcgatgctgaca

SEQ ID NO: 456449 - DNA, 291 bp, Homo Sapiens
ttagcgcttgccactgaaagtattggggtgtaggaaaaaagaagtggctagtgttttgcctgtgttggtctaaagttcactttttgttccccacgtgtgaaaggtatggtttgaaaaggaggaccaaaaaggcttccagccagctcctcttccactaaggaagaaagggcataggatttggcaccagaaaactagaatgtggtccttcatctgctgtcaaagtgatgtgactctagctagtcactatcccactctggtgggacggtacaccacagtacgggatcctctagc

SEQ ID NO: 456450 - DNA, 243 bp, Homo Sapiens
  misc_feature (202)..(202): n is a, c, g, or t
acctagaggatcccgtacgtggtgtaccgtcctagtcggattgttaccactgagccacgaccggaactcccataaagtattttaacctaaaggtcaatttcatgtgagtccacttaacatgttggataaagaccttattggcaggtcagtatcttaataatatttgtatcctgaatatctaatagattgtgacggactcacnggtaacaccccacagtgggtaccgggagctcgaacttcgta

SEQ ID NO: 456451 - DNA, 158 bp, Homo Sapiens
ttataactgtggtgtaccgttactgtgagctgtgtgtgtaggtcgcagacacggttcagatgccacattgctgtggttgtggtgtaggccggtggttacagttctgattgcacccctagcctgggaacctccatatgccacgagtgcagccctgaaag

SEQ ID NO: 456452 - DNA, 378 bp, Homo Sapiens
atccttaacccactgagtgaggccagggatcaaacccacaacctcatggttcctagttggattcgtttctgctgcaccatgacgggaaatcccaaggttactttccaaaaggttctaaatcatacagggggatccattctggttatgctagatggtcctcacaggttaatttaatagaaggtggactgaaattcccgaatcagagagagataaatttacacaaaagagagagtgaccaaaccattatgatctgatttcagaagagttctgtgactgatgttttttaaaataaatgcaatccatttttgcttatcataaatctccacacccaattcatcaatttctgaaagcttccactaaccacagacggtaccccag

SEQ ID NO: 456453 - DNA, 244 bp, Homo Sapiens
tgagtgaatgcactggagtccattcagcagtgtgaaatgcatccagagtgactgcaatggatttcatgcagcttggcccaatagatcccgattgaatgcagtggattccatgaagcatgattgaatgcactggatccgatgcagcgttgtgaattgcatcccgagtgaatgaagtggaatccatgcagcgtgattgaattcacttgattccatgacgggtacaccacagtatcagggtcctcta

SEQ ID NO: 456454 - DNA, 213 bp, Homo Sapiens
ccacagctcacagcaatgccggattcttaacccactgagcgaggccagggattgaacctgcatcctcatggatgctagtcagattcattaaccgctgagccatgacaggaaccccaacctgccttttaaaacactgtgcagacctcacaaaacagccaaacaaaaatctcacccgtgggccatctatggcctggccacaatgtgtaatgaccc

SEQ ID NO: 456455 - DNA, 385 bp, Homo Sapiens
acggtaccgattacgtccaaaacttaaacctcttacaatgctaaaaattattatcccaacaacaatactactacccataacatgaatatctaaacacaacataatctgaatcaatgcaacagtacatagtctcctcattagcctgatcagtctatccctactaaaccaactaggcgaaaacagccttaatttttccttaacattcttctccgactcactatcagcacccctactagttctaaccacatgactcctcccccttatactaatagctagccaatctcacctatcaaaagaaacacacacccgaaaaaaactatatattaccatactatcctactacactattcctaattatacctcgtcggctattttccgggatcct

SEQ ID NO: 456456 - DNA, 279 bp, Homo Sapiens
gggggatctagaggatcccgtactgtgggtaccgtgatttccatctgttaatgtctcatttggactgtgaactgttttcctgatttcattgaattgtctgtgttttcttgtagctcactcagtttccttaaaagagttttttgaactctttagcaggtaaatggcagatttccatgtctctgggttaggttaccaaaagattattgtgatcttgtggtgatgtcacagtcccttgatttttcatgtccttggagtttcgtgttgttgtttttgtatctg

SEQ ID NO: 456457 - DNA, 178 bp, Homo Sapiens
cccaaagcaatagaaattagagcaaaaataaacccatgggacctcatcaaactgaaaagcttttgcacagcaaaggaaacccaaaagaaaacaaaaagacagcttacagaatgggagaaaatagtttcaaatgatgcaactgacaagggcttaatctctagaatatataagcaaggta

SEQ ID NO: 456458 - DNA, 352 bp, Homo Sapiens
gcgtacgtggtgtaccgggcaagaatagtaatactaacattgaatgttaatggactaaactctccaatcaaaactgttatggaaagaactgttatggagcagttctccccattcccacccacatcatttttcatcaactctagatgagctaagggcccccaaatgccttaggctgagcatttctttggggtgaggtccccttcttgctcagagcctaaagacaagtagtgatattgtttctgcctgtccagtgtttcctaacaggccttcagtctccagagtggagaatctgccttggtgtggggtattagtaagaaaatctaggagccacatccaatcctctctcaccctg

SEQ ID NO: 456459 - DNA, 161 bp, Homo Sapiens
tactgtggtgggatatatatttgtttattcacctgatgaataaacatttttgttgtgtctattaattggttgtaaattcaaagttcctgtttgtagagcttctaccatgtaatactgtcctttcctatatctgcagccggtacaccacagtacggagtcct

SEQ ID NO: 456460 - DNA, 182 bp, Homo Sapiens
attagagttgatttacaatgttgtgccaatttcttgctgtccagcagcgtgacccacagtatatatacatggaatggttcaaaaaagagcctgtgagccagagttgtagagaaagactgtgtatatgtgttcattaccgggggagctgcctatgctttaagcctgtgttaatattacaccta

SEQ ID NO: 456461 - DNA, 291 bp, Homo Sapiens
ctgtaggtgtttacccgtcaggccgacaacgttgttcgcgtcgcaactgccgccgggtcgacccacacttacggcctatgtcggacccaggtccgaaggagctgttggggtccccgagctatccccgcccgactcggtaccgggtccgagctgacataaaatcgaccagctcccgcggccaactgagtattgggtccgaactgactcggagtggaccaactgtcccgctgcctcgaccctggtccgaagagctgtggtaatgcccactttctcccacggtaacagccacaa

SEQ ID NO: 456462 - DNA, 159 bp, Homo Sapiens
cttactctcgtacacacgtactaattaatccccgagtatgttgtcgaatgcttgtgatacatcactgtgttaaagatacggcacaatttatatgcctgaggaccagtcctgggtcggtggtgtggcctggctgctgcctctgcttggggactgactggg

SEQ ID NO: 456463 - DNA, 254 bp, Homo Sapiens
cccgtactgtggtgaataccgtctgtgtggcgggcaaacgttaagaacgtggaggtttttcacagctctgatctagtccttctattgtcctttttacagtgtcgtagagcagacctctgggaaacctgtgcagactttctaaggcataggaaagcacacgagtgaagcccgttatattgcctataaccatattaaaatagtctctgatttgaactgagcacgttatctagttcagtttctcacctacccacgga

SEQ ID NO: 456464 - DNA, 229 bp, Homo Sapiens
gtggtgtaccgtactgggttgggtttgtaccactgagctatgacaagttcttccagaatctaactttagagctctaaatattcacggctgaccacaaagatacatttctgagcaaaactgagtcgcgctatctgcaacctacgagggtcattagaggttctatgtacagtgttacctgcactggaaaattcaatagactgaagacttaatacccttaagaactgccctc

SEQ ID NO: 456465 - DNA, 164 bp, Homo Sapiens
cgttcccactgatttatagcaaaaactaaatgtctgtggtgttaatctcccgagattttgtctttgtgcaccacagcagtataaatatcctatcctgagagagactcaataaattattataacacagctgatgtgtttttccacttgaatgtaaatttagatag

SEQ ID NO: 456466 - DNA, 229 bp, Homo Sapiens
cgtagctgtggtgttaccgtgttgatttacagtgttgggagaatttctactgtatagcaaagtgacccagtcatacgtaaatatacattcctttttttatactgtattccatcatgttctatcccaagagactgggtatagtttcctgtgctgtacagcaggacctcattgcttatcctttctcagtgtaatagtttgcatctaccgtgatgggctgggagtttggggt

SEQ ID NO: 456467 - DNA, 206 bp, Homo Sapiens
cctagaggatctccgtactgtggtgtaccgtgggagtctgtgaggctcagcagtaatgaaacctgactagtaaacataaagattcaggttcaatctctggcctcgctcagcgggttaagtatatgacattgctgtgagctgtgctataggtcacagacatggcttggatcccacactactgtggctgtggcacaagccagcagctg

SEQ ID NO: 456468 - DNA, 247 bp, Homo Sapiens
ctatactgtggtgtacctgtgattccaggactcccctctcttccggcttacttccatcaaacttttctttaaagcctgggactagggaacagatgacttctttaacagtgacaataacagagtcagctatgttcccagatgctgcactcacctatccctgctcttaactctcgtaatttactctatcgccttatgcttaaccatttttatctgaattacagttagtgtagtagaacctacggaaaca

SEQ ID NO: 456469 - DNA, 258 bp, Homo Sapiens
gagggtagagttcattgacccccaagggcaggagagagagcctccataggatactgctcattccccacctcatgcatgtgccctggctggcatgaggtgcccagctccctggtagtccagaattgaataatcctagaggtaaaagggactctagaggtcagttgaacccaacctcccacccatcgttccattccgtcttctacaatctttatcgacaaatggatgacggtacaccacagtatagcgatcgtctagatc

SEQ ID NO: 456470 - DNA, 195 bp, Homo Sapiens
gtttctaattactcctttgcactttattggcggtaggtgagcggtcttggaaccaggatttcagaagaattgaggcagaatcaatgttcaccgccccaggattttcagttagtataaatattttgcatcagtgttattctgatggaggtgccaggcctaaatctctgtgctgttttaagtattaacctctgtgct

SEQ ID NO: 456471 - DNA, 186 bp, Homo Sapiens
gtaattatctcttcaacttcaggatatttgttgatgtccttagccattgaggacaacctcgaactgtactttaacaggtctcttggagcctcaggcagagacagactgttaggtgggaccaatagtgtctattgctgggttatgtacgtgaatgaacttaagtcaattgacggtacaccacagaag

SEQ ID NO: 456472 - DNA, 259 bp, Homo Sapiens
gacttgttgagtctcaagacaagtgcagagtacacagggaagggcaggaggccagcgttctccctgatttgccaatctcagctctacctgctcttcatggctcaggttatgccttgaagatgataatacttatcattttatgaacactcacagtatgatatttgtcttcagggtagtcattccagactgagagtgggccctgatggagaccaaggatgcgaagtgtattaaatagctgaggtgtcctgaggtccacaga

SEQ ID NO: 456473 - DNA, 267 bp, Homo Sapiens
tgtggctcaacagtaatgatcttgaaaaagaacaaaggtggacgacttacacttaacataaccccttatgtggaagaggcacccagagcgtctactcccttgccaccttctatgctctcttgcggcttagagctcatgactcaggcaaacctggaagcagtggaggtgccaccttcccagagcccccaagctgtgatgctagtgacaacagtaatactggcaacaagcaaagcaacatgcccccaaggacacaaacagcaaggaggg

SEQ ID NO: 456474 - DNA, 166 bp, Homo Sapiens
cctacgccagaggcacagcaacgcaggatctgaaccgcatctgcgacctacaccacagctcacgccaatgccagatccttaacccactgagcaaagccagggatcaaacctgcaacctcatggttcctagtcggatttgttaaccactgagacacgatgggatctc

SEQ ID NO: 456475 - DNA, 199 bp, Homo Sapiens
aaaaggacgttgtttggcacatgcaggccacatcaacactttttgaggctgtcccagtttattccacttgaacctgtttagcagtcccccgtaaacagaagatataacttggtaagatggacggctgctaccttttgatacctaatgaggacccttgacacagggctcaacctatttctgatctagccatggaataggg

SEQ ID NO: 456476 - DNA, 228 bp, Homo Sapiens
  misc_feature (17)..(17): n is a, c, g, or t
  misc_feature (114)..(177): n is a, c, g, or t
gatactactgtggtgtnacgttaggactgtagtcatcaggatacacgtggcagttgtggggcctgtgcctacagtgctaagactcaagctgtgacggaacatcacgtgaagctnnnnnnnnnnnnnnnnnnnnnnnnnnnnnnnnnnnnnnnnnnnnnnnnnnnnnnnnnnnnnnnntggtgggaagaagagatggagcccaaatgtggcaattctgggcaccaaagg

SEQ ID NO: 456477 - DNA, 204 bp, Homo Sapiens
gtgttttttaaatgtatagcaatcatcatacttaatagggtaacattagcagcattttattaatgtcaggaactggacataacacctgttcttgccccaaatcctcaacattattgtacttgcaaatgctgtatgacataagaaatgtgatacagggattgggagggatacattatcaactttcagagtcttacggtacaccac

SEQ ID NO: 456478 - DNA, 245 bp, Homo Sapiens
accgctactgtggtgttccgtgaactatgtctatgatactcactgttgcaacagacacaaagggtgggggaaaaaaatgtaatgtatataacttgatccccttgcttgtacagttggaacataaaattcccgtcctgacgcagctggaaacgacatccgactgacgaaccacgaggtggcgggttttttcctaggccttattcagtaggttaaggatcccgccttgccatgagctgtggtgtagg

SEQ ID NO: 456479 - DNA, 173 bp, Homo Sapiens
gtttgtttgtttgtttgtttgttacccctagactatatagaagttcctgggacctggcaaacccacggctgtgatctactcctgcagctgtggtaagacaggatcctttaaacccactgcaccaggctgaggatcaacctaacctccacagccacggtacaccacagatagcg

SEQ ID NO: 456480 - DNA, 271 bp, Homo Sapiens
ttttgtgtgtgttaccgtggccgaacattttaattgagggggagcagtgtaggtagagatcaacaaagtgtaacacatacttgagggctggtgaatagctggaccagcaggcgtaggaaggtggtgaaccaatgactgacaaggctaggtggggcctgaacttacaccagatgagtctgagcttgctcggcgaccttaactggcgacgcgtaacacccacatgtacgcgggtaccgcagcctcgaacttcgctaactcatggctcactagc

SEQ ID NO: 456481 - DNA, 226 bp, Homo Sapiens
cccaaatctttatacaaccaactaccatccagctcttcactcagatattacctcctcaaacagcctttcctggtcatccaatactttggtggcttgtcccgtccccatcactctctggcaaacgaccttagttcatcatgtaccgtttagtttacttatttatagcctgtttctccacaggaatgtaaatgtcatgagaataacacctggtcacggtaacaccaca

SEQ ID NO: 456482 - DNA, 185 bp, Homo Sapiens
gatccgttcactctgaactactctacttgcatggaagagcatcaggaacacctgtggtcaatacagcaataatcttacccatgggtaagagtccccaccgccctttatttggataccatatctttttgttgttgttgaaatattctttttttaatgaaatgatgacggcagaagagtaatggcag

SEQ ID NO: 456483 - DNA, 192 bp, Homo Sapiens
ggagccctcttccaagggttttctgcaatgcgccttactttttctccatcttacccaaagccaggtgacacataacaaaggctggagatgtgaggtgttgtggggaataatgtaaaggcagttacctgactccaagtgtgttgccttgatggactataggtgtgataacacaggagacagtacaccacagta

SEQ ID NO: 456484 - DNA, 276 bp, Homo Sapiens
atccctggcccaggaacttttgtaagccacgggcacggtcccctcaaaaaagagtagatgatacatttttcattagcatcatcatcattacagtagctaaaagcatcagttcttccctctggagcggtgaaacggagcccaaattcctctcccaggtaccagccctgcacatggaaggtgacactgtccccaatccgctgagccttctctctccagagcgaacacccccttgtttagcatccagcatatatttgctaccacatgacactctccctc

SEQ ID NO: 456485 - DNA, 215 bp, Homo Sapiens
  misc_feature (89)..(89): n is a, c, g, or t
cgtggtgtgggtctagatgtggcttggatcctccactgctgtggctgtggcgtaggccagcagctgcagttcatattcgactcctagcnctgggaacttccgtatgcctttggtgtgaccctaagaaaaaagttataaacaatttttatcttaaagtctattttatctggcattagtatgtatcacctttccaatttttggatgggagtactggt

SEQ ID NO: 456486 - DNA, 312 bp, Homo Sapiens
gtaccccgtactggtggtgtgtaccgtcacttaaggctgcttgttgaatacagaattcaaacggatgagattgaaagcacttgaggagtgttttatgccttcagggtgaatcctacagagtgatctttgatccgcaggagagtagtacaacaatttgattttaagtattcttgtgtcttccacaagaaaacacatatcatcatagtgcggtgagtaaatgctaacagttttaagtatgcagtgtgtttcattaggaatcatactttcaaatgtttggttaatactgcgttacgtacaccacagtataagctc

SEQ ID NO: 456487 - DNA, 195 bp, Homo Sapiens
tattttacttggtgctttgctgtgaaaagagaaaaaatagtgtagagaagatactacctgctccccaataggtcggctccctgctccagcagggacctgtggtagctgtgcggtgacagcatggtgtgtcacatcagagcgggagccagctcgacgctgcagagatggacgcatattggctggggggtcctctag

SEQ ID NO: 456488 - DNA, 213 bp, Homo Sapiens
gggtaagttaaaaacattagtacttttttgcgaatagtttgcaagatagatcttggtcaagtaggaattcaatttttaaaaattttctccctaggaaaatgatttcacacagcaatcattatagttcagtgatgccacgaacctcttctaaccaatcagatcactttatcggcccctcagccaattagtgtgggcatcgcacatgttgtctgg

SEQ ID NO: 456489 - DNA, 200 bp, Homo Sapiens
ggttctttgccaatgtcctggctgttgctatgctgaaagcagaaggaagggtgcatgctggtagcaacgcagtgagagtacagtcttcctgcttagacaggttgtctttagagagacccttgcttagctctgctgccatggggtggaaggagggcttatctgtctgacagaggaatgattgctcacgctgaagatcctga

SEQ ID NO: 456490 - DNA, 499 bp, Homo Sapiens
  misc_feature (401)..(401): n is a, c, g, or t
  misc_feature (427)..(427): n is a, c, g, or t
  misc_feature (433)..(433): n is a, c, g, or t
  misc_feature (451)..(451): n is a, c, g, or t
  misc_feature (476)..(476): n is a, c, g, or t
  misc_feature (484)..(484): n is a, c, g, or t
ctatttttataacattttatataactcataaaacagtgtttgtataaaaattcacacaaagttgctagagagcatacaatttccaaaaatgtcctgggtttttgttacattcagtttcctaaggatgcactccaatctatggtaaaatgcagacatgatgcgagatttcattatctttggtaaaactattctcattattttgtctcctcacagtattaagtctgatatccactttgtgcagggtctgctattactaggatgtcagaaaaacattaaggctggatctacgagagggcaagtatttcccaacagcagtaataggccccttggccctcacccccacttcatgtatctatacaggtcgatctacacagccgggcggggtgcaagctcacgacctncacttggggagttttcgaggttcccntttgangggggaaggaggcaaacnttttggggggacgttgggaaacggngggccatntctaaattgaacccg

SEQ ID NO: 456491 - DNA, 233 bp, Homo Sapiens
cggttctcaccttcctgagcccctccacatggttggtctccatgtctgttcccaagctctcacagcacttcttagacctcatgctaacatgactgctccatgctcacatccccttatctgtgttttttcagtaatgacttgcactattcatcttatattctctgacttaagaatgtgccaaagaccgttactttatcaaaagaagacgctactcgatacatttccagaccttc

SEQ ID NO: 456492 - DNA, 323 bp, Homo Sapiens
gaccttagaggatcttggttgaagttaggagacatgttgaatgactgaatacattgatgaatggatgggtggacaaatgaggaggtagggatctagtggggctgccacctctgcttgtagccaaaatgaaaaccacaagcacagagaagcaggggagggtgctgagtccaccgaaggatctctatgcttgccttttagtagatatatcacagaacatcaagaccagcaggaagcatgtggcacacttcactattttacaggtttctctcctttcaggtctctgttcatctgggtaacgtaagagcaggcaatctaacttcaac

SEQ ID NO: 456493 - DNA, 243 bp, Homo Sapiens
tcccatggtagtaatctcgattgttcagtcagactcctcattttactatctcggttctcagacatataatcaagttcttataggaagtggtaattaagttgagagggaaatgaaggcttgatttcaggttgtaattccgtacctaaaaattgtgttaaacagtctctttgggagagaaatagtaacaaatcttttttagagagaatctacttcaaccgggatcctctagatcactacagcaca

SEQ ID NO: 456494 - DNA, 638 bp, Homo Sapiens
ctagacatgattcgattcgagcccgtacccgttgaaggtagttcctctcctggaattccctgatgctccattatggggccagcaaaggtgtgtcagctcagtgccctgtttgacttgctgcagctcctaggagtgagagaccaccgacatagtagacatcttagagctggtcaaacctgagtagcgctctcaagtcattagagatctgctatgggaacgaagatctgacattttctatcagtgaagccattaagctctgtgtcactgtggtggcgtatgctcccgaatcattcagaagtcttcagatgctgatggtcttagaagccttagttccatgttacctaccaaagctaaagaggcagacatcacaggtggagacagtacctgctgcccgagaggagattgcggccactgctgctcttgcgacgtccctacaggcccttttgtacagtgtagaggtcctcaccaggcccatgacagccccacagatgagcaggtgtgaccaaggtcataagggaaccaccacagccaatcacaccatgtcgtctggggtgaacaccaggtaccaggaacaaggagccaaactgcactttatcagggaaaaccttcatttactggaggaaggcaagcattcccca

SEQ ID NO: 456495 - DNA, 223 bp, Homo Sapiens
gaggaaggcgtggtgttcttccttttaaccatgaagagattgaaggctgcagttgctttgtaattgtccccaaggcgtacttgtcctggggagaggcaggcctggcaggttaggacacctccccataggaaagagtcatatttcgggtcattgctcaggtctggaatgtaatgagcaggaaaatcacgaactgcaaatagcgtcgctattttctcagctcctg

SEQ ID NO: 456496 - DNA, 286 bp, Homo Sapiens
cggatcctgaaaatagcgacgggttgtcagagtgtctctctgggcctgtactgatcaatgacaattttggaaaacactgcctgtgtaattcaccatggaaaataagctttgggattgaaggatgtgactggagcttctaacacaaaccgtccactgtgttccccataaaataggctagtccagctgggaagctggctgggagaaaatcacaagtgtacacccgtaataagccgcccgtgcttgtagagggagagtgaggcatgctgtccactcctggtcactagta

SEQ ID NO: 456497 - DNA, 233 bp, Homo Sapiens
atttaccgaacgggcaaatgtagccgacggccgtgttccttctttccagctgatgtggccccggggctggcctctcggttacaaagcaggagactaacacgcgtcagagcgcgaaggctattccagcctggagagggtctttcttcacgttacaaccagagggaaaggaatttgaaaaggaataactttcccacccatgcgtcggctattttccggatcctctagtacccctt

SEQ ID NO: 456498 - DNA, 171 bp, Homo Sapiens
ggagttgcctgtcgtggctcagttgttaatgaagctgactggtatccattaggttgctggttcaatcttggccttgctcattgggttaaggatccagtgttgctgtgagctgtagtgtaggcttgcaacttagcttgatccagcattactttgctatgttagcgtcgctat

SEQ ID NO: 456499 - DNA, 197 bp, Homo Sapiens
aaaagttagccgacgccttgcccttcatgctgagggccacaagtgctgagctcccattaagcctccatatctttgacttgttcagatgcttcggtagtctgcatttgactctcggtccaaccccttgctaatggcatgaccttggccaggactcaactctctgcacctgtttcttcacttgaaccaagacatcattg

SEQ ID NO: 456500 - DNA, 266 bp, Homo Sapiens
cggtacccaggaaaattgagccgacgggtcgggtccgatgtggctaggcttggagagcttgaccgaatccgcggagtccttcggtctgtctcttttgccgagcgaggggcagccgtctcgacccggacgccttcctcggtgcaggctgagatgctttcttggggtttttgttgtcatggctctttctggactgtcgccgactcgaagggcatcctttgcaggttcgccccagagtgcgtcgctaatttataagcatccgctaggca

SEQ ID NO: 456501 - DNA, 199 bp, Homo Sapiens
gtctagaggatcctgaaatagcgagggcatgtgggcgagggtggcactgatctggcactttgagatgagagagaggaaagcaggatatatgacaagcaagtatagtcaccaaacagtagcccctgttcatatctcaattttcctaatttgaatggatcacctcctttctttctttagttgcgtacggctagattttccg

SEQ ID NO: 456502 - DNA, 266 bp, Homo Sapiens
aaaattatccgacgggggtcgcggtcgagaagcactttgcagcctgaggagtttgggcggaccgtccgagttgctatgagctgcttttaggttcgtgtttttaacatacggtgacatgaagctttacacgtgtactgtgaacgtgtgtcatccggtcttttagtccatagtccgtatgtgttttcgggtcacattctgaagttagcctttggaagcgagcgttgatctggtgagaaatgcttagataggcgtcggctaatttataa

SEQ ID NO: 456503 - DNA, 230 bp, Homo Sapiens
atagccgacgaaagtgcaatatatataagtaatacacatgtaagctaacagtgtgactctgccattactctctaatttattaaggtaatagtaaaactcttaagagaggctgtagaaataactctcttttggttctggaaaggctcaccactgtagtaaaaactgaatcactttgttgtacagcagaaattatcacaacagggagttcctgctgtggtgccgtcggctaa

SEQ ID NO: 456504 - DNA, 275 bp, Homo Sapiens
  misc_feature (234)..(234): n is a, c, g, or t
aaaattacccgacgtaggaggcgaggggtacaggctagaggtgaagaaggaaagggcgttgagaagccctgctgctccatgaccaaagcccaggctacctggggtgttcacattcggattcccaggccgtacccccattctactgaatcagtatttccaatgggaggacccaggaatccatatatttaacaagcttgctgcattagggtggtgcacctcccatatgccagacgngggcttacgctgaaagggatatgcgtcgctatttaccgatg

SEQ ID NO: 456505 - DNA, 225 bp, Homo Sapiens
  misc_feature (156)..(156): n is a, c, g, or t
cggtaccccggaaaatttagcccgacggaaggaggaagggaaagtccagtggcttataatttagcctacccattaaagatattctggtccgattatggctttctccaaccagaaccttctcaataaaggggaaaggccatctgtggaaattggagncagagcctttagatctcctgttagttatcatcagttgcgtcggctattttaagatccgctagagcacag

SEQ ID NO: 456506 - DNA, 379 bp, Homo Sapiens
  misc_feature (326)..(326): n is a, c, g, or t
tcccaccttcccatttcacacacaatgttatcagtccaatccagtctcttagagtaaatgccatctctgtagcaacgatttccatgtttacttcttagagccctagatttatattcctctattaggctgtctagttgatattgcaaactaaaatgtatcaaataaaaattcttgacttcctgctaaaatctactgctcttaattttggtgaaaagtacttccattcttctaattgctcagaccagaggctctgaagttttttcggggttctgtctttctcttatatcctaaatccatccatcataaaatcctatcagatttgctcnaaatatatacaccacttgcttacatctcgtcggctattaaaccgatgtcaaca

SEQ ID NO: 456507 - DNA, 306 bp, Homo Sapiens
agtgactacggagcttaaaaattagcgacggggtgtcgagcaagtaagctgggaggagagcagacacttgacactgcatttatcttaagatttgtggtttttatttctgatgtaggttactatcagaaatggcagctagaacctttattagaattatgagtagaaaacagggtttcaggcagagtaagactagcctaactcaaagtctgaaaaacagtttttaaaaacacagaaagatctatgtagtaatagaaaaattaattgctaatggtcatgctcgctattttccggatccttgacacccgc

SEQ ID NO: 456508 - DNA, 243 bp, Homo Sapiens
cagatgaatggatcattcaactcgggactaatgtgcatgttcagagagttttttttattactcagtgaattttattacatttatagttgtacaatgatcagagtttttatgagccagcatccctttgtaaactgccaaccccaatgctataaactctcattctccataaatggacatccgagtctcaactcatcctctgggtgcttggggaacgacacaatgactcagatgtccctccgtgcc

SEQ ID NO: 456509 - DNA, 156 bp, Homo Sapiens
ttatgcgagggagagggtgaaaattattctgggtggtggaaccaggagcaaagcagggagttgtaaaagggcctgggttgtttatggaaatgtggaaagtgcagtgaagctgaaaagtcatatgtctggttggaagtaagatgaggctcaacgaat

SEQ ID NO: 456510 - DNA, 225 bp, Homo Sapiens
gcgccatgttcaagaaaatggcaccaaaatctagcttccttgcaagctgctttcgcagaaagtgcaactctcctccgggaaaccaagctcagccccaatgcgtgtttgctcaggaaagcagcgcgttctggtttctcccctaggtctgtgcttgccatagtaacaaggagggtctggctgcctcctgcctccctgcgtcggctattttccgggatcctctagatc

SEQ ID NO: 456511 - DNA, 319 bp, Homo Sapiens
ccggaaaattttgcgacggcagtccagcccctccttggccctatggggggcatagggctacgggagaactaggccggcgccgcaatcctgacccaagccgcattggggcagaggtgtgttccccgtgcacagtttccgtttgcagaatgcagctcctagatgcgtgttttgagccgtgtcggagataggccctatatacgtagctccctagctggatatgggagggctgctaaggccagtgcaaacagggcttcttcatgccaaatcagccttctcctgcgaaggacaacacgcgtcgctattttctacagctcctcta

SEQ ID NO: 456512 - DNA, 223 bp, Homo Sapiens
ggttttgcgtggcgatttttcccccagtggcatttgacacggttacacccttttagaaaacagttggcagtgctatcgagagccataaatgtgtctatataatctctgggacttcagacttaagaaaatactaaggaatatgaataaactgtatcaacaaagacatgatgggttgagagcagctgtagaccaatgagcctggtgtgcgtcgctatttaaagct

SEQ ID NO: 456513 - DNA, 376 bp, Homo Sapiens
aaattagccgacttttggatgaggaaaatgtgagtttgggtcctgagtttgtttgagtggctatgtgtctgttacatctcgtagtacgagatcattcatgtgtgaaaggaagacgagggtacctggctcagggtccatgtgggaattaaatatgttagcgtgtgtgcctatgtgacacagtgcctggaacctagtgggaaatcacacaaggtcaggtctcctctccacctacgccaaaagagtgtctcgtgacagtattgatccggtggccttgactactcttaattaaccatgatataaacaattggtatgagtcatccagaaaaacagcaggaaccgtacaactcagtgccgtcggctatttcacgcatcctct

SEQ ID NO: 456514 - DNA, 256 bp, Homo Sapiens
gcatcagtgtattctgggacaactttcaagcagcgttgatgtatgtacaactggaggtcgttggaaatgataatgtgtaacgtggtaatcctggaaaattatttttcaaatgtgataaaaattataaactaacatattcatgaagctgaaagaataagcttatatgaaagtctaatgtttaacctgcattaattcaaaagtatagtgagatatctagtatctattcgtcggctatttataagctcgtcagagtcac

SEQ ID NO: 456515 - DNA, 376 bp, Homo Sapiens
gaggaggtagtcggtattgttctgaagaggtgcccgccgaccccagtgagatccactacctaggaaacctgttcacttttccacccttcctctcagcacttcagtcattataattagcccagttaccgccctcataggagttattctactctatccaactgtacaggtttctccggtttccactgtggtttatatggagattctctgtaatcctaataattccaagaatcttatccatttgatacatttccccaagtgaggcccactccctccaacaaccaatccctaagccagagatgccactcttgagtgggaacgattaattagccatccttcaatccaaccacgccagtgttcgtcggctattttccaacgt

SEQ ID NO: 456516 - DNA, 335 bp, Homo Sapiens
aaaatttaagccgtcggaggtctgtttggtctcacaggctggaaaatcctctttagcaagtggggtcttgaatggacacgtgactgatccaaaggagccagccatgtggggcctggcgagggtcagcatggagggaacagcagctgcaagggagctgggcaggtcacagcccctggagcctcattctgcctctgaaggtggacaccaaccagctttgagtccatccatataaatgtcagcagaagggtgagccctctgggcaccttgtgtgaggtgtgagtgagagatgggggtgattcagacaaagatgggaagacttagggggcccacgatgg

SEQ ID NO: 456517 - DNA, 257 bp, Homo Sapiens
gccgtataaatagccgacgcaaatggtatgttgaattcttaaatagtaagacttgaaagtcaacttactccttgatgcatgggcttcagaatggattatgtgttagcagacataaaaacaacactaatttcattgcacatctccatcagagctctttgggtgaccaggtagattgtcaatgagcaataatcccaggctaggggtcaaattagagctacagctgccggcttataccacagccacagtaactcgggatc

SEQ ID NO: 456518 - DNA, 288 bp, Homo Sapiens
actgggaaatagccgacgtcgctgtaatatttagcttagaaaaagacatttattttactaggctgatgctaccgtttctgctccctgcctgtaaaacccttctttcccactgttgctgctcttcttttaagagcacttagcagatgaaataaacctttggtagctagtctggaaatattccatcatttggatatctttttttgggagaaaaatttcaaaacaagcaaactacaaacatttagagtctgatctgcccacgggaaatacagtatttaaaaatacatgttt

SEQ ID NO: 456519 - DNA, 261 bp, Homo Sapiens
tgtagtattgaattttcttgtcatagaatagaagaaatgctaaagaaaacccatgcttattccatggctcttgacattgccttgaagaccttgcttgggcagcggggtggttccgcttagatcattacgtaacgtgaccaccccaaactggttctgatggtgtgagcgggagagggacggctggcctacaccagagccacagcagtgtgggatccgagccgtgtctgtgacctttcccatagctcatggcaacgctggatc

SEQ ID NO: 456520 - DNA, 236 bp, Homo Sapiens
cggtacccggaaaacttagccgacggggtcaggctgaaaagcactgatgtaatgcgaactcattttccccacccgcaagacgaagacccaattaagataaatgaaatttccaaacattactccatgacttaggatcaaagaagtgtcagaatgaaaacttctgcgcttgacccaccggcacacttcccacacggaggtaacagacacgctgctcggctatttctaagctctgagat

SEQ ID NO: 456521 - DNA, 198 bp, Homo Sapiens
ggaaaactagcgacgcatagtgactttataaaaaacaagttctggtatataactcaccactgggatccttctccagcaatggagtagttacttagatctaatttgttagtgattcaatgcttaatttttatgtttttgtctttttagggctgaacctgcagcatatggaagttctcaggctaggagtggaattggagc

SEQ ID NO: 456522 - DNA, 180 bp, Homo Sapiens
cagttagagatttaaatactttaagagactttgtggggaaaatgactgtaaatgtcatgttactcttatttcttacctttctcctctgctttcctcatctttgtccccactgttctttctgtttgtaagaatttagagaatgataatccgtgccataacactctggaacccgtcgctatg

SEQ ID NO: 456523 - DNA, 322 bp, Homo Sapiens
taatagcgacgcaatatacatgaggtttcctctcatgctcaggttctccacaaatgaagactataaacaaggtttttttaaactgtattttagtgacagaaacctatgtgctcttgaataaaaataaagagctgttatcaccatgctactgtcacaacatttgctgtttgtaactgcttttctttcaaaagtctaaaaacttttttctatatgttgtgtttatactcatgtatctcacagaactgagggaagggacccattaatcaagacctttctttttaaactatgtgtacatatttacattatcacatacacgcgtcgg

SEQ ID NO: 456524 - DNA, 171 bp, Homo Sapiens
tctgacagtctgcctgtggagttacccaaacctcttggtaaattgcgccaagcacacttgagtgctaacggtgcggccgcgggtgaaagccgatcttagtcagttctcagctgagctaaagggaggacagggccttgccccactctgcccctccaaacgggaatttatgat

SEQ ID NO: 456525 - DNA, 307 bp, Homo Sapiens
tgggggcctgagaatgccctagtctccatgagtggcccccagtgccttggacagagccctgtttgttgaagagggcgagtctatcagggctccggatccggagggaaaggtgtttattctaatcctctgcttcccagttttcgtggtctgtagtttgatgtttctgagacagatagacccgaccacccaccgccagaagaatgtcctctgcagatcaaaggtttgtgttcaggacccagagaggaatagctagtcaaaaacacagctttgtcagagttcccgttgtgaaccacgtaaggacccgtcg

SEQ ID NO: 456526 - DNA, 357 bp, Homo Sapiens
tgaattagccgacgtagtcagtcaggttaagaatcttagcacctccatttcccagctgggggactctagacaaataatctagtgaactctgtaagcctcagttctcactcattatatatgaataatcgatactatctccttcttggtaatagtgcaaggattatacatgattacataagtaattatttatcacaattcctggcctagagtaaatgctgaataaacagtcaaagtgttccatgataatacatgtagatgcatccacatgagcgcagtcattttgttgacttcttagttattgccagttatggattgactgcagagatgttgtataaatcagggtccatcagcgtcggc

SEQ ID NO: 456527 - DNA, 289 bp, Homo Sapiens
gggctccagcagaaagagacttgccagaggcgaactaaccacccgagcgcctctgattgggtgccgccgtcattagtgccacggctgtttaggaactacacatagacaggacatggtgacagctaagactttaaagcctatgtatttttcaaacagcttttcaaactgtttttcatgacagaattttttcagctctatcattaactgctgacaagctgacagaataaatactccagcctttaagaagccctctaacgatctcgtcccctcctccgccttgagcttggtg

SEQ ID NO: 456528 - DNA, 360 bp, Homo Sapiens
ccagccagtgaggaccatggaattttcttcccacactcctcacccccacctttgcctcaccatctcaatgacagttactgtcatatctactgcttccttgagaaatcatcagaggtggtaatattcagttctaacgctgaaagagatgttcagcactgcataaatcagggttaagcaactttagagatctgtggaaacatggcagagaccacagggtgactagggagtgatagtttgatcctgggctcttccgagatgaacagacaccaccatccaccttcactgtatgcactatgttagcctgtgggaagcatgtctccagccagccaggtaagctgtcgagcacatcctaaccagcct

SEQ ID NO: 456529 - DNA, 326 bp, Homo Sapiens
  misc_feature (168)..(262): n is a, c, g, or t
ctagaggatcccgcatgtcgtaatgatgtattacatcattcttatactgaagcatgactgaagggaaagatatctcatggggggagagttcctcatacaagagtatggaggaaacttcacttcagggtcatgatcagcttcattttgagaggagaatccacccctcannnnnnnnnnnnnnnnnnnnnnnnnnnnnnnnnnnnnnnnnnnnnnnnnnnnnnnnnnnnnnnnnnnnnnnnnnnnnnnnnnnnnnnnnnnnnnntcaacacgcttttaatacatacattcaacccccagatacatacataacatgcacatataaccac

SEQ ID NO: 456530 - DNA, 244 bp, Homo Sapiens
gagaactccaatgcagatttctagagtgtttctactgggctctacttccaaactgatattctccccccaatttttggatgtctcagtctccctgaatttggatctcattctcttcatctcaggcaagactttatagacctggacattttacagatttagttaatagcagttcattagttcatcactagtgtcaaatattttgagggtagactcaggtattctccttattcagagtttatttcta

SEQ ID NO: 456531 - DNA, 437 bp, Homo Sapiens
ttggtttccgtgtttttcgtcgttcttcttggtggcacagctttcaagtgcagacaactttttcttgttgtctagagccattgcttccagagcttatgaggagctataaaagaggtcaggacacctgggtctagtctcagctctaccacgaactagcaatgtggccaagcaccaaggctttctggtcttagctttctcatttataaaatgaagaagccaaagttaactggatttctagcccctgccaactctcatatctctaacagtaagttgagagatttttctctctctgacattgtcccctttctttccacctctccacaatgtgcgcaacttgagataagttacttcacctctgtgtggctcagctttgcccatgtatacaatgggagatacctactttgtagtattgtgtggatattgaagtggggatccta

SEQ ID NO: 456532 - DNA, 255 bp, Homo Sapiens
tataaagtaataagaaaacatgccgaccccatcctacctcagtcccatttcccagatgcaacacaccacagcatgccatgtttaacttatcatccttgcagacctttttctctagtcatgcgattgaccaatcaacaaagatttatcgagcgtctacactgtgccaaccacagtagcaggagctggggaaacagtgaacaaaacagactaaatccctggaggagaggttcatttaaacagtacacatacggtaac

SEQ ID NO: 456533 - DNA, 381 bp, Homo Sapiens
tgagctgattccaggacttatgcaccattccgaggactgttctctttttaatcggtgcggagggaggggaacgcgcgggctgcccggatcggtggcttctgacatgcccctgatcaactctgcctccgtgtctctatctgtaaagatggctctgtcaatacccttgtctgcagttctgatataaggattaaatacaatcacatatttgtcaaaagacaaaattacagtaaacttagttatagatctaattggcttttatttgcgattcataaatctgagcagcctccttcgaaatagaataagggctccctctgggcagtagtagaacagcgagttttgttaggtcggaatggtgctaaggtcctcgagagtcgacctcag

SEQ ID NO: 456534 - DNA, 447 bp, Homo Sapiens
tgctgaggtcactctacaggatctcatgcaccattccgaggggtcaaaaggcaacagagagtaaatatacaaagtcgtttttctttcctatttcctgggacttttggagaaaatgacctgaagtgacgagaaggggccaggccaggcacgaggcggctgaggggacagagcatatgggagccacaccacaggcatcatgaaggaactccagactggcaatgtaaacccaggtagggccaccttcccaaagcacaagtgcaggtgagggggcccagtggggtgtggctccccagtgccttccagaaggatgatgagtcttcctcgccctggggtctgctggtcagccaccactgccttcagctgcacagagttcccctttcactggaataacagccatgagggaaccgtgaacctggggtcggaatggtgcataagatcctggagagt

SEQ ID NO: 456535 - DNA, 564 bp, Homo Sapiens
tttctcagctatctcttccttttctgtcgactgaacctatttcttaggcttgtgctgccttatcatttccaccttttcccttctcctgaaagtctccaggggcccttctttggagaagactgcacaactgctgagagagaggacttctaggaccagaactcctctaggacccgaactcctctaggaccctcgttaggggcagctggtgagcaactgtggcttctgggtcttaagctaaactgttttgagtccatatcccaggtccaccacttactagacgtgtggcctcaaggaagcctgtttgcctctctcaagttcagtttccccattttcaaatgggagcaagagtagtccctttctcattgtgatgttacaaggactaagataatgcaggttaaagtatctagcacagtgctaagggttagctattgctaactagggagaaactactttaaatgcatgagacttggagacagggagaggatctctagacagctttgggcaaaggctgtaactatccatacatgacttggtgttggatcggaatggtgcatgaatcctcgg

SEQ ID NO: 456536 - DNA, 498 bp, Homo Sapiens
cgacccctctttattcgtcgtctcctgaagctgtgtcatgtgtttttattaatggcaccatagaaaattcttcccttattatggcctaaagatgaattaacataatagcaagcaggtgtatacaaacttgacaattatgcaaatatagtaaatggccctgtaggtactgtacttcttcagaaagatttgagatggacattaagtcttccttgttaatcctgtatttaatgacctctaaatagcatctattgagaccttccattcctttcaacaagttagaaaaacgttccgatttatccctgttcctttttcccatcctctggcaccagctactgtctttatattagaatttgacttcctttcctttcacattgtggctaaagaaataattgttatcatgttttactagtgacttcgtagatgtctaacaatacatcacttaatcagaaggagaggagaggaatgccctgagctctgtgcaggagctatgttcagttg

SEQ ID NO: 456537 - DNA, 443 bp, Homo Sapiens
ctaggcgcactcgtagaaacaggactgtgattgggcactggttcactgttcctccttttctctttcctatctcagtgtcctgcttattctttccatccggactttttctgcccaatctgtgcagtgtctgaatgcctgcctcacaaatcctccttttaagattgggagccaggtgcttgccaatgaaagataataaggttttttgcaataagtgacctcatccagcagcctggcacagacctgtcaactgccgacttctgaatgggcactacctgcagcccttccgatggaggagctatgggaggagaggatgccgtaggctccataggcactcaagtccgtgctcttggacatgaagtaatttggggctatttgaaccccagccctattgctaccttcacagaggctgtctccactccaggccatttgtgccctgggtgcat

SEQ ID NO: 456538 - DNA, 533 bp, Homo Sapiens
atgcaccattccgagcagaatatcaatgatgaaatcagcaacacagggcaagttatagaaagatgccagttgctggctccgaagctgtaggcacgtaacaagaagagacaaagcctctcccgcaatcagcgagtctttggtggatacagactgttgtcgaacacagattcccgcatgcagggctactggttctccttcacttccagagctgcaattgcttcctgaactgctgagtctgtttcgaattccagcaggacacagggaattactttctttaattggctggctactcccaacaagatcaagccgtcctgcagccgcagcccatgacaatctcatgaagcaagccacagtagaagtgaaatcacttacttccattgtttgtattgcaactcgagcagcagggatgatttcctcaaccgctaatagaagacctatcagacacggactactgtcggtaggatgacttttctggtggtaccacactaagtacatctgtctgcttttacccggcggacatttcggaatggtgg

SEQ ID NO: 456539 - DNA, 339 bp, Homo Sapiens
tcgagctcggccccggttgaaatatcgttattttcaattctttatagaaggaaggaataagaaccatgaaatgtttggaattgagaatgcctgagagatgcaggcaataaatatgtgcacctttgaaaagggaaatccatggccaaggaaataaatatccctttcaataagactacctcttaacactagaatctgcttacataatgataatgtggacttctttcacaacactcataacacttttccttctaatgaccaactcttgattatgtaggcaataataaaagcgaacatctactatgttcaagtcactgggctgagcattttacatacaaattc

SEQ ID NO: 456540 - DNA, 376 bp, Homo Sapiens
gcaattttcagctcataatctcagaatccgtaaatgcctttaggatctaatttgcaaagagaattacgtattgcaaggagccatgtaaagtatataactagttctgtggaaagcaaagctgtgagtgacatctaattaggctacaatatcaatgtgctttggctctggcactcatctgtcattactttgaacaagccatttgacctttatattatatgtagggaccatacctcttcatttgcctgttagttctgttgccctggtataaatttaattgcgcctttctgcttcaatgtgctggtttgggtgataagttatatgatcactcactatatacaatctagaataaatgataacgatatttacccgggccagg

SEQ ID NO: 456541 - DNA, 529 bp, Homo Sapiens
ggtaaatatcgttatcctttatttttcactttcacataccacatcgaatccatttcttttttaatcctgttttccctagtttcagaatatatccacaatccactctgggtccaagccacttcttgcctgatatgatggtgttaaaacatattccaggttatgctacttttctgctagtccctcaatgccttcccatctcacctggaatgtcaacatccttacagtggcctagaagggcattgtgataacctgtcctacttttggccccacctcagccgccactgccacttctctgacctcatctatttcttttgtcactttgctaaagtcacactggcctccttccttcacccagaacaccctcaaagcatgttctgtctcagagtctttgtccttgctgtctctcagtctcaaaacttcccccatatgcctacatagctgactccctcccttcaggtctctgtacaaatattcctgtactgtcagagacctgtgtcaaataacgatatttacccggtccgagctgata

SEQ ID NO: 456542 - DNA, 580 bp, Homo Sapiens
gtctaccaggggccgaatggtcatgccctgcacaaagacggtgaagaagatgacagtgatgatggcagtgaggaacaggtcacacatggggaagtgcttcttgtccaggaggtagcccagagagaaggcgatggcccctcgcaggcccccataggcgatgatgaactggtccttgggggtcagcttcacgatacggtacttgttgatgaaccaggtcaggcccagcacccccagcacgcgggcgatgaggcagaagagcagggtgctgatgacgaaggtccagttccagtggtgggagccggccaccgtggagacgccgaggaagatgaagatgagggtctcgctgacgctgctccacatcttcaggaagtatttgatgctggtgtgggacttgtgggagatgttggcctccacataggggcgcatcaccactcctgaggctatgagcgccatgatgcctgacaggtggaagagctcggctgacaagtaggccatgtagctgtagaggaagacgaagagcggctcgatgacccggatgtgggaggtaaatcgggaggtgaaggctgcgatgaccccgtag

SEQ ID NO: 456543 - DNA, 402 bp, Homo Sapiens
tcgagctggtccgcactgatgttcgttgagcacttgaccacttgcccaaacgtccctcggcccaagaactctaagacctcgtaggtgttggtcatggagcacagcacctcatgctgcaccagctgatagtcgccctcgctgttggagccgctgtttttggaggtggcagtagacgtggtggcagtggcgacagtggccccgcttgcattattctgaatcatgggtggatgctcctcgatgatctgcacgctgcttgtgttctcgatctcctcgctcttacgcttgagtccacatttttggtaggtatcaaggaggctcacagtgcttcgacgcattaggttgtgtggtccgccgaggactgcccggtgacagaagtgctgctagctgagtgaccacgtgata

SEQ ID NO: 456544 - DNA, 418 bp, Homo Sapiens
tgtatattctcattctgcatcatctattttcagtgttccctgctgcctggacactgaagccaatggtacatatttgtaggtttcaagttatggcagcactctattttgaggtattcattagtgcacactatctcctgtaacaaatagaccccaaaatgcagaatgattaaaacaccacagagatgtgtttctcacataacaagccagagtgagagctcattagtggcacgtggcttttctcctgaaaagctgaatgcagtgattcggaaacccgtgttctttacagttagtagattcacccttcccaaggcctagtaaccaatggtattcagcggtggaacgggaaagagagagcctggagagagcccatatccatactccttgcagaatgagatacacagggtcctctagagtcacc

SEQ ID NO: 456545 - DNA, 352 bp, Homo Sapiens
ctcagaggcatccccgttatctcattctgcaatgcaagactgtgcatatgtggatgtaagaaggatgctccttgtcacccagcagtaatatgagccatcacttattttgcctgtatagtgccctcttgggaaacatgtttattggctcccttagattaactttatgacgagagagtatgtacccttcactctactcctccccccagcctacccaattaaagatgactagtcttttaaaaatagcgttattgagatataacttacatcatataaatggaatcataccgtgtgtggtctttgtgactggcttcttccacttagcatgatgttttcaaggttcatctatgttgca

SEQ ID NO: 456546 - DNA, 410 bp, Homo Sapiens
tgtgaatctcattctgctaacctgtccgtccgtcggattatgacttccatcccactcaagcaatatacactatcagacattctcctaagttccatccccggttatgacttccatcccactcaaacaatacacactatcagacattctcctctctttacatgtccatcaaaaccaccttatctcccagtctccaatagagaatctcaatcccattgcttgtctaactctaaagaggaacttaaagcaagcctaaaataagtaagacctataagagagaaaggcctgttacggcagggcatgcagtttatatttaatcagagagaacctggcaagccatgggagttatctcagcctttcaggaagattacctgatgagcccttgcagaatgagactaacaggggatcgctct

SEQ ID NO: 456547 - DNA, 439 bp, Homo Sapiens
cccctgttatctcattctgcaacagctatcccatcccatctctctattgtttgctgcatggtctcacacatgacatgtgaaaatctgactcaaagttctttatcttgaagctgtgtttatatgttccgtgtgcacataaaactcaactcagttactattcgtccttttccttttagctacgctgtcaaatcaaatgtggtttcaagataggaaggggctgtccagtttctaaatccgccaagacaggcacacttccagcttcattgaaagttggtcttgaattcctggtcactacgtctgctctgagtagtgcagcaaatgttttcaaaagggttcacagtttgcttctcatggaatcaggttatggtagagtccttcagcttagccaattcacagatcttttgcagtaatgagataaccaggggactgctctagagtc

SEQ ID NO: 456548 - DNA, 342 bp, Homo Sapiens
cttaccttagtcttactgtattttttgaggtctcttcatattgacattaatctggttcatttatcttagttggtggatagtattccattgtactgcatttgatctagtcccttagtaacagacgtttagatgtgctcttcttgtatttctgtgtaattcttcagttccatttgttcctgtcctttctgtggtattgcgtgtaggaactcagtacatacttacttgactttattttgatttgactaaaggtagtttatgagctatgaagctatccttcatctgtttcagttctttcagatggtctcagttacagattatttatttataatcatcttaggtact

SEQ ID NO: 456549 - DNA, 264 bp, Homo Sapiens
agcctgagggttgcatttaaaattggcattaattttgtttttcacaggcttagcttttttccctgaggcttctaacaaattctagttggcttctgtctctattattgaccatgtgtaccaagtggaatattgtctataaaaatttgaaggcatctgttgctttgcaaagactatgtgccttttatgccttaggtaagcttatcaattccagtcccctttaagaggaggctgaccatgcccatggttgcagaatcgattaaatca

SEQ ID NO: 456550 - DNA, 360 bp, Homo Sapiens
tagtggcatgatacccttttcctgagatgcattcagggttaaagaagatagttcacctacacgttagatttcccgtgaagataaaaagtcccaagttttgaaaagcagaaggaattctaaaaagaactgaaaaacaaaagcccatggggagagtgatgaaatgagtttctgagaaagactgtgaagaggggttcaaagcggccgctgacggactgcccgaacctagggcaatgaaagacctggggcaggtattgatgttgaccgtgtcagaggcagtggacctggtgggcagccccagaggcaaaaggcctttggcgttgctgagagagcttttccagtactgagcaagagcatagtttg

SEQ ID NO: 456551 - DNA, 311 bp, Homo Sapiens
atagccttttaaaaagttacattcattgtcaaagtaaattcctttggagcattaatagtatgtgaaatatattttagatttttggagttaattcaaggaggctttgtggttttaaactgcacaggtagttaggaatgaccatggttgaaatatatgtatattcttggactctgcatgcatatttcaaaaattggtaaatgctttcatatgggacgggggagggttcgggaggagatactttagttaaactagcaagatgattcagttttcttgaccagtgtaatagatcttggtattctaagttctgtgct

SEQ ID NO: 456552 - DNA, 365 bp, Homo Sapiens
cctgctatatctcattctgcaaactgtcttgagagctgtcttttgtcccaggctcagctgggtggtctgcctctgctcttcggccctaccttctgtgcaccccatcatggcacaattcatgctcaattcaaagcagggagcaaaatggaggcagccactgttgtgtgtctccactgctaaatgaggctctcccgagtgcaaggctgcaggggggctttgggagaactcttggtggaatgcgattaggcttacattctttactggcaattgcctcagagttttcctgttttttcccatagccctatgtggacactggaattatgaacctggtatttgatgcagtgacagaaatgtaactgttgatc

SEQ ID NO: 456553 - DNA, 341 bp, Homo Sapiens
attattacaagaaggtaatttctaaatgtttccttttttccccatacattttaaacacacagaaattatctttcacccactcggaagaaggggaaagatctgtatctgtgtaatttgctgtctctgtgtaccatgggattgtgaaacattcaataatgattttaagtttaattcaagtagaagcatttattgtttcttgggggtttcaggattaacaacttactgttcatgatctttttgtttatagaaccattgtggcctaaatcttatcagtttaataaattaaattgtaattgctacacttgcagaatgagataatcaggggatcgtctagagcgacc

SEQ ID NO: 456554 - DNA, 353 bp, Homo Sapiens
ttatgggcattggatatgagtactcaaagaatggatgcaaagcaagaagctcttgaggacactgatatttaggaagtgggttgaacatgacaacctggtgaaggaagcgatcaaggagctattggaaaggtagaaggagaaccagtgtggtattattttttccctatcattggctgtttttcttgggagatgactttatgtccctgcttgctgcaagtcttttgatatcaggcttgggccatgtggctggctttggccaatagaatgtgagcaaaggtgatagacactatacccaagcagaagttttaggaatctctctgtatgggtcagtgttagccctttttttctgccat

SEQ ID NO: 456555 - DNA, 314 bp, Homo Sapiens
cgcataactatacagtactataactttactatgataacttcactgagcaacggtacaaatcgacaaatggacaacagtttctatcattgattaatcaaactaatcagaagtcaagtaatctgctaagaatattctgacctctactggcccttggcaatagatggagacagaacaatgccgcaaacgtgaagacagcctcccactctctcctctcccacttctcctacaggctttgaggatcaccacgtttcgctccttcattcacatgtctctgacattttagagtccagaacatcacaagatacccataagat

SEQ ID NO: 456556 - DNA, 283 bp, Homo Sapiens
ggacttgaatgcttgactagggaattcctacatcattgactaggcagtggggaaccatcgaaaatctttgagcatggaattcacagagtcattttggcagttgtgtacatggctaagtgaacgactttgaatctagttgcaaagaggccaattgtgagagttcagggaccttcagaaagtaacatcaggaatttcaagatggtcagatacccttaaataataagtagctctcatattacatatacaaagtaaggccttgatgtcaactcccataagatcaccc

SEQ ID NO: 456557 - DNA, 230 bp, Homo Sapiens
gtgtgtcatgaaacaaatgttgtggaggcatccccaaagctatctaactccagttattctggatgaaatgtctcttctgtggtagcaagctgttgactgggtttttcaaatcctggtttccctatgtaatttttgcaagaagactttaaaaaaaattcttgttcatgcatacattctctgggaccccaagggcttgttaattgtttcatgacacaccggtaccgagctcc

SEQ ID NO: 456558 - DNA, 372 bp, Homo Sapiens
gtcagtgctcggcccggtgtgtcatgaaacagatatcattatatactcactgtagctcagacacagtgcaatgtactgatgtggggttcacatccctcaaccctcaagccatatacacttcctactatattcccctacagaatggaaagccattgctcctctgtgacaaggttcaaaaattacagtaattcttttgaaaaatcagtgtgaaacaccaaatagtcaagtgtgcctacaatgttgttggctgtaggaagtagaaggcagtatgagacacacttccaatctcaactcagaaccagaaaatctctactgaaaagatccatagacatgaatgatcaaatgtttcatctgtttcatgacacaccggcc

SEQ ID NO: 456559 - DNA, 303 bp, Homo Sapiens
tcggtccggtgtgtcatgaaacaatgtacaaatttaatactcatacgttaaagaaaaattgtttaaaatgagtattcattttcatttttctacttaattcagaatgctattggaagactcttgtttcatacctgttacctagaattaatctttctgggttttggcattcttcaagaaaaatgacacgagtaggcagttaggatgtgctgcttcctgatctgtgcagtttgggaagttctgccctttgtggataattataggataaccatgactctatttttgtttcatgacacccggtaccga

SEQ ID NO: 456560 - DNA, 372 bp, Homo Sapiens
tcgagctcggtaccgggtgtcatgaaacagatgtataaaaattgaaaggaaatacaacaaaaggataatggtggtattagatggtgccatgaagaatattttcatttcactctaagcttcttataataggaagaaggaattggtagtattttgaatttaaaaggcaagtgtgagtacacttgtgataggaagactctccctgaaattactaaaatgttaaggaaactagacagagtccactctgtattttctgtgtaggttcataaagggtagggtagaagccatcccagagattgcccaaaacaatggatgtgtaactgtcatttctttgggactttgcattgtatttttaaatctgtttcatgacacacc

SEQ ID NO: 456561 - DNA, 263 bp, Homo Sapiens
agcctggtccgggttgtcatgaaacagaatgtagaatgtagtggagaaggggccagagaataatgcacactctctacagattcagcacctgggatgcatttctctgaagggcagttaccagcagttagtgggttacagccgtcaccacaccaggggataaggagagtggggaaatggttaagtacacttttttaaaagacagtacttatctacttattctcatttgttggatatttgtttcatgacacaccgaccgagctgat

SEQ ID NO: 456562 - DNA, 462 bp, Homo Sapiens
gggctcggtccgggtgtcatgaaacaaatatatgaataagtagtttactattcctgagaaaaagagaataccaagtgtaagagaatgtgtaactagggttggggagaggggggctggagagagagaacacacaaagacagcagagagaagtcaaatagaaaatttcaaaatgagaatcagctgatgtatcaaaaagagcaaaagaatttttttacagccagaactgcaagattttgcttttcaaaatgattcaattttccagaaaagaaaaatcaatttaagcactcacctaagtaactagtataaagtgtcaagcaaaaataaacatttattagatatagacaaatgcaaatatattcaatgctttcatacaaatatgaatatcaggggccttattatcatctcgttaatacatgccagtgaacaatttgtagacacaagacttgttttacaaacagagta

SEQ ID NO: 456563 - DNA, 526 bp, Homo Sapiens
aggaaagatggttctggtggaaggaaggtgccatccactgtgatggtgtagtcttgtagatgataactttatggggaaccagcaaaaagtggaaggtgactgctgtttcaagcttgagttgagggaggaatattgagtagtgtgtttgaaacaaataagtccagtagaatgtggagtgtgtgcgtttgcttcttaagaggagaggatgctatgaaattaattttaaacctgctgaggatgaaagaaatcaattgaaagtatagaatcaattaatagtagaggtcgtagggaacatgaagatttcccagttgtagagattgggagattggagcctgggaattggattggctgttctgttctgcactcagcccgatgagcaattacagcagacctgaatcaggatgatcaagtctgtgctttgggccgagcagggactccgaacagagctagattgacaaactgccgtgcacctgtttttgtaaattttatgggaacacaggcacaccatctgtttcatgacacaccg

SEQ ID NO: 456564 - DNA, 200 bp, Homo Sapiens
gcttgtagcaggtattttttcactccagactgagaatattggtgggatattgataaggggtactgaatggtaataaacatgtgctctagctctgtgctagtcagcttatttcagaactctagtttgattcagtttcttgcctctgactcaaatggagggagagtgatttgtttcatgacacccggaccgagctcgatctc

SEQ ID NO: 456565 - DNA, 261 bp, Homo Sapiens
tcgagctcggtaccgggtgtcatgaaacaaatttacatgtggactgggaattagaagactttttgtttcagtctgcctgttttactttgtttttttctgagtctcggctctactgctaactagctatatgattttggctaaggcacttgaaatccatgggccacaagatgatgcaatgggaaatgaatttcatcctttcttacagcctgacaatctgacaatatttgcaacctctatttgtttcatgacacccggtccggc

SEQ ID NO: 456566 - DNA, 378 bp, Homo Sapiens
cttgtgtccgtggatctgaaacgcccactcaaagagcctttcatagctgcattctgagggtcagcttcaaacattcactgaaaaatgaggtgggagtgactgtattctggatgaataaatttttctagcaatagacatatctgacgatgtaagttaaaatcagccgttacttgttcctccgataaatgggaaacagtggagaatatagaggtggaagacagcctccactcaagtctaaagcaatcctcttccctcctcacctccgtcccatccatagtgtcttccattagcccctcttcataatcttctataggtcattaatttctggattatttacagtgcctaatattcttgaacctccctctatcacccgattca

SEQ ID NO: 456567 - DNA, 296 bp, Homo Sapiens
caaggttgagaaatagtagagagacggtgaaggaagatcagtggaagatgggaaacttgtctaatagggtcattcagatagccttaagaccaagaagtccaaaggactggagtattagggaatcaagaaagtaagaaaattgcattgaacctcccgccacccccctgccctttaacaactctaagtaacccctgctcaccttcccatgaaaggcctctctccagctctcatctcagttgccatttctaaattgcctaagatcattttaattttcgtttgcgtttgagatgaaccat

SEQ ID NO: 456568 - DNA, 508 bp, Homo Sapiens
ccgtgtgaagctcaagcatgggtgacaagtgtgaaaatgtgtgtccatgagaacaaatgtgagaatgaaaccgtgtgagaacaagtctgtgagaatgagtgcggacaagtgtgaaagaacaagtgagagagaacgagtgtgtgggaaggacaaaatgggtgtgtgagacaggaggctccaaagcccagtctgaggtccacatgagggcaccgtggagaagccaccagcagggcccgataaaggcctggctttagaaggcgcctttggaaaagcaactaaaatcagcgtgcccctccttccccatggacacgtgcctcaggatgctgggagcctcgcctctggaggactgagctatttcaggaaactgaaaagccagtggaacaggcatttccaaaggacaggaagtcacctctgagctgttgcggcttttctacgagaagcagaacgtgtacggcactccaagatcggaaaacaatcttttcaactggaatgacacagcatgtatcct

SEQ ID NO: 456569 - DNA, 485 bp, Homo Sapiens
ctggtccgggtgtcatgaaacaagtggatacatctgtgtcattccagttgaaacctgacattgttttccgatcttggagtgccgtacacgttctgcttctcgtagaaaagccgcaacagctcagaggtgacttcctgtcctttggaaatgcctgttccactggcttttcagtttcctgaaatagctcagtcctccagaggcgaggctcccagcatcctgaggcacgtgtccatggggaaggaggggcacgctgattttagttgcttttccaaaggcgccttctaaagccaggcctttatcgggccctgctggtggcttctccacggtgccctcatgtggacctcagactgggctttggagcctcctgtctcacacacccattttgtccttcccacacactcgttctctctcacttgttctttcacacttgtccgcactcattctcacagacttgttctcaacggctcacatggcacactccagtt

SEQ ID NO: 456570 - DNA, 386 bp, Homo Sapiens
gatcatgaaggccaaccaggcctacccataattctgaggtgtgtcggcaatgttatatataggtagggtttgcgtgggcagtcccagtttatgtctgttacaactttcatcttcaaagcatcctgatttacacaataaattagaagttcaccctggtcataagcaccccttcattctacacattcactttacattttccctaccatccctttaaacaatcacccccgtggacatctggccccctttgtgccactggctatcaaaactttctgagctttaactacaaggattctgtagccaccacttttcatacacactatattctatgcaggccttttcaaatatgacagatctgtttcatgcacacaccggaccgcactgactta

SEQ ID NO: 456571 - DNA, 387 bp, Homo Sapiens
ccgggtgccgacaggaacttcggtgtccccgaagcacctccatgtggccagagccgtcgtaacgggctgagtaaatggcatctgacctggcgtcaatccaaaggatgcgcttctccaggtagtccacggtgagcccgttgggccagcccccagagccggtctcccggtgcacggtgcggcgcccagccccactcatggaggctgcctcaatgcggggcaggctggcatcccagtctgtccaaaacaggatcccatcccggggatccagtgcgattgcccttgggtgctcaatgtcaccggccagcagggtggtccggagggtcccatccagcttggccacctcgatctgctccaggttactctccactccagtagatctgcctcatc

SEQ ID NO: 456572 - DNA, 401 bp, Homo Sapiens
  misc_feature (23)..(23): n is a, c, g, or t
accgtggaactacctggaaaaancgcaatcctttggattgacgcccaggtcagatgcccatttactcagcccgttacgaacggctctggccacatggaggtgcttcggggacacgagttcctgtcgcacccgtttgcagtgacgctgtacgggggggaggtctactggactgactggcgaacaaacacactggctaaggccaacaagtggaccggccacaatgtcaccgtggtacagaggaccaacacccagccctttgacctgcagtgtaccacccctcccgccacccatggctcccaatccctgtgaggccaaattggccagggcccctgctcccacctgtgtctcatcaactacaaccggaccgtgtcctgcgcctgcccccacctcatgaagctcca

SEQ ID NO: 456573 - DNA, 339 bp, Homo Sapiens
tccataatgtgtgcccagatgtgagtggacatacccccgcaaagaaagtgggcggctggtggagccggtgactgacttcctcttggatatgccttaccacatccgctccatcctgcacatccccagtgccgagttagaagactcggggacctacacctgcaatgtgacggagagtgtgaatgaccatcaggatgaaaaggccatcaacatcaccgtggttgagagcggctacgtgcggctcctgggagaggtgggcacactacaatttgctgagctgcatcggagccggacactgcaggtagtgttcgaggcctacccaccacccatcacctggagtac

SEQ ID NO: 456574 - DNA, 363 bp, Homo Sapiens
  misc_feature (131)..(155): n is a, c, g, or t
catcgagccggaccgggtgtcatgaaacaaatggatttgacttctctgtcatgacacctggaacaaatgtggcattgcttacttacttcctttgccatgaactcagtgaaggcagggacgggtcttggctnnnnnnnnnnnnnnnnnnnnnnnnnaagagactgggtctcattctgttacccaggcatgagtgccatggcataatcatagctcactgcagcctcaaacgaacctcctccctcaggcctcctgagttgctgggactacaggcatgcaccaatggccctggctttttaaaggccatcatctagcacagtgcctggcttttcaatggaagtctgttgatgactgactgactgaccg

SEQ ID NO: 456575 - DNA, 276 bp, Homo Sapiens
  misc_feature (107)..(131): n is a, c, g, or t
aaaacaatggatttgacttctctgtcatgacacctggaacaaatgtggcattgcttacttacttcctttgccatgaactcagtgaaggcagggacgggtcttggctnnnnnnnnnnnnnnnnnnnnnnnnnaagagactgggtctcattctgttacccaggcatgagtgccatggcataatcatagctcactgcagcctcaaacgaacctcctccctcaggcctcctgagttgctgggactacaggcatgcaccaatggccctggctttttaaagg

SEQ ID NO: 456576 - DNA, 426 bp, Homo Sapiens
ctgctcggtccgcctgatgttcgttgatgaagaagtgaaagtggctgtgatcagagacactctgcgcctcatggacccacttaagaagaaaagagagaatcagtctcagcagcttgaaaaaccattcgctggaaaggaagatgctttggacggcgagctgaccagtgctccagactgcaacgccaaccccgaagcccacctgccttccatttgcctcaagcaggtgttccccaagtacgcaaaacagttcaactacctgcgcctggtggacaggatggcaaatttgtttatccggttcctgggcatcaaggggacaatgaagttggggccaacaggctttcgtaccttcataaggagctgcaaactcagcagcagcagcctgtccatggctgccgtggacatcctcaatcgagacatcagtgacgg

SEQ ID NO: 456577 - DNA, 357 bp, Homo Sapiens
tggtttctgtttcttgccttctctgggccccatctcttactttttcccatcttcatcttttttctctccctccctctgtctgtctgcccgccctacccctcctccccatagacgtgtccgaccttgagaacaataaccttaaccgtggcgggacggtgaatgaagcccctgaccctctctccacagtgaccaatgccctggtgggtatgagcccctcatcctcgctctcagccctgtccagccgcgcggcctccgtgtccagcctccacgagcgcatcttgtttgccccgggcagcgaggaggccattgaaagactgaaggaaacagagaagatcatagctgagctcaacgagacat

SEQ ID NO: 456578 - DNA, 393 bp, Homo Sapiens
agccgcactgatgtctgattgacccagcatgttagttcactcctggttccctcgagggtaagtgtgcattcaccgcataggactgttgggcagaacagacaaggacctagagaagggccctccataccaggagttcacatgtctgtgctgggtgcaaggaaatggttgggggttctcaagttagcctcacttgtaagacagcaacaccttctgaacacttccctcttgagaattcactgagaaaggctttgattgtatttgtcagcttcatcaggcccaggagatgagaacatgctcttgttcctgaaaccacagcgtcctgtcctgcatgtaataatttgcaatatgttgtctccgtcacttggaaggagtcattttcaatcagacactcag

SEQ ID NO: 456579 - DNA, 258 bp, Homo Sapiens
cagtataccttatgcttttatctctaaccattctgtctggatcctcttagactctcatgcggctgcatcaggttcttcctacactctcatgtccacatacatatattctccgagcttttacattttgaacttcttaattctcactcacctaatgcttgacattgtttaacttgttatatgttttaaattcactcaccaactacataagaagccagccgagaacactaattatttctgtctcctacacatcaacgagca

SEQ ID NO: 456580 - DNA, 418 bp, Homo Sapiens
aggaagtctgttatagacgtaatgtaaagattatgtcttcaagcacccccctactccctgcacccccgtttcacaaataatttctcaatgtttgtttccaagcctgagataaataatgcatgcatttaaaaaaccgcagagtcatggggttccctctgagtagagagggatccatttttaagctcacagtcctggcagtgtttgctcatgcatacatgccttcagcattagctgccagcatcttccaccctgaggctggaccctggggaaggctccttatttcttaggaactcccaagcctgccttacagagcaggggcagggcaggtcatcacagcaaaggccccagagccagatgagctggggccagtggactgaaagtaatcccagtcacaaacgcagtacacgcgaccagatct

SEQ ID NO: 456581 - DNA, 670 bp, Homo Sapiens
tcaatagcttatgttggctcctcctgtggggcaagctgtgcagtctgtgtgcctgatgcggcccccggtacacgcaccagtgggtgattgacttggaaggacctgaacggttcgcgaaggcatgcacccctcatgccgagtgcccagtctgggaatggcgtttgaacatttctctcagaagaaactgcaagggtgcagagcactagagcctgcccagggccagcgggctccatagcctccgagcaggatgggtggaagcagaccctccctcatattcccagcccagcacagcacagagtgccctgggctcccagtcccagccctgcatctcagccccaagctggtccagtccttcctccctgcaggcctgttaggaaatcaagccctcaggaggaagcttctggtgacagtcaggggaatgttgaacagaggcagagggaaggagctggctctcagcacagacacaggcccctgcagccaaacctaccttcacttccagggcaggtacaggctcttccaagagaggtcaggagcctcccgtggtacgtcccatgggatgtgggacaggcaagggggagaggaggccaccactctcagcccgcagaaacctactaggctagctaccctccccgttacctgctttctgccctgaaaccctgtacgtgagcca

SEQ ID NO: 456582 - DNA, 580 bp, Homo Sapiens
catcggaacccaatgagccatacttcctcattctctcctaggccacagcccaatgcagtcgatcaccgagttatatgaggtctcgataatattttgtacatttctaacatgcgttggaattcagacccccatcaccttgattcagagaactaaatctggtagtcatatacttctagcagcactcccttccaatttattcttaacactgtcattagtaaagctgttacaaacgtagtatcttgcccatcagcccacctttgctccactgagtacacaagtccccagattactttcctcaagttatccttcgcattgctagtgtacatccttcagcagcagccaaagtcctctccttttctagaggcccatggtcacccctgcccccagatctttgtttctagcatccctttcttctgctgggcattgtgtctttttccaacccaagtacttagagtgccatgcgtagtgagtgcctggagggtggtattgattagttttacccccattattggatcgcttgacctgtttcccagctgagggatttactggacaggtatgctcattgggttccgatggggga

SEQ ID NO: 456583 - DNA, 750 bp, Homo Sapiens
cccttctgtgcacccatcaggatctacgtaatcacatggcattaaatactgtttctaccctagagacacccaaatagtccgtggccttggtgtctctcttaaacgcaaggcttgtgtcttgtgctacctacttgatgtctctactcaaataccatagagaaatctcaaattaaacatgtctaaaatttggtcttgtccctaaaacctgctcctcccatactcttccccacattaggcaacagtcattccatccttctatttactcagacaaaaacccttacactcattcttgacctcacccttttgttcacactccaggccattaggaagtctcattggttctaccctcagaagatatccagattctgaccacttcgcatcactttcgtctccaacaccctagtacaggcagctgtcctctctgctctggattatttccacactctcctgcttctactcttgcccccaccatctgttctccctagaacaacacagcagctgtgcgattctgttaatactcatcaagtcatgtcacccctctgatcaaccccctacagtggctcccatctcattgagcatttcaaggttgtatgtgatatccccccaacccacacacacagtacatccctctctgatctcacctcctgttacccttcttgctcacattgctgtggtcccagtagcctttttgctgtcctggtgcccatcgagcagaatccagcacagacttgtgtatatattaacagtcaa

SEQ ID NO: 456584 - DNA, 601 bp, Homo Sapiens
  misc_feature (33)..(33): n is a, c, g, or t
ccccccgacgggttgggaggtttggggacaggnccaaagttcagcacttgcccagcctttgtgcttccccgagggtgctcacacactgtgtgacaccagtgcgggaagacacaggagatgggtaatcctcagataattagggtcatgttgcacagagtgctggcgggccagcccagctcggcctgggaagcagaatggggggcagagccatcgtccgctcgggcagtctttcaggcaggaggttacctctcccttggtcaaaggcccagaggcttttagggagaagagctttgggctgaagagagagctgcagagggcatcagtgagcagggcgcagctgcattcgtggggcagaggcacatgcacacatccctgggggcctctccaaggccttgctccctgtccagtcctgatctactgtgctctcagggccaagctggagggacacttcctcttggaggaagagctcatgcagcatcgcccaggccccaggaatgacttctgcccgtcctgcctcagccgtgccctggctagtggtgcacatgcgtggcttgtctggcctccggcccctgccaacctagtcccacccggtcgggtggag

SEQ ID NO: 456585 - DNA, 596 bp, Homo Sapiens
  misc_feature (487)..(487): n is a, c, g, or t
  misc_feature (498)..(498): n is a, c, g, or t
  misc_feature (504)..(504): n is a, c, g, or t
  misc_feature (510)..(510): n is a, c, g, or t
  misc_feature (526)..(526): n is a, c, g, or t
  misc_feature (540)..(540): n is a, c, g, or t
agtttgaaaaatcaatgtagaatattaaattcaccaaacacagatagatcagatctacataaaaatatgtcttaatatcttagaattttcctttactccaaaaaaccccatatatatatgtttctcctttataagcttagagattgctttggtggtcaagtgcagggcggctgggggaggtaagaccttcaggaaggccatatcccggacaagacccagaagggaagcccccagagccaagggtaggagggccccacccgggtctcagccactcacttctccagggcggatccgagacactcacaggcctcagggaggggccagggtgctgctcctgggtcattgcttcccccacaaggttttgcatgagggagcagagacagtccagtcttcctgaacacccacaggggcacaggagcccagttgcagggggcaggacaccaccgcagtttcctgggggaccaagagggaaggttcccagaggggngggcccagggnacgttngggttngggttggacagggttngggtaagggtttcntttttggggccaaacccccagagcagcagagaaccccatttcaaggaagttttttt

SEQ ID NO: 456586 - DNA, 413 bp, Homo Sapiens
ctccacccgacgggttgggaggattggtgagttactgtttaatgggtatagaatttcaagttttaacaacaataaaaagagttcgccaggggtgcaaggcagacctgagagtgaccaggccagacggcatagagatggggctcaagggacaggtgttgggtgtttgtatcttgtatcttggttatttgccaggctaggggacaaccactcattgcgggatgtcttaatcatcttaaaaaagaacgcagtagctcgtgcccgtaatccccgcactttgggagcccgagatggcagacggagttgcgttcactcagtgctcaatggtgcccaggctggagtcatggcgtgatctccgctcgctaccaccccccacctcccagcatgcctgcccttggcccccccaaggtgccgat

SEQ ID NO: 456587 - DNA, 169 bp, Homo Sapiens
tcaaccactttatcattatcaattttataataacgatgtcgtccccatgtatttactgaaattaaattagcttctactaattttgaaagatgttcactagctgtttgcggttttacaccagctagtttagctaatctccagctggaagatatataccgctagatattca

SEQ ID NO: 456588 - DNA, 122 bp, Homo Sapiens
ggcagatggctgaagccagaagtttgagacctcatctctcttacaaggccactaatcctataaatgagggcttgccctcatgacttaatcacatcctaaaggtcccaccccgtcgggtggag

SEQ ID NO: 456589 - DNA, 585 bp, Homo Sapiens
  misc_feature (44)..(44): n is a, c, g, or t
  misc_feature (51)..(51): n is a, c, g, or t
cctggctctgaacttaggcttggttccaagccctcatgacatgnccgggcnattaccagtcaggctgagctgggggacagaggtgatggggacagcaggcatgttctgtcctcacgaggcccacagtctatgcagggacagatgtcagcagtcatgaccactgcagggcatgcttggagagactacaggacatcgagggggctcagtcagagagctgcaccatgatcccggctctgtcaaggatgagtcatctggcctcagtttccctgtctataaaatgaggagtctgggctgcacagtgtcaaagactcagagaacctagaggggctttctgaggccgctggctccaggagcctaggacccagtcctaccaccatgtgagcaacactgccccacactggatcatttctctgtgtgttccgggctgcgttagagaccaggaattccgccaagcctggggacaggtgttatcctgtcccctccagagcctggggggaagctgtcacctgacctgaggtgcccctctccatgcttgcatcacacagactgctcttccctaagttctgagccagggggatcctctag

SEQ ID NO: 456590 - DNA, 378 bp, Homo Sapiens
tgcaggaggattatgtttaggacttctcggcttccatgagaagcagccacagggggcctggtttcctcctaaggcccttctctgtcccaggccacctcttctccctcctcctgtcccctaacctccacctaccaccatcctccctctcagttctctcccatccttgcccctggttcaggagccattctacctgcctcagtggccaggcgcaaggctacaggtgcagtcacctgttcccggccaccttccctcccatctttggcagacagaagtctcagctctcactagagggaagacctgggcatcctgctggctcctctctccgtggggcctggagtctggtgctgttccccagccagcctggctgcagacctctct

SEQ ID NO: 456591 - DNA, 455 bp, Homo Sapiens
cctggctctgaacttaggggagggaggtatatggggcaggttggttactgacctggccacggttttcacaggcacagcagatcagagtatctgtaaaaacccctgaatctgcacacagtccaccatgggagcagaatttctactagctctggtcttcaaccatcaatgtttgcaccacagggtaccgactcctcaacccccatttctgactggttccctggtccctctggcagccatcctggaagcctgagttccccaacaggagtgacatctgctacgcaggccagggttatgggaactccagtgggcatacttgggccagaggtgcctgggggtcagaataggagcactgaagttcagaaggctcatggaagccccaggcgccaggcagtaatgccagttcttgatcacaagtgacatcagagttgggagacgggcctaagttcagagccagg

SEQ ID NO: 456592 - DNA, 537 bp, Homo Sapiens
agagagcagggcttgggtcaggaaggctcctcagagaggctccagcctcgctggggaagcggctggagtcaggacagtcccacacgtgcgtggtttgcactgcagctgggtttgtcagttgtttatggatgttgagctgagtggcactgtttggaattggagttgtcatgtactgttgtgggggtatctgtaggggtgttgtcagggcctctgaacagtgcatgtgtggctggctagggtacggacgtgtagctgtccagaacagtgttgtaaggcagtaggcagctcctggccgtttgggctgctatcagatgtcaggttgtactgggaccatccggtggtgtttaccggctgtgagtgaatcctggccatgttttgggtgcctcttcccttctatctttgtacagaggggggccccaggacacctggagggaggtctcctgtcttaatcagtccctccacaggtaagcaggcaggcaggctcaagccccctcactctcagtaattttaccacggtgcctaagttcagagccaggt

SEQ ID NO: 456593 - DNA, 497 bp, Homo Sapiens
  misc_feature (117)..(180): n is a, c, g, or t
ccattgctgcggattcaggcactagcttggctctttccttggcattagccctgctctctctctggactggctcttgtcctgtcctgcactggccataccatgccctgccttgccctnnnnnnnnnnnnnnnnnnnnnnnnnnnnnnnnnnnnnnnnnnnnnnnnnnnnnnnnnnnnnnnncatatttcttgccctgtccctaccctggccttggccctgacccttaccttgttgtggccctgcccttgccctaacgcagcccctggccctgtcatggccctgccctggacctgtcctggccctggccattccctgcttgagaacttgccctggttctcccctggccctgaccctgaaatgcctggccctaccctggccttgcactgctctggcccttgccctgactctggtcctgtcactggcctagccccagccctgttgctgatcttaccatgggccagatcctggcgagtccgctgcattgggatcctctagaa

SEQ ID NO: 456594 - DNA, 779 bp, Homo Sapiens
  misc_feature (47)..(47): n is a, c, g, or t
  misc_feature (748)..(748): n is a, c, g, or t
ccactgtcctttaccccctcctgccttgttttattttcccccacctngaacagggattgaattgattccatgtcctgccaacccccagagcccaagccatattattggaaaacactgaaaatattccttgaagaataaacatacaaatgaatggatggatggaatcctaataagcacggtagtggtttggagggaacagacatagtgagcttggaagcttactaaaaatagtggagacttaatgaacaagcactggcaaacaagcaccttacaggaagaagaatgagtaaaggagtcagcattagccaaggcgagatgccaaaatgaaaatgtcacaggggatgtggaagagagactaactgccttggttacagggttaggtttataaatagaagccatcagacatagggcagaagtccaggtgactgaggaccacaacaagcctataaaatgcctttgtgtgaactggaaaaagatgtccagatatccttggtgaagatgtcaacctgaagccatgcagcctagggaatgatcaatacttttgtgttaggaaaaggagtcttttgttttggtagatgcagcctggcacttcagggtgtggcctggtgtgatggttaatatcagatgtcaacttgactagattgaggggatgcctagatggctggtgttgtttctgaatatgtctgagagggtattttcagaggactcagacatgtgaatcagtggactgtctcgtgcggttagatcncgagtccgctgcattggggatcctctagcac

SEQ ID NO: 456595 - DNA, 299 bp, Homo Sapiens
  misc_feature (132)..(132): n is a, c, g, or t
aatgcagcggactcggcacccacccacaccacctccagacagacctgctctggctgtcccgtcctaactcactgggattcagaaatagtgccgcccacaggagctgatcggtggctgggaagcggcgtgtgnttggggggatggggcaggaacggggcagcagacccacaggtgccccacccacctggagatacgggccagtagagggcatgagggggccggcacggcagagcctggtgctaaggaggcctggaagcacagcaacacggctgcgcgctgcctgccgattccgctgcatt

SEQ ID NO: 456596 - DNA, 576 bp, Homo Sapiens
tgattctagaggatcccaagtgcagcggaatcggagaatcttaagtcagagtctggagattcatgacccctctccacagcctgactctagggtacacgggtaagataatagtgacaacagccatgaaacgaagggggctggttttccatgaccccacacattctgcctaaggccacgcacctcccaaatgccacgatggatgagcaggcgggcctgggcactcaggtttttctggtaaggtgacgaatctaagtcaatattgcaaagtagacgtggctcccctggctctgcaaatattggaccaaagacttgagtgaggcgatgctattgacgattacgagatggtagcattgttgtctttgttgccatgaagtgcagctcggtggagcctgtgctaacatcctgtgtacacagaggggacagtgtgctcggaggcccgtgttgtttgctctgccaaatatgcgccagtggccagccctcgaacactcccccatcccatgtttacagctgggggtgttggaaacataccgtcctctccttacgcccaccagggggccttccgattccgctgcactt

SEQ ID NO: 456597 - DNA, 510 bp, Homo Sapiens
tctagaggacccaatgcagcggactcggcatggagtgtgctgacactaaatgtgattccactgtcatccccacgtaggtcttgaagccctactgtgtgcccagccctgggctaaacattaggaggctagacagtatcccccctgcagatattttgagtcacggaaatgctttctttggatgaaacctaacgtccctcccctctctgaggctggcgcccccccaatatggggctgctgggaggcttcgtgtgaatggaattcttgttctttgcagtccccaggcctggacaggcctggcagctgagtctgtcctccaggggacaggctcggccaccttgagcaagtcgtgaggtctctttggaccttgttgcctggtgcctgccctctcccatcccctgggggctgatgaggctgggacgaagagaatctcttggttgttgggagatggtgtgctgtggcccagacggcagaggactgccgagtccgctgcatgggatcctctagaatcac

SEQ ID NO: 456598 - DNA, 639 bp, Homo Sapiens
cgcattccacaggacacacccatagtccagggtttttaaaggcatttctaactataaacatcttagaaggttaaatacctacatgcatcccacatatatgtgtctgttgaaaactggcgaaggcaagtgttaatatcctcacatacagttaaaagtgtaattttataacaccagagccagattctgggcccccatcccagctgaagttgttaagtgagaaatctctgagctgcaaactggcctatctagttttattatatcctaagaaacagaggttagcatcagggaaaaggacacagttcaggccattctatattcgcttgttgtgctaatcaaatagacacccaccaacatttgaccatcgtggtccggagcatgttttccaagtcttttccacttggttttaggtttctcaagatattgtcttacattgagtaatttttcttaaatgctatgttgcaagtaagaaatcttaaagaaaaattttctcttagtatttttagtagagtaaatctggaatgatttttaaacagatttgagtctagtgcttctaaatcacacccgttactatgtgcttatgcagtaaacacgtagagaaagtgctccgagtccgctgcattggatcctctagacgacaga

SEQ ID NO: 456599 - DNA, 303 bp, Homo Sapiens
gttctcgtgatctagatgatccaatgcagggactcggacaggctgtagtggcatctgcttctccatggcctccatgcgctccctggtctccgtgtcttggctggcactggctggccgaacccaaccagcgagcgttccccaggcccagtgaagagctccgaagggggagctccggccgtcgaggcgctccccgggctgcgggtcttccctccaggactctcggcaaagacggacgaggagcccgagtccttgcggaaggactggcgcactggcgagccgcggttgccggagtccgctggcatt

SEQ ID NO: 456600 - DNA, 696 bp, Homo Sapiens
ggaaacctggtcagtttgtgttcaagggtgacttggatatcaacgtgagaacagcctctaagtatgacgactgctgcttcctttacctgcctgacctctgcatgacactggacctgcagtggctgtgccatgggatcccccatgatcaccatagtgtcactctgcgggccccagagttcctgcctgaggtgtccttgggccagcttcatgactccgaccgggcctttcgctcggagacctcaatctctccatcaagatggatctgactcggcacagtggaacaatattcctagccccgaattctgctatatagtagtaccctgcgctggatgcataacttctgggctacttggactagtgtcacaaggcctatctgcaggggaaagctcttcaataacctgaaacccagcaagaagaaacttggtcagcactacaagcaactttcctatacagccctctttccccagctgcaggtacattattgggcctcatttgcccagcaacggggcatccagattgagtgcagtcagggccatgtcttcactcgggggactcagcggcttatacctcaagcaggcacagtgatgcggcgccttatctctgattggagtgttacccagatggtgagtgacctaagtcaggtgaccgttcacctgatggcctcaccactgaagagaatgccgattccctgcactt

SEQ ID NO: 456601 - DNA, 599 bp, Homo Sapiens
  misc_feature (399)..(416): n is a, c, g, or t
caaacttcctgaatattatcaatgcagaacagctgtggagactctaacctgaagatctataccaaacgtcgtctgcttaccacgtaacacagctgcatcttgagcagtgacctgccaagggcaaaggaccccgctccctagacttacagattttctaatgcttgggcaggtggttactgcatgttccacatcagtcaatgcaacttaggacaaaactaaccagatacagaaacagaagagaggctgccgggaccagcatatttccgttgcagccaaatggattttattttttcattttattgattctcagaagcagaaagcatcactttaaaagttcgtttgttcatgccaactatatttgcattcttacattagttaagctaagcagccaaaagaaannnnnnnnnnnnnnnnnngtttagcccatgtcatttaattgtcagtttctttgacataaagcgcatcttctccacatgggcttcacgtggtttggagatgggtgggggaaaactatcaggtttcttcaggctgaggaggacttgctcagccgattcccaacatttgtccgagtccgctgcattgggatcctctagacgcga

SEQ ID NO: 456602 - DNA, 575 bp, Homo Sapiens
ggacggacagaagggaagagccaaaagacaaaaagaggtcagagaatccaagtgttagaggagaacaaaaattcagtattatacagatctaaaactcgcaggtgaaagatggtttacaaacttcctgaatattatcaatgcagaacagctgtggagactctaacctgaagatctataccaaacgtcgtctgcttaccacgtaacacagctgcatcttgagcagtgacctgccaagggccaaggaccccgctccctagacttacagattttctaatgcttgggcaggtggttactgcatgttccacatcagtcaatgcaacttaggacaaaactaaccagatacagaaacagaagagaggctgccgggaccagcatatttccgttgcagccaaatggattttattttttcattttattgattctcagaagcagaaagcatcactttaaaagttcgtgtgttcatgcaaactatatttgcattcttacattagttaagctaagcagcaaaaagaaaacacacacacacagtcacatttagcccatgtcatttaattgtcagtttctttgacataaag

SEQ ID NO: 456603 - DNA, 534 bp, Homo Sapiens
  misc_feature (161)..(161): n is a, c, g, or t
attgataatacagggagtcctctctgatatcaacttgaagaaaggtgaatccgagtgccggtattacatcgacaagctggagtacctggatgaaaagcagagggaccccagaatcgaagcgagcaaagtgctgctgtgccatggggagctgcggagcaagnagtggacataaactttacattttcctgtttcaagacatcttggttctgactcggcccgtcacacggaacgaacggcactcttaccaggtttaccggcagccaatcccagtccaagagctagtcctagaagacctgcaggatggagatgtgagaatgggaggctcctttcgaggagctttcagtaactcagagaaagctaaaaatatctttagaattcgcttccatgacccctctccagcccagtctcacactttgcaagccaatgacgtgtttcccaagcagcagtggttcaactgtattcgagcggccattgcccccttccagtcggcaggcagtccacctgagctgcagggcctgccgagtccgctgcatt

SEQ ID NO: 456604 - DNA, 517 bp, Homo Sapiens
cgccccaaactccctgtactgcacagtctcctcatagctgacaaagggctggttatacaccacgatcttcccaatggcttccttctgccttttcttcagctcctcaaaagactccaccaccagcacctctgcttcaatgcctgaaccgagaggagaccgaaagccacagaaaaagtgacatgcttggagcaacggtctacggtactgcatttcagtgcttgagacgtcactacagacaccctggttcgaatccaggctgtatcacaaccggccatgattgggagtcccatagggcagcgcacaattgggccagcgtcattcgggtttggccaggcggaggccgtcattgtaaataagaatttgttcttagctgacttgcctggttaaataatggttatataaaaatacatcagtgcaccagtcgaagattcatctaaatatctacaccttggcttgagttggggcctagcaaatagtggcgacaccatcagcatgtctaggctgagttggcaataag

SEQ ID NO: 456605 - DNA, 467 bp, Homo Sapiens
cattgtatataagcatttgtcttagctgacgtgcctggttaaataatggttatataccaatacatcagtgcaccagtcgaagattcatctgaatatcgacaccgtggcttgagatggggcctagccaatagtggcaacactcatcagcgtcgtctaggcttgagttggggcctagcaaatagtggctacaccatcagcatcgtctaggcttgagttggggcctagccaatagtggcaacaccatcagcattgtctaggcttgagcttggggcctagcaaatagtggcaacaccatcagcattgtctaggcttgagttggggcctagcaaatagtggcaacaccatcagcattgtctaggcttgagttggggcctagcaaatagtggcaacaccatcagcattgtctaggcttcagttggggcctagcaaatagtggtaacgtaatcagcaggtctaggcatgagttg

SEQ ID NO: 456606 - DNA, 135 bp, Homo Sapiens
cccgcggtttttatcccttgaccatttactatgacataaggttgtagtacacaggagatattctattgatgctacaaatggaaagccaatgcctttaccatacatagaataacaaccctaagaaacaagcaaaac

SEQ ID NO: 456607 - DNA, 408 bp, Homo Sapiens
ggatcccccccgccgtaccagttgcgcacacacactggggttcagtgtcccttggattatgctgatcctgagatcagggttgtgggtaatggtttccaagagctagcgattggggggacttattcctttgattatactgttgaaacatgaggccatcaggatgttgtgatcaatatcctctgagctgcctctgcaatcatccttgcccttcactgtagaagaagtatctggccacacgcccctgtcacttggactttatcctctttgtcttggagctctgccttgtgctaacactgatcttggatattgatttgaatgagatgaacttggagttaatactctgtcatcaggagcgtctctgagcccgagagttggccgcaactggtacggcggggtaccgaggtgact

SEQ ID NO: 456608 - DNA, 455 bp, Homo Sapiens
aaggggagtgtctccagctgcttagtccagcagcctccaggattgggtgagggtcggagggtcctggtgccctgcatggacaaggcagtggcagcggggctgaaggacaggctggggtgggaggaccgcaaccctctgggatcgggccccacggtcagctcccgcagcccaggggagaggtgcccactctagcagccctttatgtgctcctcaagctgaaagtagagaccccgctttgtgactacagtgagttctcacaccattaggcgaacggctggggtaagaccaccctgtggcccctgcagagctgacctcactgggtggtccaccgaagaggggatgggagggcaagtttgcttcagggtcagaggtccggtcccggtgggtgcacctcgctcagccctgaggtaggttagacgctttttcccgcgtcaccaatcctcaccgctattgta

SEQ ID NO: 456609 - DNA, 347 bp, Homo Sapiens
ttgatcgagctcggcaccccttcgtacagttgcggtgcagcttcaggcccaccgtatggtgccccatggtgttcagcagctgggtcacctcacccgactgcaggttgtcaaagtagattgtggcacccacaatctggtccccctccttgaccaccccagtgcgggccgcaggggagttctgcgtcacctcctgcacaaagacgccgtcgtccctctgggcgatggtcagcccgtgggagccactaccctgccagttgggcagcagcagctcccgggttgtctcctccttctccatctttgcaggattccgctcaggagcgaatgccttgcgcaactggtacggcggg

SEQ ID NO: 456610 - DNA, 160 bp, Homo Sapiens
cccgccgtaccagttgcgaccaccacttcctcagctgccacggaaactatggaaaacgtgaagaaatgtaaaaatttcctatgctacgttaataaaactggcttcatctggcaagctgtctctgtagactgcctgccagaataagggccgagcctgacta

SEQ ID NO: 456611 - DNA, 216 bp, Homo Sapiens
aataaataagtaaataaaaatgggccacagacagcggcacagcgctctggacagctccccagggttgctcctgcaagggacgggggtggcctgagggatgagggggtgcatgccaggaggggctccctaagactgcccagcatctgctccatcctagagacccttccctccccaggcctctcactctacccaagaatgttcccgcaactggtacgg

SEQ ID NO: 456612 - DNA, 244 bp, Homo Sapiens
gagctggcgccccgttcgtacagttgcggaggtccttgagctccgtatggctttgccgcaacgctcacagctgtagggccgcaggccagcgtgagtacgccggtgcttgcggcacactgaagggtcagcaaagctcttgccgcagtcggcgcaggcgtgaggccgctcgcctgtgtggccacgctggtggatcttgagcttggagagcgcgccataggccttcgggcgcaactggtacggcggg

SEQ ID NO: 456613 - DNA, 552 bp, Homo Sapiens
ttccctgctcccaccaccagtgagacaagctgaagattaggcacacagatcccctggaaacccacctctctggaaggccccttccctggcaggtggccaggcaggcgggggctgctcagcttcatcctgagagacctgccctctctgcgctgaggcccagcccctccagcaccactttggcttaaagcatcctcctcctggactcccctccctgccgaacacacatcccaggagtctgggaaggagggactgttcccaagaaggcaagctgcaggtgcaattgcgtcttgttttctggcccaaggcaagacccactttcttctctgctcagggccactaggcggatgtgatattggaaaggccagaatagtacataaaccacaaaattaaggagacaatagcaacctcaagttatgcctcagaatccccagatgtggtccataaacaccctcttgctgccttgtgggcctgagagcatttttggctggtgtggaattgttccgtgttttcatcaggtgccgatgatagcggggatcctctgacagcctcccg

SEQ ID NO: 456614 - DNA, 539 bp, Homo Sapiens
acagcaacgataaaaacgctgccttggcaccaacatcatggcaccaacgaggccaaaacccagggaaaagctacagacttaagcacggcctcacaacgtataaaatcattcctccaaagtcagagatgcgatgttacgacagagatgtgtccctctccaccggagccattaagattgacgagctggggaacttggtgagtcctcacgccaccggcatcaggatcatttccctgtcttcgtctgtgcctgaagcagaatctcagcccattgggaaagtcagagagttctggaggtgccactctgtggaaaaacacctgagccgaccctcagagagctctgccaggggacccccctccacccctgtgcccacgcagacgcagaatccagagagcagactccaagcagaccccaagccaatatcgccccagcagaagtctgcccaccatgagggccggaaccccctaggggaggggagaaaccagccccccaccatggcatggtcacgtgaggtgccgatgatagcagggatcctcagaaca

SEQ ID NO: 456615 - DNA, 934 bp, Homo Sapiens
tccctcgctatcatcggcactgtgaaggttggcgacaacccccaggctgctcccatggtagatgaagactttcccatcaccatcaaagggggcacccactgcaatatctggaaaggccatcttggttgaggtcccccaggacagccaggctgatcccgaacatggagtcaggggagccgcatgatgccggagaggggagatcccagcccagtgacccccctggttcaagtacacatacacagcaccccccagctcttcttggcgctcaaagaagtagggggcacccactatcaggtctggccagccatcactgttgaggtcggccacagccagctgagtagccaaagccggaggtcaggcgctccccagacagcataacctcgggcaccaggcgactggcgctgtccttgcgcaggatgaccacagcacccttgtggttggcgcggggggctccagccgcaaagctcagctcttctgcacgcaccagacctttccccgagtcaatagagaagccaacaacattagccctttcttccatatgtgcccaccatccatcccctcagggaaagtccccctaagtagctattgagggcccagtctccggctggtcctgggagccggtcagcagggtcccaagttttatacaccagctggtcggggtctgagctatcaatgttggtcaccaaaagctacccgagtgtcagctcagccagcagcagcgtgcggagacgggaatggcagtgatgaggtgtgggctagtgtgttggagcatgcaggccccagctgcaggcccagcgtgcacttggggcccatgccagcatgttgaggagcacttggccgtgcgagggaaaggaggcaccccccattcatgtgtgcactagctcaatggggtggaaggcatggggtgccgatgatagcgagagatcctctagag

SEQ ID NO: 456616 - DNA, 541 bp, Homo Sapiens
gtcacgccggctgagcatccagcgctgcaaccagtcgctggtgcacgcgtgccagtgccgcaacgccaactgctcgctggcatcctgccagaagatgaagcgggtggtgcagcacaccaagggctgcaaacgcaagaccaacgggggctgcccggtgtgcaagcagctcatcgccctctgctgctaccacgccaagcactgccaagaaaacaaatgccccgtgcccttctgcctcaacatcaaacacaagctccgccagcagcagatccagcaccgcctgcagcaggcccagctcatgcgccggcggatggccaccatgaacacccgcaacgtgcctcagcagagtctgccttctcctacctcagcaccgcccgggacccccacacagcagcccagcacaccccagacgccgcagccccctgcccagccccaaccctcacccgtgagcatgtcaccagctggcttccccagcgtggcccggactcagccccccaccacagtgtccacaggaagcctaccagccaggtgccgatgatagcga

SEQ ID NO: 456617 - DNA, 499 bp, Homo Sapiens
acctttcatgtaaaagtatgactcctaagatgaaatcaagtcctccccgggcagagtccaaccgtctggaaagtcatttcctggcaggagtatcactgggttcccgtgcttacccagctgaatttcagaactgcttatggaccagccgtgtgtgtgcctttcatttgcagcctttctgaacaggagcatctgggcatcatgtaactgtcccaccattgcatgctgggtgtttggagggcgataacttgtctagttctcagccttgcagatcaggaagaactgtcttagagctgtacctgagaaccctagggtcgtcatccgcccctggacctaacatagataagatgaactcttcagctgatgctgtgagctgatgggactgtcttgttccttgggagggggtgaatgtacttacatgtgggaggactgtggatttttgggggatagagagcgagtgggagccggtgccgatgatagcagggatcctctagacggaccc

SEQ ID NO: 456618 - DNA, 547 bp, Homo Sapiens
gaaaagagttcgggtttcatggccctgcaaactggctgttccagtaatctgtcttccctcctttcccgagtttctgctccagcctgcctgtagcgtagattgctcttttattgccttcgcttcctgtctgctgagttggtcccattctgggcatgctgccaggatttgcaacttaacacttccgcccatttcctgctgcttcctttcttctttctggtctattgaagaatgggcagaagtgctaagaacttcagctaaatctatggagtttttcagtgagttttggaggtactcagcggataagaggagtagatgtagagttggtctgtcttgaaaaaattttggacgttatgggatccactctgccctctgcacccaccttctcctctcaccctccagaagctctgggcctccaggctccttttggtgcaccctgcgtgctgctctgctggactgcctgcccacagtgaccttctgcctcctctctattagactgttgcccatccatgagggcctggtgccgatgatagcagaggatcctctagac

SEQ ID NO: 456619 - DNA, 302 bp, Homo Sapiens
gatgcctgccctactcacgaagtattggggagccactgcacccgacctctaagcagattgctaagcaccttggaaaggctacagtttttgttttatacagaggaaacaagtttcctatactcaagaggcataatggaaataaaaggaaaatgtcctaggttgtccctaatggtgaagctgaatgtctcacactaccatcacatacttgatgccccccaatctcaatgacagcaattcttaacagccatcagcttccactcccacagctgggtgccgatgtatagcgagggatcctctagaca

SEQ ID NO: 456620 - DNA, 771 bp, Homo Sapiens
gtcatcggcacgcctctgggctcaagaagctcagaagtagggaccagggggcctaaaaatcttagaagcgcctcttacatggcaggcacactacatgacaaatgtaatacactatctcattgggagatcatctcatccatttcacagatgcagaaatgaaagctggatttagcacagagctggcctgaggtctcatagctagtgtgggtgaagttaggtttggagccaggtctatcacactccagagccctgttgcctttccaccaaatcagacatgagacaatgccatgccacggagaacggtgtcagagaggtttcagcatgctgtgggagcacagaagagggtgtgtaatgcggcttcccaccagaggtgacactccccctgggtatcatctttttctaaaatataaattttattactcttcccacttaactctgtccttagcacttgccagccttatttcctgctacctcactctatagtccctgcttgctggactggtttgagaccatgaggcatgccctctgtttctgcttgctgtatacttccatatttcttcctgctgacacttcacccatccatcaagactacctctttcacaaagcatcccttgtatttgttgttaaaataacactttaggtgcatgtcttaacttcctttttagaatttgcgctctttcagagaggggatcctacagagttatgaggattagccaagtatattaagtgcttattgctagtaggtgccgagaatagcgagggatcctctag

SEQ ID NO: 456621 - DNA, 568 bp, Homo Sapiens
tgggatgaggtgccctgtaagctgagatctggaggaagtgagggagtgtgccatgctcaaatttggaaaaaaatgctttctgagcagagtaccaagcacttggagagtttgaaaaataccaagggccactgtatctggcactgaaggatcctctgggagagtggaagggcagatacaaggctttacaggctgtgggatgggggctggattttactgtgaggaagaagagaaactcctaggagacatgagcagtacttctgggaatagggatatgaagtatgatggaaccaacatgggtgtagagagaatgggctgtgcccttattttcagttaatgccccactattgaaaagctagtgttgggctctaagtggacctggcacttctgctcccaggtccgtttagacctgtggctgtcaaacttcaccaggcatcacatttatcagtagaatctagatgtttcccgtaaccatatgttttgaaacctggtattctaccgggggagcgatacattacccctctgttttcccagttgtgccgatgatagcagggatcctctagacagcctc

SEQ ID NO: 456622 - DNA, 617 bp, Homo Sapiens
tggtgttctagaggatcccggctatcatcggacactgctgggggaagcagggggaaatgcctcaagtatttctattggttaaaacctcggtgtgagaacactgcttttggccactcaaggaagacagttcatcaaacaccagggagtgggacttctggagcaaagataaaagaattcatggctgcactacaccgattctgaaaaggaggaacaaacgccccgtttggaacagaatctggcccatcccatggagagggcccctgtgcctgacagatttgttggggtgaatctgggtgcccagggatcaatatggcaactctacactcttgctggcgagggaactggaggccagcaccaaggagacccaaacaggcctcccagccaggcacagcccagggcaccctgggttagcctgatcccgccctggtgcctgggtccttcacgcggctctcctgtagactttctattaagaaatgcctgtggtagagtcaggcgggtgagaagtctacactcccttggcagtaccttgaaaggaaaaatcgtcacagataaaaaaaataaacaggtgagaaatatcaacgcagcgcagcagtgttgaaaggtgccgatgaatagca

SEQ ID NO: 456623 - DNA, 562 bp, Homo Sapiens
cttgaatgccatgctagggaggtcaggtttcattctgtagatagtgggaacatacccaatgtttaagaatggagaaaggtaatgttagctgccataacagagaaactccagaacctctgtgacttaatctgtgagaaatctatactttcttcaccaaatttcccaaagaggtgtttctaattagcaggtgactctcttctaagtggtgattcagggctctaggctctgcattttgtggctctgccatctgcagcatgtggtttccatgccactatgcacacttgtgatgagctggtggaagaggagagaacatggactgtcatgaagttttttataagcccagcctgaaatggtctcatgtcacttgagttcacatttctgttagctatagaacccagttacatggtcccaccacgttacatgtgaggctgtggaatagaaactaggtgtgtgatgcagggtgaagaggaacagagtggtagatcctgctgtgctgctgtttatggcaattaattgtgatgatgctgtgccgatgatagcgagggatcctctagatcgcccg

SEQ ID NO: 456624 - DNA, 535 bp, Homo Sapiens
tctgtctctgctgtattcccagcacctggcccagggccttacgcatagtaggtgctccataactatttgttgaataagtgaatgaatgaggcttcacacttggggaattctttactttttgccaaacatcaccaagaaaatccctaactgtagatgttcacatggatgatagttaaaggtcagttactgaccaagattacccaagtgcccctatatgttcctgaaactgtcctttaagaatcaccctgattcagggtagaggaaggaaatcctgcacaggctctggagaaagctggtgtcatggaggacactggagcccttgtccaggaggtggctagtatagatggagcaggaacctgtagatagaggaggcacctgtagctgatgatggatgccatcctccatccagcctcagtaacaggtcattgcaccccccggggcagcaccttcaggtgtatgtttcctctgagctacatagcatccccgtcttcaaggaggaagctgagtctgagagaggggtgccgatgaatagcga

SEQ ID NO: 456625 - DNA, 1225 bp, Homo Sapiens
  misc_feature (161)..(292): n is a, c, g, or t
gttgggggcgtggattatgtgaccagagtggtatcgagcaatggacctgggggctgggggaggtagcgggctaaagaggacaactagggtgaggctttacattaatgtctccttctgaatgtgtgtttctttacctgtacatctgtctccctgtctgtttnnnnnnnnnnnnnnnnnnnnnnnnnnnnnnnnnnnnnnnnnnnnnnnnnnnnnnnnnnnnnnnnnnnnnnnnnnnnnnnnnnnnnnnnnnnnnnnnnnnnnnnnnnnnnnnnnnnnnnnnnnnnnnnnnnnnccacacacgctaactcctacaatccaacttcaatagctatggactgacccaggggccctaacctgtttctgcagccctatcagggcagcagctccttcacactgctagatggagaaatgccaggtccggagctgctgccggggcgccagagacgctgcagaagcgcctgccgagtgtggaggctgaatccaggaacaatgagaaattatctgttaattctcggctcctgccacctgctctgctcccaacaagctcctttgccttcagtttagatgcaaattcccccactcgatgtaagccaaatattgatttccctgcatcacaggtctgggcccttggaatggtcctgtgctttttcattctctgcaaaggccatacaaggtgctttgttctgtgaatttcccccaggaactcgcgagggggagggagaaatagcaggggagtgacagagttgccataaacacgggccaagagcagttctccatttgtattttacataaacacaaacctgccacttgggaaactgctaataagcgtttagccagaggtctttctgggtgctgagatctgcatcgggtgatggaaaagaaattaatggggcctctaggctcctcaggtgggttttcagaagcaccaggaaggcgaatagggatgccagagccccacttgttcttggaacagcaaccaaacacctccagcaggaaggcagcccggattgcacagtatcgcctgcgtcgtgtctgcttggtccctgcctgagttcctagccttctgctatcacagggcacaggggtcagggtgggaagctgcggaacctttcaacaattgcctcttccctcgttcccctaaactttatggcccacgcgatgggtaggcaccaattgggtttttcagcaccgtgggacagagccaggggggcgtttcacggtgggt

SEQ ID NO: 456626 - DNA, 559 bp, Homo Sapiens
cacagactctcttgcatctgtcatggcccaaccaatggggaagacaataaggcaaccaccattcattaaggcttcatgcatgctcatgtgcttaggtgctgtgctaagggcagaggtagcagtgcagagccagatggcaaacctctggccttataggagcatacagtgtggggcgggaggagacaggcaggccatgcataaagaaatataaacaggggcatttcagaggtggccaggactgtgaagtaaagcccttgtcttggatgatgtgacatggtcgactggctgagcaagccctgatgaatggtggtcagggaaggctgagtgatgaagagctacctggtagtgtctggggcacaaggctgtcttgggggtaggaacagcagagaccaaggccaggaggcaggaacggctggaaggcatgtgttccctagagggaggcagcagtcacgggggacagggctttgtgggcctcagggaagagtgtggattttgttctatgccctatgagaagctgctgaagggtgccgatgatagcgagggatcctctagacaccat

SEQ ID NO: 456627 - DNA, 514 bp, Homo Sapiens
tgtacagccctagatacacagcatatgctccatatggctggattcacatctgttggagggaaagaacatactgaaaatgtcttgactgcttcatgaaggcccactgggaaatcgggatggataatccaattgaaaaattccttttgcagggaaaaacagagcagccactaactgatctaactgatctacagaagtgtaatgggaatatgtgtgtgtacggcgtggggaggggacacactaaaaatgaaaactccatgaagctgtcacggaaaggtagcctctcccttctcttcccttttgtcttctcttgggctagacctaagaacccagagttctcagttctggctcacaaactgaagtttcattttactatggtagaaatcacagacagacacatgcagatacatacaatttctccagcataattttgcagaataaaaaaaggttttatcacccctactgaaataatgacactacaaagtaccttactaatactatcatttaacgcctgcat

SEQ ID NO: 456628 - DNA, 536 bp, Homo Sapiens
agacggtccctcgctatcatcggcagcagagggtggaaagaaagggtcattctgtttttatttcaatccccaaagtatagattaaggcagcagtattctaggtcttacacaatcataggaggtgggtaacatggcaggagaggaggaaataatattcgttgactgtttactatgggcaagacatcttaccaacagtttaatactcttggcaactctgagccagtgggctctctctgtatatcactttgggaaaagctgaaattggtaaattagtcccaaactctaggtcagagggtaggggagtgaaggaaggtttcattaaataaatggccctggggctagtaattaaagatgactatgagttacctgagtaacaaggggagggaacagtgttcttagtagagggaacaacattggcaaagaatcttcagtgggatggagcttaaaaataaggcaaacatggctgaaggacagagagtgtgggagagtactatataagctaagagggaggatataggcaggagctagatcaggca

SEQ ID NO: 456629 - DNA, 534 bp, Homo Sapiens
ctgagagacatgaatctggataacaactggcatcctagttagtgagcatgagcacttactacgtactccgtgcttcgtggatacccctccatcctccaagggaccatactatactcatgctgcccactaacctaatgtgctctccaaccagctgagactggagaggttaacttttagcctccagtcacaccggtgggaaggcaccgatttgaacctaggtagtctgacccaaattggagcactttcttccatgctacattctaccgaaaatgaatagctgtcaaggactgtgaaaggctaaaccaggtccatgacattttatccacatactgaaattccacacctgttccacccaaggaaagtaacatgaggttcattcttgatgttaaccacagaaataactcacttgattttcacacttaagagaggcttaaggagttagaatttaacttctttacccttgttcatacggatcttaatgttcgtcctctctttcttcttcctactgctggactagccctgtgccgatgatag

SEQ ID NO: 456630 - DNA, 423 bp, Homo Sapiens
gatattgcaccaaaactgatgcatagattttctaagcttctggtcaacccctacccactgggaacttttttgaaagtagtaacttggccaactccaaacagaggctgcagtttggtaccagaataaaaccatcttgtcctagtttgcccaagaccatcccagttttaaaactgaaagaaagccctagtgtggaagcaacccctgggtctactgaggaatgaatggataaacaaaatgtggtacagacatactgctacggtttgaatgcttttgtcccttccagaattcttgttgaaatgtgatccccaatgcaacagtattgagaggtatggccatcaggaggggactgagtcaggagggcacttaggcatcccttagaaactgggtgtgtgccgatgaatcgcagggacctctagacaccac

SEQ ID NO: 456631 - DNA, 372 bp, Homo Sapiens
ggttctgattaagtattcactataggtattggtagaaaaagatggtgactagctgactacactgaaagtagagtacatctgcgatggctggatctgggaagcacacagcagtatgaaattgacattatctgagattcttacacatttcccgtagtagccttaactataacgattaaggatttagacagaagcttttgtttttccttcctggtaaaatatggttttgtgtttgtccatgttaagtggcagagtaacatctagtttaagataattgaggtacttttactatttatttaatatagaatagattaaatccgggttttaagctccagatagacttatgatttccaggtattcaggtgccgatgaatc

SEQ ID NO: 456632 - DNA, 490 bp, Homo Sapiens
  misc_feature (132)..(219): n is a, c, g, or t
tccaactcaggggcgagctgcaggggctgcagctggctgtggctggggctgctgtcctgctgccatagtgggcttttgctgcaaggcagcctgctgagtcatcagctgttgttgatgcagggctgtggccannnnnnnnnnnnnnnnnnnnnnnnnnnnnnnnnnnnnnnnnnnnnnnnnnnnnnnnnnnnnnnnnnnnnnnnnnnnnnnnnnnnnnnngtgctggggtgtggcctgggcctgagcgggcagaccctgggcctgagtagaaggcgtctgctgtggagtgggaggagcctgtggctgcttggcctgagtttgcggcagaggctggctgggtggggcttggggttttggttggggaacactggctaaaaggccaggctgattgctggatcctgcagcctgaggtgggggctgaacagtggccccccttccggggtgtcagcgctggctgtatgggaagattcctgactacacactgactagt

SEQ ID NO: 456633 - DNA, 539 bp, Homo Sapiens
ttcaatggttgtgtttttagaactgattagaagatgaaatgtagaatgaagtctacacccatttaatactccccattcaggtctcagatcaaatgttaccaccctatctaaagttgttcttggcacaacaccttttctttccttgatggcatttaacattatccgaaatcattttattaacgtgctggttaattgtctgcctccatcagacagaacgtggacctgacgtgtcgtgtgcacagctctagtcctaagctcttagaactgtgcctgacacataacaggcgctcaggaaacattaataaaacgaagacaggtggaatgccgttctccaccccgctgcacaaatctctcctcctacccccttataaactgagttcccacagcgctgctattgcaattaactggctacgctcgcggatgcaaccccgggtttccttcctgttctatccctggcttggatgtcggtgccaggcacgctgtaggcactcgatggcagctcgcctctgagttgggatcctctagaacaactatcacca

SEQ ID NO: 456634 - DNA, 280 bp, Homo Sapiens
ctctcgaggatcccgaggcgagctgcaccctactcccagcaacaccgtcccagacccccctatgcccaaccttcgtatcagcagcagccacagtctcaaccaccactgctccagtcctctcagcctcgcatactcccagcagccgtcccagcctccacatcagcagtccccggctccatacccctcccagcagtcgacgacacagcagcacccccagagccagcccccctactcacagccacaggctcagtctccttaccagcagcagctcgcccctgag

SEQ ID NO: 456635 - DNA, 373 bp, Homo Sapiens
cgagctgcaccggggaatcatgacttctgcagccgagataaagaagccaccagtggcccccaagcccaagtttgttgtggcaaataataagccagccccacctcctattgcacctaaacccgacattgtgatttctagtgttccacagtcgacaaagaaaatgaaaccagcaatagccccaaaaccaaaagtcctgaagacctcacctgttcgagagattgggcagtcgccatcaaggaaaatcatgttgaacctggaagggcataaacaggaattagctgaaagcactgacaactttaattgtaaatatgaaggccatcagagcaatgattatatttcaccatgatgttcctgcagctcgccctgagtagcc

SEQ ID NO: 456636 - DNA, 672 bp, Homo Sapiens
gggctcagccgcggagtgagcgagggagacgggaggagccgaacccggcgccatccgccgccatcctcccccgccccaccgccatcccgtcacggggagcccctaggcccgggtcccggatccccgcgcacccggccaggctctggcacgttttgggggaggtgcctgcaggacccaacatactcaatgagcttccagcgcaatgtctgatcgctcggggccgactgccaagggaaaggatggaaagaagtattcctcgctcaacctgtttgatacgtataagggcaagtccttagagatccagaaacccgctgttgcccctcgccatggcctgcagagtctcgggaaagttgccattgcccggcgtatgccacctccagccaaccttccaagtctgaaagccgagaacaaaggcaatgaccccaatgtctcactagtgccaaaagacggaacaggatgggcaagcaaacaggagcagtccgaccccaagagttccgatgcctcaaccgctcagccgccggaatcgcagccactgccggcttcacagacgcctgccttcaatcagccgaaactacccgcagcgagcccccgagaacactcctttggttccaagcggggtaaagtcctgggcacaagccagcgtcacccatggagcacatggagatggtggaa

SEQ ID NO: 456637 - DNA, 181 bp, Homo Sapiens
tcggtacccaactcagtggcgagctgccctcacatgttcacagcggcacctgagtcacacatctggagccatcctggactgccatcatttccccgatggggggtttccctgacttcatccatcctgtcttttggtccccataataactacatggctcgcccgtaccagcacactgtgagaa

SEQ ID NO: 456638 - DNA, 399 bp, Homo Sapiens
cagaacctctactaggtcagtgtggaggggaaatgtggggttggaggccccagaccgagtccccactggggcactgcctagtggaggtgtgggaaggaggtcactgtcctctgtattccagaatggtagatctactggcagattgtatcctacacctggaaaagctgcaggcacttaacagcgctatgagagtagccacaggggccgaaccctgcgtagccaaatgggtagaactgccctcagccttggtagcttgccctttacatcacgtgtgccctggatgtgggagacggagtcaaaacaagattattttggagctttaacatttaatgaattccctgcggggtttcaaacttccatgacatctgtagcccgtgtgttatgacctgattgcgcgag

SEQ ID NO: 456639 - DNA, 502 bp, Homo Sapiens
  misc_feature (364)..(364): n is a, c, g, or t
  misc_feature (395)..(395): n is a, c, g, or t
  misc_feature (409)..(409): n is a, c, g, or t
  misc_feature (445)..(445): n is a, c, g, or t
  misc_feature (458)..(458): n is a, c, g, or t
ctcctggagccaggactgcacaaggcaatggccaaatttagttgaattcagcctaccatcctttgctgatgactcagctctatgccaagtactggagccacagagatgggtcagtcccagcccctgtcctcaggaagcccatggtcagggaaacgttgtagggataagtaatagagggcagttgccttcagggctcctggtggctgctggtccctatggtgccttgatgtgaattagaagacggtgccctttccaggtggattcagacctacactagaacgcacagctttgggagtgacacacaggttggattttagcaccccttgccccttggccagaggtgccctgctgcacggccatacgntgcagcctcgagggacacacaggccaaagtntttccttcagcctnttcctgggagaggaagccgcagtcatgtttccaagnttctggtcaactncaggggaccaccttccagcccccaaacatggccgagcagtgctt

SEQ ID NO: 456640 - DNA, 559 bp, Homo Sapiens
caggtttgggtcctgggctgcgtcctgtggtggggtagtgccaggctggccaggctgcagtgctcgaggcagacagtgactgatgaagaaggcctgcaggaagcggcgccgcaggccttcaggcaggtagtagtggatgaagtacatgagccccaggctctggcctggggtaatagctggcggcggggccgagctagccagcagcgcatctgtgatggcatctacaactggggtgaggtcggacatggccaggcgtagcgagtgcaggaactgtccatgcaagtgctcgatgtagtccttgccgtaggcctgcagcagctcttgaggcaggttggccagcagcaattgcttgcgcttttcccactgacccacgtttctcactgactctggggaaggagtggcaaggtcagagtgggatcagctaggggagccaaagccaattaggactgtttaacccgcgccaggtatgcagccacaaatacacccccaaccaaaaccatgaccattcatcaaacctgacctgccgcctataagaccattcccaacgcgaacacggata

SEQ ID NO: 456641 - DNA, 564 bp, Homo Sapiens
tgttggtcaggggctcattgcaggtctggacgatgcggggtgggtaacacttggggttgtcctcgtccggccctgtctcatgcgtcaccaagaccttcaggtcgctggagagcttgtaaatccgattgacggcccccaagtaaatgtgtcctgtcctctcatccaccaccaggtgattgaaaccctcggcgggctctcctcggaatgtgacaaatgaccgctgcttctgggacagcggggctggctgccgggtgagcaaagtggaggagcccatgcccaccatgaggaggtgggagagaaggcaggtccagttccagggcatggctttcatggcagaggcgggtcccagtggcacagcagcactcaggcacagtcgtcccctcagagggccaggactcagcaatgcagtctcccctactggacgcgccgcgtttccctccttcagcgggtgcgccgcattgacactgcagatgaagcctatgccgcatgcctctcagccctcctctgtaacgtgtgcgtgtgcgcgcgtgtgtctgcctcctccagccccaacccgaacacacg

SEQ ID NO: 456642 - DNA, 518 bp, Homo Sapiens
acccattgggcaatgttaggaccagaccacgggtccttgacagctctgtgttcaatgactaggttaaattgcttctctgtctgcactgcaatgggagaaataggactccatttggcctcttacctgctggattttcctgtctttacgatccttgaagtagcccgaggctttgctggggagaggtcttaggacccagcctagtttggtattggttgttttatctggtaaaggtgttttgtcctccatcccactcctcagcctgtgctggcctgtgattgccaggaaagtcaatgagaatctatctgaaggtcatggaccagaagaacctgtggcaccacgcacctttctgcgagttccacactgactgtatttcaccataagaggacttttggtgaagcagaacatctgcgtacaagtaccttggagttggtgctatgtgagccgatggtggaaacaggttgcggctgaaaatgagatgtgaaagttctagaatggattttctagtggcttgagctctg

SEQ ID NO: 456643 - DNA, 556 bp, Homo Sapiens
aaccccctctatttgacgttttaagcggggccatttttagtggctctgatatatccaagactcttttagacactttagaatgaagagctgttctaatgttccaaaatctattcgttggtcaaaacactttggttagcatatgaagctttatacagactagggatataggaaaagaaatgtgacttttaaaatgacacctaaaacatgcattcggtgtctggtactgttaactaggggccatctgggtcaataacaagttacctcatggagaaaatgcaataggaccaaacaaggaaggaaataggaagtaactcagtctctcttgggtttaatgctaacctgctaaggtcaggcaaaatttaagtggatttagaaaccataaaaccttctagtgagatgaatgcagtgacaaaggacctttgaccagagagtcaactcttcattattcggactttaaagccatcttttaggaggtgatattgtattaggcaatccgttatttactagacattgcagagcaccccttctagatgatgaggcggatattgggggcgtg

SEQ ID NO: 456644 - DNA, 537 bp, Homo Sapiens
atgttacgaggttctgaatgtttgtccctcacataggatttcggagcactgctgctgtggtctgaatgcttgtccctcacataggattccagaacactgttgctggggtgtgaatgtttgtccctcatataggattccagaccactgctgctgtggtctgaatgtttgttcctcacataggattccagaatactgctgctgtggtttgaatgtttgtccctcacataggattccagaatactgctgcggtggtctcgaatgtttgtccctcacatgggatttcagaacattgctgctggggtctcaatgtctgtcccttcacataggatttcagcacactgctcttgggttctgaatgtttgtccctcacataggattcccgagcactgctgctgtggtctgaatgttttttcgtcacataggattccagaacactgctacgagggtgtgaatgtttgtccttcacctagtattccagaacactgttgcagggtctgaatgttgtccgtcatataggagggggtttgtgagagtgta

SEQ ID NO: 456645 - DNA, 563 bp, Homo Sapiens
ccacaaatgagattgtttgtatgggctggtccagcaactaccactgcattctctaagttgcaccaaacatctgaaggtaaaagaccccctgtcaacactacacctcaacatatctggcactaattccctatttttctcacttaactgcttatttctaatctaattcagttagtaggaaaggaaaaactcatttttctcaattcatccaacatatcgctaactgcctggatcaagaacactaagagaaccaaacaaatctgagaggttataaatacactaacatttctaccagaagaacagagactcaaaggcaagaactataaaataacttatctacctcacttttagaagaatgttcatttctctgaacccctacagcttttcactataaaccagtcatttgtcatgtgatcacagtatcaacaccgacatgattaatatgtagatatgtatacacggacacattacacatactacgactttatcgactaagatacatcaagctagacgaataagatcttgctatactatcctatgtttcactgtaggggctttcgtgttga

SEQ ID NO: 456646 - DNA, 214 bp, Homo Sapiens
tcatgcatacaaccctgggtgaaggtccccatatgggacccctgtccaaactcatgtgaaatgaggcaggtgacagtcgcagctgttctctgaaatgtggtgggcttgtggggagacgggtagtacagcaggctgacagctgccgttcaaagggggaaactgattggacatgttagcagatcaatgcccggccctctagcgcacccggtacgac

SEQ ID NO: 456647 - DNA, 512 bp, Homo Sapiens
gctcgtgactgggagaatccttgacgatatattgtcaaatgtaacaccttcatggcagcatgggagccccataacggggaaagcctacccagggtgatgctgggcccacccaggagggtccgtgagggttggggaaggcctgggcagatgctgttgccaggtgagcacaaggctaaagagggacatgggagccagactgtgggggcgctgaagatcaggcaagaaagtgtggttcttgttggctgtcaggacccgccatgccttctcaagctgagccctgcaaagcattgagaggcagcctgcctgcctgcgggagagggggctgtacccaagagtaattcagaccagggcatgcccaccaagagaagagacaaggagacttgctgggactcagtgagagtgaccttagcaggtgaggagaagtctgaagtccaggctgggagatagggaggctgttctctgaacctcatatcccaatttggaggtctgggtcctccctgcatcatgcctag

SEQ ID NO: 456648 - DNA, 721 bp, Homo Sapiens
gtcgttcgagtcggcgggcaaagcagccggcggggccggactctggttccttctattggtcagggagtttctgtggagagaagtgatggatggatgatgctgtgcagagtgctgcttatgggaaggcggcaagggctgcagggtagactggccttgattgcttgcaggttgctcattctcactgtcggacttgttttcgtgctccgtatctgtcagggtgagggctgagttggaccgacttgacaggcaggagctgcggcctgatttgacccccctgccccaaagtctcatggcatgctctggggacatcactgcttcattttcagtatcagcatctgaccctgcactgatagagtaacctctgtgagggagccccatttccgcacaaaatgccagtcctcttcgagttgctggttcacaaactcctaactgccttagggtaaaattctgtccttgtctagtgaactcgtctgcttctctgtgaaccacatccttcactctgttgccgtaaagcagccgcgaggaatcatgatcaaaagctttcaatgtctcgctggaactgtaggacttctgtgtgggtacccggcactcctcattgtctgcggaggaatttgtgtagcgccgttccttctctcgtctgctcttggtcagggagcagtaaggcctgcgttctttcacatccatacttcattccttctgtgtgcacatcagtcctgctggt

SEQ ID NO: 456649 - DNA, 356 bp, Homo Sapiens
ctcgcacccgacacttctagtggtccagcttctgcctcacagcagcctctccatgcatgcctagctcctgcctctttagggaacttacaggcctaaaactttcttaatttgggcttctcaggcccagctcctgccttctgttggcctctacaggcctggcatcatcctttcaacatcctctttaggcccggcctctccaggagcaaaacatccttaagtcaacctcaccaggcccggctcctgtctccttgcggcctccagaggccgagcttttgccgccaatggcctctctagccccagcttttgcctgccaatggcctctctagccccagcttctgcctttcatcggtctctcc

SEQ ID NO: 456650 - DNA, 656 bp, Homo Sapiens
ctacagatccgtcagacagcggcttcggcagtcacatggtagaagatggtcccggggactttgctcacacaggggttccaggacattgtgccaaggtccacgtgtgcccctttctcctcagagggaggttttgactgtgcctgaggccaacagtgagccctggacccttgacacgcttgggggtgaaaggagacccggagtcactacttggcatcttggaaatggggaattggcctgggcaaccagagcacccctttaccagcaactggagaagttggtagacactcccctgggagcctggcaaggtggcaagggcgctgctgggaaagcagagggtgacatcaccctgagcacagctgagacacaggcatgtgcgtccggtgatctgcctgaagcaggtactacgaggacattctccgtagtggaaggtgattgggtgctgccaggaagctgtcaggacccagcctgctctgacaaggctccggggatggagggtacagctgcccttcatggggacagcccagccaggccccagcaggctaaggagcagccagggcctgagcgccccattccagctggggatgggaaggtgtgcgtctcctcacctctagagcctgaccaggcttcagtgcctgaccaggcttcagtgcctgacc

SEQ ID NO: 456651 - DNA, 653 bp, Homo Sapiens
gggcgagcgggctggtgcagaagatgggtccttctagcagctcccaatgaatatgagtaatcagttcaacatcacgagaaagagcccaggcctgagagggagaagattaccagcgaggtgacggtgagcaagttactgccctctaggctggagctgcctcactggcatatctgagaggcagtgttgggtagtgattaagagcaaaatctacaaccagtatggctagattggactcctggcttgaccagtaacaagagcagggctctcagcctctatcagccaaatgccctcatttgtaaaatttccttatttcaaatcctgtcggtgcaaagattaagagttcatatatacaaataacgtactgtggaacagtagatggcacagaaaacattatgtgtgtttactagtattacggccactagtattaatgcctttagtgccatatcgaggatgttggattagtgagcctttggaggtctcttaaaaagtctgcagttctatttccgtgcactatgagccccgtttagatttcagacttaatcgagcatttgctgagtgcttactatatttgaatatattatcttatttaatccttgaacaaggcctgtgatcccatgttttatgttcttaagaactggaaatcggggtcaaga

SEQ ID NO: 456652 - DNA, 420 bp, Homo Sapiens
ggaaaatgacaaagtccaatgtcaatgcagattttgttcgtaattatgactgatcgtagctcttcagccacgctgccttgtcagtaaagtatgggacaggaagggctttgtgccattggctacatttctttctccttggccaggtggctgaagacgaagtgagtgataacagtgccgagtgtgtggtgtgtctctcggatgtccgggacaccttgattctgccctgtcgccacctctgcctctgtaacacctgtgcagacacgctgcgctaccaggccaacaactgccccatctgccgactgcccttccgggcactgcttcagatccgagccatgaggaaaaaaattggggccccttgtccccaaccagctttaaccccatcatctcatccagcgagcggtaccgagctcgattcgatca

SEQ ID NO: 456653 - DNA, 528 bp, Homo Sapiens
cctcacaggggccgaactgggtgacgccttttcatcgtttttgccactgatgaagatgcaaggcttggtatgatgcgcacaggtggtacaattaaagggtcaaaagtaacactattgttgagtagtaagacggaaatgcagaatatgattgaactgagtcgtaggcgttttgaaactgccaacttagatataccaccagcaaatgccagtagatcaggaccaccacctagctcaggaatgagtagcagggtaaacttgcccacaacagtatccaactttaataatccatcacccagtgtagttactgccaccacttctgttcatgaaagcaacaaaaacatacagacattttccacagccagcgtaggaacagctcctccaaatatgggggcttcctttgggagcccaacgtttagctcaactgttccaagcacagcctctccaatgaacacagtcccgccgccaccattcctccaattccagcgatccatctctgccaccaatgccatccatcccccaatccattac

SEQ ID NO: 456654 - DNA, 459 bp, Homo Sapiens
cacacaagaaagtaaaacatgaaaacttcagcctcctaacctctggagaagtgggagagttctgtgtccaggtgaaaccatctgtcgcttcccgaagtaacaaggggatgtggtctaaagaggagtgcatctccctcaccaggcagtatttcaccgtgaccaacgtcatcatcttctttgcctttgtcctgctgctctccggagccctcgcctactgcctggccctccagctgtatgtgcggcgccgaaagaagctacccagtgtcctgctcttcaagaagcccagccccttcatcttcatcagccagcgtccctccccagagacccaagacaccatccacccgcttgatgaggaggcctttttgaaggtgtccccagagctgaagaacttggacctgcacggcaggcacagacagtggctttggcagcaccaagccatccctgcagactgaagagccc

SEQ ID NO: 456655 - DNA, 334 bp, Homo Sapiens
gcatgattctggaaagaaattctgtttaaaaagatgagcttcagtgttaaaaggaggtgggaataaatcagaaaactttcatagcttttgaataaagcatgtaatttttcaccaaaaggagagaatttataatgggggagagagagaaaggaggcaatgaggacagccaagggaatgctggaaccattttatccctgtggcttagttcttacagataaaaaatctggctggattctctcattaacaggtgtgtggctgtgaataaaccactgaaacaatcttggggttcagttttttagtttataaaaagatcgggcccggtggtggtggctca

SEQ ID NO: 456656 - DNA, 1104 bp, Homo Sapiens
aggagttggtgctgtgtgcaaaagtgtgagttgtcggttgtgtcatgtacagtgcatcatgcgggggtcgtcgtaactggacggctgctttccccgacgtcatcctccatggagatattcttaccatctgtgtgctctgtcttgagttcattttcatccaggttgtgagtggtatttatttcagaactgttatctgtatgaggtgaagcccacatgtctaggttcccaggacctgaactgattcgatttcgagatgactgttgcagtgactgtggcagtgactgaggaggaatgtcagtctcctctgccgtggagttaccatcttttgactcaaaaccttcctctttagcaaatggcttgtgttcagtttccttttcgtctccagcaaatgttggtgatgtgtccgagtctgaggtggaataatgggtatatgagggggcaggcaccgaatcttctcctaggttggatgcactgtaatcagaacatttgtaagactaagcaggaatcttcccaaggaactaggacatctgaccctcctttcttcatattctcctcaaaaaggttccaggagtctaccttttcatataccttgcccctagttttaggctccactaaaccattctgatcttcttttggtggcttcgaattagtccatgtgtgatccagatcagaactgggatttccaggtgcacagatgtgatccctggagtcattgtttttcttgccccagatttctggagctgcttcattgtttatctcactgggtgaattgtccagtagttctgaagaagaaaaggcaaacccactttttgccatggcccactcattcgggtccctaacagaaggtgtcttgctgcttgttgggtgcaaattccaggtattttttaaagcttcatcatgatcttctttaccaaatgcactccaggctgggaatggcgccacagctgctggttcaccatcatctgtaggatttccccagggctcgggcatggctgtgggagagcgaccagaatgccacaaagaagcaaagtcttctatcaggtggtttgttccttggggagatgtatttggcaaagtgacttctctatgggcacacattatgga

SEQ ID NO: 456657 - DNA, 511 bp, Homo Sapiens
  misc_feature (146)..(170): n is a, c, g, or t
cgaactggaagctggacttctgaatatatcttgttttgtctctttgactttgggaccatgtacatatcttgcaccattttaaaaccaaattaaagtgtaaaagagccttaaagattgaaacgagacaggtgattctaattcattgnnnnnnnnnnnnnnnnnnnnnnnnngatttgcttacataaccatacagagaggcactatttcaaatgtcagatgtttgattatatggccctaatagattataactgaaggataaagcgtctccaaaagtataatcctcaactgttagagtaatcgtattatgcttgttatgttggtattgttattctaaggcttttgtgtgtattttatgggataaagcaaatgactggttaagataatatcattggaaacttggacttttagtgtagtttaaaggagcaacaggtagaagttttctataggcttaggcacgaccctgtgatggtacattttctcagctccttccctgccatgcctggccaaccca

SEQ ID NO: 456658 - DNA, 756 bp, Homo Sapiens
gctacgacacagagaaactcagccgaagaattcggacgccaaaagatcacatgtcgtaggttccactgttaggaaatgtctataaaagacaaattcacagagacactggagacatggctgccagggcgggggtgctggggagagtaaagagtgagttcttaaacacagggttcctttggaggcaatgaaaatgttcggaaattaaattatggcaatagttgcgcaactctgtaaatatataaaaaccacttaaccgtacacttaaatgagtgcattttatggcatgtaaattagatcgcaataaagaggtctaaacattaaagaagtctggaaaaaaataagcagagacattaaaaaaaagagctgcaggctctaaaagctctccccatacatcaaaatgccgagtgcaaagcggtcacttcagacgccaccacagctccacactgggaagacgtgaggccaccacatctcaggtgtctttattttggacagaatcaagtctctgtggtgaggccctctcaggatgggcccccactctatcctgtacagacatcctttccttcctgccctcagagggcactgccagccacacccagggactctccccaccaaacacagacagggctgcgtgtggccacggcacaagagctggtctggggcagtgcccctgcatctgccatgcatgtgccctctgtccccacccactgctggccaactgcagagctccctgccctccaccccagttcgcccacagag

SEQ ID NO: 456659 - DNA, 369 bp, Homo Sapiens
gcatatttcttaaaagctagctgggtggagaacaggctgttagagagcagggatagacatggcaggactgccaggaagtggctaccatgcctggagagatgatcggcggcctggaccaggacagtggcagccaatgtggtgggaagaagagtgacttgaatgttattcctctgtttctaaatagggcttggtgattaggcggctaggagaaaaagaaggataactcccagatttctggcctggctcgatctgtggtactactgactatgctacggtttttgcttgggtttatttgtttcatggcaagggagtgtagagcttggtttgcacctggtcgggtttgagcttccactgggaagtatcgtcatc

SEQ ID NO: 456660 - DNA, 136 bp, Homo Sapiens
ggagctcggtaccgtcttgtgttgtgtttcccctaattggcttgttttgggtgatgttggggtttgtccttccagccacatctcagaacctgagccaattaggggaaacacaaacacaagacaaggtagagccgag

SEQ ID NO: 456661 - DNA, 288 bp, Homo Sapiens
ctggtgtgttcacacatccccacccagctgtggtctttctaagtccaaaaataagagtattcaccttcaaaaacaacttcccgtggctgtaaacttcaattataacaacaacaaaaaaatcaaccacctttctgtgattgtcattcctccctctgtgaccccatctcacaccacttcctcctgctgcctgttctttcaccacaagcccttcagtttatccacctgtctaaaggccttgtatgctcccttctctgtggctggaaggcctttagacaaggtagagccgag

SEQ ID NO: 456662 - DNA, 234 bp, Homo Sapiens
cactactgttcgtatattaaaattgaagatagtttttctgcagagaacatttaagacacctagatggcaatttaaattttttcttcagtacagtctggaaaccctataatgtgttaaatatattttttcccatatggggtctcactatattgtccaggcgggactcaaactcctgagctcaagcaatcctcccaccttggtctccagagcatctggagacaaggtagagccgag

SEQ ID NO: 456663 - DNA, 284 bp, Homo Sapiens
tccatgatagcagcgtggacatgcctcgcattactgaaccagatgggtacgacagccctggcgctcatcttttccaaggctgttgtgaggcagcatctcttgtatttgttcccacgtgctagactgaaagatggaagatcccaggcatcctaggactttgagaggtaccaggtgggaatgtctgcccctgtttcagagtgcttgttggtgtcctatactttagggatcacgcagaggacacaatttgttctgagctctagggaacgctccaactagcctagcag

SEQ ID NO: 456664 - DNA, 583 bp, Homo Sapiens
ggcctggagatataccaacatctcgccagatacagaatcatatgcagaatgtccacatctccaggcagagttggttaagtcataggtaatgatcaaagaacgcagggagccataggtcaccataatttgctcatgtgtcaagggagtacatatttaaaatccacattgaagtcaaagaccttgtattgaaaacatgtccagctgcgttatacattggctgtaagccatgagtgaagatgatacaagctgccagatataggcctttacatttcattttctgtaatgagtttttcctgttcaaacacatggctactagcagcttttgatgatgcttgctccagtacattgaacgttcagctgaacctccactcaggatgcatttgtgcattaatgcatagactaaagaaataaatatacatggacctggcctccaacgcatagactagaaaatgacatccccatcttttctcatttcgtctcctgagatgtatgttaagatggccctatatttgcttggtggtggttgttctgcaatgtcacaggtgtggtgcccactacccctatcccgatatatgatatacgc

SEQ ID NO: 456665 - DNA, 609 bp, Homo Sapiens
ataagccttctccacccagctgcctatctcagggccaagggaagaaatcactgaccagaagttcccatggcaggaggccctgactccctgtctaataactcccctaatccccacccttatcctgactccccttctagtacccccatatataattatatccctcctgcaggagttttaatgtatgttcagagagttttgtcttttcttcatcatcctcagaaggagtctgccagagttttgcatttgttcaactaaggaggttttttcatcaattgaaggctcaagatggttcctgtgattgtaatccaatgttccaaactcaaggcctgtctgacatcagctcctcccacccacgtatctccccagtatgctgatacccaacctacaccatctgtaggaccaaagatgttccaggtcccgtctggtctgaagaagaaccctggctcaggagttaagaaacttaagggccagtgaaaaagccagcttatgtcttataggtccatcctcgaccttatcgccgattatccacgcccctgacccactgtgcaagactcctgagcaatatgctcaaacatccctcatacgctttcgaaagtagatcaggcaaca

SEQ ID NO: 456666 - DNA, 527 bp, Homo Sapiens
  misc_feature (88)..(101): n is a, c, g, or t
agacgtccattctgcatacttaaactatccctctcaaatagagccttccatttttaaatacgctccagaatctcatccattaaacagnnnnnnnnnnnnnnccaactcatgagacctcaaccactacattcagtcatccccatcatggctaaatttctggaacttttcagtcttcatttccgtcccttcccactggtccctcaacctgcttccaaattccatctccagctgtcagtaaggtcaacagtgactgacgaggtaaatgcaaaagactctccaatcatcagcatatttaattctggccagcagaatcagatactctcctccttggttcctgtgatacaaccttctcctagttttcctcctacttctccgctcacttctctgtcttataataacccatctttctcaattcaaccacattctaagcatatgactcacaaatctacagcccatgtcttccatcacactccagagtgtaatgcttgccctggatatcacaaaggtgtatcaaatccataatgtcc

SEQ ID NO: 456667 - DNA, 610 bp, Homo Sapiens
  misc_feature (19)..(19): n is a, c, g, or t
  misc_feature (53)..(53): n is a, c, g, or t
gaagttcaagaaaacagangcacaaagaagactgtctccttggctccgcaaangctggatgaagaatttgaaaaaaaattctacagcctccctcgatatagtcctgttacatttgaccggaaatgtgtacctgtcccaagaaaaaagaagaagactggaaatgtgtcctcagaaccgactaaaaccagcaaaggaagtggggataaatggtcaaaccagctactcttcttggatgccattcaccctacagaagccatattttcagaagacagaaacaccatggagcctgttcataaggttaaaaatatcccatccatttccaacacccttcatgatcagaggagtttccttttcctgagcttcgttttcctctgtcaacattagctcgcagagaggtgagcatgccctcagacaccagggttttataaagagcacctttgcaagacctctcggatttcctggaaccacaagtttctatttttctgtgacagtcactgtcctcaggcttggcctgtcctgataggctgggtggtagtgcatcttccatacggggtcaatggttctgcttttataccctgctgatgcaagaatgacgtcggtaccgagctca

SEQ ID NO: 456668 - DNA, 464 bp, Homo Sapiens
  misc_feature (325)..(362): n is a, c, g, or t
ttccttgtagctcagactttttcacgtctgttgttatctctttgggaatgctgaatacatacatttcgagaaggaaatgactgttaaactcttaagacttcaggttcatattgctaacctgcccagcagggagggatttttttcaattagtgttctcactggtgaggcaaacctgatgccttcccctcttcctcagaaccggctttatcacattgaaaacctttgctcctccgacggatcgagtctgctttccctgtggatgtgagcatggctttgtctgctggtgactgaacatctctaccttgtgtcaatgggccattggtcnnnnnnnnnnnnnnnnnnnnnnnnnnnnnnnnnnnnnnatgatttactaattcatagtcatttttctatagattgttgtgcaaaagccatttacatcttaaggatattgataatcttgagtaatatatgatggggatcct

SEQ ID NO: 456669 - DNA, 643 bp, Homo Sapiens
aattcttatacagtcaattttcttctgcgacaccctgtcaacaattctgttttacttcttcttcgaatatcatggatacaatccacctgttctggagtaagcttgtgcattttccacaaggactggaaatcatttcgagacagtgaaattatcccttgtgcattgaatggcagttttaccgtcacattcttgttctctggctgaacaggattcactgtctccttcggtgtccgtctcagagtcgtctccccagctaatgacacaagcatatgggcaaggttcttgctggggttctgaaacataatcatcgtttcccatttcccaattgcttgaacagccttcagtactcagagtacttataaaagggcagttgacagaacttaatgttgtgaaagtcctttgacctggttctgggctctcactaatcctgatacctaaccacggacactcagaccgtttctgtgagatctgttctgagccatctttggccaccgcaggtgataactgcatttggcaaggagtgtccgtgctgcatatgtcactccagaagccttcttgctaggtgttctgccacttctcgctccacactacgccgtagtcactagagcagactagctatggacgtcctggtaccgagccgagt

SEQ ID NO: 456670 - DNA, 517 bp, Homo Sapiens
attcttgacttcagaaatcagtatagagggaagctgagcatgcccagctgttaatatattctccctaatattccactaagccactcacggtgtcctcatttcttttacatagactatggatggtgtgggttgatataaatgctaacaatcaaataattaggctttttctttcatgttgataactccagatttacgtatttgggcagtatattaaagctaggaaagtttttaaatgttaagtcttgtccatttataacatggttcagaaataatgaattgagagtttctgatatgaaataatcagtcaaatttgctaatgtgtctataaaaatatggttaaaatgagtataatgattttagatacaggggaacatttctgtgatactgtcctgataattaaaatcctaacattacttaacagctttatgatgtgacagcagatgcctagagtaggtagttttattattttgcctcgtacctttagcctatgtgaatgtatgtggtgatcaattaaatt

SEQ ID NO: 456671 - DNA, 565 bp, Homo Sapiens
atggatctaacagatacgtatggaactttgaacacaacagcaaaagaatatacattcttctcaggtgcacatgaaacattctccagtatagttcatgtagttcaccaaaccagtcttcagatttaagaagatccaaatcattctaagaatcttttccactcaccatggaattccattaggaatccataatagaaaaccggaaaactcaaatgtgtggaaactaaaccatgatatccttttgaaccacctttgagtccaaaaatccaaagggaacttgaaaagtttcttgagacgaataaaactgaatacacgacgtacccaaacttaagagatgcagaaaaagcagtactaagagggataaaggcctacattaaaaaagaagaaccgtctcaacctaactttatacctcaaggaattagaaggagaacaaactaagtcccaacttagcagagggaagggaataaccaagatcagagtagaaatagagagtaggaaaataatagaaaatattaagaaaacccgagtttgtttcttgaaaaaatacccagacccgacgttatacacg

SEQ ID NO: 456672 - DNA, 335 bp, Homo Sapiens
atatatcccaagccggtggtgtagttttacctgcataaccaactcaacaggaagatttcgattaatctagaattgagtgggaataggtattttgtatgatttttcctaattgaatacaacctaaaattttggctaagttaagagttcccggaagaaatggatgaatcagggttttactaatcagccagcagtagaggtattgcgacatacaggactaactgtgctcctgacactaatgaggagaggaatgaagccggaagccgagctcatgcaagaatgacgtctatgcagaatgacgtctatgcagaatgacgtctggtaccgagctcgattcg

SEQ ID NO: 456673 - DNA, 613 bp, Homo Sapiens
gacatggtcctaagcgattgcaggaagatctcggctccatctgctccttgagtggcgtcctggtcattgccctgccagtccctgtgattggtttcccactttagccggatttaccaccagaatcagagagctgataaaccgcagggcaccaaagaaggcccgccttgccaggatccgtgtggccaaaacaggcagttcgaatgcatacctgcacagcaagcgcaacgggctcctcaacgaggcgctggagctgacgggcaccccagaagaggagcacatgggcaagaccacctcactcatcgagagccagcatcatcacctgctgcactgcctggaaaaaaccactgggttgtcctatcttgtggatgatcccctgttatctgtacgaacctccaccatcaagaaccacgagtttattgatgagcagatgtttgagtagaactgcatggagagttcaatgcagaactacccatccacaagaagtccctcactgtccagccacccaggcctcactaccacctgctgctcccgtcgtagtaacgaagaccacccacctgccccattctaaccctgccagctactcacctgccagcatgactagaatggacgtctc

SEQ ID NO: 456674 - DNA, 650 bp, Homo Sapiens
gagactcgagaactgagtccaaatacccccgatttttaaagaccagaaagatgaagagggatccagcaaaacagactgaggacaaatgctatatggggtaggatgaccatgaaaatgtggaggtgtaccagagttcaaggaagccagcgtttcaggaagaaagatatgatgaactatgtctaatgggaagatcaacagagtaagatgagacctgagaatcaacatttgattgggcaacatgaagttcattggtggccctgaataaagtggtttagataagtagccaggaaactttttctgtaacgggccagagagtaaatattttaggctttgcaggccatctgatctttgctgcaaatactcaattctgctgctgtagcactagtcataggtagtacctacggaatgagcatggttatccttgaataaaaccttatttacagaaacacatagtgggctggattggttcatgggccacaggtcactgacctctggtgtagatgatgttacgatatttgaagtgtgattgaagtaagttcagaagggaagagaagaagggataactttggaggagttttgctgtaaggagaagcagaaagatctgagtggtggctggagaagaagcaagaatgacgtctggtaccgactcc

SEQ ID NO: 456675 - DNA, 492 bp, Homo Sapiens
ggtcgcagacagtcgattgcgagctcgagcacaatggtttaacatttaccaagtacattttgtttaccacacacggggctgtgtacgttacctgcagttacttcttttaaagctcccaaacccgtgtaatgtaggttttattatcccgattttacagaggaagaaacaggtttaaggagattaggtaacttgtccagggtcatacaactagttaggtctgaagcaggatctgaaccatacctctcttacctttggagcccatcttgagctccaggtctgcttcttatccatctggttttccagggtttgcatttgagagcgtatcccccttcactggctgatgtagccctggttaagaaacatttctccatcccctgttgtggccctcaacaggcagttgcagaccagtgatggatgaggtgaatccctggttggttttccagcaggctcaagaattgccagccagtgtgtgaaatcactcagtgaactgga

SEQ ID NO: 456676 - DNA, 637 bp, Homo Sapiens
  misc_feature (42)..(51): n is a, c, g, or t
  misc_feature (623)..(623): n is a, c, g, or t
gtacgatcgagctcggtaccagacgtcattctgcatcaggannnnnnnnnncttcttccaacttttaggttcagtgggtacatgtgcgggtttattatatgggtaaattatgtgtcacagggtgtgggtgtaccaattatttcatcacctaggtagtaagcatagtacccaagggtagttttggatctcaccctcctcccaccctccaccctcaagtcggtcccgggtgtctgtggttcccttcttggtgtccatgtgttctcagggtttagctcccagttataagtgagagcgatattgggtttttccgttccggtattaattcacttaggagggcctctagctccatcggtatggctgtaagggacatggtctcattctttttttatggcggtgtagtatggcattcggccaagattggtaatggggggacttttttctaatagattggggtgaaagtggattttctattctggacttttactaggctctgggaccccaggtaacctaggaattagagtactatctgttagatcatggatttgaaatctttctttgggaggtaggcatttagaactataaactttccttttaacactgttctgctgcatcccagagaattncgtatgttatgtct

SEQ ID NO: 456677 - DNA, 663 bp, Homo Sapiens
tcccgacgccattcttcattaagagaatgacacacttaagcaaataattccaactgcatatgtgatgaagtacttgtatctagaatatattaaagttcaaccgttaaataaacccagtttaagtagaaaatgaaccaaatatatgaatagacattttacagaaggggtatgcagatgacaactaagtacatgaaaagatatgcaacatctagctttcctggaaatataattcaaagctataatgagatatcactacaccctatcaagtatggtgaaaatgaaaatagtaataacaccaattgttgacaaggatgtagagaaactggatcactgaggcactgttcatggtaatataaaatggcacagtctggaaaacagttggcagtttctattaaaattaaacctgcacttattgtattgtccaataaatgcacgcttggacatttattcagagaaatgaagtattatgttcatgcatagaactgtacacggatgttcatagcagctttatttgtagtagccccaaacaggaaattaatgtgcttcacacggtgaatggataaacaattgtgttatgtccatatcgtggaatatgactcagcagtgaaaaggatgaactattgatacatgccagaatgacgtctggtaccggctcgattctaa

SEQ ID NO: 456678 - DNA, 653 bp, Homo Sapiens
atcccgtcattcttgatacatgatcttttagtagatataaagcagagaaagtggaagcaatagaagtaaagctcgatgatatggatttatcagcggagactttagtaggtggagagaatggtgcccttgtggaggttgaatctctgttggataatgtatatagtgctgctgttgagaaactccagaacaatgtacatggaagtgttggtatcattaaaaaaaatgaagaaaaggataatggtccattgataacattagcagatgagaaagaagcccttcccaatagtagtacatcatttctcttggataaaatacccaaacaggaggaaaaactacttcctgaactttctagcaatcacattattccaaatattcaggacacacaagtacatctgggtgttagtgatgatcttggattgcttgctcacatgaccggtagcgtagcacttaacttgtacatccagtatcatcgacagcacaaaagcattcaaaatccatacaacttcagcatggcatgcagcagtatttctgaaagcagacttagcgtcatcaactaagggggtggagtatgctgaaatgcctggtacaactctggaaactgagtcttctagtagcaaaattgtaccaaatattgatgccagaatggaggtcta

SEQ ID NO: 456679 - DNA, 575 bp, Homo Sapiens
atttgtcagtgcttctgcacttctgctggagagaagggcagaaaaaaaacctttacagatgccaaacaagaaggcttctcattaggcatttggattaagaactattgctcaagaagccctgagcaaggcctaccagttctgatctctctaacctcctctcctatgactgtcccccttgtccatgggcctctgccatgctggcttccttgacgctccgccaacccttcagacacactcccacctcacgaccttcccgggggctgttccctctacctggacgactcttctctcagacctctcgtatcttcaagtctcggcgtcaaatgccacctttgcgaggaggaaaaagatttcttttctttcccatgatatttatcacctcctactacaccgtataatttacttaattatctataattcaccccgtttctccgtttcccccgtcaaataagctcccggaatgcagagatctctgtcctggttcactgatgtctatcacaagcacttagtgcctgacacaccgtaggagctcgagaagtattttctgaatgaatgcagaatggacgtctgggacc

SEQ ID NO: 456680 - DNA, 204 bp, Homo Sapiens
tacgactcgaggctcggtaccctaagggctcacttgcaaaatgcccaggctcttgcttcttcgatctgctctgctcttatgatctggctttaatactgcttatttcaacaattgcaccatgaggtctggcgcacccccactttgggaattctttgttccatcttcctgttttccatgttggttcctctatcaaagctcaactct

SEQ ID NO: 456681 - DNA, 277 bp, Homo Sapiens
aatgcagcggactcggcacttgaaagaacttccaactatgaaggcggacttaacccggcacgttctcgtggaagatgtgatggttttgaaggagcaaatagagcatttgcacagacaatgggaggacctctgcttaagcggtaagtcagctcactgcagggcatggctgtttgggagtggattgaaatgtctctgaaggccaaacaaagtagaaaggagcttaatttcattgaaccggaggcccttttcagtgacacgctgccgagtccgctgcatt

SEQ ID NO: 456682 - DNA, 386 bp, Homo Sapiens
  misc_feature (22)..(22): n is a, c, g, or t
  misc_feature (372)..(372): n is a, c, g, or t
aagactgtggctagaggtagtncaggccatgaaggctgcaacttattgtttctctgccctgacttaaagcatgtgtttccaagttgatgcctgttctttttatgcctcatcaccaccctgagtgttcagtgaggaattgctgcaaggaccaagagttcccaatgtaatgtggataccaaagaatccaaccactcagcttcatcagtgcccttggcaatgcacgtccaagaagcctcgcacacagagctgggaggccatctgaggtctgaccactcgtcgcctgccagaagatgagcattctgtttgtctctacagttgtgtgtgccctgtggcactttcacatattaagatttgaccccaccaccccccaancctgtgactgatcc

SEQ ID NO: 456683 - DNA, 648 bp, Homo Sapiens
aaccatccgctcccaaccatccgctcctggcctttccagctcggcttcagagggcctggaaattccgcccttcatctggtaagctgagccctgttgttggggaaaggggggccctgcaggagcaacagatgtccctgggcttcatggacagcagctgcccccaacccccatcagggagctctttgaggcattctggttcttgcaagtgtgcaccacttgtatgtgtgtgcacgtgtgtatgtgtaccggggagacgaggacactgagatggttcctgtgctgtgaggggcgatggttggggttgggtgtgtgtgagaagatcccgtgaggcaagctggctgtgcagtttaactgtaaagtgctatgccaccgttgacagcactggtaatgttccgagagaccaggggagccactcagaggacagggaagagagaattctagcttcctctgccattcccagatgccctacatacccagtgccactgcccccgccccattcccctccataccaggccatgccagcaggggcagctccagtgaggactagtaatccaggctaaattaagctaagagtaagcaaacatcaaaagccacaaggtttgaaagcatgttgtttaaagcaccagagaaagctctgactatctcttt

SEQ ID NO: 456684 - DNA, 523 bp, Homo Sapiens
tgaagaagctttatagatgtgtccgttacacttcatcacattaaggaaggaaattgtgtgatacagggattttgcaagaattaccaaagttctctggatggatccctgatgagggcttgacagtgcctgtcctcgaaatgcaggttaaccgctgtgtcctttgttagaggacttggccccgcactaagcatgctgagtttcatccactgatgttctcactcatgtggagagtatttgtggtgcatcctgggaaacgcaattgcaggtagctttctgagccgactagcaatctaaactgagcccacggtgatgagattttcttcaacgccactctttgggatgctgctgccttgtgatgtaatggggcagggaacccttattgatttatagctgcgactctggatgcctcagtcccgaggagtcctcagcctggcatgctgtacgagccccttcacctccacggggtcagagatctggattgtatcatgaccctgccattgtgcgaatcacactgtcttcttct

SEQ ID NO: 456685 - DNA, 523 bp, Homo Sapiens
  misc_feature (12)..(12): n is a, c, g, or t
  misc_feature (21)..(21): n is a, c, g, or t
  misc_feature (43)..(43): n is a, c, g, or t
tgaataacaaanctggaaccncttgacccccgtggaaaggttnaaggggccttggtcctgcaatgcccaggctggaggaactcctcggggacttgaggcaattccagaagttgccagctttaaaatccatcaagggttcccctgccccatttcatccacaagtccagcagcatcccaaagagtggcgttgaagaaaatctcatcaccgtgggctcagtttagattgctagtcggctcagaaagctacctgcaattgcgtttcccaggatgcaccacaaatactctccacatgagtgagaacatcagtggatgaaactcagcatgcttagtgcggggccaagtcctctaacaaaggacacagcggttaacctgcatttcgaggacaggcactgtcaagccctcatcagggatccatccagagaactttggtaattcttgcaaaatccctgtatcacacaatttccttccttaatgtgatgaagtgtaacggacacatctataaagcttcttcagcctcgtgcca

SEQ ID NO: 456686 - DNA, 566 bp, Homo Sapiens
ctgatggggctgaggactgagcctcatagtggggactagtgccctgatgaaagaggcctcagagagcaccctcgcttcttctaccatgtgagcaccccgcaggaaggtgctgtccaggacccagaaagtgggtcctctgcagacaccaaatctgctggcaccctgatcttggacttccagcctccggaactgggggaaagcaatgtctgctattgatgagccgcccaagctgcggtgctttgttgcagccccaacaggctaagtcaggaaccgtggacaggagacctcccaggtagtctgctcggaggggggatttgtcgtgggggaattggtcattgtgcctcagtttccccaatgttggggaagtggtgcccatggccactggcatggcccccccgggggccagcacaccaggtaggaagaaatgcaagccccaggctgctgagatgcacagagccccacattctggcttcgggacgtctgtctagtcccttgtcttacaaagggtgggcaggtcccctgcaggactcagcagagggagagacacagtcagggagcgggcacga

SEQ ID NO: 456687 - DNA, 455 bp, Homo Sapiens
gggatgttgtaacacaaggtcattttcttcaatactttggggttctctgtccattcttattttcagaagaattttgatcatttaggcatgtgtgcaaagaatgatgttggtgaggctcagattcaattgaaacagcaatcagtgagccactagtggcaccaagcacatttgattcgctttcagaggtgggaagctcgagaatactctgagcagaaatggcagcaggaagacaaagaggaacagcctggttggtagccaatgcaggaactgtggtctgatgccatggcttgttttcagaagggtaaactccagaaatagatacaggagtcacaagattgcaagtcctctgtactggcaccacattggcggtctgcttttgtaaattatgactaacattaaaagttatcccctgaacagctgttccctggctgtttccaccaggctgattcccgttg

SEQ ID NO: 456688 - DNA, 395 bp, Homo Sapiens
caggcctgggctattgcatatccgaagatgcccagccagttgagcctttgaaaacatcagttcacattactctccttctgtagactctccagaggctcacagttccctcgagagcccccttttcactctccctctctcctcgatcccactttagccacctttccctcttgccttttctcaagtactgccccctctgggtctgtccctggcctttccctgtgctgggacagcaacttggctccttcctccacccatttgagcctttgctcctatgtctccattcacgccacagcagatctgcctgcctcacctctcctcgtggggctgccaccctcaacatcgtacacctctgtgccagcctcgtggctatcctcacttcccacttcacacagttt

SEQ ID NO: 456689 - DNA, 631 bp, Homo Sapiens
  misc_feature (192)..(214): n is a, c, g, or t
taccagaggacggcacttgtggtgtgaagaacttgcaaagggcacagactgagctcttctgttaagaggctgccattgccagagggtgtagatggattggagctgctcaaagccactgacagtggcgggaggtggggaatggcacgaggatgtaggttggagctcctctgaatggctgctgggttcctgtgnnnnnnnnnnnnnnnnnnnnnnngagatccagaacccccaagagagatatactcctgttcttatggccttgcagggtcactttattgccatctgctgacatccaaagttaacattctactagctggccaaagagaattgcttacagggtccagcttcagtatcacaaagtagggcaagaagagtagatctggagccaagagacactataacttgataactggcacacaatgctttctcccctacaaatgtagtcactgcttggagtacaatttcccactcttttcaactagttatttcatgtgatttcagatgagatcattcagatctcaccttaggtttacttccttggggaattctttcttgatatccccagcctcaaatatgcgttacagatttcagcacactatatgctttctttcctaacaccacgtctcgccta

SEQ ID NO: 456690 - DNA, 261 bp, Homo Sapiens
  misc_feature (47)..(47): n is a, c, g, or t
  misc_feature (94)..(94): n is a, c, g, or t
  misc_feature (101)..(101): n is a, c, g, or t
  misc_feature (208)..(208): n is a, c, g, or t
  misc_feature (215)..(215): n is a, c, g, or t
atcgcttcaagtccatccgtcaaaagccgatctgttcgtagagattngtaaagccggctgcaaggtttcactagcgcggccaggccatgcttcnttcgcanacatcaagcgattctgtcagacgttccggtgtcagattggatgcgccgattgcacggactttaccggccttgatcagctcctgataggtgccgagaacatctcaacnggcgttntcgggatcatcccagtgcgactggtagagatcaatagtcgtggcag

SEQ ID NO: 456691 - DNA, 577 bp, Homo Sapiens
aattaatagaattctagaatctaattaaaatggttcaactctacattttactttaggataatatcaggaccatcacagaatgtctgagatgtggatttaccctatctgtagctcacttcttcaaccattcttttagcaaggctagttatcttcagtgacaaccccttgctgccctctactatctcctccctcagatggactactctgattaagcttgagctagaataagcatgttatcccgggatttcatatgggaatattttatacatgagtgagccattatgagttgtttgaaaatttattatgttgagggagggtaaccgctgtaacaaccatcaccaaatctaatcgactggaatacatttgacgtttatttcttgttcacctggacagttcagtgttacctaaatttacatggaggacccgggggcccacgttccttcatttggggctccaccgacctccagggtttcagggccctctgccccgccttctgcacccacaggggaagagagtggaggatgcacacgcccaggcctggaagtgacgcatgtggcttccccgtccacagacttcg

SEQ ID NO: 456692 - DNA, 397 bp, Homo Sapiens
  misc_feature (356)..(356): n is a, c, g, or t
  misc_feature (365)..(365): n is a, c, g, or t
catttagtacttatcacaacctatttacattttctatataaacattgatctcattagactgtgatctcctagaggaacaagtcccatgtcattctcattgacaaaatgaacatggcagatacttggtaaatgtttgctagtaagtgaatggaagtcaggcgagttggcttggtgatggcagctggggtgttgatggaaataccgtgcttctttttggacatgatggaatttggggatgtggtctatttgttagatgcagtttctaggaagagattacccaaagaactgaagaacaatgacaaacttatgtgtatgtgagggcaagataaagagtagagagatggtatagttgggtntggagagantgctgtaactgaactgctcccttcaagatgtc

SEQ ID NO: 456693 - DNA, 582 bp, Homo Sapiens
aagagaagcgcagccagttgaggccctccagctggtacgggtgcagtgtgccgcctgtggagtcgatgtaccatggctgcttgtcgaacttgaccgtggggtccacaatgggcgtgtccggcggcttctcctgcttgtcgtccctcagcttcttgcccttcttgagcagcctcttgggcagcctggtgtcttctcccagcatcagctccctgtggccccagtaggcctgcttgaggttgtcgtagtaggggatgtcgatgtcatcgatctcccaggtgcgctggtcgtagggcaggtctttccacttgatcaggtagtgcacatcccccttcttgtcaaagctatggttcaggattcggtggatcatcatccactctggcttgatgccgtagcggtagaagcgctcctccatcttggcatagagggggtccttgttcttcctcttctcgctcttgccgtcttcatccccagagccgtagtcaaaggggggcggctcatccatgtcgttctttctttggtagttgcgatacatcaccgtgtggtacagctccagctgtagctccttcacccaggagcaatgcc

SEQ ID NO: 456694 - DNA, 285 bp, Homo Sapiens
gagctcggtacgggatctctagagtgacctgaggatgaatgatgacatggcgtcgtatacaacgtcgttgatgtgagcaaacaaaagacaataagagagatgggttatacgttattcttgcttactgccgtgggtaaggtcagggtataacaaagtaagaagtaactagagaaagctatggattattttacatcaggaagggcttgcagtgcaagtcctgactcttgtcaccagtcatttctacatcctactccagcctcagaatcttatggagaaaccagtctc

SEQ ID NO: 456695 - DNA, 603 bp, Homo Sapiens
  misc_feature (35)..(35): n is a, c, g, or t
ccccagacccgattggaatggaagaatttgccganctgggagtctactcccggggaacttgtttctcagcgactccctgcgtttgcccaggggctgagacattctttattcgaagtatcatgttccagtcctctatctcctactttctcatgtaacttatgtgcctcagtttgctcatctgccaaataagaagagtaacacacctgcaccaacagcgcacacagaaactggaaaagcccaaattgctgttcaaaaacgagggatgatttcatcagagagggtttccatgaagcccttcttccacctcagcttccacacagacaagtagttacttttttctttaatcttactttttaaaactttctcctctcctcactagtgcttttagacgccagaaaattctccctggtgcggaacagtttggttcaaatcctgactctgctacttacactgagacctgtgtgaactcttccagcctcattttccttatgtataaaatggatatgatcatatccacggcgcttgagggcgtgccatgctgccaggccctgtactagacttagttctgcatagtaagagagcaaccgaccgacctgctcgtcg

SEQ ID NO: 456696 - DNA, 144 bp, Homo Sapiens
ggatggtttccgactcgatcttcagagtcgatattggcatcggccgtgatgcgaggggcactcttcagtctccgggggaacatcccgagtcggtctgggatggggctgactcgctgactgaggtgggaggggtttcatcacact

SEQ ID NO: 456697 - DNA, 874 bp, Homo Sapiens
  misc_feature (61)..(61): n is a, c, g, or t
  misc_feature (74)..(74): n is a, c, g, or t
acaagtgcaaagggcggcagcactgccctcagctggttccacgtcaccaaagacttcatgntcccaactctggnaattcatcttcattttcaaagtttaaacaaacacaatcccaatgtttaaatgctccacaatcacttccgtaactaatattttgaatactacagtacagatgttgaaggtgacttttaaaaagtctggtttttcatttagctctcatgagatgtgattatcctgaaagctactaattcaggctcaacactttggaaattcaggtaggggccgactgttcagtatggtgaggctaattcttccgtaggagatggcaagtccggtttccaggtaggtattaaaaaccacacagaaaccactgctgacctctgggcaacaaccctgcctgtctgccctccacactaatgaccctagacccctaggaacccgtgctatgggggcgtgggaagcccctctgcagcccggtctgagggcatatgcaagcgaggctaagggcgtcctgcagggagctctggggtccgcgctgtgctcctcacctgctcatctgttggcttacagaagcaactccacccaaggtgccacggatgtggaaccaaggactgcaaagcctttggccatttggagtttaaggggctttctccacgtttagaagagcagtgacacagctgtgccacacgacaagggagcggtgtgcgtcttccgctcagtccctctgtgtgggtggcactgctcactgccccacaggccctcagcgtagcttggttcctgggcatcaggttgcagaaacgcagagctgggagggggaagccccaaatgcaagagaggtcaggtcagtgctccttctgggtctggtgctggcgga

SEQ ID NO: 456698 - DNA, 399 bp, Homo Sapiens
tatgggacgacagttctcagcttctcagttggttcaagctcccatgagaatctgatgtggctgctgatctgacaggaggcatagctcaggtggtcatgcgacgccatagggatgccgctgtcaactggagaagaatcttcgctcgcttgccctggcgccccctcctgctgtgtggcccagttcctaacaggccacaaaccacaatctatcatgaaaaactggtcttcctacgatacataaaattgtttctctatccctttcgagtagtgcaattggtctaaatcgttttagaagtattgatagaagaaacaaataggacaatcattagtttccaaaactttaaggagcgacactgtttgttggataattgtgctacttatattatattacccaatagca

SEQ ID NO: 456699 - DNA, 490 bp, Homo Sapiens
cctcgccctgtgagcagcagcattgaccccagtctcctcagcaccaagcagggaggccttacgccttccagactgaaggagcctaccaaggtagccagtgggcggacccctccagcccctgtcaatcagacagatcgggaaaaggagaaggccaaagccaaggcagtggccttggactcagacaacatctccttgaagagtattggctccccagaaagtactcccaagaaccaagcaagccaccccacagccaccaagctggcagagctgccaccaacccctctcagggccacagcgaagagctttgtcaaaccaccctcactagccaatcttgacaaggtcacctccaacagtctggatctaccatcatccccgtgataccacccatgcttcaaaggtcccagatctgcatgctacaagctcagcatctggggccctaacccttccggcttcacccccgtcccgactaacttggtccgagctcgatcga

SEQ ID NO: 456700 - DNA, 463 bp, Homo Sapiens
cggccaagtagtgggacgaggcagtgccttctggtttctggcaggacgggcagtgctggaagtcttcttcagtcccctcatcttctccctccttgtcgctgtctgatgagagagccggtccaggagagagcattgatggggcctggtgccggttgggtccagaagccctttggggagaggatggtccttgctgcttgccgccccgctgacgctggcgcaactcggccagacgctgcctcatgctgatggtcatctcagagctcaggcgccacacaaatatgcagctgtccccagacacagagatgagatgtttacaatcattactaaatttcatgccagtgacaatctctgagtggccaaacatggtggccacgcactcgcctgaggagaagtcaaaaatggagagattcttgtcagaacagctggtggcaatgtagatccctgaggggtctgtctgcacctt

SEQ ID NO: 456701 - DNA, 548 bp, Homo Sapiens
gtggacaaatgaccccaagacagaagagcatcaagtcatacataggccgtctcgttggccgggtggaagggacgaattggagccccaggcctggacagctcttctctggctggaacaccctcagatgagacactggccactgaccctcttgggctagccaagctgacaggcccaggagacaaggaccgaaggtacaagaggaagcatagaactcgtggagggaggcctgtctgccagggcctacctatgtgctgcctgggacggggccaccgtggtgtactggctggagctgtgggtgggcatgcctgcctggtatgtggccgcctggcggggcaatgtcaagagctgtgccatcatggccaacctgtcagacacggagatccagcgcgagatcggcatcagcaacccgctgcaccgactcaggctacgcctcgccatccaggagatcggtctcgctcacctcgccctcagcccccgcctcctcccgcacttccacaggaaacgtgtggatgacacaacgaggagatggagtcccttacgtcccactt

SEQ ID NO: 456702 - DNA, 367 bp, Homo Sapiens
caagttaaatcgggtccgcaagggaagtcgggacggaggaaatgcaactgtaaggatctcagttctactacagacctttttcgatacaagaaccctatgaaagccagcaaatgaattgctgctcctattactctttagttttctgaagcccataaccattaatccgatgagtaagttcatagattacatctgatggcaactgttcacatctcctgaagtggagtgatgataccatccagcccacgtgcctcacttcaaagtcagccctgcttaatctataaagattttcctaatacacgcatctgtcgcttcagaggtgtaagagctctaaagacagagaatgtataacatgtaagggaaggatatt

SEQ ID NO: 456703 - DNA, 444 bp, Homo Sapiens
cagttaagtcgggaccgggatgtaaacgcttttcgtctcagaatgagcaacagaaatgtatttgattttcaaaagccctgaaattctgtcaccccaggaacagagctgagtttgaagaccccctctctcacaaccacctaacttcctcaacaccggagaccaagcactgcttgtatttccctttaacagtgagccctgagccttaagagatagtttatgaatggtatacagcccccagcgtctggccctcatgaactttaccccaaggccaggaatgagggattaatcatagcatcaggatacgcgtggttctatctctggatgtggttattcaatggccaaaatcttgtccaattctatctccatcaaacttgctcaggaatactcaaagtctaagacatttgattccagttgccgtcccgactaacttggccgagctcgatt

SEQ ID NO: 456704 - DNA, 561 bp, Homo Sapiens
ggttgtctatcttcttgaatatcatcatgcctcttcctgggtgggggtgaggatgggatgttatggagtggcaggctagggcaggtagggagaaaacatgcgaaagatgaagagataagccaagccagattcttcagcagaaaaatcaaggttgaaataccatgtttcaaaaatcagactgaggtgggatttgaggttaggggtccctagtccaggggattgaagcttcaaagaggatgttcctagagcttaagcaagcacagagagtggcagagaggtccctggtcatttttccacagtgccattctagtgctggcaagtccacctttcattgtccagtcaggtaagcgtatttgtggggtgggagaaagtacatgggccataggctgggcacacagccctttactggcccttatctctcctctcttctcctatacagttctgtttccgaactgtacagtggctgacactcgggctgaggtctgggaaataggcgccatgttgaatatccctcgaggaagaacagtgtgtcttcagcacgtgccacacgtcgcccatcac

SEQ ID NO: 456705 - DNA, 500 bp, Homo Sapiens
ctgatgatgatttccagtatgcagaagacacagattgatcgtgttgtccaaggtccaggagatacagaaggaattggtttccaaggtccaggagacacagatggatcaggtttagctggcttccaaggtcctgatgatgctgaaggattggatttccaaggcctaggggacccaggtgtccctggtttccaagagcctggtgtacacagcgggggctggggtcctagcctctggggagcacagcagggaacggcttccaaggttcaggagactctgaaggggatggcttccttggctcaggggaggtagtccgggctgacttccgagattctggagatgcagctggggatggtccccaaggcttctggggaagcagctagaactggtgactctggagatgaggatgaaggtggccccaatgtttccgggaaatgagactgcttctgggtttgggattactaagagtgagccttactgcgtcccactacgtggggccagcc

SEQ ID NO: 456706 - DNA, 362 bp, Homo Sapiens
caggctgagtcccacctgtccagctgacgtcacagcctcttgcttgaattggcatgggcggtgggtgtgagcccctctggtgaggacagcgttggcagctgctaggcactgtcccccttgggcagctgtgggagcagagggaagagagactgggggtacccgcctttccagatggagcgggctgctcatgggacttagctggagtttccaaggagactgaggtttgggcggtttctgtgagctggccggatgttgctgcagtgcctctgcgcgctctctggcctctgtgcccttattatgtgtaattctgttctgcaccgccctgtatgtgtaaacgtggcaagttccgtcccgactaactt

SEQ ID NO: 456707 - DNA, 405 bp, Homo Sapiens
taatcgagtcggtaccaagttagtcgggacgggaggtggaactgcaagtgttctgaaagatctctcaagcagctcttctcagtagttctgggtgggggccaagatcttgcctttctaacgaagcccccaggtgattaataagctgccagtctgcccaccgcacactgggtagcaaggcacagagagtgccttcacaggttttttcaaaatccccacctgttcgagcattcagcggatactcgtaggatatatctatattctttctggagtttcatccatcgctaaggcaaaatcaggcaccactgcaaatattttgttgctttttgaagaagtatgtgatccaacatccttctctcataaacaaccttctggggagctcagggatttataggcagtgtgaggaac

SEQ ID NO: 456708 - DNA, 562 bp, Homo Sapiens
ggacacgtacgtgcaggcgcaggttcttctgtgccgtgtgctgaagtggcagtactcacaggcgaagggcttggcccctgtgtgcttgacagccacatgggacagcaagaagtcctctcggaaggtgcggtagggacaaaagctgcatttgaagggcttgtcactgacgtgggacaactggtggttcagcagtgccttcttgtcttcacaaacaaactcacagaactcacacttgaacctgcggttggcaacagcctggatgtgcgtgagcaggtgcattttgaaggtgtagcgcttcttaagaggactttccacacttgtcacacatgtggggcttctcagtgctgtgcgtcttcatgtgctgcgtgagtcttttctgcatggggtacacacggccacacacagggcaggggaaagagctcggctttggagtctaggaaggcataagaaggggccagatggagaaagaagtggaggagggaggataaaacctcccctcttgtcctcacccccataaacaacccccgggcaggttcccttcccaggccagcacgccagactc

SEQ ID NO: 456709 - DNA, 490 bp, Homo Sapiens
  misc_feature (424)..(424): n is a, c, g, or t
agcccaggagtgccctcaaagtcgccagggcaaaccctgaggggcaaagctacagaccaagggtaagccttgcagtgaagaatactgggccccaacgctcctcctctgatgctggtcgggaccgcactgagtgatgctaagaagcccccctcgggcattgctcgcccctccacttcgtgatcctttggctacaagaagcctcctcctgccacgggcacagccactgtcatgcaaactggtggttcagccactctcagcaagatccagaagtcctcaggcatccctgtcaagccagtaaatgggcgcaagactagcttagatgtttccaacagtgcagagccaggattcctggctcctggagcccgttctaacatccagtgccgcagcctgccccggccagccaagtccccttctatgagcgtgnccggcgggcggggtaaaactcgccctgtgagcagcagcattgaccccagtctcctccgcaggctgt

SEQ ID NO: 456710 - DNA, 664 bp, Homo Sapiens
tgatctcagtttgcgggacgtatgttttcaccccctcttcacgtggtgtctcagagatgttctgaatttggaggaggagacactgactggttatttttacaggcggtgtttctggtgtcatatctaagaattcatttctgaatccaaagccgcgaagattttcctctgcgatgttttgcgtctcggtctggggtcctcttgagtaaccttccctgtggggtgtgaagcttgtattgaggttccccttgtggtatgtgggtgtccgggtgtccgactgtcctcagcatcagctttgcaggcgcgcagcgttgcctcggcgtcgtgactgtgccgtgtgcgggctccgttctggaaccttcctccgtcccactgctgcacgtgtctgtccgttcccgcggcagagctggctgtggtgagaagcctccgacttgggcgccgtgtggaactgtcggggccattctggtgttgggctgcctgtgtgtgaatcttagactcagcctgtccttgctctgttgtcctgtgggaacgtgtgttggactctgacgtggtggtgagtgctggtcccgggaccacgtggactgtggcccccaccggcctcccgtggtgcacgctggagcgacgtgttcacttttgccatcccgtgctgagcttctcagttctgctt

SEQ ID NO: 456711 - DNA, 436 bp, Homo Sapiens
aattacgaatattgacatggagccatgcacggtagacccccagctaaggattattcttcagtggctcattgcctctgaggctgaagttgcagaactttattttcatgactctgcaaataaggagtttatgctactttcaaaacaattacaagagaaaggatggaaagtgggagacctcctgcaggctgtgcttcaatactatgaagtgatggaaaaagcttccagtgaggagagatgcaagtcgctgtttgattggctcttggaaaatgcatagagcaaaccccaaaccagtatattttagtatttgtttggggaggggaacatagccaataaagatgtttaggataaaatttgaatagtgaatattaacatcgtaagtcagttgggaggcaagtaaatatagcttagagcgcttgtgtgtatcactcgtcccgaa

SEQ ID NO: 456712 - DNA, 472 bp, Homo Sapiens
ccagtttttgggacgtgtggcttctctgcacgacatctggctggtctaccgcctctgtttccaatactttgctcagcgtctccttaccctctgggatggctggcgacttgagactgttcttgtggtttcccgaatggtcctcgggtgtagtctgacccaactctccctcgagagtggtctggcctgtgtctgtggtgacactgatgctgatgtcaaggctcctctcgttccctgactcccacggcgtgtgttctgaggacagcactcgccgttgccagcggaagtcagcctcattgatctccatggaatctcggctccactcagccccatccttcagctcctcaaggcgcagaagcagcagttgcacctgaccttcgctcaagcccttcccctggctgagctcatccagggcacccagcaaggtgcagacacaggacacggctgcatagcaagcttcgatgccacccttgat

SEQ ID NO: 456713 - DNA, 544 bp, Homo Sapiens
tctgaggaaaccatcaatgcgacaaaaagaaaacacgtgagtcctatgggactgtctgtgtgagatggagaagacacacagagggtctgggcacaggacacacacacgctggagtgtgaggcccacccatcaaggccgcgatgccttcctgcgaggcctcccacaccggagctcaagctctgtgtagctccaagttccatggaggggcctcacccctgccttgagcaactgggaatgtcttcggagtgagctcaggttcccataacgcctttgaggagtaacacgctgattcaggagggtgttccttttagagagtgaatttagacgatagtcattatgttttggtcacagtcatgtagacgggccttggggcgcacggcagtcggggctggcatcctcctatcaaagctgagctacaatgaaccgcagcatcccagatttgcctctgctttgccatggggcctctgcctgcactatcatcctgagaccagtaaagagactgccagtcagtctgtcccattgtgacattggaatgagggccgag

SEQ ID NO: 456714 - DNA, 600 bp, Homo Sapiens
ctcagtcacatgtcacaaggggcctctgtggggccgctctggtgaagtccatcaaatcaggattcatcccgagttacaacacctctgaggcctgcaagagggctacgccccagcaattaccccacggatctatctgcatgagctcatgcatgaagcctctcactgatttgctatttgtaacaacggcacaaggctggagagaggctaaatgttctttcatatggcatgtcctcacacagatctcctgacacaggcatattttcactaaaacaacaaggcacacagcaatacaatgtgtagcatgactttgtgcaggaaaggggcaggagaggaggtgccacctagtgttctctgcaggatgtgcaggcgacgctgcagcagcagctgcgtgtttctctgggatcctttggattgttatgctccacaaactcagaaatacactacttatcccagaggcactggctggccatgtctctggttctggggagtaagggaccagcccagctgaggacgcggtggacagcccagggaggaggagcactcactgcaggaagagcttcttcatcatgttgtgacatgggcgtgaggtaccgagctcct

SEQ ID NO: 456715 - DNA, 472 bp, Homo Sapiens
gggcctcacgccatgtcacaaccagccaaataacgaactaccttttctagatccggctcacgcagagctaatgctagttcattattatccatcaccgaagctgcagccagatccagtggtgttgaacctctcatagctggggaggcaagaccaacactgctgttttccagtaaataactgagatgatcaaacatagctttttgattctgcctacttatacgacagaagtaacagagaaaacggcaacagttggccaccatcttgggaaaggtgatttccttggactctccacctccaaggacgttcaccatgacctccatcacagtctcgtgcatccccagtgccctcatgagattaggctgctggtaaaacactttgttattcataatatcccctaatccacgaatcatgagcttctcttcttctttgcccattctcacactcagcagggaccgaatctgaccaagggatg

SEQ ID NO: 456716 - DNA, 390 bp, Homo Sapiens
catcatgagaaatgctgctatgactgtaaataccttccagcttcctctcattttatgctcagattcatttcagtccaggtaggtgcaactataaaaggctctgattccttggagcatcttcacttgaggcatcgatccccacttcatgtgtatctttgattctggagcatgatggctgcagaagggctggtgggtcttacttctggccaggaaagactcctgtttgggggatcatgcttcttttggagtatttattgaaccctgagttgaatttttaaattgccactgccccacagtgacaggaggagacatgtaagactggtgaagttttagaagcattccccagtcatattcaggatacacggacagactctgccattggtgtacatt

SEQ ID NO: 456717 - DNA, 174 bp, Homo Sapiens
agctcggacacctcttattcactgaacactacatcagatagtcacgttcattttgtttcactcttcacacatacttttaaaaaaactcatgagaggggcagcctcattgtattgtagtcacatcatttactcataccatgttcagggtgttatagttgtggcacatgggcgtga

SEQ ID NO: 456718 - DNA, 450 bp, Homo Sapiens
ttgttcttatagaccacgtccttgaggcagcccatgaagttgttgctgacgggcgagcccggcaggtcagctgtgttggggctgcccccaatgtagaagaagtcatcagagcccagcatggtgtaatcctcctgcgtgtagcctgtggtggtcaggatcccgtccaccgagatggtcaccatagcgtgtccaatccctgcgtgctggcgcaggtttcgggtgacccggacgtcgtgccaggcgttgtcgttgaacttgccattgacgggttccacaagggcctcgaaggcacctgagcctaggttgatgaccagccagacagccccagacttgagggacaggttgacgtagtcggccgacttgcctgtatgcagcatcaggccgttgcgttgcagggtgcggaaggccagtgtgatctcatcagtgctgctctggatgaggtcgtgacac

SEQ ID NO: 456719 - DNA, 413 bp, Homo Sapiens
cgctggagcagttcttgaccatcctacctgaggagctccagacactggttaaggaacatcagctagagaacggagaggaggtggtgaccctattagaggatttggaaaggcagattgatatactaggacgaccagtctcagctcgcgtacatggacatagggtactctgggaggagttagtacattcatcatctgcaccatgagcctctctaatactcagctccaatctgaggctacccaacataaatctccagttccccaagagtcacaagagagagccatgtctacttctccagagtcctactcgttcccagaaaggaagttctggagaccatgtaaatgtacagctacacttctcacagcagggttccagtactttggagaagattgtgacatgagtgaggccgacggag

SEQ ID NO: 456720 - DNA, 474 bp, Homo Sapiens
tcaaggatgagattgacgggcaccaagacagctaccagcgtgttaaggagtctggggagaaagtgatccaaggccagacggacccagagtatctgcttctgggccagcggctggagggcctggatactggctggaatgccctgggcaggatgtgggagatccgcagccacaccctcgtctcagtgccttggcttaccaggagttccacgcaaagatgccaagcatggctgaagccatccgtcagcaacgcaggaatacactcgtggctcacttggagcccccagactccctggaagctgcagaggctgggatccggaagtttgaggatttcttcggggtctatgaagaacaaccgggatacgctcttgagtcctgtggactctggaaacaagctggtagctgagggaaacctatactcagacaaatcaaggagatagtgcagctgagttgtgacatgacatgagggcccagcct

SEQ ID NO: 456721 - DNA, 443 bp, Homo Sapiens
ggggcccactgcccatgtcacaatctcgctgtctccagtggccaagaacggcgtgctgcgactattcactgagatggagccttttcgcccatccctctggaagtccacgtgacaccactcgccatcattgaccttgcggctggatgcccgcagcttgatgcccccagatcccatgtccagcagaagatagaggtggccgtccaatagctccatggcaaagtagtcggcccgctgagcagagctgtggctgccagctccacccccagcccgccggccctggctgaagagcagcagcccattgggctcggtggtgcggaagtctagggagatggagccagtgcgcttagcgctccagcggggcagcgccacaaaggcctcgggactctcaaaggtcacagggtccagggcagccacatcctcacagcggaatgacaagtccccct

SEQ ID NO: 456722 - DNA, 351 bp, Homo Sapiens
agaaaattcaaagctgcctgggagatgcatggcagagccctaaacagattgtaaaggggaggagaaaaggtcatggcaaagtcaaggatgactggagctccctgcctggggaaaggatggatggctgtgttttagttgccaaggcaacaagcctcaatggcaggcagagaggctacagagtccctctctgggagtatcctgccctcagttgcgcagcacaggcaggtcttcttccacctggaagtacaatatgctgctctgctactggaggtgtgtttatcactgacaagactcacccccaagtatactggactgcagtagtctgcaatcatgctacagaacatgtatttc

SEQ ID NO: 456723 - DNA, 471 bp, Homo Sapiens
  misc_feature (137)..(284): n is a, c, g, or t
gtctggtcaactgaggccctttgttaaaatcccagaaagatgtaaggaattgcttctcaaagcctcatggtgaggtagacaaacaggcgtctgaaagaacaggtgtgttctcacacagcaccctgacatgcaccccnnnnnnnnnnnnnnnnnnnnnnnnnnnnnnnnnnnnnnnnnnnnnnnnnnnnnnnnnnnnnnnnnnnnnnnnnnnnnnnnnnnnnnnnnnnnnnnnnnnnnnnnnnnnnnnnnnnnnnnnnnnnnnnnnnnnnnnnnnnnnnnnnnnntgttcaaaacaaagccactggtctcctaaccatttactggcaggaaataggctgaggtaactatttggctgcaaatcagggtttttgttgttgagataggtgtctcctccgttgcccatggctcggagcacaatggcacaatcacaactgcactataacctctggcctccctggagtagcgtaggac

SEQ ID NO: 456724 - DNA, 248 bp, Homo Sapiens
tgaatcccagtaaaatccacagaaaactcacaatgtttttaagagaactgaactaacacaagcaccactagcttggactaaaatggacaaagactgttcaaaacaaagccactgggctcctaaccatttactggcaggaaataggctgaggaaactatttggctgcaaatcagggtttttgttgttgagatagggtctccaccgttgccccccctggagcacaatggcacaatcacaactcactataa

SEQ ID NO: 456725 - DNA, 375 bp, Homo Sapiens
  misc_feature (52)..(199): n is a, c, g, or t
cctatttcctgccagtaaatggttaggagcccagtggctttgttttgaacannnnnnnnnnnnnnnnnnnnnnnnnnnnnnnnnnnnnnnnnnnnnnnnnnnnnnnnnnnnnnnnnnnnnnnnnnnnnnnnnnnnnnnnnnnnnnnnnnnnnnnnnnnnnnnnnnnnnnnnnnnnnnnnnnnnnnnnnnnnnnnnnnnnggggtgcatgtcagggtgctgtgtgagaacacacttgttctttcagacgcctgtttgtctaactaaccatgagggtttgagaagcaattccttacatctttctgggattttaacaagggcctcatgttgaccagagccacgttttactgtggacatgggcgagaggtgccgagccc

SEQ ID NO: 456726 - DNA, 640 bp, Homo Sapiens
cgcctcacgcccatgtcacaaggataacaaccaacattttcagagcacttggcaatttacaaaatacatctgcctgaaggtacagcactaccagcctcattttacgtgtgtgaaaactgaagcacagaagaattgggtgacttgtcagacgctgcataggtggtcagcattatggtcttcatccctccatcaaccttaatcacatactgcatgtgaccagcaggaagaggggtcttgagaataggaggggagatcaaagaagacatcgtcgtctatttgacatcaaaactggccagtaagtgcacaagaaatgagctgggttacctggaacctaaccttgggaagatgatctgtcaatggagctgtatgtctgtgtgagactggattttcctcatatactgtgaacaaaacaacatataacagattgactgcagaaacaggtcaagcttgtctaccaataaggagaggcacaggtacgggacacttttgaagggtttgttcgccttcagacaaacagcagacacctccacgctttgttttccacgcgcagagatggctagactctctttttggtcccagggagtggagctggctcgctctacacgctgcttctcacctgaggatatcagtggagagcccc

SEQ ID NO: 456727 - DNA, 629 bp, Homo Sapiens
agctgttctagaggatccctcagccagtcacaacatcaggccccccttcgaagagtcccaatttgctttctgctccacaggccagaggggcagcttggctgtatcctaggtactgattgcactgtcctcccacccactgaggtccaacaggaagaaaatctactggcaacacccacttgttgcttggataccgcttctggacaaacgcaacgctgcgggtcacctggtctaccatgtggtccagggtgcctgcacagagagcatgagctgggtcagggatgcacttcctcctaaagcccaccggccctcggacctgcagcaaccactcctattacctttgggggcgatgccgtaagccactattaccacggccactccctgtgccgtcagcgggtggaccatgaaggcagactcatccttactgcagagacacacagatgtgacagctggaggcagcttggccactacgctgcttcctgtgtcctggacacaccacttgccagatgtcctgtccacgcacagcatcacccctttctggtcccatgtgagagagtgaagcggacaggctctctccctgccacatcacatgctagctacgggaccttgggggaacttcatgtaactttttg

SEQ ID NO: 456728 - DNA, 448 bp, Homo Sapiens
tcgtcttgtggacaggagggaacggccactagaaggtggccgaactaattccaataacaacaacagcaatccatgttcagaacaagatgttcttgcacagggtgttccaagcacagcagcagatcctgggccatcaaagcgcagaagagcacagaggcctaattctatggagcccacgagccacgcatgtactggatcgcaggtacgtaaccacaagtgttcactcgcacacggccacaacccaatatgccaatgggacagtactatctggccaaacaaccaacatagtgacacatagggcccaagaaatgttgcagaatcagtttattggtgaggacacccggctgaatattaattccagtcctgatgagcatgagcctttactgagacgagagcaacaagctggccatgatgaaggtgttctggatcgtcttgtgacataactgat

SEQ ID NO: 456729 - DNA, 450 bp, Homo Sapiens
gctccagcaccagcagctccaggatctgttccttggtgttcaaatctggcctcagccactgatggcaaagggcccgtagttggatcagagcttctcggggtcctagtgtctcctggtagcgtaactgcctgaagcgcaggcggaacacttcttggccaagagggttactttcatgcagactagattcctagtcccaaccatgatcctcctctaccttgacgattacaagatcctcttcaggagtctggtctggtggggatggggctgaaggctttcttgattcttcagccattagagcctgaaaagctcaggaagttcgtttccactaccttctttatcttcttcagagccgactcttctgagggcctctttctaagggtacttagttccccatacggatcatcaaggcagtgctatcttttcagtttttggagttgtgacatgaagtga

SEQ ID NO: 456730 - DNA, 542 bp, Homo Sapiens
cagatgtagtggactccatacagcaggagtgccctagcattgtggacttagttcctgagcaagactccaaattgcaccacgttcttctgagctctggggcctgcggacatgctcttcctctgcccaacatgcttgctccctctctcctcttttctctgactacttcctattcatccttgaggtctcagcttaaatattactcctctgggagcccactttgatcttccagactgggttaggtgccccttgtttgtgtccccacaattcccctggacttccccttgaaagcagtgatcacactgaattgtgttcccttgtttacttgtccatatcctctcatagcatccgtgcttcatgaggccaggtaccaggtctgctttgctcacatctgtattcctgctgtggagtaagttgctcagaagatgttggttatgtggttgaacctgtctgcttcacagctcactcacatactcttagttggcttctcagctgtgggactggctcatggttgtgtacatggcgtgagtgacctctagaacacc

SEQ ID NO: 456731 - DNA, 434 bp, Homo Sapiens
catgaagcacacattctgggtgaggagaagcagccaaaaagcttatgaaaactaagataaatatagtaacttcagattgtggaaagtactgtgtatacataaagcaggtttgtgtgatagagaactggcttcttcactattaaagtgatctttctgaagaagtgacatttgagctctatatatgaataatgaaaaaagtcaaagacatataaagatctaaggggagagtcttttaggcacccggtatagccaatgcaagggtacttgagttgaccactagcttgacaatgtactagagacagtaagacctagtactagcagtcacatcagtgtagtggctatgtgggtagaggtgaagttggtgccctagtcaggagctccaatcatataagacttccttgagtctaaatgggaagcattggagcattttaagc

SEQ ID NO: 456732 - DNA, 570 bp, Homo Sapiens
  misc_feature (302)..(513): n is a, c, g, or t
gatctagaggatccctcacgccatgtccacaatgactggtgatgagtgagtcatggtaatacagttgcttcagaccactgttgagtgttaaccctgtgagtccagggagaaggctctcctctgggattgcttccagtcctcatgttctgctctaactttatttgatcttgaatctgtttattttaactattgtggccgccaagattattatattttaatatagaaatgatccataaagatgcatttttatggcatttaaataatgctctgcagtggttgaatgtctcaggaataccacagannnnnnnnnnnnnnnnnnnnnnnnnnnnnnnnnnnnnnnnnnnnnnnnnnnnnnnnnnnnnnnnnnnnnnnnnnnnnnnnnnnnnnnnnnnnnnnnnnnnnnnnnnnnnnnnnnnnnnnnnnnnnnnnnnnnnnnnnnnnnnnnnnnnnnnnnnnnnnnnnnnnnnnnnnnnnnnnnnnnnnnnnnnnnnnnnnnnnnnnnnnnnnnnnnnncgacgagagcatgggtgctctgtgtataagggtgtgtgtgttttacgagtaggggaa

SEQ ID NO: 456733 - DNA, 286 bp, Homo Sapiens
cctgctggcacacacaaagagacgctgtaatagcagagcccttcactcaagtcattcattatcgctcattcatttaatgcctaacatatgaagggtacttgtgtggagctttgagagacacaaaaatgactaagacaggacccctgccctcaaagagcccagctgttccaaatattctcattttggtatgctccaatttttaatgtaattttaattattgttgtcacaccttagctaatattttcatactcaacatgtacttccagaaattgcagcaactatacca

SEQ ID NO: 456734 - DNA, 337 bp, Homo Sapiens
cgtcgcgccccttctcaatgactcacctgttgtcctcccacagacacctacccaccaggaaaccgctttcctgattcacatcacacaaattagtgctgtctgttttagatcctcataaaaatgaagtcatactgtgtatattcttttgggcttgactcctcttgctaaacgtgcctgtgagagtcattcatatgattgcgtgtattaagttcgttcctctttattgctgccaagtattctgttgaatggatataccacagtttgtttactcatccttttgttttaaaataataataatccacttcccgggctgaagccatcttcccacctcagcctc

SEQ ID NO: 456735 - DNA, 299 bp, Homo Sapiens
gcgcggcatacctggaccttctggagaaggtcctgagtgaggactgcatggagggataggagaaggtcctgagtgagtgcttggtggagggataggagaaggtcctgagtcagtgctgggtggagggataggagaaagtcctgagtcagtgctgggtggagggataggagaaggtcctgagtgtggactgggtgaagggataggagaaggtcctgagtgaggactgggtggagggataggagaaagtcctgagtgaggactgggtggagggataggagaagtccagaatgccgggtacc

SEQ ID NO: 456736 - DNA, 460 bp, Homo Sapiens
  misc_feature (53)..(53): n is a, c, g, or t
cttcaggatgcccaggatggagctcagcgcctcctgcaggtcctcagcccccntcgcagttcctgctgtatttcagcatttccttgagcagcagctggtacttggtgatcctctgcactggcttcagcaggtaggagtccaggctcagcttgtggtccagctttctctggcattcctggaaaaacgggcagtcggagcactgtctccacaggctctcagagcggggcttgttctgacagtacttctcatagatctggaaatcttccatcctctccagaaagcatcttccaaccagttctgggcagtcagtgtagttttccagctccctgaggaatatcctgttgtggaagtgatagatttcctccatgtttccaaacaaaacatccttcttgttgtgaaggcctgttgacaggaggtgagccatcagtgggttatccagaaggtccaagatgccggcccg

SEQ ID NO: 456737 - DNA, 274 bp, Homo Sapiens
catacctggaccttctgtccaccttcctttctggtctgcagactgaccttcctgaagtaccgtccctgcccaaccaccttcctctttccctctcgtgtctaaccctgccctccacgcacgccagacgccactgagtcagtctccttcatgctgacacctgccctgcctttgctgtccctagaccacacctgtctaccttctctaccctctctgctgtctacctttcaggcccagcctatgagggtagagaagtccagtatgccggtaccgaggt

SEQ ID NO: 456738 - DNA, 476 bp, Homo Sapiens
gaccttctaacctgtctactaaattatctaagggcttccctcaaaacatccacttttaaaatactattctatacctaacctaaaccactccaactgagatatagttccagttgagtgtgtcagcaaacttgtcgtgtttgattttcacaggtaaaagatttgcattacaattaagttaccacacaacacccacctacaccaacacattacaaatgctaactgtgagcctatttgcttccccacttcgctcatttcttctaagggtgaaaaataggcaatgagagcagaaagccttctagggaagtctctctcatagtagtgtgtttcccttctgcatctcttttgtgggttttaacagaaagaggctgcttcttaaagtttgtattgagcacaatcctgctccatatttgtcaagtggttctcatctgaagatttatgagggcattagttataccagagtcaaggatgccggccag

SEQ ID NO: 456739 - DNA, 408 bp, Homo Sapiens
gtcctttaaaaaacgtatatttgattaaatagaaaagaaaatagcatcctagttatcttccctgccacaattttgtagccatttatgggtgaaaattttctatctagattctacctagtcagggaattaaatgttgagtctctgctggttgagcaacatttattcactcagtctgtcagtcaataagtatttactgatcacctatcatgtgttctgttctgttctgttctaggcttagtacatatagcagtaaacaaaaattcttactctcagaaagcttatattttagtggggtatacattgaagtacactaacctaagtagataagtaatatattagatagtaatatatgacatggaatagacgccgacgtattttacccttaggaacccaaacagaggtcccgta

SEQ ID NO: 456740 - DNA, 615 bp, Homo Sapiens
  misc_feature (179)..(318): n is a, c, g, or t
tatgatctggtttcacggggacatctcctgtcagtcttctgatcacaagtagttacaattctttacaaagatccaaacttttcttcattttcctgtcttcgaagccctccaaactctcctgatctctgtctgccacccccttctgaacctgcttctacattatcagctatctttgtcannnnnnnnnnnnnnnnnnnnnnnnnnnnnnnnnnnnnnnnnnnnnnnnnnnnnnnnnnnnnnnnnnnnnnnnnnnnnnnnnnnnnnnnnnnnnnnnnnnnnnnnnnnnnnnnnnnnnnnnnnnnnnnnnnnnnnnnnnnncacttcccagtactaattttctctatgatcataaagaacctcatgattctgcaggctgtaaggaaacatactggcttctgaatctgggaggactcaggaagcctcccaatcataccagaatgtcaaggggcaatgagatgattcacgtggcaggagtaggagaaagacagagagaggaaagaggtgccatgccctattatacaagcagatctcatgagaactcacaaggtcagcatcaaaaagatggtgtttaaccattggtgaaggatttgccccccacccccaactcccactgtt

SEQ ID NO: 456741 - DNA, 247 bp, Homo Sapiens
acaggcatacctggaccttctgacttagttcagtactcgctccaccacaccactctgcctcaagggagacaaggccttggcatggaggaaacaggctagctgtacctggaggctggcacacatgagtcttccaacccccagcactctcacacttgtgtcaaagtacatgaggcctgcatgcagcatcaactcttggagcccatgccagtacagaagtggttacaaacggacaaacagaggtcaccct

SEQ ID NO: 456742 - DNA, 343 bp, Homo Sapiens
cccagcatacctggaccttctttgctgatagaaacttacaattaattggtctgtttacttgtgttttgtctgtttctccagtgaatattggctatacaagtacagccatgactctcctattcaccgttgtatccccagtacctacactcagtacacagcacatattagatgcttaataaatatttgttgactagatggtgggatggatgcatagataatgtaaggatggatggatggaaggagtgtacagatgggaaagtgataaaaaataagatttctgggctgggagcggtggctcacgcctgtaattccagcacttttgggaggcagaggcaggcagatc

SEQ ID NO: 456743 - DNA, 652 bp, Homo Sapiens
  misc_feature (219)..(227): n is a, c, g, or t
  misc_feature (412)..(514): n is a, c, g, or t
acagttctaggcacctgaaacttcttcttttgcttgtagtaaatatggtgtctttctcaggactctgccctttgtttatttatatatctggtctggtttttgttttctagagatagttctctactctccatagtgtctgctttctcattgcctgagtttgtacatggcttgccatagcttctctaggcccaattttaggccatcagtagatttaaaaannnnnnnnnctcttgacaccaattaccttagttgcaatttcccatttataattgcaacttgagcctacaaatttacaaatacaatgaggtaactttccactgtggttaaatattataggattattgggctgctgggtaaacccatgaattgcctgcctttggattagatattcagaccaggtccatttaacaannnnnnnnnnnnnnnnnnnnnnnnnnnnnnnnnnnnnnnnnnnnnnnnnnnnnnnnnnnnnnnnnnnnnnnnnnnnnnnnnnnnnnnnnnnnnnnnnnnnnnncattcttactccttataatctagggtccaggacaggggagatatgcactgtattaatgaaataatctgtactgaatgtaaaattccaaagctgaagcatttaatatgacaggaacattctactaagaatgaagcacag

SEQ ID NO: 456744 - DNA, 449 bp, Homo Sapiens
ccggcatcttggaccttctgggaagtctaccagtggcaaaagacagatgcagaagcagaatggagggaaggccgtggacgagcggcagctgttccacggcaccagcgccatttttgtggacgccatctgccagcagaactttgactggcgggtctgtggtgttcatggcacttcctacggcaaggggagctactttgcccgagatgctgcatattcccaccactacagcaaatccgacacgcagacccacacgatgttcctggcccgggtgctggtgggcgagttcgtcaggggcaatgcctcctttgtccgtccgccggccaaggagggctggagcaacgccttctatgatagctgcgtgaacagtgtgtccgacccctccatctttgtgatctttgagaaacaccaggtctacccagagtatgtcatccagtacaccacctcctcca

SEQ ID NO: 456745 - DNA, 481 bp, Homo Sapiens
aaggacacacttaggagagaagtttatgtgtagggactgtgggaaggctttagcaataatcaacatttaccagacatccaatgacagcctcaggggaaagcacccttgtctggggagtgttggggagcatcagtaaaagaatggacactcaggcacagagtggccctcaggaaggaggtctttgtttgtaggatgtatgggcaaagcttttgtgatcacacaccacagggagaatctgcatgtggggacactgtggagctctgcccagatgaccttttcaggggtaacaccccagctgcttgagagaacagtgttgctgctggcagagatgcattccagagatgcactccgctctggaactcactctcagccacagggagctgcatgcaccacaggggcaatgcacctttgcaggggtaccttctggcccctacccttgactcaacggggacaactccagaagtccaagtatgccgggtcg

SEQ ID NO: 456746 - DNA, 584 bp, Homo Sapiens
  misc_feature (455)..(455): n is a, c, g, or t
  misc_feature (460)..(460): n is a, c, g, or t
  misc_feature (510)..(510): n is a, c, g, or t
  misc_feature (530)..(530): n is a, c, g, or t
  misc_feature (542)..(542): n is a, c, g, or t
tcaaccagtacagcctgccttccataccgcccttcctgaaactgctgccataatagtcatcaaacacttcatgttactgaattcaatggacagttttgcctctgttttagtgaaaccctcacaagcactctgcatagtccgctttctgtcttctttaacgtgcctggttccctctgcccaaacttttaggattgggcctcctcagggccttgtcctgagccctcttctttttctctctccatggattacctcctccagtctatttttttataccacctttatgtagatgaagtgaaggcagggtggtgctagactggggtgggtcaattcccttctgatagtctcggagtctcagggcatcccaaagatgaaagctctagaggagagacaccagtcctcacagggacttcatgtccatggttcagtccaagggagaccttggccacttccttaanccttnctggctcagtttcaggaggaaaagggttgggggattgggtggggctgctntcccacctttaagagccaantgttttgggcancattcaaggcaagagcaagttttttttcaggaaggacagggg

SEQ ID NO: 456747 - DNA, 311 bp, Homo Sapiens
accaatcacaaggatctttataagagagtgaggtaggagagtcagaattagagaaagtgatgtggtaatggaagaagaggtcagagagggagatttgaagatgctgcacttctggccttgaatatggagtcacgaggtaagtcaaggaatggaggtggcttctagaagctggaaaaggcaaaggagcacattctgtctagagcctcccccagaaggaatgcagcctctctgacaccttgactttagccttgatagacctagtgggcttctggcgcccagaactgtaagaaggtctaagtatgccgggccgc

SEQ ID NO: 456748 - DNA, 1386 bp, Homo Sapiens
gagcacgggcagaggctgcccatcagcaggaacacctttgcagaagtcaccgggctgtcccctggggtcacctattacttcaaagtctttgcagtgagccatgggagggagagcaagcctctgactgctcaacagacaaccaaactggatgctcccactaacctccagtttgtcaatgaaactgattctactgtcctggtgagatggactccacctcgggcccagataacaggataccgactgaccgtgggccttacccgaagaggacagcccaggcagtacaatgtgggtccctctgtctccaagtacccactgaggaatctgcagcctgcatctgagtacaccgtatccctcgtggccataaagggcaaccaagagagccccaaagccactggagtctttaccacactgcagcctgggagctctattccaccttacaacaccgaggtgactgagaccaccattgtgatcacatggacgcctgctccaagaattggttttaagctgggtgtacgaccaagccagggaggagaggcaccacgagaagtgacttcagactcaggaagcatcgttgtgtccggcttgactccaggagtagaatacgtctacaccatccaagtcctgagagatggacaggaaagagatgcgccaattgtaaacaaagtggtgacaccattgtctccaccaacaaacttgcatctggaggcaaaccctgacactggagtgctcacagtctcctgggagaggagcaccaccccagacattactggttatagaattaccacaacccctacaaacggccagcagggaaattctttggaagaagtggtccatgctgatcagagctcctgcacttttgataacctgagtcccggcctggagtacaatgtcagtgtttacactgtcaaggatgacaaggaaagtgtccctatctctgataccatcatcccagctgttcctcctcccactgacctgcgattcaccaacattggtccagacaccatgcgtgtcacctgggctccacccccatccattgatttaaccaacttcctggtgcgttactcacctgtgaaaaatgaggaagatgttgcagagttgtcaatttctccttcagacaatgcagtggtcttaacaaatctcctgcctggtacagaatatgtagtgagtgtctccagtgtctacgaacaacatgagagcacacctcttagaggaagacagaaaacaggtcttgattccccaactggcattgacttttctgatattactgccaactcttttactgtgcactggattgctcctcgagccaccatcactggctacaggatccgccatcatcccgagcacttcagtggggagacctcgagaagatcgggtgccccactctcg

SEQ ID NO: 456749 - DNA, 689 bp, Homo Sapiens
agaagattcactggagctgtgtgataattgatgaagcccacagactgaagaataggaactgcaaacttctggagggtctaaagcttatggccctggaacataaagtgcttctcactggaacacccttgcagaactctgtggaggagctcttcagtttgttaaattttctggagccatcacagtttccttcagagaccgctttcttggaggaatttggagatctgaaaacagaggagcaggtaaagaaactgcagtctatcctaaaaccaatgatgcttcggcggctgaaagatgatgtggaaaagaaccttgctcccttactagagacgatcattgtaggtggaactgacctatatcctagtaaaagttactaccgtgccatcctcgagaagaacttttccttcctgaccaagggggcaaatcagcacaacatgcccaatctcatcgacaccatgatggagctgaggaagtgctgtaaccatccctacctgatcaatggagcagaggagaaaattctagaagatttccggaattacccacagccactgatgccccgtgactttcaagctgcagagccatgattctaggcagctaggaaagcttgtgttgacttgataaactactccctatagctgattagcaggtggccacaaagtactcatcttctcccagatgggcgctggctcgat

SEQ ID NO: 456750 - DNA, 453 bp, Homo Sapiens
aagtgccctcttaacccactgggaataggaaccaaaaatgtgttcaactgtccctgtttaagccaagggtaaggtggcatggccctccctgcctgcttatgtatggacagagtatgttgtctcagcttcctccgagagagactggtggtttagcttctgtctacacaggcagaagggctataactatcccttgggacttctcagcaggagtcctcaggaacagtggtttttcgagcagtcatacacaggctcttctggtgaggagtatagttttcctctcccttgggtcatcctattgttggcacaagtcagagtttctggccgggatttagagagccccttcccaggtgtgagcagaggcccaagagggccagcagggagccacctagaatctgtgccccgagctctggttggcagaggagatttgggggaacattctcagtcttccatggc

SEQ ID NO: 456751 - DNA, 786 bp, Homo Sapiens
ccttagaggaggctgtgggtgacacttcagcagctggcagttctgagcagcccagagcaggcagctccactcctggggatgccccaccagctgtggcggaagtgcaaggcaggagtgatgggtcaggggaatctgcccagccacctgaggacagctccccacctgcatcctctgagagctcttccaccagagattctgccgtggccatttctggagcagattcccgaggaatcctagaagagccgttgccttcaacaagcagtgaagaagaagatccccttgcgggtatcagtctccctgaaggtgtggacccctcttttctggctgccctgcctgatgacatccgtcgggaagttctacagaaccagctaggcattcgtccaccaacccggactgccccctccacaaatagctcagcgcctgcagtggtggggaatcctggtgtgactgaagtgagccctgagtttctggctgccctgcctccagccattcaggaggaagtactggcacagcagagagctgagcagcagcgacgagaactagcacagaatgccagctcagacacccctatggaccctgtgaccttcatccagactctgccctcagacctgcgccgtagtgtcctagaggatatggaggacagtgtgttagctgtgatgccacctgacattgcagctgaggctcaagccctgagacgagagcaagaagcccggcagcgacagctcatgcatgagcgtctgtttgggcacagtagaatccgcactgtctgctattctccggtcctct

SEQ ID NO: 456752 - DNA, 378 bp, Homo Sapiens
tgggcaggaggggccggtaggtgagtgaaagcagcataagaacaaacatgaaggtactcagcacctggaaggtttgggccagcttgatcttatcccccagcattctgatgaggaaggggaaggacatggagaaaatgctactcccagcagacaccacaccattggccagacccaggcggcgttgaaagtagtggcccaggatgacgagggatggctgaaaggcgaaggaacagccacaaccaaagagaatcccgtaggtgaagtagcgcaggcttagggagctggtgaaggagctggtatggaggccaatgaaagcaacggcagcccccgcggttgctgtgattcgccagcccaagcggtcagtgaatcgtcccgata

SEQ ID NO: 456753 - DNA, 397 bp, Homo Sapiens
gctttggtgaggaggagccaggtccaggtctttagatgatctcctgacatgggcccagtgtgtagagatgagtccagtgaggctagagccaagggacagcattccctccttcccacagggcttggggatagctctggcctgggcagggcttctgggagcttgtgggtagactcactggatttcaccacgtgtctgtttggcctcccagggtttgggctgggctcttccagtttttatcactatggcatttttagcacttggctattctagccttttccgctgggagctccccaagtttgcccaagtagggcctgcttccctagagagctgagctcaggggtccttgggaagaatcactagagttaggggtggcctaacttgggccttctactctcaa

SEQ ID NO: 456754 - DNA, 435 bp, Homo Sapiens
ggctttcgggacgtgggaaggctgccatcacagttagattaagagacatagctgatgactccaacctagagtcaggctctccctgagaactaagagctggaagtgtgagatgagatcctatagacgggagggcccagttgaaagaagaaaacagggctttgctggcagtctttggagctctcatcaccacaagggtgacaccagtatggtgactaaacttggcttggagattgctgatccagttggtgtgcccctcacagtgttagcctggggctttgcacatagtaggtgatctatatccctagatggctgctggtcccatgtgcttgccctcattctcaatcacctgacctttccttttcatgcacattcagagtaagttctttaagtgtgaaattctctgagtaacacaatcccagctcccacagggcaagg

SEQ ID NO: 456755 - DNA, 456 bp, Homo Sapiens
tgcttcactagggcttctgtggctcaggcagctgagttggggaggggaagaacctgttgtctgatttaggcaacagccctccacacccctaccctgcaacctgcactgtccctaccagacccctgctgtgagcatgtgaaggggccaggaacatctgtggcccagaaccaggcaggatgaggagacattcctgtgtcagggtaaccctgggaggttcccatggcaacagccagccagtccagtgtgtgtccttgggcccagccggacgaggctgggagccactctcaaaaggagcaatgtgcctctgaccttccagaagccaataggggtggtcaggctgggaagcgaagtgacccactaccacctatgacccacccaccccatctgtctccagcacctgtcaccccaggatgggtgtgaatgccaagcactggggaaagcctggggcctagggga

SEQ ID NO: 456756 - DNA, 409 bp, Homo Sapiens
cttgcgttattattggcacttcaccccaggcctcctgtgcatcagtctcagcactactctgcccacacctagggagacctgcagcctctcggacagtccccatggccctgactgcagcccgagccctcatcagcgagtccagttcctcatagaaagggcatgtccctgcgtgggtggctgctcttggctttccggtagcttcgaaggaggtttttgaatctgtagcgacactgctccagtgtccgcaggaagcccagagcacacagccgctctgcaatggcccggtacacctggctgttctggtgacaggtacgaagcttttccgagaatggggactcactgagaattgccaggaaggccttggtctccacatagccccagtgcacacctgctgtcaggagtgaagagt

SEQ ID NO: 456757 - DNA, 316 bp, Homo Sapiens
cgcaatcacctggaattcctgagggatgaggagctggaagaaaggcgagagaagcgcaggacacaactgtctgaggaagaaacaaagataactgataaaggcaaagaagataaggagaacagggatcagagtgcacagtgtactgcatctaagtcaaatgactccactgaacagaatctctcagatgggacgcctatgcctgacagctcaccctacactcccatcttcaactgatgcagctacatttgagtccaaggagaccctggcactctgcaatcctcacgaacagcaaccacactcccaacacaccaggccg

SEQ ID NO: 456758 - DNA, 470 bp, Homo Sapiens
agtgttagggacgcgacatccgcttcgagtttgactgggaccacctcgtcctgactccaagctgcacacttgtctttctgccaaccccctctcccctcaccgccctcctgcgctcttccgtgtcagctccccagcttccctttctcttccctttttctctcaggggcctttctggtcttcctccacccacgcttaaagcagccaccctcccgctcctcgaatagcagcaccccgcgatttgtcacagatcgttgtccacctttcccttcgtctctcctgcctcgcttcccctccgcccgcaccggttctgccagtctctgggttatcaccctcagggtccttgtcctggactgcgctctcgatccctgggcccttgcagttcccccagctttttctaccctgcttcttcgttttccaaattgtgctctccctcttgcttgcaagccaccagctccaccctcatcaccttt

SEQ ID NO: 456759 - DNA, 555 bp, Homo Sapiens
gacaggcccatgctcacgaggtctttattggaataaataacagcatactgtgacgccacgtggcattgtcctaaccgcatccctggcggaagaagtgtttgcccggtgttgcagtgagctcctgaaaagcgcttgcttcctgcactcagccaggtgggcctgacaaacagcatggccagggttttcgtggcttttatataacatccagaaatccaaagtaaacattgcttaaaacaattaagaagacagtaaaatactggcacacaaaacagggggaaaggattcagttgctttaaaataaaattgctctttgtcaccaagacaattaggacaccacggcccagcgggactctgggctcggtgcttgcataacactgtgtgggcgtcaaaggggaactgaagctgcgggaggctcccctagctggtgtgggttgagagacacgtcacatggagaaggagaatcagcaaataccttcctgcccttgtccgagcgtccacttgggccttgcaggcctgagacccctttgtgctgggacgtttgtccccatgcgtgga

SEQ ID NO: 456760 - DNA, 141 bp, Homo Sapiens
  misc_feature (68)..(76): n is a, c, g, or t
acattcagcgttacacaggctgagtggggcctccttgctctggagggggtcttcgtccatccttggtnnnnnnnnntgcccagccccttttcaggcctaacaacagtctctaagagggtcaggagacctgagcaagccggg

SEQ ID NO: 456761 - DNA, 404 bp, Homo Sapiens
ctcatctatattagatctactctttggaatcactgaggttttgtgtcctttcatgtggtaagttaatataatgaattttctgtatcctttgcctgaatttcccatactgtttcctctttaaatttgaatgttgtgttggtacatagtctggcctatggatttttcagtggtgattatatcttgttaaatttccttcttggtctcctttaatgcttttggcctttcttttaatcttgtctgattagactgtgtcaccttggtcttgtgtgttgtttgtctttacctggtgtatttttgccctatgagtatatcttatcttcttacacactttgaaataattttagattcatatagacttccaaaaattgtacaggagtttctgtcactccatgagtgagtggatc

SEQ ID NO: 456762 - DNA, 434 bp, Homo Sapiens
  misc_feature (52)..(52): n is a, c, g, or t
  misc_feature (96)..(96): n is a, c, g, or t
aaacccccaccccttctccgtgtctctactcttttctctgggcttgcctccnttcactatgggcaagcttccaccttccattcctttcttctcccnttagcatgtattcttaagaacttaaaatctcttcaattctcacctgacctaaaatctaagccgtcttattttcttctgcaatgccacttgaccccaatacaaactcaacagtagttccaaatagccagaaaatggcactttcaaatttttccaccctacaagatctaaataattcttggcgtaaaatgggcaaatggtgtgaggtgcctgacgtccaggcattcttttacacatcagtcccttcctagtctctgtgcccagtgcaactcgtcccaaatcttccttctttccctcctcgcctgtcccctcagtcccaacaccaagcgtcgctgagctgc

SEQ ID NO: 456763 - DNA, 561 bp, Homo Sapiens
aggacaggtatcagggggtgaaagcctaggatggctctgctctaatgaaagcatcaagaatctgactgctaaagcacactgcatcaccaccagcagggagtgtgtagggtgagtgaaggaggcacatgctatagctctgtgtacaagctcaaagagccaaacacatttattttcttccaagcttccaaaatggaaacctcagggttcctccgatgctaacatcactcaatacagctatcttcttgcttcactaaggcatcacactttccttctatgtttacttctatatgcaaagcagagggaattcattccgcacgcacaggaccggtcatattattctgggtctactccaatttcgcccagattccagaataatagcccccatttaacacagctaaccagatcacactacactcaccctcctgctactcttatcctttgattataagttgcaagggcgggccaggcatggtggctcatgcccttaatcgctacactgtgggaggtggaaggatcacttgatgtcccaggagtaagagctccgcagtgttctctgatagc

SEQ ID NO: 456764 - DNA, 426 bp, Homo Sapiens
gctgggccgcactggcgcactctttatttcttctttttagggtgactcttttcttgtattttcctttctgattcttctttctctgaccagctcttagagtcctgtcttcattctacatgtctttgtcctctctgtgtatggtttcacttacacttaagacttaattatcacatataaacatgactgtcaaatctattttcaacccctaacctctttcttgagaactctagaaacaaattttcacgctagatactgaactctctacaggcatcagaaatgcaacttatcccaaattaaactcatttctccagaggaaggagagatatatttcacttcaatatccttcagtccttcatttaatgacacctccatctatccagtcactcaagtcagaaaaacataatgctccagaagtgcgcctgggtg

SEQ ID NO: 456765 - DNA, 471 bp, Homo Sapiens
gcaagtctcgatcaggtccttggtggagccttcagggctacttctggggatagaatggacagagttggggtctgtgtcctcctccacgtgggaatggggcagaacttgcggcttcctggcgcacttctcgtggtgggtgggatccaggctgcatcaggcagtgatgtggacaggatgttgtgggggctgggcttgactgggtccctgggagagccaggcacggcctgagttgggacgagagcagccttgcccaggctcggtgcatgcgtcacgccctccggcccagtgctgcgggacgtggcttgggcatccaggatgaggttctcttcaggccttgccccagcttctgcccttgccccagcttctgccctctcctcctggataggaagactgggtccagctggggctgtagtgggcagcccatccagccccctgtggccacctgctgccagctgctcagtgacagccatt

SEQ ID NO: 456766 - DNA, 430 bp, Homo Sapiens
gggagtggcgcacacttctcagccgaagacactcttggtgggtccggctttgggcttctcaaagacagtctcggtacctgtgcgggtgcggctgaacaccgacggggcggccgagccagcttgctcacactctcgcatgacctggtaggtcttggacttgatttcctggttcttggtcaggtttcctcgggcccccttcaggtcctcctccttcacaggggggcgcttcttcttgataggggcttcctgagcaccagcctgggacatggtgggtattgtgtaagtgctgggtctctgaaggcgcctctctggcaggcagcagctgctggaaaagatctgagtggagcccagccttctgaaacttatatagcctgcttgcttgtcccgcagagtcactgcccctcctctgacaggctccctgatgattcag

SEQ ID NO: 456767 - DNA, 427 bp, Homo Sapiens
  misc_feature (136)..(136): n is a, c, g, or t
gggctgagcatacggatgcctatcgaggcctactctggccaggcctcactgtccacagactccaggccgggacatttggctccaaatgacatcgacgctgaaagggctcctccttctctttaatgagcctccgcanggtgtgcacctggcggcttgtgttctcatatgtctccttgatgctctctagttccttctcccgctgtagcagctgcttctctagttctgccacccgcatcatgttttcattctctaggtccagaagcttctctgtgagatgggacacatgctcctccaactcctccaccttctccagggctacattcttggtctcagcatcctccaacaaaccccgacatcaaacacgttgtccagaatgcctgaatccgcacctgcagcttactcgctcttctgtgacaaaggcccacgg

SEQ ID NO: 456768 - DNA, 372 bp, Homo Sapiens
  misc_feature (48)..(48): n is a, c, g, or t
  misc_feature (102)..(102): n is a, c, g, or t
gcgcaactgctacacctccagcgtcttcagcaccaacacgcccttcgngtgctcaacaaggtctggttcgagacgtgcatgtacttctgtacccgcggccgnagaaccagcgtgagttggaggaggactcttttgggctggccatggacgaggacggtcgcaagttcgtctacttcaagtcccctcgggcccctaccacaagtcgcgcctcgtcgtcgtggagcaagaagcgcgccgagagcagcgacgaggagaacttgccccgcatgtatgagacgggcaccgagttctgcccctacgccagcttcgtcaagtacctgtcgagacgcaaccctctctgcaaggcgttcttccagcggcgttggatgcagt

SEQ ID NO: 456769 - DNA, 180 bp, Homo Sapiens
actgcatccaacgccgcccatctgcactcttccccccaagcgacatatgtggcccccgggctcaccgagaaaggacacgcagactttgcagaaggtgtggaactggaacttgctgccgcctccagcagtgtcttggcgttggccgagtcgatgaccagggagcgcggcgttgatgcagtc

SEQ ID NO: 456770 - DNA, 530 bp, Homo Sapiens
ttctagaggatcccgactcatccaacgccgcacatttatttatgtttgttacaactgcatccaggaatcaatattgcctgcctgaccgtgggtggattagcatcttaatgtgctgctggatatgatttgttagatattttgcttgaggatttttggtgtctatgtttatcaggatacttagcacaagttttcttttttctttgtatctctgccaggttttggtatcagaatgatgctgacctcatagaatgagttagggagaagtccctcctccttgattttttggaatagttttgttggttttgtaccagctctttcttttatgtctggtagaatttggctgtgaatccgtatgtcccagggctttttcttgttggtagcttattacagaatcaattttagaactcattattggtctgttcaggatttcagtttcttcctggttcaatcttgggagatggtatgcttcctggaatttattcttttggtgtctaggtttgttagtttgtgtgcatagcggcgttggatgc

SEQ ID NO: 456771 - DNA, 411 bp, Homo Sapiens
tcggtacccactagtccacggttggctgacaagcttttgctaactgccattggctatggtcatgttcgagctgtggcagaagcttgtcagccaggtgtagaaggtgtgaatcccatgacacagatcaaccaagttacccatgatcaagcagtggtgctacaaagtgcccttcagagcattcctaatccatcatccgagtgcatgcttagaaatgtgtcagttcgtcttgctcagcagatatctgatgaggcttcaagatatatgcctgatatttgtgtaattagagctatacaaaaaattatctgggcatcaggatgtgggtcgttaccgctagtatttagcccacatgaagagatcactaaaatttatgagaagacctatgcaggctatgagcccacacgtggactacgt

SEQ ID NO: 456772 - DNA, 639 bp, Homo Sapiens
tctgtagtgtaaggactccttctggatgccagatagcacctggtatccattcgacctccactggagagcttctgattctttctcccggaagactgcatcattcatcaaggcatcttcgccgtccatgttttcatggcttgtggctcttcttcagttcttccgcatatggtttctctgtaagaattagccttttttcttgcacttatttttcagatggactttacgatgcttcatattataggtcactttggctaggccatcctgcccagtttgtttggcctcaccctcactctagatattggtgtgaaggtattttgtggatgtggtcaacatttacagtccattgacttcagataaaacagtttgcccttcataatgtgggtgggtcccatcccatccgtggaagggcttaagagcaaagactgaggtttcccctcaaagaaggaattccctctccagactgtaacatggaaatccttcttgagtttccagtctgctgacctgacctattgatattggactcaagactgcacccatcactcttacctgcatttctagcctattggcactgcccaacatattttagatttgccagcccctataattacatagccatacgtggactagtggggatcctct

SEQ ID NO: 456773 - DNA, 552 bp, Homo Sapiens
gttggctcattcctggaatgtgtgtctgtgtgtgtctctttgagcatctctcttcattcctggaatgagccatggacagtaaagttgtgtgggaaaagaaggctctttggggaccctgacatgaagaagtgcactaagtgggagatcttctctcatctatggcaaagtctcaggatcctgttcagatatcggggctttcatactcctgttggtggctatttgggaggcagcaagatgtgtagactggatgtgttcagttactaggaccccacgatgccatcgcatacttcctcctgcccgtcatggtttccccagaagtgtagttcctgggacattcatggatatgagctattcactagttgggtctagactaacagggactctcagtcgtctaaatctcactcttattgacaataaatatcaaactatgaagaaacagaagtcccattaccagaaagaccaaaactaaactcctcggatcttcacccccatcaccgtgggaaacacagatgctttctccctttccagaatataacaccaaccgtgactagt

SEQ ID NO: 456774 - DNA, 303 bp, Homo Sapiens
actacgtccacggttggcggaacacacaattctacccaatagacaaacacagtgtgttccagccatcataacacatactctgtccaccacaaaatatttagctctgattatacatgtgcttgttttcttttggtctagcttctcaggcatgggaattctatttcatcatccattcctttgtttccagtctaatcgggagcttgattcataatgggagtcatacatgtttgatttaattaacatatttcgtcaaatctaagatgctagtagttttaagagccaagcgtggactagtgggtaccg

SEQ ID NO: 456775 - DNA, 301 bp, Homo Sapiens
tagagatggctacaataacgtgcctagtgttgggagcctagcagatccagactatctgaacacaccacagatgaacacacccgtgacgttgaacagcgctgccccagccagcaatagtggggcaggagtcctaccatctccagcaacccctcgcttctctgtccccacaccacgaacccccaggaccccaagaactcccagaggtgggggcactgccagtggtcaagggtctgttaagtatgatagcaccgatcaaggatcaccagccaaccgtggactagtgggatcctctagatcacca

SEQ ID NO: 456776 - DNA, 418 bp, Homo Sapiens
  misc_feature (154)..(173): n is a, c, g, or t
ccctgtcctggtacctttaacttctcttatgttgccgaatggaacacttatctccttcttcaggccccactttggggtttaggtggatatcttaaatgtcagagaagacagaaaaggagaggaaggatgatgaaagtgcttcagtgaaattgtnnnnnnnnnnnnnnnnnnnnctctgttctactcccctaggctgtttgggtaggactggatgctttctgcaattcttggagaggctgcgtatctaaaggcctgcaggaaaagaagaggtgaaaggagtggattttctgctcttgttatagagagcccaaaaggagggcaaccggctccctgccacgccctgcttggatttaggtaaaatgcagtattctgcttggagggcctgacttgactgagctgtcaggtcgtgtgtgtgtgt

SEQ ID NO: 456777 - DNA, 603 bp, Homo Sapiens
actaatggaaagactggctttaatttgaccttgcgtctctttataattagctaattgattccctagctgagagaggtaattaacttactgattcagaacttccttaggaaagaaatgtaactatctcacttcaaagggctttccttgttccctcagacctaatgcaatctcagatttagatagaaatcataacttataaaattgtttcccacatattaaactccttggctctgccctaccgcccagtgacttagtttaggtcagagacctctcaggcacagacagggtaagtgatattggctcaatcatcattccacttacccagaaaacccaatgagaattaaggtttcctgactcttaatttagttctcttcccctgattccaccattacatctccataagactgttatagcgatatttatagtacagtggtatttcaatgtgggatactgtatttgccaagccaatctggacacacatatgaaagcattcattcccaccttccctttaaaaagaaacacttttctcgcccatctccttccactaaacccacactaatgcttttataacatacgtagatgctaatacgctggcatggtttg

SEQ ID NO: 456778 - DNA, 945 bp, Homo Sapiens
ctaacaccagacgcatatatctttttcaaatatcaaagagatagtaaagctatgcatgtaaaagtcataatagtaatagtaattataagtattataaggggtaagaataatgtacatgattcttactgactcccaagcattggctaagcactttaacttttcaaaatctcgagaatgctatgctgtacatatgatacgaaaggagaactttcttagtttagaaaactgagttgcagaaaggttacgcaacttgatcaaagcaacttagtaatgggaagagcagaaatttaaacctaactcatctttcatacctatgaagatgcagataagtcaaccaattagcattggtgtgtaatatatttgccctcttgatgaatactgaaccagagttagagcatcttctattggtttcatgaaaaagcattgacattatacacgattggtgtgttctacttggaaatcacacttggttactctaaacattatttgaataagaagtggctaataatttgagcagttatttcaaaatatttatgtactattactacacagatggattactcttgagcttggatccaatttttaaaattttctaactcatgtgtacatgactaattttccctctcagaattatgacaacactcattcatatgctcttctctcttgatttttgtactttggtagtttgggcaacatgataagatagctcgtagtataactaatagcttagcacacatagcatatctatactcttttgacttttcctctaaatatcaccttatcatagtttgttctttatcccctatccacttgccattatttccatcccatgaaacttatcattcttctctcatcatctctgaattcccttccctccctcccagcatatcgatgttacctgaagctctttgatcagcataatatcccaatacgctgcatggatat

SEQ ID NO: 456779 - DNA, 291 bp, Homo Sapiens
gcggagagagaatgattagggaatgtgaaatattggctttagacttaaatgggttccagcaatacctggatccacattgatttcagatcagacatttagtgtagtgcaagtcctgttcaaacagaaaccagagagcgtgcttcgggagagcctagttctaatccagggagccaggcttatgtgtgtgaaagaaccagacagacttgagtgttgaattctgctttcaccaatcataaagtgtgcaaccttgggaaaccattttattttacgctggaatggaatgggggtacc

SEQ ID NO: 456780 - DNA, 615 bp, Homo Sapiens
tttagcgagctgctctgcatatttgttgctgcaccacttcttgaaagcctgatatccttttatttttgttatcacaaagcatttattaaccattcatatgaatgtaaagctgagtcatctcaaaatatatctcagtgtagtcatagttgacactctaataactttagtatgaaaagatcatataaaattatgtaagatgccacttaattgaatttacttttcttaatttatccttgaatgacatggaatattttttctatatttttccctacattaaactaaatgtaaacatataaattgccccattttgtttaatctctaaagttagtgaaaacattacattggcatttatattggttaataaaattgaaaagaaatttagtagtcatttgtctagactacctatctgtgtgaaacttctttgaccatatccctgatacttgactaataaatcagcctctgcttgagaagccttagggactggggcttcagatacttatgacagtctatacttatcttaactctgcctttctgtgaccagacctcatggctcttgtacagtttcactttgggcttactaggcactacctacgctggaatggatgggggtaccga

SEQ ID NO: 456781 - DNA, 633 bp, Homo Sapiens
gggcagctgctgctgcggtcgatctagaggattccccaattccattccacgtatgactaggagtgaaatgctaggtcatacggtatgctatatttaactttatgaggaacgccaaacgtttcccacagcagctgcaccatttggcattcctaccggcatgtatgagggttccagtttctccacatcctccctggcacttgttatcatgtctctataattatagctaccctaggggatgtgaagcagtatttcatggtagttctaattggcatatttgggatggctaatgcatatttctttcctgataatttgtttttggtaagaaataagccgctttttcctacgttcttccacactcctgtatgaaacaagtaggggagagccaacttgctagacattgactctaaatgtgcccgaggttgtcatcccagcatgtagattgtctgcccctatttctcctccctctgcatgactccctggatcacctgccaacaggggaggcaaacacctcagatatcactaatgttttcccagcctaataccgtacctaggaaagtgagaaaatttaaatgaaaggtaaaatacagtttaaggcagtagtgaaatgaatttttctacctggcaatggaattg

SEQ ID NO: 456782 - DNA, 1155 bp, Homo Sapiens
agtgcgtgctggcccggggtggcaggagccgcagaggcttgggctgcagaaaaaggatcctgtttgctgtgtaatcctgagaatggactgcaagagaggaaaaactgggcgtctgcttgggaatctattgtggaaacccagggtgtttcccgaccagtccctgggcgccaactagagtatggactgaccaggtacctggatggagacctgagctggagaaggagatgcgcttgggaggaaattgcagaggccgtcaacatggaaaagcagccccagaacagcaggagaggcctcgccccccgagaggtgccgccagctgttgggctgctgctgatcatggccctgatgaatactctgctctacctctgcctcgaccacttcttcatcgctcctcgacaatccactgtggaccccacacactgtccctatggtcacttcaggataggacagatgaaaaactgctcaccttggctgtcctgcgaggagctgagaacagaagtgagacagctgaagcgtgttggggaaggagctgtaaagagagtctttctgtctgagtggaaggagcacaaagttgcactctcacagctcaccagcctggagatgaaagatgatttcctccatggactgcagatgctgaaatctctccaaggcacacatgttgtcacgctgcttggctattgtgaggatgacaacactatgcttactgaatatcaccctctaggttccttgagtaacctggaagaaacactaaacctttcaaagtaccaaaatgtgaacacgtggcagcacaggctggagctggccatggactatgtcagcatcattaattacctgcaccacagccctgtgggcacacgggtcatgtgcgactccaacgacctgccgaagacactgtcccagtatctgctaacaagcaacttcagcattttggcaaatgacttggacgccttacccctggtgaaccacagctccgggatgctggtgaagtgcggccacagggagctgcatggggatttcgtggctccagagcaactgtggccctatggagaggacgtgcctttccacgatgatctcatgccctcatatgatgagaagattgcatttggacgatccagacatctccagtttcttctgggcccttgcggggtggttggc

SEQ ID NO: 456783 - DNA, 666 bp, Homo Sapiens
ctcggtccccaattcattccacgtacccctttcggcacaattaatccagctcctcctcttcagggacatgttttccagctcctcctctacggacacattccatccagctcctcctctacagacacatttcatccagctcctcctctgcagacacattccatccagctcctcctctgcagacacatttcatccagctcctcctctgcagacacatttcatccagctcctcctctacggacacatttcatccagctcctcctctacagacagatttcatccagctcctcctctgcagacacatttcatccagcgtcctcctctacagacagcttttcttccagctcctctgtctacagacacatttcatccagcgtcctcctctatagacacagttccatccagctcctcctatacagacacatttcatccagctcctcctctactagacacagttccatccagctcctccgtctacagacacatttcatccagctcctcctctacagggacactccatccagatcctcctctacagacacatttcatccagctcctgctatacagacacattgcatccagctcctcccctacagacacagtttcataccagctcactcactcgacagacacattccatccaactcctcattacagctggaatggaat

SEQ ID NO: 456784 - DNA, 346 bp, Homo Sapiens
ggtacccccattccattccagcgtaaagtaaatgtggctacactgtagtcttcgacattctccacacacatcacaaaccactcttgccccaaagtccaccgcaatttgtaattccccagcccagtaataaaaaaggagtgaaaagtgttctagattcgttcttttccatgtgcatatcggtaccactggggtagggtgagactctattcctaggtagctccccgatggtgatgatgctatgctggagcaccggctattttctgaatagacaagggcccacattcattctcaagacttccatttccgccgggcgcggtggctcacgcctgtacgctggaatggattg

SEQ ID NO: 456785 - DNA, 628 bp, Homo Sapiens
  misc_feature (38)..(38): n is a, c, g, or t
atggtaatctttcaaacatgtgaattctattgctaagntttgacttttctggatctatgctcataaatgaaactggcttctgtttgctttatttttgtactacctttcaggttttataaaggaaactaagtaaataaaatgaaatggtgaacttccttcttttgctaagtagttttttaaaagatacgccactatttaaaacgctttggtggggaagagttccccttcataaaaatccacatccacatgcacactacaacccatccatcagtcaggcaggtgcccactccctgttccccacaccactgcccagtatggtctctggtgagaaaccggaatatccagtgtgggataatgagtaggttagggagaagactttaggtaatggcttaattagactctaaaggtgtcctaccgaagtgttttcatgggtgaggagaagaaacttaaccctgaggttctagggatttgactttaaaccacatacgacaatccccacatcttagttgaaaatgtcgtgatactctaccaacgcttttctctatacacctaactgtgcgtggatgccctggtaatgcaaattctaagacatttacggtaatatggtagttacagctggcatggaatt

SEQ ID NO: 456786 - DNA, 355 bp, Homo Sapiens
gctcggtacccccattccattccagcgtaacagatgctggtgtcttgattttggacttctcagtttccagaactgtgaagaaatacatttctgttttctataaattaccccgtctcaggtattttgttatagtaccacaccatggactatgatacttactttgtctaatactaatacagacacttcagttttcttttgattagtgtcaggtggtatatcttttcccatcctgttaatattaacctacttgtgtatttatatttaaagtggatttttggtagacagcatctaatctttcatctaatccaatctcttttgttaatggaatggggtcctctagatcgaccgcgcacac

SEQ ID NO: 456787 - DNA, 680 bp, Homo Sapiens
ctttttatctgtttgcattagctacattttaggtgccttttttcatcgttataaagctccattggacattgttgttctataatctgtgttttaatacataaactctgtagtggaaaaatattgctttcttctgccttaaacctagatttgccttctaatctgtatgctcttgctggtggcttaggaaaaccagctttctgttgtgttcctgccggattattttcctctctcatccaggaacagcgtgtgggcaggtgccctagctagaagaacccaccttttatcaaggaatttggaaaagaaaaatcattttctgtataggtgactcaactatgatttctacattgtggtttggagaggcagaggcactggattcaagggataaagaagaaaacatatgtgacatagcccattattagaggggcatcccgtttggttttagttctttcttttcccttgtctttgaggtaccatgaggtactcctgaatcctctcacataagccgcctttttagaaaacaaaagctagcttgattagccttcatttaatcctcataataaatcatgagggatagttcaatattcctatttacagatgaggaatctttgggttcagtgagattaagattagtcgtcagacgcatggactcgaatccatatgccttacatataacttgcaac

SEQ ID NO: 456788 - DNA, 552 bp, Homo Sapiens
ttcttccaagcataaagttcctctttctaagctaatatagcatcttttagtcaaaggattctcatatatgtgtgcacttttagcacttcaagcaaagatcatgttaaagtgaatgcaaaatgcttactttctgaatttgtcctagagctagcccttatccacagtaggaggagatactcaggtcactttgggaaatcaatggataagtgtaaaagtgaaatttttatataatatagcccatcctgttaacgaaggtgactttgtttttgccccataatataatgagttttattttgagtgatgctggatttaatggctcaatccatatgtgtatttagcgctgggctttatttccacactaagtgacgggagataagcagccctagagtgtgttaattggtttgtgtttagcatttacgctaatcagcagtagcagaggtgccctgggccactccagcctggtcacatagggcttatcttcaaccctcgatttgttcacattattcgactggagctgaattgtttctcgtttcttatacatctgaacgtacg

SEQ ID NO: 456789 - DNA, 356 bp, Homo Sapiens
tcatcagcgtagatggtagtgatgaaaaaggttgcaatggtacctagatggtgtgaccacaaaaccaagttttcctgttggagtacagtgtagatgcatcaacaaagcatgggtgtgtgatggagatattgattgcgaagatcagtcagatgaagatgactgtgacagtttcttgtgtggaccacccaagcatccttgtgctaatgacacctcagtctgcctgcagccagagaaactctgcaaggggaaaaaggattgtcctgatggctctgatgaaggctatctctgtgatgagtgttcgctgaacaagggaggctgtagcaagcactgttctgttgtacgctggaatggaattg

SEQ ID NO: 456790 - DNA, 1026 bp, Homo Sapiens
agtatggtaagttaagtaatggatgagcagccatgtttggtgtagcccaacccatgtttacaggtgggggtggtggtgggggtggagggcggaggggaaaaattatgcatgtcaaacactggaagaggaaaggggtattgtggcataatgggattattttgtctctgagaaggaaatcctgaagtctcctgagataccatatgttctgagttatagaaatgctgaggtggaggcctgccatggcaagatcgagggtatctggccctggaaaatcctcgtgtgaattctctgttacgatatccttttgcatgctctgaagcagagctatgagcattccaattctgatgtacttcagtaaaaatcttcacctttgagtgaggggagggaaaacataaaaaggaaaataagtttaatatatcaaaaagcattgtttgaaatttcaattatgatttttattatccagtatatcttgtggcagttaaaaaagtgtaagacataaaatggtaaatttgaaatgaactgaaaagacaaaacttaatgccaaagaaagagaacccagcaagtcagaaaacacttagatgataaccattctactctagccaaacaccacagaagaaaatgtggcaccatccctacacactctcaaaggctgagtacagatcctagacttctatccttgacaggcagtaatgaggtactccaacccttccaccacagtagcatcaggaacaggctgaacggggtgccagtaacaagcctcccggcaaacaatgaacatcacatggggaacctgaacttccacctccacgggcggcaacccagtgttcttccctcttttacactggggcaatgtcagagaagatggagtagagttaggatttttgtccccaaccagtgataacaaggccatcctccagtggtgtcagtgcataccatatggggaggagtgacaaagtactcctgtccctaccaggcataagacctcgtgggatgtcagaacttctaccctacgctggaatgggattg

SEQ ID NO: 456791 - DNA, 511 bp, Homo Sapiens
gtggtttatcggtggccacgtgcagtgtatcgaggccactttccttaaaggctcatctgaggtccactttggtctgaaggactttctaatcaatctcctatggagaatagatgcccaaatttgacacttacgtgggcaagttaagtattacagatttattgatattcttgtgtatgaattctgttctccctgaaaatcatggatagtgtattataccacactatccctagtcgcctagggtggtaccttttccatagcagctcttctggtttgggatggaagatgctgatgatgtggtgtcctatattcaggctcatgtcattaagcatcttccagaggtagctctgcttcatgtaccctacctcaaagtgcttgttaagttaaagcagaacaagctcgttcagtttccctcagccatctcttaatgattttcaaagctgagcctattcttctatgacccaaggtctgttttgaaaatcacttaagaggtggcatcgataaacagcgggta

SEQ ID NO: 456792 - DNA, 609 bp, Homo Sapiens
cggtacccggtgtttatcgagccacccaatgctgggcggacacagcattgagtggcattgaatctcgtcatgagaagtttctttcctttcagttctctttcactccacattgggtcaaggggagaatctccatttggggctcctgtgctgttaacatctgtcagacgctggctgatgtcatttgtttgtttgaccaagagcaaatctgacccaggcttagaatcttgctagaacttgccttgctctcttgttgaacttcatggcattgtttcattgtatgtgtttttccggaatctcccgtctatacctaggaatgctggttttccatccactgtagcataggaaaatgtctttttgaaatacatgtttaagttttaaaaaaataaagtcaacttaaataaacacactaagatgacactagtgtaggtgttactcaggttcattggttcacctggccggagggcttggggaatgcagagttaaacgaccccaagtgggactctgtctcttaggcacctagggtgccctctgcctcttgtctcctagggtgacaccagtggcatcgataaacacggggtcctctagatcgaccgccagcagcaactgcct

SEQ ID NO: 456793 - DNA, 554 bp, Homo Sapiens
tgtttatcgatgccactgcaagttaaacagagaaccctctggggtacatgttttgatacccatgcacactatcttattagtccctctcataatgtgcagtcctcattactgttacgggttgaggtgtccccatcctctatgggacacctctatgttgaagtctcaggattccctagaatctcagaatgtgaccttgtttggaaacagattcgctacagacgccattagttgagatgcgcttatatgggtaggtcctaattcagtgactggtgtccttacaaaaatggaaatgtacacacggtggtagacatgcatagagggaagagagatggagaaaatggtcacctaccagcccaagaccaggggtctggagcagatccttccctcacagccctcagaaggaacccatcttgcccacaccttgattttggacttccacctccagaactataacacatttctgttcttcaagccatttgtagccatttgttacagctaatacgatcacacatagaaatgacttgtaaatgactaggcatttcagagaggtggca

SEQ ID NO: 456794 - DNA, 1207 bp, Homo Sapiens
tgaaaatccatgttgtttaatagaatgccatcctttacctacttttgctctgtatggacgtttttcttttcatgctctagtgagctttccctatatcatgagaagtggttatatttgtgcaaatatacaaatataggaaaacaaagattcatacctgtaggcaatagtctaacttgtccaaaccactttgcctttactgctatttttatccccaatgcgtagatatttcccccaggcctatagcctttgtgaaggaaagcaaatcatacctcctgtatattgacacgaatctggttttcaaatgtcatttccagattttttagttaattgggggttgtccttttcccttaatgtgaggagtcattttcctgtatatttctgggatctctcaggggctgggaggggggagtgaggggactacaaccatagcactccaagaacccttttgggattactccagtaatcaactacgaaagttattttctaaatgtagatatgtaaggtgttcttttaaagtaaggtactttgaaatatgtagcataaactggtactgctgttaaatgggtcgattattaaacggagcagctgtgtgagggcagctaactttgaatgcctgtctccctggctggtgtgtctccttctcatgttgagagcaccagggattgcgtggctgcatgctgaaaccgcattttcccatggtgtatgactagttcatctctttcttgagcaccattacaagaagatcaaatgaaaatgagatcaatgtggaagacaattcatagcacaaaaaaagtcatcttaaatctactctcaaacattcatcttatacatgcatcaaagtaatttactgacatcactttgggtgagagagggagtcactttactgtcaaggcagaggcttaaggtgtatacctttgtactcacttccttattttcttaacttgtaagcacagcactagccctctctcttgtgaagtatcttcaaaggattggggtgcctaaataccttgctggtaagccatcaatgttttatttaaatcccagcattcgaagttagctgcccttttcaaatacacctaccacaaatactactgtatctttgtaaatgtgaatagtatttttatagcttgttaacagacatcgctagttgcatattgtaaataagtataatgtctgctctgattttcttttggcaatccgataaaca

SEQ ID NO: 456795 - DNA, 545 bp, Homo Sapiens
ggtacccggtgtttatcgatgccactgtcatcttattcctgccggtagcgagtatgctccatctcataggatgctgctgcttgaggtcaaaccttgaactgtagcattccagtcaggagccttcccaagatccgtcattgttctccattatcagccctaacagaaagaacatggcccagagccacctcataccagaaagggatcagtgaaccaattgtggacgcactttcttatcctataggcgtactgaatttcctaaatattatcatccctaaccagtagatcactgtgtttgagattttactctggatccttctgccacacccacatagatagactgtgagatgaagaagatactgtgggtgtggcatcgggaaacagcggagaatctcgatgacagcgatcctcagattcgtgaagccaatattgcggagatggggggccgggcctgtgagcaggtgtgagcaactgcactcggccgggtggcttgtttcagtataacatagtgacctgcagttgcatccatggtgtggcagataacagga

SEQ ID NO: 456796 - DNA, 600 bp, Homo Sapiens
tgcagtgctgctgcggtcgatctagaggacccggtgtttatggatgcacaagacaccgcccaataaggagagcaattgttctttctagatccacaagccatacccaggactgagctggctgaggtaatggcagaccagcaggatcaattagttctggccctccatgaagaggccactgtaactcctggtcttctaaaagatcagcagctggcaggagtctattaaggcaatcaagaggtggcaacaagtcgaggaggtaactcaataaaggccgagccactgacacagggagtaacagcagggagttaacaatctggcagagcatactgccagcagctgagacgtatatcacatctcttaatttttctccaacactgccattccaaggactttctttgagcaaatttgcagaacgtgaataaatatctgtggcatgaggcaacaaaagctgaagatgtttatgaagcattgccaccctgcttgagttctcactaatgttattgatatggcaaatgccagcagctgtttctgtagtgaacatagcagtgtggcatcgataaacaccggtgtttatcgatgccacctacaatcatgcaagcg

SEQ ID NO: 456797 - DNA, 301 bp, Homo Sapiens
  misc_feature (282)..(282): n is a, c, g, or t
cggtacccggtgtttatcgatgccacatttctctggctggaaccctgagagaaatgtggctggtttcccagagagttgggaaaggttgttttgaagccgtgggtagaagtcttaatgttgttctaagtgtatctctggattctattttgctctttttcttcttgtcatttcagatattgaggaaaccgagccggccatttcaaatttctctttcaagtaggtaatccaataagccagtgtgttcagaaccattaaccttcagttataataccttctttttgntggtggcatcgataaaccc

SEQ ID NO: 456798 - DNA, 551 bp, Homo Sapiens
atatttatcggatgtcaccacctatgattggaatgtctcaggtggtggctggatgagatggtgaatcgctgtaccagttacccgacctaggaccaggtgctatacgtagcagggaaagagtatttgtgattcagaagagatgtgtaggacaattgaagtacagtcaatttaaggttgttttgacctcagggcaggatttacagtaaacagtagataaactggaagtcttagaagccttcccaggactagggttaatcataagtcaacatgacagatgagcatccaagatggagttgctttggcctcgacaagcatgttgtttccctaaactcggaaccttcttcagaacttgaagtgagagttttcctgaggtcattaacagtagtgccatggcctccaccagaggctcggtctattccagcactccctgaaatgtacagctgatgtgtgggttaggaaaaatagtgtcttccttgtgttctgctttttctgccctaggaaatttcaggtctacaggaatttgagagttacggggtggcatcgataaacag

SEQ ID NO: 456799 - DNA, 592 bp, Homo Sapiens
ttacgatgccaccatgatctaagtctgcttaccccgctggttcatattcccactgactccactcctgcaccatggtttcagctagacgcctcctccctcattccctctttctcctacagctcctggcggggtagggtgcccctttccaggctccccaagcttccttcacctctactggtacactcggtaaccctgagctttcatagctgattacctcgcctctctcctccaaccagaccatgacaccttacggacagagcctgtgtcatccttttctctgtggtcccaactctgacttggccatcatctccttgggtagccttgtgcaagctgcttaccctccctgggcaccagtttcctttcttacctctcaagtggccttggccatggtagaagtcctgccctgcctagatattctatgacttgctgagcctggacttttgagtgagtagccgcgctctacacctgagcatgtctcaagcctggcagaagcccccaaggtagtgtcctcctctccgaggtacatggcatagcagccactgcccatgtatctgagaaggattgggcgtggcattcgataaacaccggggat

SEQ ID NO: 456800 - DNA, 410 bp, Homo Sapiens
tgtttatcgatgccacccatgtttgcaaacctgggtggcatagcctattgcacgcctagcagtatggcacagcccatggctccggggatacaaacctggacagcgtgtgactgtactgaagagagtaggcaaccgttacacggtggtgaggatttgtgtatcccaacacactgaagcatagaaaaggggcagtgaaaatgcacttttgcaatcctgtgggactgctgtcacttacgcggactatcattggctgagatgttatgccatgtgtagctgcctttgagtttatctccctcgtgtgccttctagtaaagtcatttccagaatgattttcctttgtttcctaattcttgagtgtgatttcctctttactaagttttcctaattctcatttgtggcatcgataaaca

SEQ ID NO: 456801 - DNA, 510 bp, Homo Sapiens
cggtacccggtgtttatcgatgcacatagaatcgatcggagatgatcctatgtggctatggcccaggctccgcctctcgcgaaatgcgacaaaaaagcattattttcagtattgggtctggaggccttgcctgctggtcttcggagagaggcagagggaggtgcctttgtggaccctcataatctgcgatctcttcttttgctctctcgcattcactgtcttcagcaagagctgatgtacctacatgtcaggttcttgtctggggaggacccataatcaggtttaggacaccgagaaagtggtagtgatgaggagggtgtctgtttaatgaatacagtcagaatcatttcattacttattttgtgttcttctcttaatttgttgagtattgttctttccttacttgttaattccaggaataggaattgttaaaacgactgttgaaaatgtcggtaacacagggaagcccagaagggctgcttagcggtggcatcgataaacagcgggtac

SEQ ID NO: 456802 - DNA, 465 bp, Homo Sapiens
gatcgatgccacccatgatatacaaagccaaccgtggactagtggtgtttatcgatgccacctaccctctcagggttgtgtgaggaccaaatgagcccgcaagtatgaaaagaactatgtgagctgatacgatggttattactccattcctctcctgcctgagtcctagcccagatcgctgtttgctattccatactggcagtggggtggcactcagctattattaatcccaggtaaacatcccacaaagcggcaagcagatagtgtcttggagaaaggtagctattttaaaactctacattctgcttagcagattgcacaatgtgccccctcagccccaggggctcctacccacacagccttgcagaagtggtgtacgtctgggactaacgctgccatggagaagctaggccagagtcccagccactcctagcccccatctggctgggagtgcatcgataaaca

SEQ ID NO: 456803 - DNA, 536 bp, Homo Sapiens
tgtttatcgattgccaccctgcctttgttttcttggctctgagtcaccccagaggtggatgcctggcaggggtggtatcaatccccaaggataaggtccctaagaatctagttcttcctacctcttggcagctagccttctttgatgtccttggggtgttttatgtgaaactctattttctcctactgtcctacaccttcagtccctggctgtaagagacatgagatgaaaggtcctcccgtgttgtgtcttgtgccttgtgttcaggacagcatatccaagtgtgtatgggccttgtccaggcaccatttagtatggggctattttcctgatctgtcgccactggacacccatatcctgagcaaagtgagagctgaacccacctggctacagtgtcactccttggcagtccctggaagaattcttccactcagaactttgtgatgacttcaacaaagacaacaaagggaggaaagtgattcatagtggcatcgataaacagcgggtgataatcgaggcgcaatgggtggtgacat

SEQ ID NO: 456804 - DNA, 198 bp, Homo Sapiens
  misc_feature (93)..(104): n is a, c, g, or t
tttaaatggaaaatggagctacatctgctcccaccacttcagatatcccacctgagggaaagccccccgactgtttttatatcataaaccttnnnnnnnnnnnnggtcaagatgtttttaatagaacaggctgggcgtggtggctcatgcctgtaatgctagcaccttgggaagccaagtgggtggcatcgataaaca

SEQ ID NO: 456805 - DNA, 453 bp, Homo Sapiens
tgtttatcgatgcacaagatcttttggcgtgctggtggaaaagagaagataatggcagtaagtccaaaagcagggagtagcacagacaaaaatatcagtaaatttcaaacacatatggagagcgagggacctagcaaatggaacctgcctgagatcaccacttgggtgatctcacctaacaccctattttacagatgagtcaggcaatggagaccaagaaaggttaagtaaattgcccatgaacacaccagttaagggcagacacgagcctaaatcactggcatattaaccttggtttcaatctccccttgctactcaatccaacataacctttggtgcttggctaattcacacttgtgatttgggtctcccagcatcattagttcacctgctcttcacttcctagccactcacattatgtgagtggcatcgataaacaccgggtaccgagct

SEQ ID NO: 456806 - DNA, 788 bp, Homo Sapiens
  misc_feature (102)..(102): n is a, c, g, or t
  misc_feature (117)..(117): n is a, c, g, or t
  misc_feature (146)..(146): n is a, c, g, or t
  misc_feature (584)..(584): n is a, c, g, or t
  misc_feature (740)..(740): n is a, c, g, or t
tgtctctgtggcttttcttccctccttttttaggagagagacaaggaggctggatttcccccaaagtcatagagaagaaaagggtttggaagacctaggagncggacaaatgggggnagagggtgggcatggggcgcccctccccnagagatgctgatgatggaaccagggcactgggcgccctgctttgggttggagaaagtggaggtggtctccaaggaagagagggagatgggtgggggtagagggaggcctcagctatcctagtctacatggttgtcaggccctgaaatctcagtctgccaacaggtccttagagctgaccacagccacagcactcagggagccactcctaaaccaactctcaaggccgcctggcttgtcagactccatcagaacattctagttctccagagcccctggtgagcacaccaaaacattctgatccatcagacatcaccgaagtatgccagcttgctggaagccaccaaaccaatctaacctatcagaccacacgaagcattctggcccaagggaccctactatggctcactgaactctacacctgggccatactggcctgnacagagccaccacacacttggctcacccgattcaatgaaacaaagccacggcaggacacagggcatggcacacaaaagggcaggggtggggaaggggaggtcttttaaccaatagttttgcattagggtccatcttcccacccttccctccggggncgagtttcggaggatttgacgtgttttgattgggggttgaccttgaca

SEQ ID NO: 456807 - DNA, 416 bp, Homo Sapiens
tgtttatcgactgccacccttcgtttcgggggagagggtggcagagaggataatgtagaggtcatgccaagttagttcataacactgggtgaggtactgaaactctaatataagaggtagggtcttctggaaatgaactgagtctttttgttaatttgagagatatcagtgagggagaagggaacgtgaactctaacaacatgttcagtttctgccacttcctgaagggggcactgtagcacagccgctgaagtaagagtggggcatgggctaaaggtggcgcctgagcaagtgtggatgggagagaaggaggaacctggaagtggttcctgctgagggtttgaacaggggaggggggttgagttaacaggcagtggaggatagataggagtgtaaagtggcatcgataaacaccg

SEQ ID NO: 456808 - DNA, 402 bp, Homo Sapiens
aacaaccccggacaatacaccgtagtacttcatttaaatagttattatactttgccagataaaaatttaaaaggcaaacactcccaaacagacaaacagtaaacatgcagaaaacagactggagtagaaatcaacaaattagcaattacattatacctgaggtgctggaggatgctgtggcattccctggggacttgtctgggcataataggctgcttgttgtctataatactcagcccaggctgcactataatctggctgaccacctggaggagccccagtcggagcaggaactgcctgacccattttcttgtagtactcttcccaagccttggtataatcaacctgtccagctggggctggattctgctatctcctgtccggttgttggtccggctcatc

SEQ ID NO: 456809 - DNA, 420 bp, Homo Sapiens
acccggtgtttatcgatgccacccactgactcctaggtcttattctgattctgaattcttcagtcacccataagcttgtccttaccgggagtcagtgggtgtgtgttcccaggtggacttaaccattcttctcctttatgatcctttcccttgggtggacaagtgtgatttggttgtaaggccatttttcaagttgcctatacattgataaaagaaatcccactaacggaagtagactgcatgcccaatttcagtgtctttctccaggggccagggttgggcccagaagtgcatggggtgcttggtgtcgttcagtgatgtagtaaggatacacggttccagacccggcacaagaaatgccttcccttggcagttcagcaccttttctacaaatctttattctctgtgcatcgataaaca

SEQ ID NO: 456810 - DNA, 687 bp, Homo Sapiens
tgttatcggaatgccagtagtcggttagaaagagatcgggaacgtgggaggcagtagatcttagtaggcagtctctgctgctaccatttatctggcgaggcacatggtatttctaagccaaaaagcgcctcctagtagaaatagaaatcctcttcatgaggcatgttgcgggtccttcctttgccttacagtgcacctttccttttgcgccaccagaaatcaggctctaagccccctctgtgaacaggaaagttctgccttcagcagttaggagtaaaatgtcctccatagcccaattttagttctgatgctgtcccaacagcaggagaacggcccttcagtccctacattcttttaagaaacttagtctgtttccaattagaacagtacttaattaataagaggattttagtttcagaggttaacgggaaccgtttttctaagagtaaatgctttagcatgggccataatagcagaatatagggttccatctagcataccccccattaaagtgggcttgcccaattacttagtttttcttgagattcattttttttagggaggcacaccggtcacacaggtctaggaagtcaaagggaaatcataggcagaggactacagctgcttggaggagcacagctaggccccaatcttagttcctctggtgctgtgcatcgataacaccgg

SEQ ID NO: 456811 - DNA, 576 bp, Homo Sapiens
cccgactttgtgatctgcccacctcgccttccctaagtactgagatgacaggttgtgagccaccacgccccgccgtattattacattttttaaaatatgtcttagatcatatattatttgggagcttaattttttgcatttaagagactgccttggagatcattgataatcatgtgggtatgtgtacatctacctcattgattttaacatttctgcagtatattatagcatggaggtgctgtaatttaaccctgtctgcttttgatagacatttagattattggtaagtttttcattatgagagacaaaggaataatgaacagtcttattacatgttgtttcatatctatgctagtactgccttcgtgctctttagggtaggcagaattggtggaattccatggtcctttggtatgtgaaatagccctggtgtgcatacgttgtcatggagaaaaggatcaagacatgtccccgtccctcttctccgcatcatctattgttatccacctcagattgcattggaacttgttattataggggtcattgtcattcgaagatgtggcaatccgataaaca

SEQ ID NO: 456812 - DNA, 459 bp, Homo Sapiens
  misc_feature (388)..(388): n is a, c, g, or t
actagtccagtgtggtcacggtggcatcgataaacaccgggtttatcgatgccacatcagtgcagttccttttccctggactgatgtggcaccttcaattcctctcagatcgattaaatcaaggtttgactttggtgttccattttgttttcaacatttccatgaattaccaagacacagctttctacagagaagcacctttctccagatcttcatggccatttgggacacacagctccaaacccaaaaggtgtccacgggatcaacccacaaggcaaacaacggctttctaaggaaaagccgagtttctaggtggcagcccacttcggacgtgtccttcagttaacaggctgcagtggacagcgtgtggtgggtggaggaagacggnagatgagaaattcaaggagattcaccacagagcagctttctggctcagctgttctagggtggcatcgataa

SEQ ID NO: 456813 - DNA, 362 bp, Homo Sapiens
aatccttccttcccatagctgagaaagggaaaggggacaggccaatccctctgaagcagtaagtcagaacacgaagacttacagaactcaaacatcaaaggtcaagtagcttctagccaggaaaagtggtggccccctcagcctagccagcaccaaaccagcatggggtggagactcagcctggcagtgaagggcatttcctgggtttcctctgaagcagaggagaaatagtgggtcagcacaggctgctggactgaaccatgagccagaaggccagaatcactgcaagacagctccagcccgcacacctcagttgtgcttttgaaaacaggtacaaagctgaggcatgggactgtgactga

SEQ ID NO: 456814 - DNA, 801 bp, Homo Sapiens
  misc_feature (132)..(132): n is a, c, g, or t
aggatccgtgtcatcccccttcgtgtatatttcatggtgttcattcactgatgctccatccaagctgcgagacatggtataacgtttgctggatgagcgttcagagtaaggtgctgggcgatctatcaacgncactggctcttctcgtttgcgcttgtgtcctgccactataacgaaacttggaacccaaggttaggaatttcttgggaggtgcttctggtaacagtagtctgaaaaatgtatgatgctcaacacatactttccataaacgcttggcagctcgatggtttggcagcttaaacccaatggtgctttcaaattgttcaaactctcccggccggatcttaatgtaaaagttgttccgtttgtatgaaatctttagaaccttgggccaggcaaatctgtttattcgcagccggtcgcgatatatcaacagaccacttgcacaaactcctaacataatttctaccccttctgagtccttagcatgatgtaaatctaccccataccttgataatttttttggcattttccaagaaatgcatctctgcttctgctggcgtcattcctctgtggctcttgtgcagctcgatcactttgtcttccagttctttagtgtggtttggtgcaaagcggaactcactaatgtaatcgctcccacattcatctgggtcatagtctccgagctctgactggacagtgtaggagcccagcaaggccagggtaacaaaggagcagggcagccctccgacgatgtcatctcgcaactgcaagcagtggtgcatcgataacaccgatctt

SEQ ID NO: 456815 - DNA, 919 bp, Homo Sapiens
atcgatgccaccctttttcgctagttaaaaatcagatggatctgatgagatattacttatttaaattctggtctccctcccgtttccctctctgtatccccttaagtctggattagaagaggcacgttacgtatggtttagttataatggtgattaagtgggatgaatcgtgggataaaaatagcagttatttaaaatgcgctttaaattgcactgagttaagtgatcttgtagggacccactcttcttttcatagaaattttaacaaattatggtcttcaaatgaacagaaaggcacaaaaatacttttttcattcataactagaaatacgccaaattttaattgcagactacttgagggtacttttcgtgttttgcttttgtgtaatttagtgtgttaagagttgaatttctggagaatttgcttaaggaaatatagcatgttggaaccacagaagtgcccattttgagagctggtctcttacagttggtctccaaggtgtgttattgtagaggtataaatggtccattaccctactgtctcaagggtagagacattttgcagcattagttttgtcttacctgtggccaatgagaatccactttctgaaatagtctgcttgaattggtattcatgagatttgtgctcatgatactacttggttcaaagattgtttttaagtgaggtaggataaattactagcagtttttttgaatttgagatataattattccttgaaacgtctctaatttctcttgtagatgaatttatgttccccgggtaaatcccgttaaaatttttttaaaagcttaggagagaccagaatatgtatagcttatggtgctttctaaaatatcttcaaaagaggagctaagccatttgcataggagggatcttggacttcatatggatacacgt

SEQ ID NO: 456816 - DNA, 282 bp, Homo Sapiens
gagctcggtacccccccgactagcccgacagggcactgttctgctctcttcccaagacaccaacaaggacaaagtcttccccatgacattccactgcccttaccaatcagggaatcctactgcccttccacctccactgcagctgctttcctggacactgtcagtctggaaggtagcatcaaatactcatctctgaaatgggataatgacagtacttattatatgaggtcactactgtcgggctagtcggggactgtcgggctagtcgggactgtcaggcgt

SEQ ID NO: 456817 - DNA, 208 bp, Homo Sapiens
gctcggtacccccccgactagcccgacagcacaacgggttgccatagttggcagcctccagacctggaaaccatccccacacctgcaaccaaaaggctcgagacccaaggccttctatcagtaggatgcgaattttgatctaggggtcagacagacattggcctgatgtccctcgactaacagccagcaacctgtcgggctagtcggg

SEQ ID NO: 456818 - DNA, 644 bp, Homo Sapiens
  misc_feature (39)..(39): n is a, c, g, or t
  misc_feature (362)..(362): n is a, c, g, or t
agcggcacccgtcggcaaccctgtgtttttctgattgtnccgtttactgtgacctgcaacggggtggcattcacttagggtctgacttcacagctatgacaaaaccgaaaaagcaaaactgcaaaaaagtactaagatgtacgggtcttggggatatctgccttatatgttatattcaaggaaattaactaaacatcctgtaaaacatcgtttaaggaaacgtttactagtccaaaggcccaagctaatttatttccactttagaaaagttagcacatgcttttgaaaatctgtgatttcattttattaggctaaaagggtaaataggctttattacactgaagctgcatctatatgtcacntgacataaagttgaaaaaataaatgcaggcacataactagagacttcttttaagggggtttggctggcttcttctctcactgaaatggccagtcgtgattaaagtgataaaaccccatatctgtctttggtatattgtacacaaacctacaaaaataaactgaacttgcaatatttttgcaaaaaaatctgtccgttaaaactgaggataaaatacctgctcaattttattttactaagtatatatttacatttcacccaggcaggccattttcttttgtga

SEQ ID NO: 456819 - DNA, 203 bp, Homo Sapiens
cccgactagcccgacaggagggtcacaagcactgcccttactgacagtggaaacaaggcactgggaagtgggggccacgcctggagctggagtctgcttcccagcagggccaggtgaggccaaggcaggagtgagaggtggaggagtcctagtgaggcctgtcatgttgctgtcgggctagtcgggggggtccgaggctcgaa

SEQ ID NO: 456820 - DNA, 542 bp, Homo Sapiens
agctcggtacccccccgactagcccgacagtccccagaagcacagcctaagacactccctctcactggcagcaccttccatgaccagatagccatgctgagccaccggtgcttcaacactctgactaacagcttccagccctccttgctcggccgcaagattctggccgccatcattatgaaaaaagactctgaggacatgggtgtcgtcgtcagcttgggaacagggaatcgctgtgtgaaaggagattctctcagcctaaaaggagaaactgtcaatgactgccatgcagaaataatctcccggagaggcttcatcaggtttctctacagtgagttaatgaaatacaactcccagactgcgaaggatagtatatttgaacctgctaagggaggagaaaagctccaaataaaaaagactgtgtcattccatctgtatatcagcactgctccgtgtggagatggcgccctctttgacaagtcctgcagcgaccgtgctatggtaagcacagaatcccgccactaccgtctagctagtcgggg

SEQ ID NO: 456821 - DNA, 204 bp, Homo Sapiens
tcggtacccccccgactagcccgacaggaagccgtgcgtccaggaaacgcgtctaggctttggtgtctcaattccaattcctgaggttgggaaatcgcccgtcccaaactcaggttcaggtccaggcgggacgacgtctggcctcgaggcggcaccccagggcagactccccggggaagactctctgctgtcgggctagtcggg

SEQ ID NO: 456822 - DNA, 222 bp, Homo Sapiens
ccagggctgtgagtggctctccagggctgtgagttgagtggccctcttggctgtgagtggccatcatggctgtgagtggccagccaggactgtgagtggctgcccagggctgtgagttgagtggctgtctggggctaggagtgtctgtccagggctgtgtgtggctgtctggggctaggggtggccatctggtctatgagtggccgtctggggctaggagtg

SEQ ID NO: 456823 - DNA, 617 bp, Homo Sapiens
  misc_feature (51)..(51): n is a, c, g, or t
  misc_feature (323)..(323): n is a, c, g, or t
aagaaaatctcatcaaaaccccggaaagccaacccgggtctgcaaaacagnaatctaatccggcggaaatggcggaaaagtggcttcacctgcttgctgggtggctggttctcctctggaatctttcagttccaccgtcttccaccagctggtgcagcctcagagtgtcctctcggaggccctggtaaagggactcgtccttcataattagcaggtatagatccttgatgatgtggccggccccctcttcctcttgaagcagcccctggtaggtgtccaagaaatggagaagcatggctagacaggcttgcttccggcccaanccttcagggccctccatgcctcctgcccgaacaaagtactggtgtagctcctgcagaaatttctccgtcgggaggaagagagaatgggtaaggacaatgtcatccagcaggatatctgaggcggcgctgcccctggtagcccctccagcaagccgctccagaacccggttcagaagatgctcgggccgctcgggggcgcccagaggggcccagggcggcgaagtcaagggctcgcctggggacagctcgtcagatgagtaggaggaaggggagcgatctgtcgggctagtcggg

SEQ ID NO: 456824 - DNA, 323 bp, Homo Sapiens
taggccggaggacactaaggccccagtttggtaggccgggcagggcgtgtgttttcttgctgatctctattttttgtcttctgtttttctgttttgctttccgtgtatggtaggcaccagtacaggcactgcatgcgacagaagttgggggaatgaaagaggaaagggataaaggattcaaggatggggcagtacaagtggaacaggcgttatttcctgtccactgatggactgcgatatagaccggggagggatcatgtctaaaagtattcactggcgggccagactcgcatgacatcctgtccacacgacatgcagcctga

SEQ ID NO: 456825 - DNA, 963 bp, Homo Sapiens
  misc_feature (385)..(385): n is a, c, g, or t
  misc_feature (736)..(736): n is a, c, g, or t
  misc_feature (875)..(875): n is a, c, g, or t
  misc_feature (881)..(881): n is a, c, g, or t
  misc_feature (901)..(901): n is a, c, g, or t
  misc_feature (925)..(925): n is a, c, g, or t
tgggcttctctgtccgagacccctattaccgggacagggtctcgcgcaccgtcagtctgcctacccggggcagcactttccctaggcaatctcgagccacagagacgtccccgctgacgagaaggaagtcctacgtccgagggcagcccattaggtccacagatgtgggattcacacccccatcatcccctcccactcggccccgcaatgaccgcaatgtcttctctcgtctcaccagtaatcagagccaggggtcagcgctggacaagtctgatgacagcgactcctctttgtcggaggtcctgaggggcatcatctccccggttggaggagccaagggtgcacggacggccccactgcagtgtgtctccatggccgacgcaanccaagcccatcctctgcctggatgccacagatgagttgctattcacagggtccaaagaccgaagctgcaagatgtggaacttggttacgggacaggagatcgcagctctaaagggccaccccaacaacgtggttctccatcaagtactgcagccactcggggcttgtgttctccgtgtccacctcctacatcaaggtgtgggacatccgggactcagccaagtgcattcggactctcacgtcctcgggccaggtgatctcaggggatgcctgtgccgccacatccacccgtgccatcaccagtgctcagggcgagcatcagatcaaccagatcgccctcagcccttcgganccatgctgtacgccgcctcgggcaatggcgttccgcatctggggagcttagcaggttccagcctgtcggcaagctgactgggccacatcgggcctgttgatgttgcctgacggttcacccaggacgggccagccaggcntggacntcgtgggttgatttgggttncaagggaccattaagtttaaaggntgttttggagttggggggagttgttgttgaagggggga

SEQ ID NO: 456826 - DNA, 377 bp, Homo Sapiens
  misc_feature (149)..(149): n is a, c, g, or t
gacgacaaactcaagaatttgtattctggaaaataacccaccttataaatttaaatattttaaaggcaatcatgtgtatacacacatttaaactcaattttaatgctaacttttcagaatcaagtatttaacgtggaatatattttatnagtcagtaaatggtagaggtattaaaaaaaccaattataaatggatttcctgttgattaatcctccccttacgtttttgattaggtgaagaattacatgggcattacattgtcctctggttcataaatgtagtgtaactagaagagactaaaagttaagaaattgcaaacagacacccaaggacaggtcagtttcagtgcccaaactgacctgtcgggctagtcgggg

SEQ ID NO: 456827 - DNA, 285 bp, Homo Sapiens
  misc_feature (73)..(73): n is a, c, g, or t
  misc_feature (91)..(91): n is a, c, g, or t
cccccccggacttagccccgacaagcaagcatcctagctcaggggacccttaaagccaggcctgaaaaactcntttgcaaagtcgagatantggtaaatattttcagtttcgatgggctaccaccagtgggaaagtagccacaaggtaatatgagccgggtgtggctgtgttcccaataaaactttatttaccaaaataagctgtgggtgagtgggtgagatgtggcccacaggccgtggttggccaacccctgcctgtcgggctagtcgggggggtaccgagct

SEQ ID NO: 456828 - DNA, 581 bp, Homo Sapiens
gcacaaggggtcctgcctcccaagggacctccgggcggaagggcagacacggcagggaaagatgacagcggacagggcagaggaggcagccagcagacttcaggccccaggcaaaccacctcagctgtaccccctgcacagatggagagcagagaatgggctgggccaaggggcagccctgccctcaccagtgcggcctgtcttcagcctccaacccactgagagagagaatggagaggtcgtgggtggcaataaggcgcacacaacccaactcacatgggcaggacaggcccgggcaggccggtgatcaaactgaaccgcagcggctgaaattcccacagaaaaggccaaacaaaccagcaccccgcggtttccagagctgagcctcaaagaacccggcctgaaaaggttagagacaagcggatggagaaatatttgttagccaaaagaaaccaagggtagaattacctcatgaaacactataagctctcggtcaaagaaacattaaacaaagagaaatatattatattgtgataagagacctgatctaccaaaagaacagtcattaatttttaagcttt

SEQ ID NO: 456829 - DNA, 568 bp, Homo Sapiens
  misc_feature (521)..(522): n is a, c, g, or t
  misc_feature (550)..(550): n is a, c, g, or t
ccccgactagcccgacagctctgcgcttttgttactgtggggaaaaaagttccttaggacaaggagacttaaaacaattcagaataacgcctggatttatcttgccatggagaaaccaaccttctaacaagaaggacattgatgacaacagcaatggaacctatgggaaattgcaaaactcagcaccacgaaaccaaggaggacagagaaaagaaccgatctcctcagcagaatataggtatcttgtgtaagtgtaagcacccagacagcttcagatgatcaagctggtaaactgtgggatgaactcagtctggttgggcttccagatgccattgatatccaagccttatttgattctacaggcacttgttgggctcatcaccgttgtgtggagtggtcactaggagtatgccagatggaagaaccattgttagtgaacgtggacaaagctgttgtctcagggagcacagaacgatgtgcattttgtaagcaccttggagccactatcaaatgctgtgaanngaaatgtacccagatgtatcattatccntgtgctgcaggagccgcc

SEQ ID NO: 456830 - DNA, 516 bp, Homo Sapiens
agtgacattgagcagctgcggtcacaactccaagccttgcatattggtatggatagttccagtataggcagtggaccaggggatgctgaggcagatgatgggtttccagaatcaagattagaaggatggctttcattgcctgtacgaaacaacactaagaaatttggatgggttaaaaagtatgtgattgtaagcagtaagaagattcttttctatgaccgtgaacaagataaaggaccatcccatccttacatggttttagatatagacaagttatttcatgtccgaccagttacacagacagatgtgtatagagcagatgctaaagaaattccaaggatattccagattctgtatgccaatgaaggagaaagtaagaaggaaccagaatttcccgtggagcccgttggagaaagatctaattatatttgccaccagggacatgagtttattcctactctttatcatttcccaacccactgtgaggcttgtatgacccctgtcgggctagtcggg

SEQ ID NO: 456831 - DNA, 447 bp, Homo Sapiens
  misc_feature (89)..(89): n is a, c, g, or t
  misc_feature (397)..(397): n is a, c, g, or t
  misc_feature (400)..(400): n is a, c, g, or t
gcctggtgcaacttatttctgcttctgcctgtctctagacctgtcttaattatgatttgtgtgctgcaggatccatgacatagatttanaacagacccatgggcaaatctaaacagtggaccacacagtgtccagtctattcgtttctctacaaagtgacagtaattcaacctgtaatcagtagaagttgattctacctagattccttcagatatatctaattaaatgtagtcaccttcaataaaataaatgcccagatactattttaaaggatacaggaaatccaagtcatacctctaccaaggctaactatgctgtaccttaatttgtttgttctcagagctaaaatcagtgcttcacttagattctcctttcctaaagagtccgtcaactcagnagnaatgcctagttcttgatgcagactcatcattagtcaatcttggtctt

SEQ ID NO: 456832 - DNA, 740 bp, Homo Sapiens
ctcggctctaccttgttgttacaacttcatagagtggtggagatcagagtgagtctattgatttatgggcttcacattaatagggatgctggtgaataagataaggcgtgatggtgaaatgcaatagttgggcgagtactagtcacttgagtatcatgttgatttttggtcaagtgggttggtcaaatgaccatcttcagcatattacaatggattcttgagagaagaactacctgagctatctgacctgaactcaaaaatgaaagacactgtggatactacaagacttgagtctgatttgtgaaatggttaattttaaaagactaaccacatcactaaaatcagtaatttaatctccaaactcaaagccctttttttctgaaccctcacaatgtttcttcatcaaaccactccagactgcctttgaaaatatgtttattcaaatgatactttccttatctggcaacaatactttttaaatggatgggatagaatacaatgttcatatttaaccgtacataaatgatgttaccattggtggatcaacagatgtggttttttcctaatctattttcagaattgtgttttgacttacagtatgtggtctaggtgagtaccacaccacagcacagaggaaactgtgatcagataccaccactggccataatataaatttctcccatctaagtactaaccagcccaaccctgcttagcttccaagacgacatgagtagagccga

SEQ ID NO: 456833 - DNA, 472 bp, Homo Sapiens
  misc_feature (453)..(453): n is a, c, g, or t
gtacccctcggctctaccttgtcttagtcaaatcacttatcctacctcaaactgtcccctcatctgtaaaatcaggacgatatcccctacctcgtaaggttattattgagattaaataaacatctacaaaaagcacttagcgcagtatctggtaaataatggcccaataaatagtagctatcttccttcattccatgcttaaacttcacaccctatgaaccctatacctgtacttatcacaaaccgtttcaatgatgttggtattttaaaggcagttttaaggcaatttagaaaaaaattagtcatcatggatagaattcactattcatgatgtgaataaatcacgaggcactaagagctccacccatatttgaggctttcaacataagccctacttcttacgcctgtgtctaattcatctgtctgtatatatactacccatgagtataaacngaccaaaggtagagccgag

SEQ ID NO: 456834 - DNA, 684 bp, Homo Sapiens
ctcggctctaccttgtttattaagggctcatcaaacattcctcagtgtctggtcccagatgcttaggccgaggcattggcacttttgaggccagctgtaactcatccctgagctgggctgcaccttctgcattcagtgagaacagaatggacacagcaaggacttgcaggggccaccccaaggctgatgacattgggctctgaagagcttgaccagcaaattccattgttcaatagctacagttggttttaattaccatgggataaacactgagggcgaatggtggaatggaaatgaaccaaattatcgcatattcgattttgctctgtttgatctctggttggttctcatggcctacctgaccaaccaagggtagtgacatcgatgattcggggtgccatttttcttctgctgcttttcaccgtgtaaccaatcaaggtttttttcactcttgccttttactccagtgtcttctggtcatcaaggtttgattcttttacctcccttgaccagcacaacttgagttcaagttctggcctgtctggacccggcggttacacctatcaatcacctctgtgcttaaattccttcaagggcttctccacattgctatattttttctaattaaaacttattggcattgaacctggacaacacaggtttggactgccgtgtcgattatat

SEQ ID NO: 456835 - DNA, 581 bp, Homo Sapiens
taccttgtcttcctactcagttctgaggtactttctttttaaatagaactctttaaagaaatagtgaactaataagctggcagggtttccaaagtttttaacatacaactttttgagagtaaaatatcaaaatatacacttgggtacacttcctaaactttcttcctcccgtctcatttttgactctcatcttcacagcttcaggaaagaaagcattaatcccgcctccttttctccagtgactatgctaggcgtgcgctaccccatgctgctgctgtgcctgggatggtacggccttggcagaccattcttcccggagagcacttggtggacgtgtctcggtttgccacggggcttccctcacaatcagaaacttcccattctaataacttgtcctttctgtttctgtgcttacgggtctctgtttcaggtgactttggggaagttagagggagaaaagtcataacttcatacccagatctggcaaggcatccacatctcaccttgtcctgggagtcctacctccacgaggtatctgccttgcaccaacatgcaagagcctccttactgaccaccatgca

SEQ ID NO: 456836 - DNA, 728 bp, Homo Sapiens
  misc_feature (137)..(137): n is a, c, g, or t
tgtcctccaggctagacttgctgttgacatcaccctccacacaagcttctactctggtccaaaaccaggacccaataatgggctcctcctcctcagccccttgcatggtgtcacagctagtttcagccctacaatcnatataggtctggttttcagcccaaaaccaggacccgaatattgtctcttcttcagctcctggcctggcctcttctccgattccagcctctatatcaacttgttctccagacctaaaccagggaccaatgacctcttcttcctcagaccttgtcctggactcacagctgaccccaacaccagattccacactggccgcatcaatgacccagaaccacgacccaaaaatggtctcttcctcagcctcttggttgacctcttcaccagcccagaaccaggaaccaataatgacctgttcatcatcagctgctagtatagattcagaggtggcctcagccccagttttcatactggtcttttccctagccccaaataaggaatcaccaatacgctccccatcagtccttggtctggatttactgctagccccagtccccatactggcctcttcttcagtccagaaccaactcccaattatggactcatcctccacttgtagactggactctatgctggcttcatctgccatgctggactcgtctgtagcccagaaccaggtcccaatgagggctacagaacaaggtagagccgag

SEQ ID NO: 456837 - DNA, 763 bp, Homo Sapiens
ctcggttctaccttgttatcttctcctgcaactgaaatttcagcagcgggagaagatggacaagagaaagctcgggcgacggccatcttcatccgataagaaagatgttaaatgcaaaaccagaggatgtccatgttcaatcaccactgtccaaattcagaagctcagaacgctggactctccctttgcagtgggaaagaagcctaaggaataaagtcatctctctagaccataaaaataaaaaacatatccgagggtgtcctgttacttccaagtcatcaccagaaagactcgtcagcaggaagtgaatctgtggtttctaacggagactgtggcaaggctttactggggacaggtacaatagtctttggacccctgggtggcatgtatgagcaccagtcatggtagggatgagccatttgtgccagttcttgggattcctggtggtaacatgggttagggtggtggttagggtccaggcaggtcagttcttgggtccctggtcagcatgtttggtgccagctgtggccgaggtaggtgacaggaaacaatgggtgggttctcaggccacttgggcattggcaatgtacttgggcattggcagtgtacttgggcattggcaatggtgagtagggtgggctagtgcttaggcccccttgacagtgtgtgtgggctgtggtggtggcagtggacagggcagctctgtctttaggcacagtattgtgcgggcaggtcctgtggcagcgacaacggtagagccgag

SEQ ID NO: 456838 - DNA, 837 bp, Homo Sapiens
ttagtgacatgttctttctccccagcatcttcaggtctatcaatctttaagttctctgttccattttctttaccattcctttttggaatctggctgcttttccttgttgtggctgtgacactagtatcactctctgtcccatcatcaacaccatccaactgtgagatttttggaagatcacactgttcctcctcccgaaataaattatgggatgccagtcgttcctctccacctgaagaaatcactgttctagtgaagttgtaatagtataagtcgtcttcatctgaagtgcttaagtcatcggccccatccacctgtccttcagctgatctcttgcctcgcttcttcccagttgagctgctgtagaatggaatgtcttcttcaccataggatcttactccatagagtggggtaagcccaaaaaacatgttagaacgtgcacgggcactgcgacggggatacctccttttaaaagagccatcctcctgaggtttggggccatctggaagcattaggtttctgtcctgtactggaagattctgatagttgttactttgagaatcctggcatgaggtgtgggaaggagagggcctctttagaagaaaacgacactgaagagggttcagcaaaggagccgattttactaacattcagttctctagatgttgtgttatgaacctgtggggccagtttaggaattccagggtaagccacattatgtgcagatccctctgagctcttggaactcagcacctttggtcttctctccctttaaagaggagctcttggacaccaagtctgaagcactggactgcttcagacaaggtagagccgagg

SEQ ID NO: 456839 - DNA, 908 bp, Homo Sapiens
cgggcattggggcagctccggggtgcctggtggcattccgcacggcctcttctaagagctccatccatgtgttcttgtctgatgacgtcaatgcaaccagctcatagatctggggtgggcccagcttggaggtgcagatgatgaagaaggcccgtttatctgtggccacagagcggatgagcacagcattgggcttgagcacggggctgaaggtctgcttgctgtctgaggagcccacagcagtcttgctgtggcacttcagcaatagcttctcatcctgtttctgtagcagcactaggaggtcctccagcagcagcacgtggaggtccaaggtcttatccttgctgatcctccaggtcaggggtccctcatggatcatttttctggttgtaagatccaggctcttgaactctgctgccagggggttgctggccctctccagggcggtggcatccaggcgtttctggtagccctctaaacggtggcggttctctgtttgttttaccgcttcattcacatacttgagaatctcccggcactggtcccgggcccggcacagcttctcatgctcagaggtgccaccctctgtgtgcttgatgatgctctccagcagcagcgggtacttggtgagccgctgcatctcagagatgatgaggtctctcagctgcagccgccgacactgagggtggctctcagcctcctgcatgaagagctggaatcgactctccttgcgttgcttggtcttgattagctctagggctattgactgataggaacagaactgtgcagccacttgctggagttcctctcgggcagggccatcaaaccgggccagcatgaggtcactgatctctttgatgatggggccttctcccggagcttcttcatggcttcacaccaggaattgt

SEQ ID NO: 456840 - DNA, 632 bp, Homo Sapiens
acggagagatgaaatcgtattcatgaatatgtcatgaatactgcagtcaaaataccccaatttttaaactcttcttggatggtagcaccatgcttagtttcagcacccaatacccaatgagggcacaaagagacatccacctatgaggaaataagcccataaataagcaaatgggaagataaactacttcaataaacacagcatctacaaagcaacttcaggctatctggaaccccttccctgaaacctgaaagaaagtcatcttactactagaatcagctgctaataggaataactgctgaacccacttggctaaactggatttatgactctatggtgagaagcggttacttggccatataataattataccatatccacatttcactgacacaaagaattctgctgaaagctataagtaataaggtacatcttaccttatacagcagctaaactcttagaaaactgcacaaaaataaaatttttatgaatcaaattgttcactagaaaagctgacccaaagaattcattccccactacattgtatagagcgtaaatttcatacatattaaacttaaagtgacaatgaacctctaatagccctatatttactcatttaacttcgacagcta

SEQ ID NO: 456841 - DNA, 703 bp, Homo Sapiens
gaccagaatctgctaatcatatgcagctagatagtactctcatatgcatgcttttgactcggcacaatattccctaagcatgctacttaaaaggtcacagcccaaaagttagtctatcttttggagactgatacctagccctgctgaagagactcctgcctactgttctaaactgcaataggtgaccattcactaactctgtttctgctgatgagttcctccccttttaccttatttcaaagattctggtgagagctgcatctagtcattcacactggccaagtctacacgagtttggctctggcacataagctggaacaaccttggtcaagttgacttaaactctggtataacagtttccccatttgctaaactgagaataatgttactctgtgaagatcattataaagattaaatgagttaatatttgtaaagcacttagagccatgagtgactattgactgatgcaatgatgtttagtgatgttgcctgcttaatgtaaagtccatgaaaggaagaactttgttgtgtttgctacattgccactaatgcctaaatcagtgtctggcacatagtaggcattcaatcaacatgtgctatgactactgaatacagacccaagaaacgcacagttgtacatcgtatatacctgcagtactacttctttctccaggtttgtattctgtaaactgacagagccgag

SEQ ID NO: 456842 - DNA, 590 bp, Homo Sapiens
  misc_feature (109)..(109): n is a, c, g, or t
ggaggggtgggtttcacccggagggagggctgggggcatggacccccaggcaggcctatccaatcatctgaatgggtgagcagtgttcagctcagaaaaagtaaggggnaaaaaaaatgcgatctctaaaaggaacatagacaatagcaaaagaagaaaccgagcccaaaagatgcttctgataggccgccttggggtcctgcatcctcgggtgagaatcactggtggacacgggaggatggagagccgggcagacatgtggagtgagaggggaagatgcatgtgtggcagggctgatggaggcatcagggtcaagactgtcaggtgttagaacacagttcctgacagaccaggacaaggatgacagctaacaaatggatgtagctgaaaaggcaatgggaccacggtggtgcagctggggtttccaacgcctcggtcccagactcaaggactcaggtggaggagtgaggcccagagaagggcccagtgactcagaggaagtgggctgtgcgggtgagagcagagagcaggggatctgttgtcatggggaggaaaggcgcaaaggggaatggagacaaggtagagccgag

SEQ ID NO: 456843 - DNA, 753 bp, Homo Sapiens
  misc_feature (280)..(280): n is a, c, g, or t
ctgaccgctgctattgacaatgacacaagcctggaggccaggctgggggttccccatttggacctgctggaactgggaaaacagagtctgtcaaagctcttggccatcagcttggacggtttgttttagttttcaactgtgatgaaacctttgatttccaggcaatgggccggatctttgtgggcctttgccaggtgggtgcctggggctgctttgacgagttcaaccgcctggaggagcggatgctctcggctgtgtcccagcaggtgcagtgcatacnaggacagcactgcgtgaacattccaaccccaactacgacaagacctctgcccccattacttgtgagctgctgaacaaacaagtcaaggtgagcccggacatggccatcttcatcaccatgaaccctggctacgcgggccggtctaaccttcctgacaacttgaagaagctgttccggagcttggccatgaccaagcccgagcggcatttaatcgcccaggtcatgctgtactcacagggtttccgcactgctgaagtgcttgccaacaaaatcgtcccgttttttaaactatgtcgatgagcagtctctcttcccaaagtcattatgacttcggtcttcgggctttgaagagtgtgctggtgagtgcaggcgatgtgaagagagagagaatccataacataatgagggagacagaggaataggttagcgttgtgcaagaggtcatgcgttgtgccacatgaggtctgcggggt

SEQ ID NO: 456844 - DNA, 655 bp, Homo Sapiens
  misc_feature (37)..(37): n is a, c, g, or t
  misc_feature (59)..(59): n is a, c, g, or t
  misc_feature (89)..(89): n is a, c, g, or t
  misc_feature (103)..(103): n is a, c, g, or t
cgtttaacacccttggccggaaaaaaaatccatcctngccccacaggccgtggccaaanggataaaaatgtgaaacgaagtttaaacantcctgaccttgganaaagcctttaaataatgtaccagtgttttcctaaatatttccctgttttttccagcactttaacagatgcccattcccaggttaaactgggttgtctgtactaaattataaacagagttaacttgaaccttttatatgttatgcattgattctaacaaactgtaatgccctcaacagaactaattttactaatacaatactgtgttctttaaaacacagcatttacactgaatacaatttcatttgtaaaactgtaaataagagcttttgtactagcccagtatttatttacattgctttgtaatataaatctgttttagaactgcagcggtttacaaaattttttcatatgtattgttcatctatacttcatcttacatcgtcatgattgagtgatctttacatttgattccagaggctatgttcagttgttagttgggaaagattgagttatcagatttaatttgccgatgggagcctttatctgtcattagaaatctttctcatttaagaacttatgaatatgctgaagatttaatttgtgatatcggt

SEQ ID NO: 456845 - DNA, 381 bp, Homo Sapiens
gggcttcactgatgttgagcagatgtgtgaagaagaaggcactgtttgtgaaagtcctctatggcgaggacaatgggtccatccaggctgctcctcagggtcttcttggagccgcttttgtctgcaatgagtgattcaagcatggtccgcaccatgtacagctgtgtgctggatggccccacagcacgccggggcaccttgatatcaaatccacctttggggtccttctcccctctcaagcatgggtcatatagggtctcgccctccctcccagtcacagatggtctttcgaattgcctgtaggacgctgatgaggacattcttcttcttccgtaccgcctgccgcaggggtcacacagcgtcacctgggcgaagtcctgc

SEQ ID NO: 456846 - DNA, 386 bp, Homo Sapiens
cagccgcacaccaagggcagtggccagtgatttggactttgtggcacagatggaaatttccaggttctctaggtggtaggcagaggcctcactttttaagaaactcccccactccacccctgccaatgaggacattgcttagaggtatttctatcagtgttgagtagaagagatcatttcttggtgttgaatttcaggtaaggatgccagcttctgcatatcagggtggtgatgtttgggctgcgacaggtctagacagcagtctgaaagggggctcaaggaagtagctgtgacagtcccgtgggatgttttctgctcccctttctgcatgtctcctggagggagatcctgttagtccctgctggactgtgtgtgtccggcagcac

SEQ ID NO: 456847 - DNA, 520 bp, Homo Sapiens
ctgtaatcatgttcttagctggtcccagcagtgtctttatagtgacttttttccccaaacacaagatcatgcattgcatttagttgtcatgtaagttttgttgcgtttagaacatgtcacttctgtccagaaatagaggtagtcttctgactcttacctctcacaagctttgttgaagaaaaaggacattaggaatttcacagaggctgcttaaaagaaacggagagactcttgtgtccttaatttttacaactttgtctgggttggggtttcttgactcagcaaggtctgtaaggcagccctgtttggtaagcatgaggggcggtactgaagctttcctttatgttataatcccagttgttttttctagaaaccatcaatagcgtctagaggactgactcaatttggggatcctattctcaggactaagcaagtgtttgactgaaaccagcccatataaatgtcactgtgcctctaactctctgtagccattcctgaatttctttcagcagtgggaaac

SEQ ID NO: 456848 - DNA, 589 bp, Homo Sapiens
cctcggctctaccttgtctggtagggcaaacctgaatgagcaatttgttctgactccagagctgtagataggggtgtttctttatgtcctgattctagaagggcagcccaccccacggtctcaaagaacggaagaattggattctagagacatgaagtgcttgcctggttgattacctctagccactgctccccttggccacagtggggcagtgactcagagctggaactgtgttcctgcctggttgccagattttgtgtggggggtggagaggaacgagaatgaatgagcaggaacaagtggctgctggatttgtaacaccttgggaggcagctgctcaagaaccgaaattgagagacagcaggccggctgggagtctccctccctgtctgacctgaacctaagatttaataaggtggtgcagctggggaagacactatccgaacgtggagccccaagggagggtgagtgtgtcccctgccttttccggtaagaacaagaaagcaggttagtcctgtactggtttcatagggattccgtttgctgtggtatattctgattcatgaaagtcaagtaatgactgggcaca

SEQ ID NO: 456849 - DNA, 526 bp, Homo Sapiens
gcagcagtatataagagagtctgggctgctgtggtgggagaagcataatcttcaaaaatatcaaatttcatccttatatactcatatggatcttcttgccacagctcttcatcctcatctttataacacatcacagaaaaaatcacatcttcagagatattctgtatgtgtggcttcatctgcttccaggttatagaatgaaccaccccttggttgagatagttgaatgcttgctggagaacacggggagctacatattctttctgtctatattgatctaaaatttttagtagcacctgctgaatgcccactgcataggttttctaaaagaattcagaaaattcaaagtattcttttgtgacatttcctgggcttccatatcgttcaaagagccgagctacgatatgcagtgcccacttcattacacttccaccataccagttctggtctatcatcctcatctatgtgcagagtctcaggaggaacggtcctgtcgataatagttcggaagatctccatccatgtt

SEQ ID NO: 456850 - DNA, 1141 bp, Homo Sapiens
  misc_feature (584)..(584): n is a, c, g, or t
catcgaaacaaggaattcatgtaggaaaggatcgtgaaagaagaacatcaaaagtgtctaggaaaggttcaaaagatgtggtggatcacatgactattcatatggatgactctgattcaattacagtgtcagaacaaagtgagccttcagctgagtgctggcagaatatgtataaattgcttaacttctattcacttatctccgatccaacaggaatattggaaaagtcttcagaaacatttggaccagcaggagttcggagccctacagagccaacatgtaaagttgtgtttgagaatgaacaagacgacagcagtttgactaagactcagaggaaacgtagcttggtaacttctgaacctcagcatgttactctaatagtgtttgggattggcatggtgaaccgcacacacctagaggcagatattggtggactaacaatggaatcagaactgaagaggatccatggcagttttactcttaaggaaagaatgaaagatgttttacatcaaaagatgactgagacttgtgctactgctcatattggtggggttaatattgtgctgcttgaagggattacaccnaatatacaactggaggattttcctacatctcctacaagtacagccaaacaagagtttctaactgtagtgaaatgtagtattgccaagtcccaagccctctacagtgcccaaagagggctgaagacaaacaatgctgctgtgttcaaagtaggagctatcagtatcaacattcttcagcaccctgccaccttacatagcatgatggttcgaagttctcaccaactatctaaacaaatctcagacctaatcagacagccttctacagcgtaagttattttatttgttcacattctgtgattccatatactacctcagggtattctttgctgcattaacaaaagtttggagggagatgaagggttacttctaagtatcgaccattatggacagtggagcaagaggagagtagccaattgtgatcatgtgagaatgacttttgaaagcattaaagtacagtgtcgtcagtgcaattgtcagtgttccatattgcataaacaaagcttaagagatcctagagatttgtgggtaatgttagaatacggtaccgagctcgattc

SEQ ID NO: 456851 - DNA, 521 bp, Homo Sapiens
cacaacgctgactcttcccaacctgcactcgcgtgggaacgagaagacactcattggaggagtcggccgagcaggcacaagcggtgtgacgagactcgcgtgggaagaagaagacactcctggaggagtcggcagagcaggcagaccaaggagttcatcttctcggagctgctgtccaacctgtactcgcgtcggaacctgcagacacttgtggaggagtcggcagcgcaggcacagcgcgtgccgatgagatggctgcttctcagagctgtctgtccaacctgcactcgacgtgcgaacgagaagacactcgtggaggcgtcggtagagcaggcagaccaaggagttcatcttctcagtgctgctgtccaacctgtactcgcgtgggaacgagaagacactcgtggaggcgtcggcagagcaggctgaccaaggagttcatcttctcagagctgctgtccaacctgcactcgcgtggaacgagaagacactctggagcgtcgcagagcatgcgacagtag

SEQ ID NO: 456852 - DNA, 573 bp, Homo Sapiens
  misc_feature (562)..(562): n is a, c, g, or t
agctcggtacccctcggctctaccttgtctcagagctgtgctctccttgactcttctgatggtctcccagctggaagcctcacatttcagtctcattcccccaagtggcccatcagctactccatctctggctccccaactaaacagtttctctcatagtgctggacctccactcactagttttttttccagctgttcttctcttttcttcaggtcactcttctcgaccgagtgcaaaaattatcccctccataccagctttgatgaccttccttccatactcctcaccagacacaacataataggtcacacactcctctgtgctttctggcacgttttaaacattattattattgacctttacctatagtataccatggcctatttatgtatccatctcccctaggcatttttcctcaaaggacaaggaaccatgtcttacccatctcttggggtaaggtgcctaggcatgggtgggctggacgcttgggggaggggtgttcattaaatgttggctcaaaaggaacaaggcaaacatttaagggtgggtgggagagcagcnggggggacagc

SEQ ID NO: 456853 - DNA, 952 bp, Homo Sapiens
  misc_feature (23)..(23): n is a, c, g, or t
  misc_feature (72)..(72): n is a, c, g, or t
aaccactggccctgaaacgaacngttagggtcaacaccgccaaagcccaggggacaccacaaaaaaatagangaagcccaggataaaaagttccactgcaattccaatttggccctaatttccttggataatagtttccctattagattttcccgattaatactgatggctcttacctaggctgtgataattaggttttgatctattgtgacattaatgatcacaatcagttgactttgaaattgtcttaattaatggctctttccttgtcagcttttgcctccagtgcaggattcattcccttccccactgccttgttttaactccttctcttactgacctcagaaacaaatagcattggaggatcactttcttcccataaaacaagactttaaactattttaaaacatttctcttgacagaggagcaatatgagatgatgttagatgaaatgaggatcagaatgtaaaggcaagagtacaagctgtctatgaacaggaaaaactccatcttagaaaactaccaaagtcaagcaccatgttaaagttgacaagttgaagtaactcttaaaagacaagatgaggtagattaaaatccaagaaagtcagcacaagcaaaaagaaaccagaattgtttttatgaaactatctaaaaaacttcacactttaactttccagagcagttactctaattcctgggaattctgacttccaaagttagtcaactctccattatccaggcagaaataaatatctttttcttgtggtcatccatgggtcagtatcgaccacatccttacgatcagactgtttcttaacccagctacgcttcgatgattaaatctgagactcagatttaatatacaaggtatatgtatttctggcaaaggtttccacataactgatacattctctgcttagacatcacccgactcaggcccgccgatggctca

SEQ ID NO: 456854 - DNA, 439 bp, Homo Sapiens
gactgaggtgctccgagtggcccggtcaatgggcttgtagagcagacgtccatggtggcagacgtgtggctgtccttggagtccttgggacctttcactttgagttcctctgagatcttctggaactggttgttggactggctgcacttctcagctgtctccagagcgactttatagttatcgacaaacgctttgtacacaccgagctggctggccagctgtctggaagaggtggcccatggtgacctggctgtcccactgttgcaccttgggcacaggttgtcatagaactccttgtggatctcatagatgtcctggatcttgtagaagatggtctcgatctgctggatggtgagcacgggctgggaggtggtggcggtggccttcaggggtttcatgggcccaggagccagtccctcaggtggagtcggggagacgc

SEQ ID NO: 456855 - DNA, 294 bp, Homo Sapiens
ccaagaagatgctcgtgttgcctggtgagcgggagaagtgacccacgcagggttgcacctcaagggggaaccatgatatattcctcccaccccgcatgatgggtgaagggaacctggaagaggatgtggtaaattcccaggaagggcagagccctggtccctaaagaagggcagactctttccacgggaggcagctccctcccactagacggaattggcagagcatggatgctcagtaaatcctgggatctccagaacagcatccagtctcagccatccgaaagcagtttgcct

SEQ ID NO: 456856 - DNA, 210 bp, Homo Sapiens
gggaaactgaggctcaaggagaggaagcgcagtgggcagggttaaaggtcctctctggctggacccagacttaacctcgggtatgtttgacctgagcccccatgctccttcccccaagagccctgcaccaggaatctcagcagacccataggtttggtcctagcctttctattagctcttagtaaattacaccatccaagcagtgccgag

SEQ ID NO: 456857 - DNA, 512 bp, Homo Sapiens
cgactgcttcggatgtctttttgcccgtaatttcgagctgccgctggattcgccctttgctgcgttctcggaagtccacttgagcttcattgtatttggtcatcacctccaccaacttccgagaaaggacagagtgctgggatttccgaatccgaaggtctgccgatgacctgacctcatcttcttccatatgcttctccatgctcttcagtttgttccggacgttgttggcccttttcttaatctcagtcgtgagctgctctaggtcatccttggtttttggctctggactcggtgcagagagaatgatactgtagagtttcttagcctcctctacatgttctgagatcttgtccatgttaagccgagtttcctcaatctcagaaaagaactcgtccataaaagccgtgttgtcgatagcaatctcaaccgcatcagtatcatcatcctgtgtcagctgcttggccttcagctgcgtccagacggtccggtcagtccgaagccagtacgga

SEQ ID NO: 456858 - DNA, 433 bp, Homo Sapiens
aggtgacttagaggaccccggcactgcttcggatggattggtgaatggatgaacagcggggttggatggatgggtaggtagaagggtggatggattgctggctgtgtggtttactggctaggtgggtgggtaaattggtatatggttaggtggaagggtggatgtatggataggtgggtggatgcttgggtgaataaatgaaatggcaactgaagggacaggtggaaggatgtgtgggtaactagatgggagggtgaatagaataatgctgacataagcattaacaattatgtctagcctcttgcccctctcttcccaactgccttttccagtggaaaaattgaaaatcatggacccggggaacacattcccctgtggtctgttaatagaggcccagcaaggccagccgaggctgtcaactcacctatccata

SEQ ID NO: 456859 - DNA, 863 bp, Homo Sapiens
  misc_feature (374)..(374): n is a, c, g, or t
gtgagcattctgctttctgtttgggcggccccacaaaggttagagtagcaaatagagtcaaaaccctgatcactctctctaagaggcacaccatgccttcctaataagaatgcccgcaccagatctgggctggttattgacaccaaacttgatgcaacatcgaagtccaatgtcaccccactttggtgtccaatgcaccccagcttctgagtctctgtaactcagggtcaactagaaagcatggcccagatcgggggtctcccgagtgtgcaggcccctttctctgggcgacttctccctgtgtactatttgcttggttgtgatcacttcctccctgagttttttattctgttgaggtttttgccttgccactnggggagtcttttagattccgtaggcgcttttggatttggaaccctgggcgttcctcttctttatcacagtgggcacagttttgtcctcatcctcacacattagagtcatttgatttttagttatttcggctgccttacacatctcaatggctttctttgcccaggaaggtcactttccctccacatcttcctcacagagcacttgatccaattgtgcgtattctacacgcccccgaagaagtgctctttcaaaagaggttcatgagttatccatatccgcataccctggtggctaatttcagctccaggactctgcagaccggcatcccttgtgagagggaagatgcttccatcaccagcctggggtggctctcctcctcaagccgggccccaaatgcactggcagctttatcccactttctacagcgatgggtctccaatcgttcctcaaatggagcctgccttcccccatccgagcagtgcacaggg

SEQ ID NO: 456860 - DNA, 249 bp, Homo Sapiens
ccaccatccaggtgattcgcagcagtaaggctgatcagaaatttgatcctggctcaggggggttccggcagtaatcaaactctattcaccttgggtgagatttcgttatacccattcagccctgcttcagtgaaatctcactcaggaaaatagattctgtctccaactggaatctcccaaagccatgactatgtttctgatcagcactacagctcagagtgaagcgttcagttccctgtcataaccagt

SEQ ID NO: 456861 - DNA, 383 bp, Homo Sapiens
ctgactaccggggaagctggcctctccggctcaggccgactctaacagaatacccgagaggtcaggccagcttcttgcccgtagtatattccagagtgaagtcgttttttgataagtaatcattcccaattctaaagtgatagcctccaaggagtcattgctttgaagaactcctttcatctccagctggactcttttccaaacaaccatcggcagagcctagtcagggttctgacacacagggttctgccatgagaagcaaattggcagcagcggacaggcccccgaggcaatggaattcagttctcagaacatactcaccatggtctctttacatgttgtgtggattcttcccccgtagtcataagcgatcgtctagagca

SEQ ID NO: 456862 - DNA, 505 bp, Homo Sapiens
  misc_feature (338)..(338): n is a, c, g, or t
  misc_feature (413)..(413): n is a, c, g, or t
ttaacaaatataatataaagggcaagaggagaaaatgatctgttttggttttttaaccttcatttatttcattggttagttaaactactgcagaaatttttggaaagatcgtcctggtgcttctgcaagcgccaaaagcaaaccatggacctggtagttcaggcagaataccattttttaaaataaaccaaagtctgtattttatccttccccattccacagaccgcagcagactgtgggaagctggcgaggcccagtaggaatcccgcgaccccacagcctcagcgctcagggttccacggtccagtacaggctaaactgacctcgccgacggccgncgcccacttgggcactttcttcccgggtcttgttctacggggcgtttgagggatttcttagtctctttctttccnggggcatttttcctccgagggccagaagttttgaatttattaggcagttaaccagccgttttgggagggggaacttggaggtgatccccttt

SEQ ID NO: 456863 - DNA, 437 bp, Homo Sapiens
  misc_feature (83)..(173): n is a, c, g, or t
tacacacacacagactgcctactcccccaatccctataacacacagtacacacacacggacggcgtagtcccccaatcccgtnnnnnnnnnnnnnnnnnnnnnnnnnnnnnnnnnnnnnnnnnnnnnnnnnnnnnnnnnnnnnnnnnnnnnnnnnnnnnnnnnnnnnnnnnnntgcacgctgaaaagagctctgtgctcatcaccagtcaccagacaaaggcatattaaaactccaaatgactaagatgactacacacctacccagaatggctaaaaattaaagagaatgactataccaaatgttggtaaggatgtacagcaacagaactctcacacagtgttggtggaagtgtaaatggctcaaccatttgctaagaaggtctggcagctgctcctatacatacatgcgaccacctactgactcagcacgataggc

SEQ ID NO: 456864 - DNA, 662 bp, Homo Sapiens
actctagaggatcgcgtgtcatacccctatcgtacgtagtgagtatcttgaaaactaggaagagaagacagcttctaagcaaccagaagttatagtagccaagtatacatgcacaaaagccaggtgcttgacacctgtcttggtctggttttaggcactcacacgtacgaagcttgagattcttgtttaccagtccccacaaattataagccacagattaaaatagtcccaggtctggcttggcgaaggtcctccaaatgcaccagagaagcttccggaaacttggcacctgagactaacgaaacagcctttcagcagagtgggtggcagatgggaaggcttcagaagcaaggtgcctccctgagtgatgtcccaggagaaaaatgacatcaacccagccaacgagaaaaagccctgtcgtgctgtgtgggaaggcaggtgccgggccttacctagctccacatgctcatgccatacttgctggaagctgggatgatgggatcccttctcacagggccacaggaggggagaggttcatgggtcctggatggctaggccctggctgggactagagagcctgggtgagagaatttccgtctggggctctggatgtgctcgctggggaaactgtccgcgcacgaagggggatgactcagatcctc

SEQ ID NO: 456865 - DNA, 446 bp, Homo Sapiens
tcgtctagaggatcccgtgtcatcccccttcgtctcatgtgtccttttagcaaaattagatagtccatcaccatataccgcatgatcaggtccttcctgttggatgactaactgaatgaaaataccaaatttccttttttatccttagaaatatatcattcagtcatcaagcgcttcagctgatacgatcagtgtcaccattatctttggaatctagagtgctgttctgtctctatgccttcctcttctgaatcatctcatcattgtgaaatctcttcctttctcaaattttcttgcctatagccatttgggcataaagaaggaattctgaatttccagctgcattcagtgaaatctaacacaacaccccgagcatggtgtcgttgtctatcttttatacattctatgagaaatactgtagaactttgggcactgccgcaaggaaa

SEQ ID NO: 456866 - DNA, 423 bp, Homo Sapiens
caaccagcttttggaaaagcaaaagcttcttacagacagaattgtctttctgccatgcttggcttcatcccgtccgctagctctattccttttcctcctagagttcagagacaaagagggtcctatatacctacctgtttgagtgatggaagagaggaggaatatcctaactaaatagccccagatagtttgcaaccaggtttgttatatgcttaacatggttcctggcatattatctgtgctggatcaagggtaagggtaccttctactactactacttttatcagcaatggtgaggaaaggatcagagacctgagtccaccctcgacagtttcagtttttggtaaagaggcaagggagatggagaatgtttcaagaatgttgggttggtgaatatacccaggccacgaagggggatgacac

SEQ ID NO: 456867 - DNA, 328 bp, Homo Sapiens
gaggtgactctagaggataccgtgtcatcccccttcgtggaagggactctgctcagcttgagtcagcagcctatttccagtccagtcactggccagagggaggatgggggacgttgtacacagctctgccatagctgaggggaccagttaatgggttcattgtgagccatcaagatattccaaaaagtgtctagaagacacttctccatgtgactctggactgacctagttcttcccccgagcaccatttcttggttgtagttctcaagaataatttttaaatgttctgggaatgcagtatcattagagaggaactagcctgaaacag

SEQ ID NO: 456868 - DNA, 396 bp, Homo Sapiens
actttctgtatgtatttggcgacttgggtttaggtaagaactaagtccataattggctttattggagttggcattttgacagttatgaaaagtcagagggaaaaagaagtctaaggtattgcaaggtgtgttactgaatgatgaactgaggactccactacaggaagactaagacgttattaacacatttatagttgaaataattgaacaagcccatgagagagtgaagctgagatgttgatgattttggagatggagcagttatgggtgatgataaaggacactgtgtgtagccttgagagcgatagctcattaggaatggaaaaagagatactccggaagaccaagtaaccaggaggctgtccacgaagggggatgacacgggtccttaggtcg

SEQ ID NO: 456869 - DNA, 224 bp, Homo Sapiens
ggagcttatgtcatcccccttcgtccacaacacggttaggcaggtgtgctcagggggtctgaggctttcacggatgttaaatgtatgtccagaaaagagtcctctcctcagagttcactaccctcggtttcacagctgtgccaaagtttaaaatcaggacggatttccttcccccgctgtgtagaaacgcctggtgttctttaaatgtgagatgtcgtttctac

SEQ ID NO: 456870 - DNA, 760 bp, Homo Sapiens
gtggaggatctagaggatcccgtgtcatcccccttcgtacagaatctctttcattcttaaaagctcaactacattttcatctattctgggatgatatctcaggctgagtagaagctgaccctgttgatctcagccctatcagcatctagtcaggacctggtagcctttgtatcagcgtgaagtcagttcctcatagttatcttttcttagcagaaaagtgagttggatcagtagccaaggtggtaattgcatcgctctcaactctttggttgccctcactatcttttcttggcttcttcctatttgcatgcagcaaaagcaggaaatgaaaggatactctggaatacctggccctctccctgcaactgagaaatatttttatctttctcagtcaaactcagctgtcatcttttctctgtgcctttccctgacctgcccaagcagaatggctccccatgctctgcatggcctctggccattactccctaaggtggctgtaaggatcatcccggctctgagctcctggaagcagcaactctggcccctttgcaccttcctgagcctagcatagtacctggtgctcaacagatgctcgtctcaagctcgaggagcttctcctcagccttgtatctctttgctactgcccccccttgtagcagtgcacgcttcctcccttaacctggtcagctggtttccctggcagggtggagcgaggcccagctacgaagggggatgacacgggatccttagagtacccaga

SEQ ID NO: 456871 - DNA, 411 bp, Homo Sapiens
tcagactacctgggttcaaatccaggctctgccactaactatctgtgggtgggtggtccttgggttaagtgtgttacctccctcgccctggtgagagcagcagtcacttcccgggttaatgtatgctactgaaggtgaggaagggtgtgacggcacctggcacaagcctggtgctcaagagttataccaggattcactcacatcggggagtggtacttggggcttccctctgtgccctcaccgaggccagggccagggatgctggcaccggagcaggtgcccaagggagctttgcccgagtgtgtgtgccacagaggatttgtgcagggggcaagccccaccccttctagctgtgaagctcttggggagagcacacgaagggggatgacacgggatccttagagtactcac

SEQ ID NO: 456872 - DNA, 333 bp, Homo Sapiens
tccccttcgtgaccagtcagtattctttggatttccacagcacttaccattttctttggttaagccccttccaacaataataaattagcagaaacttgtggagcacatacatctgtgcatgtgtgctagacattcactcattcatttattcaccaaacaagcaccgaccgtttgccagatactgtgcaaaattcgggggatagtgtggagaatatgacaaagttcctgctgtcaccaaacttttgctctagtgtgggcaaataagcagtgagcaaacagataagtttatgacatgctctcaggtgtgatcaccaaagccagggaggagcgatg

SEQ ID NO: 456873 - DNA, 904 bp, Homo Sapiens
  misc_feature (41)..(43): n is a, c, g, or t
  misc_feature (95)..(95): n is a, c, g, or t
  misc_feature (99)..(99): n is a, c, g, or t
  misc_feature (200)..(200): n is a, c, g, or t
  misc_feature (208)..(208): n is a, c, g, or t
aattgggaagctgcctggaagaaccatctatcactcctgcnnngtgacaaatggcaggaaggagcagcctcccacacaatggccctgccactccntgcncctccacaccttattatgcctgagaaattaatattcatgttgttttgtcttgacaagcagggcagagtgatgtcaggtagttgcttcccttgtcctccttntgcacatncccctgagcggctctggtagggctgaacctctgctgggaaagccttagtgcctctcagctggggacagaacggtacctcctgcgagatgctctcaggggcttggctgagcctggctgtccggaccgtcgcctcaggctgcgcagcatgctagggcacaagattatgttccaccctctgatgtcagagtatacaagttgtgcatctctaccctctgcactgggctgtttgggtgccagagacctaaagctacgcacagatctccgacatgcacatggctgcccaccttcctccccaactgcctctacccctagcggcctcgcccaccaaccaggttcatttcagttcaaataaatgtattgagtgttccccatgggttaggcattggaccaggacaggagtgtaggggatacgtcccctgctattgccatctagtacatgtctcatgtctaaggaagtcaaacagctgtaaaaatttctacagaatttgaaaaccagagaccaagctgcagtagagtagaggctgacctgaaatcaacaattacaataacttttcagagtctacacaatggggagaagacagagtgtttgcaggagaatatctgtcaatcaataaggatgtgtctttctgtagtattttctaaactttcagataagtctaatgttccctcttcccaacacacacaccccatcctaaa

SEQ ID NO: 456874 - DNA, 1191 bp, Homo Sapiens
  misc_feature (33)..(33): n is a, c, g, or t
  misc_feature (112)..(112): n is a, c, g, or t
  misc_feature (129)..(129): n is a, c, g, or t
  misc_feature (973)..(973): n is a, c, g, or t
ggtgccaaatgtccaatgtcattataactggtnggaatcctggaaaggtattcccaaagtgcactggtttatggccatccacttccccttgtaaccttaccaaaactatgcnggccataggttaaaaangccactgtcaacatcaacagataacaagtctgttcccaccacatttaggataaatggccaagcatatagtggataaatggagaagagtaagaggacctcatccttcttgagtcaaggtccttggaagagcttctgtgttctggagtgagtacacattcttactttttaaagatcggaattaaaccaaaaagttggtccctagtttcctgaagtaattcagctctgaactacaactttagcaaacacttgctatacctgctcatacctgttaagcagtttcatatttctaaatgtgataaatgacagaggtgattcttacgtatctacattttcaggtaccccacagggtccatccacattgaatcaactgtcttatcttttaaacagaccatactacaaccttatagttatattacagttgatattttctcaaagtgctgtcatatacattatctcatagtcattaaaataatgtgaacaataaagtttttttaaagaaaagggaatgtaggactaactaggttttttaaaaactcaagttggtatttctttactacaaagtgcacattgctgtgttgctgaggtctgtcccaaagaatgaccccattgaattttttaaatggactgaattctactgagtgcttgcttggcttgtgttcccattactccacattcaaagccccttaaaggtcaaaagtgtcaggagcatgtgcttttagaaagtgtgcagcaccacacaggctgattgtcgggtctgagccacttttttgcagtgtctcacatggcagcaggtatggtggaaagaccccacaaccataaagtcaagagacttgaattctagccnttgctctgccactaattaaccgttctgagacaataggcaagtaatttaaccatcttctgctagtttcttaatctataaagcaaagggttggggtactgatagttttcagatagcactgggtgtttcaaacacctggcgagattactggagaatacactggccgagaccccagcccactgggaattctgatctggagtggggctattccgtcagttttt

SEQ ID NO: 456875 - DNA, 420 bp, Homo Sapiens
cgggatgctggtactgaggaggctggattcctggctttgaggatgaccaggagctggagccaggcacacagcctggtcggaggagttccactcaaagcctcaccaatcccatgaccccaacagcaacctctagacaagggttccagggcatctggacagcattcggcattttccaactttgcgcatgtccctcccatcccattcaatgtcccataaggtgaacaaagcactccattactcactcacccacttgctcacataggtacacaacaagcattcatcgagcacctactgtgtacaaggctttatttggataccatggaaatgcgaaagctagtcagataagaccactgtcctcaaggagtttccagttgagtgagtacataaccacgaaacggactgtggacccgaaggggatga

SEQ ID NO: 456876 - DNA, 677 bp, Homo Sapiens
  misc_feature (13)..(13): n is a, c, g, or t
  misc_feature (49)..(49): n is a, c, g, or t
aagtctggctgancctaccagtttgtttttgggtataaccgtatccttnggaacccaggctcacccagcaagctatcccctaaactatgagaaaagcaccctgaccagcaaaccctaaagtgggtgcctgaggagactcaaaacatcccaaattccagccagtcaactgtttgttttacaattccctgttgacaaaaggagagtggtcaagcaggcagtaagacgacctagcacaacacacaacagagccaagaactccaaccccatcagtacagacaggccaggcttcgtccacaccaccagctacgaaggccacccagttcatttctcttaccccagttccacactctggtccaaacgcaatcttccagttatgaaactggtttattatgcaactctcctgagtacaaagaagggtcaccacccaacgagaacatcctgctccactgagaggaatgttacttgtcgcaaataaatacaacatgcaaacacaatttctcttggaaggctggttagcaattcgactctgtgaaattgcatcaaatctagagacaaggaacaaagctttggcccagctttggaacatcatgaccacacacgaccaactaagggagctgccgagtcctcgctcgacttcagtgctgcttctggtctctctgttgaactttctggacagc

SEQ ID NO: 456877 - DNA, 288 bp, Homo Sapiens
  misc_feature (48)..(48): n is a, c, g, or t
aaagcccctcttcattatgcaaggggttccggttcattggcagcgtgnagtcccccttgcggaagttttcactgggactcctggtaggggtccgggaagtccacgttctcgggcagggtcacattttcaacaaactggggtggatctaagtggaaaccaggctccttctcaccatctatagtgtagatcttgtctctaggggagcttgatttggttttcaggtaggtgcgctcgacctcactacagtccttggggtatttggaggccactgaccttttaaagttgtcc

SEQ ID NO: 456878 - DNA, 551 bp, Homo Sapiens
acgtctcaagagttacaagaaggcttacttgttgtctgtgttgtttttctagttattagcaggtacagaatacgtttccaattactgttaagtttagcctaatctcattcgctgtgttaaacacacaggtgattgatattcttacatttctaactatgggatggaatacttcctcttgttaaagaaatttcagacttcagtaagttgttggcaagaaatgtgacagagacataaatgtgtaaaatctgaatttaacccctaactaggccctatatttatgttaaataagtgggagggaagcaagaaataagttatgagtgattcccctcgggacttatcccagaaaggtatccccttgctttgcagggaaatgcaagcacaggtattattagctcccaaaacttgaggagcaagtaatctgatggtatccccgagtcctgggcctcacacctccacccagcaatcctcgtcttcccagacattcagcttaatccatttacctccatgtatgcattgtatacctcctttcccctacccctatacgtctgtat

SEQ ID NO: 456879 - DNA, 779 bp, Homo Sapiens
tcccaggccaccgaaccatgcagccccttctttgggggaagagacctgtgtcagtcttggttaattgttccagggaaccttgctaacagaaacttgctcttgccttggctcttcagtagatgacctggctgtaaagagattccctggacgagccagatcattcagtttcagcgagtccttgagctccacaacatctaccagatatagcagacaagcacccatggaggcaggtttcgggcctgaagcagatcagagggctttgcaaaagacagcatagagccatcttcctgcaactttacctctttccctcagcatggggagccatgactagggttgcacctacaggatactgtaattatgactccatacattgcttttgctcctgaaacctgggaatcaatggaaaggcagggaatgtgcctcttctgtggccagactctgttatttgcaattaaagccagtatttaaaaaatgcaagaggcagttgttagtcttcagggcttggcaactgaaatagctatgtggcggatacggaaaacagaggacaatctgaggatctagctggaataataaatgacagctaccatttgttgagcacctattatatatcaggcactgagctgggtaggctctaaacttcaaaataaccctgtgacttaactactttatctccattttgtagttgaagaaataagttcagagagaaagatacttcacaaggtcatgcagctagtaactgatagaatcaggattcatagaatcacgaagggcatggacaa

SEQ ID NO: 456880 - DNA, 593 bp, Homo Sapiens
agagacttttctaattactaaattggtttgttataaaaagataatagcaaatttctgcttttgataattggacatttcttccctgtaggctaatgcaggcacagcccgtgcatgcacaataagttatgcttttgaaagccataactagctaataacagctacagtgtcatcagagagtaatggtgtgctgattagcataattaatgacaaatggtggtgcggaattggtggattggtttagcggatgatgaatgcggcgaggcctgggctgaggcctgccaactaggcctcgctggctgtcagcccttctgttctcccgatgcagccctcattagtcacgatgggaggtgccagtttgtattccgtttggagcacagaaaacttaataatccaagcaaatgtggctatccccttttcctctgtatttactcacaaaaccctctcactcattcccattgtggctgaaccattaagacacaggctatttccagatttctctgcgaggcttgaaggcgaaacaaaagggagcatattagagagaggcacggatccccgagctttcatctgtacatcaatgacttactctcctaggg

SEQ ID NO: 456881 - DNA, 471 bp, Homo Sapiens
tggcatttttaacactttttaacatgtcaattccctatttgccttctccatgcttatttctggtcgtgggtaaggtgcttcatcataacaactgaaactatgtggtacacaggaaaatgtgactgatctggaagccattttgtagttagagctcctgtttttctactgtaacacacatatagacctatttggagcatctgatgatggtgacctatgtgtcactgtgtgctcttctcattccacatcttctgttagcaaaaatatttgacagtaccattacctcccccaggagaacatttgcattattaaaaagtataacacaccaagattcatggaagaaatgttactgtgcttactcagagattcactgttattatttctagctttggttctgggttctctcatttattaaacactgaaatattgagaaaatatcttgccttttctggctctgaatttcctaagcagtaa

SEQ ID NO: 456882 - DNA, 472 bp, Homo Sapiens
  misc_feature (129)..(153): n is a, c, g, or t
gtttttcaccatataggccaaggatgtcccatattgtcacttttcttggccacattgggaggagaaatgccctgggacacacatgagattacacttacacttacgataactggtgtaggatataattgnnnnnnnnnnnnnnnnnnnnnnnnnatctcacaacgttttaagaaagtttatgaatttgtgttgggctgcattcaaagtcatcctgggccacatacagcccagaggccatggattgaccaagtttgatctagggggttttcctttcatttttttcaatatttgtattcggagtataaaaagtatctggctattaaacaaaaaaaaggttgctcatctttaccactcagtaaaaagcattagccagaaaccccctacaagttaactttaggttatgcttttaaactcagaaaaatactaatatcctgaaattttcaatgagcttgcgactgaagatcctgctagg

SEQ ID NO: 456883 - DNA, 644 bp, Homo Sapiens
tagactctagcggatcctcacgtcgcacagctcatcaggagcaggcgactatttttgaagaggttcagaaattgagaccgagaaatgagcagcgagagaatgaattgattatttcttttctgagatgtttatatgaagagaaacagaaagaacacatccatattggggagatgaagcagacatcgcagatggcagcagagaatattggaagtgaattaccacccagtgccactcgatttaggctagatatgctgaaaaacaaagcaaagagatctttaacagagtctttagaaagtattttgtcccggggtaataaagccagaggcctgcaggaacactccatcagtgtggatctggatagctccctgtctagtacattaagtaacaccagcaaagagccatctgtgtgtgaaaaggaggccttgcccatctctgagagctcctttaagctcctcggctcctcggaggacctgtccagtgactcggagagtcatctcccagaagagccagctccgctgtcgccccagcaggccttcaggaggcgagcaaacaccctgagtcacttccccatcgaatgccaggaacctccacaacctggccgggggtccccgggggttatcgcaaaggaaacttatgagggatcc

SEQ ID NO: 456884 - DNA, 819 bp, Homo Sapiens
ttgtatagtcttttatatctttgacaagatcagaataatatattggactcagcatatacatttacatacaaattggttcatgctggacaattctactaaaagtatacacttgaaagcattatatcatataaatgttagttatcattattttataacctgtgtcaaactgagtaaattccttcaacaaatagagaacagaccttcatttattcaattttgttcactcgttcatcaatactggagatttaggaacaaactttttcctgttctcatggaaattactgtctagcatgagagacaagttaatataggtataaaattgtacaatgaaacagagtacagagcacagtaggcatacacagtagagggaacctaacatagtccagggaatcagggaatgtatctctaagaacataagtctctgagtaagctgagacctgaaggatgttctagaacagatactagatccagaggactgagaggtctaggagtcaggcaaggtgatttgggtgtaagggaagagtaggctgcagccattacatatggtatattagatacttcaaacaactctaacctgttctacttctagaaaactcttaagggcacagtgcatccatgtgagatatgcaactgaaaattaggtcactttattacaacaaatgaaaagcaaaatacacaacactaaaataaaatatcaaaaaacaggtatataagtaatatgaccaacagctacaaaataaaggttatattgtaacactttgttttatttatttatcttttaacttgttgagaatgagcttgcgactggagatcctgtga

SEQ ID NO: 456885 - DNA, 1071 bp, Homo Sapiens
  misc_feature (687)..(844): n is a, c, g, or t
cccacgcagcaaagctcattgaaggtggaggtgaggctttgccctgggattgacagaacaatgagagaataagaggctttaagggagaacttcccagaatgatgctaggattcataggggttagtggctgttaaggggaaaggaagcattgagcccggaagctgcccttgggaagcctgctgctgggccacattctggaactgcaggtgcatctgggaacgtgccttgtggtgcagtaccaaggaaccaggctgctggcagcctcagcaggatgcaggtgtgggagcggcaggggaaagtcagcgagtttcttttctcacctgtcccttggtaggcagaagtccagatctagtgccatgcctggaccagaatcagaggtcaggccactgaggacctgcagaatggacacagttctgggcccctggacagacaaggctgagccctgagatggtgcagaaagtaggaggtagaagcaggcagctgggccctggcgccagatcgggggcagtaagtcaggggacaattccaggaagatctagcaattagaatttaaggtagggccaagagagctgtctgaagggaaagattcccaagggcagagtggcgtgcacagtgtgttggacttggagtccgacaacatggagttaagttccagctctaccactaacttgctgggagactgaactnnnnnnnnnnnnnnnnnnnnnnnnnnnnnnnnnnnnnnnnnnnnnnnnnnnnnnnnnnnnnnnnnnnnnnnnnnnnnnnnnnnnnnnnnnnnnnnnnnnnnnnnnnnnnnnnnnnnnnnnnnnnnnnnnnnnnnnnnnnnnnnnnnnnnnnnnnnnnnatattctaaatagccagcttatgccccccctatttatcctatgtattttggtttgcaaaaccttttctactccattagcttcataggttctgtgtgggattggggcaagggtccttttttacagatgaatctgtgaggcccatagagaggaagtggctctgccccaagtcacatggcttgaaggtggcagggcaggacacgagcctgaatctggcaactcctctgct

SEQ ID NO: 456886 - DNA, 868 bp, Homo Sapiens
taatccaatttattttggtagcattcagctcaattaagggatacaatgttacttaaaatagtctaattagatgaaactccactatggtactcatctttcaatgtctgaaatataaccatgcattaggctgcaagaggtgaatactgttaactccagcctccatgtgtctgtccagtctatgagctacactgctatttccaacactgacctatatacagcaacatgccattcgttctggctgtttgtgtaagagatgcctcacacacttgccttaaccaacatcattcgcattgttcccacaatgggctatgtgaaaatggaggctactttgcatagtgatatgttcataacgtgtattagtcttacagtagagcaatactagattaaaccgtttccaaaaatgcctcctccagagtttattaactgaaaaatgtaagtagcattttggcaatctatagagcagcagtgccggaaagtgtcagcagagtaaaacaatcacattttagtttagaaagcttcaggaagagaatattcattttctccattagagtctcttctgacattgaaaaaaatgtcaccgggaaactgtagctacagttgtaggattctaaagcacagatagatactggttccgctgggatttagcacaccaactttaaataagcaaagtgttgacaggtttaaaataaagataattagtaatttatgatcttatcaccctagttaaaaacaaatcacctgacaaactgactgctatttgtagtaagctacatatcattacgctccgaagtagcagattacttgcagtatgttctttgggatgtctgatcactgtttataagtagcacagattttactcaccttcaac

SEQ ID NO: 456887 - DNA, 892 bp, Homo Sapiens
  misc_feature (387)..(397): n is a, c, g, or t
tgaattaaacagattttatgaatgtctatgtaagctactttatatttccctgtgtaggctttgcttacgtgaatgcttgcttattgcttcaaaatgtaaatcacagatagctctgtgcgatataattgaataatgagtaacttcatttggctaacttatacctataaatcttttaatccataatggcctttttaataacatgaggagatgaacaataatgtccattggtctacatgtatgccaaccacctgtaatgcattgggaactgagctagcagctggaaacagaggcacaagtaagacatagtgtctgttcacttcaagcccattagccagagggagcaatggaatgaatattatagcatgagtatttacaagctgtgatttnnnnnnnnnnngctaagcaaaataataattaaatactaatgggaataactgcttctcaaagaaaaataaatgaaatctgagctgcaaagaatgtgttagaatttgacaaaactatgtacatagctgaagaaaaagggcatttcaagaagaggaatcctcatgcgttgagagcacacatttttatacatatggcaaggctgatgaattacaaatttattgtatgtggtggcatatagagtaattgatgggaagtttattttagaagacttaaaacagggaggtatgcagcaggttaaaaaagccccaaacccacatttcaacaataccaaggagattaaacttgctctgtaggccctgggaggaggatcactgagtgaccttatgttggaagtgacatgatcaaaattgcaacacagaaagatctactcccatgttatgcacgatagattggtgagtggaactgtatatagtgttgttagtatctcaactgataatgagctttgcgg

SEQ ID NO: 456888 - DNA, 688 bp, Homo Sapiens
taaccccgggtcccacacacttgttttagaaagagaacattttgaactgcatggatgttttaagccagaaaaaacgttttttaaaaaacttggtaattaggaaactattagtgctcctgcagcagcaagaggattcatttgatctcattgcgaaatcacacgtgcaccgtcctttacattcagtcagatgcatgcacggcccccggtgtctgttaaagccgatgaggaatgctgcccgcagagcaaaggcgagtggttgtggacgtgcctgttgataatctgatcttgacatggcgccgcctgcgttgagactgttgctccatcaccccgtaggagcttagccatgaaatgttccctctgtgtaacgatgatccctgtgcgagcagaggccggcaccatttggtccctgagactcaaaacaaagactgatttgcctggttaagacccccagtctctaatgcagtcgataaatctttgttggtaaataattgctatcgagcagagttttaatataaatttatgagtggtgttttatcacagcttggggctgcagcaaacactgagtgatgggtttcagatagcacttacattcatgacattaactttgtaagttatttaaagcttgtacacttaacattgcttttggctttcaatgagcttgcgacgtgggagatcctgtagatcaccc

SEQ ID NO: 456889 - DNA, 550 bp, Homo Sapiens
cattaggcaggagtagctggccctgaaatgatataggctgtggataccatgcggccagcactccatcacagtgactcactcgggcagcagcctgttctcacttgtgtctcaggctcccccctcagcagaaaagcttgaggaccacttaggaatagtcatgatgcaaatgtcagtttctcctttgctgcagcagtaccaaagtcttaacaaatgagctgagtcacctggggagctcctgctaactacacattgtggtctattgggttttattaaaattagtgatttttcttccttttaccattttggagtttcatgttttgcaagtcattcccttcaagatagtcatgacattagtctcccccttctgggacagcagaaacattggagtggcctcactgggctggatcatttcaccagcttgcaattacaacccccacatccctggagtcacagagtggaatagtaatgcccactcgccgagactaaatatccttactccaacctaagagccacctctaggctctaagcctttcaactatatgttattgag

SEQ ID NO: 456890 - DNA, 511 bp, Homo Sapiens
tctgcaggagtctccagtcgcaagctcattcaaaaatatttattgaatgacagttaaagagcctttactgtattttaatttccaataaacatatatgtgtcacatatttttaaaaatatggagaagttcagcgtttttgttttgctttactttggtaggttaatgcctgatgttcatcttttccagttcaacaggctgggtgagtggtatggtaccataaaaaggatgatcagctggaaatcaagaccttcaatctctacttccattccctctaacaaacagccatggcatgttgtcatttaattctgagagagcttcatttccacatcttcagaaagacagaacaatgctagatgtacttgcatgtattccaatagtgattgcctttcagaccttcctcttctcccatttgaatagacattagcctcatgagtgacctccgcacctgtactctccccatacacgattctgcatatagccaccaaatgtaactttctaatatgcaaaacat

SEQ ID NO: 456891 - DNA, 486 bp, Homo Sapiens
cctggcctagattgtgagaaaagagatcccattacatttatgaatgggctgtgctgaaaattgacagcaacatcagaatcctaattgtgtgccagcagaaacagtgctattagattttctctgtgcttagcaaaggatttagttagggcattcactttcaagcacccgttctatgcattacacactctcatactgtcttaaccaataactatttctataaggacattctggtgaaattagtgtgtccaataatttaaactaaaatggtgacatctaatattttctcctccaaggtaacgtcagcatttcagagcactttcactatctgaaaacggccaaaaactgatagaagagctttctgtttacaactttatacaccatagtaaagttctaggatgcaaagcttgcacagctttgtaacataagcattttatgccaaattaggtgaggataatgagcttgcgacgtggagtcctcagagcaccc

SEQ ID NO: 456892 - DNA, 714 bp, Homo Sapiens
  misc_feature (127)..(141): n is a, c, g, or t
tctgtacacagtgtggtccttcctgctaggagtctacccttgaatcaggcattaactgctcttttttaacctcaattctgttagtactataatggtgaaatattgagtaataatcatctgtcataannnnnnnnnnnnnnncgcatactaattacttgaagcttttatttttacttaaagctatatgttgctcaccactatttgatctcaggcttaacagttgaggtttagggttacaaaaatgggatctatctatacctgattaagcagaatcaatattaattgaaggatttaaggtggcttaaagaatcgatgaggagtttggagaatccaagctggacctgaaccacagaagacaaaaacttgagatagaatactgtatgttagaatctcttttgttgacaccgctgttgctgggctctcttcagcttacctttggagtctattgcccatacttgctccacagcactgggctcttatctctgtggaattcactggaagacaggtcgtgcacctttgcgtctcattcttaacactaaatatcttcggagtatctgttttgggtgggctgaaatcgccccctttaaagggttggggagagagtgttagttcccctttggcatcagcagtggaaagtgcctgccatccatcttggattctctctgaatatgaagagtgcttagatgctgggaagacaggatgaaatgagcttgc

SEQ ID NO: 456893 - DNA, 653 bp, Homo Sapiens
caaaatctgatttctagacatgctatcaaatgctcaaatacatatcattattattccaaatacgccccagatgtattgcaagaactaaaatcccaagcatacataaactttctgctgtgggaatataatgctagcacactgtcattggggatatgttttataattaatcatcaggatagctctgttctataaacagctgagtatcaagtgtagttttttccctcaccacattagactctaagtaacggttagctgaattgtctaccaaatattcactaatgcaaatctttttaaaatagtaattctaactactttgatatgtacttttcttatttaatacttaaaataatattttaagataagaagcaaagggtattatccctgactttgatgtggaaattatgtaaaatcaagggctttgctgaggtcacatagtggcaaagtcagaaatgaaaagattttaagtatttatattcaaataactatccttagggaataaagtataagaaatctcccttcccccagcctgaaagacactactactctctgtagagacaaataaacctcggtgtctcatattacgttgtcctctggcagaagtataaaaaccttcacactgtttacataagtagttgctaagtgagctttgcgca

SEQ ID NO: 456894 - DNA, 126 bp, Homo Sapiens
ccccatttagaactgttttactgagcacctgccatgtgctcgacacgtgatagttgtagaggatacagagacaaatagacttagtctgtaagactgtgtgaatgagcttgcacgtgggatcctcga

SEQ ID NO: 456895 - DNA, 734 bp, Homo Sapiens
cgggatgcagatttatctgcccaccgttgtttatgggagggattccccctccctcaggtagagttgttctcagagatatctgtaattgtgccttcccatttaagagtcagccacgaatgatttattctaaaatgatagacccaggtagagaggttacccaccctccgtcacagagtggccagctgtgtcccctgcttccgggaggtgggaatgcatgtggaggggtcgttatttcctaactctcttgctctggcagcctgaagagctgtctgtgccctgaacaacagcttagggagctggaggaaagagaaggaggtatgcatttgagggagagaggcccactgggttggacaagaaggtaaaagagggctggtttggcccctaagggaaggacaggaaagcacccgcttgttccctgtgtggatgcagtgtttgtccagctgaaggcagcctcactcggctgactacctgatgagtgattttccccaagctgacagctgctccaacacatttcacctacaagtcctgacaaagtggtgtgttcttttggggctgttattactgcagcaggcatttggaacaatctggaagaatggggtgccaaaggacacccttgaagccgtttctgagtatccgtcccttcttttctctccgatcctctagctttttttggcttatgaaaaattgggcccatccctttcgaatgtccattgtgctgttagtaatgagcttgc

SEQ ID NO: 456896 - DNA, 631 bp, Homo Sapiens
  misc_feature (17)..(17): n is a, c, g, or t
  misc_feature (24)..(24): n is a, c, g, or t
  misc_feature (61)..(73): n is a, c, g, or t
tttaaaactctgatttnaaggatngttgaatttatactttagttatgggtgttttgttacnnnnnnnnnnnnngtatcatgactcagtatggttcaatttcctagtaagaagtggggatttgtgtttttggagtcctcagctcacatgtcttgttcctccttcagcacaagctaggggagatcctaccaacactgataggtcagtcattgatggcaatttgaatgtgggtattactctgtgagccaccctgcttcgcttgtttgtaaggagaaatgcatctggttatgtgaatttgccgagagcagcagacatggagggccagactttaaaagcaacgcaagcagattcgaagagctgttgccctcttctaaaaaaggcttttggaggctgtgttacatgcatgccctaaagcagtcagtctgttagtatgagcaagacatctgaagtacacagttgcttttaggcttgtatagttattttctacacatgccaacacacatgatgataaaggaaccttttctaggaggcattgcagggtttcaatacacaggacatgttctagttacagaagccttgctctgctgtcaacaattgggaaatgctcattttttcatgttttgtgaatactct

SEQ ID NO: 456897 - DNA, 793 bp, Homo Sapiens
  misc_feature (382)..(394): n is a, c, g, or t
  misc_feature (646)..(646): n is a, c, g, or t
  misc_feature (651)..(651): n is a, c, g, or t
  misc_feature (761)..(761): n is a, c, g, or t
gtcctggctcaatactaaacagactggactgcttttagggcatgccatgtaaacacagccctcccaaaagccttttttaagaaagagggcaacagctcttcgaatcctgccttgcgttgccttttaaagtctggccctcccatgtctgctgctctcgggaaattcacataaccagatgcatttctccttacaaacaagcgaagcagggtggctcacagagtaatacccacattcaaattgccatcaatgactgacctatcagtgttggtaggatctcccctagcttgtgctgaaggaggaacaagacatgtgagctgaggactccaaaaacacaaatccccacttcttactaggaaattgaaccatactgagtcatgatacnnnnnnnnnnnnngtaacaaaacacccataactaaagtataaattcaactgatcctttgaaatcagagttttaaaagaatacccttgaaacagtaaagcagttagaaagaaaaaccagaattactagtgttctctttaaacacagtgggaaaacacctcttaactactatttcattttgttcacattcagaatgttcaaaccagaacctaatgatccctacttgtcaataatatgggaagctctggttgccatgatacgttatantgttntctttttatttttaaaaccacattcccttggtgatatctagtgagaaggtgtgattctagtttgtgttgaacaaatgtttttagctctaaggtgttacactgtaattganatgtttccaactactgcttaaaagaagacatt

SEQ ID NO: 456898 - DNA, 382 bp, Homo Sapiens
  misc_feature (166)..(183): n is a, c, g, or t
ctcgactctttaggatccccactagtccacggttggctaaaggaaaccaaatacttaaagaaaatcagattttctcaataagattaacaggagttttctcatgagaaaacatggaggttaagaaaccagagcctgggcagatagacggatggactgactgaccaannnnnnnnnnnnnnnnnnggagacggagtctaattttgttgcccaagctggggggagcaaaaaaccgaagccttgtttttttgggaaagacaaacaataaacctaagtggcctttgtggtttgttttggggaaaacatttaaaaagatgggaggccggggagtgctggggtgtggaaagattttctggaaggtcatgattgtttttgagcagagttt

SEQ ID NO: 456899 - DNA, 212 bp, Homo Sapiens
gaacaaactgcttcccggagctggaaaggcaattatattgtacatggtcatacatctccctgaagcaaaatgccacagcaaatcccagggaacaagcacctccacccagactgcaactatctcaccctaaaagcctggctaccctggcaacaagtcaggcactatggaattcaaggaccaccaagcttctctttagattatgttaatcttgt

SEQ ID NO: 456900 - DNA, 899 bp, Homo Sapiens
  misc_feature (162)..(285): n is a, c, g, or t
  misc_feature (702)..(702): n is a, c, g, or t
cgtccgggccttacggatgtgcagtcacaggctccatcagtgagctgaggcggcggtgccctgacggcagggggcagttgggccttcagtgctcctcttcccctgacacaaagcaggcgccaggtcgggaagacccgggttcagtgtcccgaatgccgctgnnnnnnnnnnnnnnnnnnnnnnnnnnnnnnnnnnnnnnnnnnnnnnnnnnnnnnnnnnnnnnnnnnnnnnnnnnnnnnnnnnnnnnnnnnnnnnnnnnnnnnnnnnnnnnnnnnnnnnnnnnnngtacttagcccagggcctgtcacgtagcaggtgttcgttattattccctatctggttccctttcctaccccatcccagcctcatgttccaggaggaaggaccctgcaacccaccccatttctgggacgcaggctttgccgttaggtagacttggactccagcactgactccacactgacttgccgtggactctaggcggtcacctctgcgtcaacttcctcatcaggaatgcagtgtgatgcagtacctattccttggggttgcagtttatgaaatgatctaagtgtttgtcaggggcttagcacagtgcctgacacataggggctcagtaaatgtcagccgtgacactggtgattttgggggagacccagcgctctccacccatgcctgctgtcctgcccctgcagctccctccgngcccaggtggtctgctttgagtggggcactatttggggtacataagagcactgccctgacctccctgtcatctgaggcagctggaaactccaataggcagagaccaagagctgagctgtgcagaactctgcttccctaggcagctccagcctgtccatctctcccccaacacatccgtactgacccgggtaccggcc

SEQ ID NO: 456901 - DNA, 570 bp, Homo Sapiens
aaaggtaggctcgctcttctgaagcacggcaagcacgaagaggacatagcggtggccgggctccaggccccggttatcgaagccgccatactgcttctggtcgccgggatggaacgtgggtggcagcacagagaagcgagctgcaatatagggccggggcacctccagctgacgcgagtgccgcaggctgcgcctctgtagccgtgagatgtcctggatgagctcttccagatccatgtcctctgggctacccagcggggtcaggaattggcctccacgagacttgcgcagtggcaccatcacaatgaaatagctctggacaggcacggggctctggccgtcaggaagatacaccatgatgaagccgtcagcatcaggcttgggggcgacgctgggcttgccgttgagcaggttgaaggcagtccaggcggtgaccgtctgctggaggccgcccaggctgctgccgcgattggtcagcacaaagttgtagaaggtgtggggcttgaggtgcgtgatgagcttcttggtggtacggccatccacatccagtgtgagccccttgtactgacg

SEQ ID NO: 456902 - DNA, 756 bp, Homo Sapiens
ccctatctgtgttcggggttgtatccgtgggttggacggggtcagagtgtgaggcagagctagggggctgatctctgcaccctgtgcccatggggggacctgctacccccagccctctggctacaactgcacctgccctacaggctacacaggacccacctgtagtgaggagatgacagcttgtcactcagggccatgtctcaatggcggctcctgcaaccctagccctggaggctactactgcacctgccctccaagccacacagggccccagtgccaaagcagcactgactactgtgtgtctgccccgtgcttcaatgggggtacctgtgtgaacaggcctggcaccttctcctgcctctgtgccatgggcttccagggcccgcgctgtgagggaaagctccgccccagctgtgcagacagactctgatggacttatgtgcccagaagccctgcccacgcaattcccactgcctccagactgggccctccttccactgcttgtgcctccagggatggaccgggcctctctgcaaccttccactgtcctcctgccagaaggctgcactgagccaaggcatagacgtctcttccctttgccacaatggaggcctctgtgtcgacagcggcccctcctatttctgccactgcccccctggattccaaggcagcctgtgccaggatcacgtgaacccatgtgagtccaggcctgccagaacggggccacccacatcggcccgcaatccgactgcccgg

SEQ ID NO: 456903 - DNA, 769 bp, Homo Sapiens
gtacccgggcagtacggatgtgcgggccacatcaaggatgaaagatccaaacacatggaaaacaagcaatgaaagccgtaccaagtcagcactgggcgctgcaggggagggagtgctggggactgggcagtgtggaccagtggctcttcatcgacacatgaccctggcctccccaagcctcagcttcctcctggtaaagcagggccctctttcacagggatgctttgaggatgcagtaagctgatgtgtgtgaaaggccctgacactttcattcactggtctctgcaactgtttagtctttagagagtgagcgccacggcaggtcctgggaccccacggtgactcaggtcgaagggcccctgaccttacagaagacagacagatgtcacgcagtgccccacagtgactgcactcagctggggtccaaacttcagggggcatgtgggggtataagaacagctaactgggacccctaagtggggacagttaaggaagtctttccttaagggagtgacatttgagctgagctctgaagactgggtcgggatcaatgacaaggtcaaggggagagggagaggaggcactccaagcaggagctgcctgtgcaaaggccctgaggcccagaggagtgcaacctctagaggaatggaccggccaggaggtacggtggctctggtagcatttcatgaagcactatcatcatgtttgcatttttaaaagatgctgcccatgctcccctccaatccacatccgtcctgacccgggtacc

SEQ ID NO: 456904 - DNA, 513 bp, Homo Sapiens
cgggccagtacggatgtgggcctgtagcaatgtctaggtgaggcagggtatggacctatagcaaggtctaggtgaggcgggatgtggacctgtagcaaggtcaaggtgaggcgggatgtaagcctgtagcaaggtctaggtgaggtgggatgtggacctgtagcaaggtctaggtgaagtaggatgtgggcctgcagcaacgtctaggtgaggcggggtgtgagcctgtagcaatcagtgtttggagcgagttattaaagaggagatgggatttgtcaatagtgagtggggattccttggcccttctgggtttcctatccagaatgttccctgttggctaatggcatcatcatgggatcatttcctcaggctgggatctcccacccatctctcacactccacactcctgctttacagaacatttcctggagtctcatttcctagaatgaaacataagaagggcatctctgcacctgctccctgctgactgccctccactgcacatccgtactg

SEQ ID NO: 456905 - DNA, 591 bp, Homo Sapiens
tccttttcctgtcatttggaatcacccagtctgtggcattttgttagggtggcctgagtagactaagacagtaacataaccccaagttgctttaatttttctccccaggaacaaagacgtggggagaagcagaaggctcagagggaaccctcctttgccctgacttccccaagctgctcacctgccccctcacccactcagcagtgctctcacttggcagcgggctgtgctcccgcctccttcccacagcaagtgggaaccatctctgggaccccagccccatagggagaaggctaacccatggattaaatcagatgccctgactgacccctcgggtctgccactttccagtcatgtggctgtcagtggtcactccgctggccgcaagccccagttgtgaacggagctgccccaggcaactgactggatggaattacatagaaccgcaggcccaggcccagagcccatcagggtatgggactaagcaaaacactcacctcacgctctccctgctgtctcaaatcagcaagaagctgcccctcaaacagaggcaggcctccctgtcacatccgtacaggcccggtaccggct

SEQ ID NO: 456906 - DNA, 511 bp, Homo Sapiens
catcatgccaataatctgttcacatgattttcgctaatacaataccctttctatatgaggagagaaagcaaatggctagactaaactagaataggtatgctggacaaaagtggaagaaacacaaaaggcaaagaaattgtggatactgatgtgggtaaataataaaacaaggagtgtgggctagacaaggaagaaagtcaatgtaggtagaggctgatgatgacaaaatagtcatcaagggacagcgtcttcatgagatcagggattaagtatagaagaataaggcagaggaagagatgaaagaaacaggaagatgagaagagaatactagagttcgtgattgttaatatggaacagtcttagatattatggtcctgcagtcagtcagtcatggcagtaagttaagggaatatggggtgctggacctgtgatacacatgactgctttagtccccccagagccttgtagcaattgagtatgaaagaaagactggccaggcacagtggctcat

SEQ ID NO: 456907 - DNA, 685 bp, Homo Sapiens
  misc_feature (17)..(17): n is a, c, g, or t
  misc_feature (24)..(24): n is a, c, g, or t
  misc_feature (368)..(368): n is a, c, g, or t
  misc_feature (510)..(510): n is a, c, g, or t
gccatccgtgccaagtngcatgtngcttcaaggacaagaccatgctgtgtccaatgcataagatcaaggggccctgtgagcaagagctgagctcttttgctgtcttccggcgggtctacattgagcgggacgaggtgaagcaaatcgctagcatcattcagcggggagaacggctgcacatgttccgtgtggggggccttgtgttccacgccatcggacagctgctgcctcaccagatggctgactttcatagtgccactgccctctatcccgtgggctacgaggccacgcgcatctattggagcctccgcaccaacaatcgtcgctgctgctatcgctgttctattggtgagaacaacgggcggccnggagtttgtaatcaaagtcatcgagcagggcctgggaggacctgggtctttcactgacgcctttccccaggccgtgtggaatcgcatcattgagcctgtggctgccatgagaaaagaggctgacatgctgcgactcgtcccntgagtatctgaagggcgaggggctctttgggctgacggtgcatgccgtgcttcgcatagctgaatcactgcccggggggagagctgtcaaaactatttattccgctatgggcgccacccctatggagctgccactcatgatcaaccccacagagagagcgtcggtaccgaagccg

SEQ ID NO: 456908 - DNA, 683 bp, Homo Sapiens
catagcattaagtcactcatggtgagtgtgaatttgctcatgagcatattaattagctagtgtgtgctccattttcctcatctgtgtattaactggagtgctatttcagatatgagcaagaattgtagacctggaagagacacaggtgtaaaatctaaatcaaatttctacttttacaggtgtggtatagacatagggagtttaaatcatttgtctatggtcactagattggcttgtagcagagcctgagctcctgacattcagactgttgctttttcctatattgttaaaattatattgtggataaagaggattacttcctggatattatagggtttcactgaatctaggctgtctaaattaatacacagtctttgttgccacagtaatgctatttttctgatatttaggccctatccacacattctttctacaccagcagctcaagcaatgtctgcctatgcaggccagactcagtattcggggatgcagcagccagccgtctacacagcctactcacagacaggacagccctacagcttgcccacttacgatttgggtgtgatgttgccagccatcaagacagagagtggactttcccaaactcagtccccattacagagtggctgcctcagttacagcccagggttctctaccccacagagagagcgtcggggatcctc

SEQ ID NO: 456909 - DNA, 563 bp, Homo Sapiens
ccagttcgggactcacactcgggggactcatcagagccatctgcacagtcacggtcgtggtcacacacgaagtgcttggggatgcactggcggttctggcacatgaactcacggtcgtcacaagtgctgttgtacaagcaaccagctgcgatgctctcgtctgcaccatcagcacagtctttgtcaccgtcacagagccagcgctcggggacgcacacgtgggtgccagggcaggagaaggaggaggggccgcacgtcttgccttcacagtgagcagcctcgtctgagccatccccacagtcatcgctgccgtcacacagccactgcttggagatgcagcgatggttctggcactcaaactgggcctctgagcagaacttgttgcagtgggtctcgtcctcgccatgttcacagtcatcctctttgtcacacgtccagctcatggggatgcagcgcccactagggcaggcgaagtaattcagagggcatactggggcgtttcacacctgggcagtcgcgctcatcactgtagtccccacagagagagcgtcggtaccgactga

SEQ ID NO: 456910 - DNA, 523 bp, Homo Sapiens
gttccccactccattgacctgggacctcacccccatcccccacagcagccacagcaagacccacccaaggagagtctgagctcagacgtgcctagccctgcccccacctgatggtccttccctatccactctggtagctgaagacaaagggcatatactcttgggagttcttgggccctgcccatcacctgttccctccgcatgctactacagctgatgctttctggaaatcgccacttcctgtcaggaggccaaccagcacaaaaatagagcgttaaaccaccaaagctaagaaccctcacagagtccttttcacccttctgccacctccactggaataggtgctggtatccccggctgagagacccatagatggttcacatcacaggactctgtgcagacaacccccactgccagcttgaagccgggtagatgtgctgtggaggttagacccagaagagagatagcaatcactacagctcagctcacaggaaagggggagaatactacatcaagggaacag

SEQ ID NO: 456911 - DNA, 482 bp, Homo Sapiens
tatatgctttcaacttctatgaggctttcattgcaattccttttcttctgtgagggacaggccttccttgggaagaaaggtcaccccttgagtctgacatgctctgcagtcagtttgagaagccttttggttaattttggacaagtcaagcctggtggtggaattcggtcccatttagcattctgccagctaggaagcgtgctatctcgatcatcttcccaagacagtcatgcgggaaggtcttttcgctaacaagaaacacaatccaagtaaattgaagcggctgagcgtcctgccaggttgtcagcttcatttcaacgtgcaaacacaggaaaaacacagaggaaaaggtcatctcctgtcccgacataaatgtggaacagggacaatgcctgtctgccaactgggggcttagaatgtagggcctcatcctgtcccccaaagtcagcattttccagtgtcaaactggttgtgcagttaca

SEQ ID NO: 456912 - DNA, 926 bp, Homo Sapiens
  misc_feature (462)..(462): n is a, c, g, or t
agttcgacggagactctcttacttggatgtttgagtatgcccattacagacgacgaaatataatcagttacatgggtcagtgaccgatacgacagaaagagctcatttctgctatgggatttccaaagactttccagcatgcgtttcaaagggctgggtgtcgaggtttgactttgtgtgttagtaaaactccctatcggcttttggtgtaagacggtgacgataacatcgaaaacattccgtaaaagcatttctctggcctgcaaaataatgtgatccgagtacttagatctctaggctgatttaaggatctgtttcagattatctagatgagtaggtggattgcacattcttcacctaccttccatactttctcagtggatcttttgtaatgaatttatcagcagtggggtttgagtttgtgcttcctcacaagttccttgaatgcatctgttttctgtngttggtgaatcacggaaccatatgttttaacaggcatggtttatcgtgggggtatcacgatggaacagtctgacaagggcacatatttgtttgtttgttttttgaggaaaatcactttattctaattaactcaacaaagaataaaatcataacggctagttcaagggtgccacacaaacatctacccagccatcttaatgaaattctacacagtaagaatttccttttccattgcagtcctgaagcagggacgctatgagagaggagaggtttacctgatgattacactttataccttcactatcaattgtatttttgtgctaaatcacccggcagagagagcgtctgcacattcttcacctaccttccatactttctcagtggatcttttgtaatgaatttatcagcagtgggtgagtttgtgcttcctcaaaccccacagagagagcgtcggtaccgagctc

SEQ ID NO: 456913 - DNA, 573 bp, Homo Sapiens
gaccatttactccatggcctggtgaagtctatattcagttggaaagagggacagagaaaaaaatgtagatacttggggaggctgagattacgggcatgagccaccatgcccggccatcgctgactttttactagagcataataccacattggtaagataggtgaggtcccaactacaaactaatgaacagacgtctctccatccttggctggttttcccatctgcctttgggctcctttctctttctaatcagcactctttttcagtctgtgtttagtgtcatgcctccattttctgctagctactccctaattctttggtcttcttttccctcagagacccattgagtgtccttgatcacctgcagctctctgtccctcaggaagccctttctcagtcttcattctcaatgtagaccaggccattgacattccaagggcactgattccctacattccttcagcagtcaagtctttgacttttacatcactgacattcctgcacccaactcttttctccatttctgccactgcttcgccatggagtaaatggcagggatcctctagaacacca

SEQ ID NO: 456914 - DNA, 557 bp, Homo Sapiens
ccctgcttggcccatggtcaacaaggcaccctcccctccctttccatctgagatgtggtggaagagggatggttgtagggagagtagcctctgaacctttgttactcagcatggaaagatggggtttttgtcttttggtttagctattaggaagtttgtgttaatcagccttaggtttcctgcccccagaccccggtattttccttttgatccagctttgggaagtcagagtgaattggccttagatttcctgcctccagaccctggtgttttctcttttaggaagttagcacagagtggccttaagttccctgtttctaggccctattttcctgtctcaataggagctcacaataattgttctgttatcactgttctaatgtggagccatgtccaaggatgctaaaccccactgagctcctggtgacatagaacttgcctcatccaacatgtattgagggccacatttgcactgtggtctccgccatcctcatgggcctcttagtccagaggggagatggctcatcaacatgcccaacctcataggagttcaggat

SEQ ID NO: 456915 - DNA, 579 bp, Homo Sapiens
ccggccagttacgtccatggcacactcggaacttgtcatcagccagaactgctccaaccaagctcagaatcttaaactcaaatatcccacactctaagcatagttttctttctttctagctcctcttattacgttaaagacctaatagtcttatttctcaactgctttcttgctaacccttcattgttctcctcataaaccccaacgggagataacaagccaggattaatccacctgtgtgatctccccatttttaacccttgtgtttccagagaaaaacacaaccacttacactggtgccacagcaagttcatactctccagaccccattggatggagcctcaatactgcccaaatcccattcatttctctagtcagccttgtgtccttttttcccaataaaaactctgtctcttggtcacatggacatttccatcctatttctgtttgaggtagaaatctgctcctgtaccttgagtcccacctgcttctgccttttcagttgacttgctccttcacctcccacttgtcttgatcgcccgctttaccatggataaacggcagggacctctagaacgc

SEQ ID NO: 456916 - DNA, 427 bp, Homo Sapiens
ctcaagttgaaatgtgatcaccaatgttggagtggggcttaatgggtggtgtttaggttgcagggccagatccttatgaatagatgaatgccctccctcaggggtgagtgggttcctccagagctggtggttagaaaccatccttgacctccctcctttctctcttgcttactctcttgccatgtaatctctgcacactccagttctccttcaccttcctccatgagtagaggcagcctgaggccctcaccagatgcagatgcccaaccttgaactttccaaccattcagagtcattagccaaataaaccttttatctttataaattactcagcctcaggtattcctttatagcaacacaaaacagactaagacaggaacctacactccttagaagaaggccatggagtaaatggacgggatcctct

SEQ ID NO: 456917 - DNA, 479 bp, Homo Sapiens
agtgggggaggatggcttgctcatttgttaaattcattaatattgggaaggatgtgctctagagatcgccttgtctttcttccaagggctcaaagacttccactgcctggaacactgttccccattaatgctgccatcaaatatttccagccatatggtgggatggtccttcctgagtccctttggggttggctgaggaccacatgctaagtgctggcccatgaggagtgagtggaaatagctgtcattttggagccagagcattgaactttcagtgtgggaccttctagcattcctttttttccttctggaatagcaagtggccatgttctaggtgattagctaggtctcaagtgactgcactgaacagagcccccttcttccccactgcccacctgcactggacactgtagcatgagcaggaaatacatctgttgtcaaagccatggagtaaatggcagggatcctctagatcaccc

SEQ ID NO: 456918 - DNA, 497 bp, Homo Sapiens
tcatgtaaggtgtggcaagccacagataaggacttcagaaatccagatgaggaaagtggtttataatgaaagcacaggctatctttcatgttacagatagagagagaaccataatagtctcagagggagggaaaatgaaatgactaaacttcagcccatttcctgttctgctgcagttctcttttaaattcacagattgggaatggcccagtacattccggctcttagcacatactcacctgcctgtttattttctgccattgcaaatgcttgtgcctttcgaaggacagagagaagggtcaagactctcagcatctgcctgacaccggtggatagaatctctggtatctctaatggtctgcttaaccaggttgttagtctatttctgtctgccgtagcaaggaatattccctcatgccagtataatgcacctgtagtggaccttgacctgtatggtgagcaagccatggagtaaatgcagggatcctctagaacgc

SEQ ID NO: 456919 - DNA, 484 bp, Homo Sapiens
tctcttcccagttgagctgtgacatccccaaatgcagagctggcttagatttacttttacagctttctttagcactagcagtagattgaataaatgaatggcttttcataaaatgagttgctgtgtgttggtactggtgaaagactgaataatgagctgctatagaatggtactatgattgattatgaaatttatgatcttaaggagtctaagtttttagtgctaatcagaacatagatacctttgaaataaaaggctgtctctttttgcatgcagtgatgtatacacatatatagaacatacacacaggcagtgttcagagccccttaacaggtaagctctgtctaaatgcacacgtcatgtcttatgaacacagcatataatttggaggtaattaactttaatgtagccctgaggatgattttatgttggtgtattattatggagacgggcataacttgtgttagccatggagtagatgcca

SEQ ID NO: 456920 - DNA, 377 bp, Homo Sapiens
agtggagagcctcttctacaactatagcatgctttgaagagtctcgggcaagaaacattcatgcatgagtatatgttcttggaatcaattcctctaagaacagagaatggtctttcccagggacgcaaagggagaaatgggacatggattcttgatcttcctttacacatttctcgggaaatctgaaatgatgctggatgggactctacacatcctgagctaagacatactgtcagtctcacttctgctgtcccagtctctagaaatcctgggtagtaagtggtggacctgtgcataaggagcttttgcttatgtgacacatgtgttgcatgctagtgaactgtatggcccactgcactgccgattaccgagttatt

SEQ ID NO: 456921 - DNA, 505 bp, Homo Sapiens
ctttcccttcaactcttttattggatttctattccttcatttcattccaaattttcatctagataaaaatgtggttccagaggaaactagcctcggacgggagggatgagcttatttgtgccatgccccaacaaatactgcagagttctaaaacctcctttgcacaggtccaccacttctacccagggatttctaggactgggacagcagaagtgagactgacagtatgtcttagctcaggatgtgtagagtcccatccagcatcatttcagatttcccgagaaatgtgtaaagggaagatcaagaatccatgtcccatttctccctttgtgtccctggggaaagaccattctctgttcttaggagggaattgatttccaagaacatatactcatgcatgaatgtttcttgcccgagactcttcaaagcatgctatagttgtagaagaggctctccactctgatgccggccacagctgcatacagttcaggtaccaccaactctg

SEQ ID NO: 456922 - DNA, 323 bp, Homo Sapiens
ttaggaatatttggattacatattttagaacactactattcaacttaaattcacatttacttctgaacataatggcaaggtagtactagactacactattaaaagcgtaaatcctggcagcctagaagacagtgatagcagaacacactgatctaggaatccataaagttacttctactttttggtatacttttgtcttacaggttactgctatacagtggttctgactgaaaatgattttgccccttaggggacatctggctggagacattttaggttgttagaagtagggaaaggtactactgctactttgttggtgtaga

SEQ ID NO: 456923 - DNA, 302 bp, Homo Sapiens
tctccctactgtatcctaggcgtgagcccctgcgccaggcctatagcatcttattgttatttttttatgtttaagagagtttcccttagcagtctgttcttacacataggatacagtactttcctatattattttaccctgttacattttcatagtactttttatacttcataactaaatctttacatgttaatttatgttaatttacccacttgttcattttaccaatgagtgcaaggggcaaataaaactgatacgcttggatttcatcttattatcttcttgctcttgtttggtacaca

SEQ ID NO: 456924 - DNA, 247 bp, Homo Sapiens
  misc_feature (186)..(186): n is a, c, g, or t
tctgactgaatttcccatgataaccactctccaagttttcctacctctctcatcacttcttatttgccttttcagttccccattcagttccagttcttctttctccatcatgctttaagtcctacattcctttctatgttctcatcctttggaggtggtctcatgtactcccacggcttcgatacncatgtatttattgacacggaactatctcagtgtacatgagtccgacccacccagaatctca

SEQ ID NO: 456925 - DNA, 460 bp, Homo Sapiens
tcaaatttttgtgtcaggcactgtgtattttgcagcaggggaaatgaggttttgagcttttttgcccactctcaatccattgatctgtagctgattggggcgctgtgtagaggatatagtagtagccttctgggcttagtgggaccatatgcacgtgtctggtggtgtatgccactggccctgaagtgtggtcggggtggtaacaatgtaatgtggtacattatgtttccacgacctattatttttctttacatagccaatttgatttttagtttcagaggatagggaactccatttttagtttacctggggaggtggaggaaggcttggttggatcaggctttgggaatgcccaactcgtgttaaccagatacactgaagactgttttttgttgtgtgtggttttgctgtggttttattgtgtgagacggagtctgctctgtcccgcagactccttgca

SEQ ID NO: 456926 - DNA, 193 bp, Homo Sapiens
tacagttcatcttgtgccctaatctatatttcactctctacatgagcaaagtgggagatcactgtcatgaccaaagttacatgtccaagataagctatggcctgggagtccctagattcttctgtgtgggcactttctctgggatatgctaaatgatgggaaatctggtctcatgtttctgtcgtgtcctacc

SEQ ID NO: 456927 - DNA, 717 bp, Homo Sapiens
  misc_feature (121)..(121): n is a, c, g, or t
gctcaaagacaagaaccatgtcttacccatctcttgggtaagtgcctagcatggtggctgacgcttgggagggtgtcattaaatgttgctcaaaagaacaagcaaacatttaaggtggtgnagagcagcctggggacagctgacatgctgcatgcttctcagtaccagcaccatcacaatgcaaaaagcaacatctttcttaacctcagcttattctgtttttcagtctactctgtgagagagcaggactgagaccagactagcaacaccattgccaagctcaaggactgggctcaatgcagtcactccttcagagagaccccccaccccaagcatgccccactttaaaatagcatgtttattgaagggggcatcctttacagtagcttagaaaattgactgagggccaagccaggggttgattaaggatggtgccattaaggtaaggagttacagagcagggcagagggattctggggggcagaagtggatgatttgccgggcctcttccagggggtctgggatacaactgaaggagctttagctacatgagggccctcagagccaaagacaggatgcaaatagagttctagagagtggccgtggaagcagaactccaggtggggaatgttcaatctctgcctcccttaaagcagggccaggctcagctggccccattgttcacttggtcacaagtttcctacctttgtttctgga

SEQ ID NO: 456928 - DNA, 754 bp, Homo Sapiens
ggcacaggctacgcagggcaggtaatctgctgaaattgattaaattcaccataggttagaatcaggaataaataattaaagtcagtttaattgatcagcacacacctgaagcttgaggagaaataaagtagtttcctttcgtggtgacactagtggcagtctttttcagcacacgcactgtttaagcctcttccatgttatatacacatacttgaagactgtagaggaggttatgaaaaccagatagtcaagcagccatttctttctgaacaccttcctttggtaggtggtaagggtggaaaggatgcctggagccttggaaggcagagatggaggataaataacagggcttcccgtaggctgtggatgctcacagcacacccctttaggcatctcactcttttgcctcgatcgtagacaagctagaagatggtgagagggtccgggccctgggcctcaggagcccagctgtgagggcatccgctcttgtgggtgattcttccagcccgacggtggcaccggtgcttgtccttggtgcttatactgtgttttggattaagatggttccaatatcaaggaccgctgatcctcctaatcgtaattctaaatgagggaaagagctcatgcatgttgtcgctttaaaagatgcttggtcatccatttagcacaactgaacaaatgtttaatttctagtaatcatcagcattcatcattagataagacacgttctgaagacgatatgtggaaatctggg

SEQ ID NO: 456929 - DNA, 493 bp, Homo Sapiens
taactacacattcataattacgtactcaacacactctcacgcaaacatgcacattctttgcatattttgtagcagccagggggcttagccaagggtaatggccaagtggcccgaggtatttcatggctcaaaagtgcagtcagtaggcgagactgccgtcgtcccactcgtttagaatgcgtctgcttaaagggtacgtgcctggcactcacgctaaaaggctgacacacggacgtctcctaagacctcctccctctactgccagaagcagctccggagggcacaagactcatgcaagacttgtccctcgtggttcttccacctccatcctcctaaaggtcgctcacacttgcttctttatcttgagtgcacatctgaaggcggtgcgcgctctgggaagggaaggagggaagaattcctgtcctattctatcaggacttggggagagaaaagctgctcggaggactacatgaaggggactttccaaacactg

SEQ ID NO: 456930 - DNA, 551 bp, Homo Sapiens
gaacacaatgcctattcccatatttagccctgtgaagacactataggaaagaaagaaactgtcatctacagcaccaagtcctcaggagaaaggcaggaaatgaaaaagaattgtttatttagcctggctctatagtgaaacagctgtataagtctgtgaaaagaaagggccctggcttggctcaacctttggcaaatacatgggtattatgtaggcagcatgtcgagccaggagaggaggcaatggaggagatttcctctaatgcttcccatattgttaattcgctgctttccctcccagggccttctggacttcccaccagaaatccagggcaggaactgcaaggcactatgggaagacagcagcttgagtcctgcctgcccactcagcaccttccactgggaccctcagcgggctcacccgaggcagttacgaagattatctcatatgccactcacccacagtacattcagctatcttctcaccctttcctgccacctgtctacagacgccatgtcaactcatactcctgcccatcgtttaccactgcc

SEQ ID NO: 456931 - DNA, 506 bp, Homo Sapiens
ttcagaaggcaacttaaaaagagaatggtggaatgtttgtatcattgaatataagtgctatttttgaaaagtgactcaaatgtatagtttaagggagaaaatgaaattatctgtgaacattaaaagttatctcttccttttagttatctcttccttttatttttacatggcacatgtctgccatgccaaaataagctctgccctcctgttttcaggccccaagcctgtgaaactctgggtcttcataagccatcttgaatcaatcagttaagcgatatccttttatccttttcatcaccttcctcagccttcctcggccttctttttccttctgtactcaattgtactctttcctaaagaatccccgatgtgatctttcacatgctgtgggaggaaatgtgttttcaatatctcagtggttgatactgctggttcattgatatatcagtagtttttagagaatgtttactcctgtcgtagcacttaggagtgtctacctctgccgc

SEQ ID NO: 456932 - DNA, 343 bp, Homo Sapiens
cggaagacctgcctggttgaatgggaacatattttgggaacgtgaaaagagcagaaaaataagcacaatttgtaccaattgcagttgatggcactccttctacgagagtacagtaaatacactgcagagtttaaaaagcctagaaagacatggaaaataatagtatacttactatattttgttcaaattaacaatgggacccatggctttgaattcaaaagtgttctacctaaagagatactggagactgtaaaaaaaagtatataaagcatattactagaaattgtgattaaagttgtagtgtctcttaaaatagttctgcaattcttgacgtctgtcctga

SEQ ID NO: 456933 - DNA, 392 bp, Homo Sapiens
tggggtctgaacgccaaactgtgctcctaaatcattgcttttaagagtgttagacagactcagggctgcatttcatttagggctaattatttcccactactcaggcaagacccttctgaagaatctgaccgatgctctgtgaattatgaggctttccagtctggctcgtagcaacaggcactcttcccaggactgtgtgagaggctgtttcctctaatcccctcagatggtgtccccagccttgggcaatttcctctcagtcaccatcagcagtcagctgaaccctcaaggggacctccacaaacaatcattgaggacccacccaccagggggataaggcaccaggtgctgaacgcctgctctgtgctatggggcttatactaatcctccag

SEQ ID NO: 456934 - DNA, 585 bp, Homo Sapiens
ttctgtttctaggcttcattcctttatagctctgagcttgaatctggtatattttccttcagtctgaagaactttaactttgcttatagtactggtattttggtcacatgttttctcagcttttgtttgtctgaggttgtccttatttcacctttatgctcctagcactttaaggatgttctgttgtctcaggcttgtcttgttcctgaagtctgctgttggtcttacttttgttctctagtatgtaatattctttttctcctccagctactttaaagatgtttttgtcattggaatttagcagtttgattacaatgtaccttggtgtagttttctttgtgattagcctgcttatggtttgttgacattcttggatctgtaggattatacttttcaccataattttggaaaatgtactgccattatttttccagttttcctatctctccccttgttcctccatcaatcttccagagctctatttacatttattttagatgctagatattgtcccactgaggatcgccattccctccatctttttttcctctgtgattcagattaattgtttcatgtgcagtgtga

SEQ ID NO: 456935 - DNA, 715 bp, Homo Sapiens
  misc_feature (503)..(570): n is a, c, g, or t
  misc_feature (590)..(630): n is a, c, g, or t
tagctgttcagaggatcctctccataatgtgtgccaggaggcatatagtactgtggtctctgcccccatgagcagctgaccctggtgattggaggcaccatcggggggctgctgttgctgctgtagatcggggcaagctgctgtctgtgaagaaggttctgtaccaccctcacctatgaggagctgcctggaacaccagccatggccaccacagctgcctccagtgggctgcgggacaggccctgccaggcgcttgctaggtccccacgtgagcaggtgaggcaggatgtgggtgccaagtgcgcccctggaatttccctcagggtggggtcgccccggcatgttctgtttatgggggtgcctcttctatgctgcttcggtgctgggagctatcacacagaaaccccagaaacctcacatcagctattaggcaggtgttatgagacccatgttccaggtgaggcatctgaggctcagtgcacataagcaccaggtccagagannnnnnnnnnnnnnnnnnnnnnnnnnnnnnnnnnnnnnnnnnnnnnnnnnnnnnnnnnnnnnnnnnnncttctccacatcccactgcnnnnnnnnnnnnnnnnnnnnnnnnnnnnnnnnnnnnnnnnntgcctggtatggcccagaaaatggtggccctgcctcctcctgctcccgattggcacaccttactgcgggtgatcctctagaacac

SEQ ID NO: 456936 - DNA, 490 bp, Homo Sapiens
aggtgtaccagggtatggtatttgagttttggaggaaccttcatacgttttccatagtggctgtaccaatttacattcccaccaacagtgtatgaatgttcccgttctccacttccttgccagcattggttattttcagacttttggataatagctgtcttttaaaaaactgaattataactacttccatccgtatttttcggaaggaggggaataaacttctgggaccaaatctgatgagtcctgagatatgtggggtagatgaacaggagtcaatggtgggacctttggactttggagccctggttggagtatttggggatgttagagcgtccttctggaattaagatgtgcttagtaactgatgtgtggttgctactggagtgtgtgcatgtgtgtagaatttaagaaattataattcatgcgccaccttcatataacatattcatgtaaagatgggcacttggtgaatctccacgacccttatagc

SEQ ID NO: 456937 - DNA, 305 bp, Homo Sapiens
ataagatcgtgccacctgggcttcccaaagatgctgggattacaggcatgagccactgcccctgtccgagagctaattttcttaggacacgcagcaacttctactggatgatcgcaccttagaatgataattatgtcaccttgcatttccagaacatttggtatttttttcagagagttttcacagtgattatctcagtggttcatcaaaggatttttcattatgaactgcatttgcgtattttatttacctataatcctttccccgctgctgaaacaatagcattctgggcacacattatggag

SEQ ID NO: 456938 - DNA, 602 bp, Homo Sapiens
tagaatgtggagaatgacctctgcatctgaactcatccaaggcctagaatagtgacacatctaccctctacccacagttgttccactgatagatatttctctctcctaaatcccctttaaaaaaccacataaatatttcatgccttgtttgtgagatatttcgcaaagattccttttaaggaagatgttaaactaacattcttatcttccatcactagaaagttttcagaacttttagagcagaaagtcttttccacaggaaagttaggctggaagcccactcatctttcagggaaaaactggaaattaaccttcacagcagaaaataaaaggtatatgaaattttaagccataacccagacataaggggttcttcttgatcaagtgagtccctaagtacgcagttttctgactggaagataaaagaaaggctcaccccaagatctacagtgttcaaagaaccaagtagattattttgtaccgccattcagaaattgtaaaaaatcatccattaaattaagacatgcctaagaaattattatttttaaattaaaagattccattcatctggcacaccttactggacggggactcctctgaac

SEQ ID NO: 456939 - DNA, 535 bp, Homo Sapiens
gtattgcgtacctgagaataacatttcatcatgcatcacctcctccctacacccactgtatttgtgtaaatccataaataatgattggatgttagatgtgttgtgtttttatgtttgtgtcatcgtgcgtttgacttttagagattgtaggatgtttgagccagtaagaagctaactgctgtgaggtccccagattatttcacagtctgtagtttgattcttgtctgtatagattactttgagaagggaaagccatctcccttctagagtcatttcaggtcattgtttgttttctgcccagtgtcattttctctgttctttaaacctagttcgtgattttcaatccaggcaccgcggtgccagtgtaaagataaattccattcccagtgtgacgtgtgtactgatttcataatgtttttatcctgcatgattctgttcacttaggaattgttcaccgatgagaaagtgtggtgataacttagcgttgcttatggaaacctgttggttttgttcagtgtctctgggacacattatg

SEQ ID NO: 456940 - DNA, 513 bp, Homo Sapiens
tctgcaagatgtcaagattgttgaacaccccagatggaagcccttacacttggtgggttggcaaagccaacgagaagcactactactggggaggctctgggcctggaatccagaaatgtgcctgcggcatcgaacgcaactgcacagatcccaagtactactgtaactgcgacgcggactacaagccatggaggaaggatgctggtttcttatcatacaaagatcacctgccagtgagccaagtggtggttggagatactgaccgtcaaggctcagaagccaaattgagcgtaggtcctctgcgctgccaaggagacaggaattattggaatgccgcctctttcccaaacccatcctcctacctgcacttctctactttccaaggggaaactagcgctgacatttctttctacttcaaaacattaaccccctggggagtgtttcttgaaaatatggggaaaggaagattttcatcaagctgggagctgaaggtttgcccacagaaggtgttcc

SEQ ID NO: 456941 - DNA, 450 bp, Homo Sapiens
gatgccttggcatcccaaagcactgggatgacaggcgggagccaccatgcctggcctatgactatttttaacagatgataaaacagcagaagctaaatagcgtgcttagagaagcttggggggccaccagcagtagggggctgagcctcactgagccttgtcttcctgctgcattccacaccccagcctcctccactgggtgcctcctggagctcaagggaacacaaggtgctctggccccttactcctgtgggaggtgggacactgaatgctgaagcaggagcaccaggaacattcagggatgcctggtggtctttctgacttgagagcacaggaggtagaagagcttgtaggtcagtcatcccttggtgggcaccctccactgagttacctcagggcaacctcctggcagcttctgcccaccaggccatgctcccctggggcagttgt

SEQ ID NO: 456942 - DNA, 485 bp, Homo Sapiens
tttttattggaagtaaaaccagtatttattgagtacctatttgccagatacggctaggtgctcccacatcccatctcttaatcctcacaacaagcctgtgaggtaggtagtaattgatcccgcatttttacaggtgaggaagtaggctcagagaaattaagcagctttgccaacttcacacagtgagtaagtacatctatctgaccccagagttacccttttctatcatgcccccgtaggatattgcctggggacacctgacaacagaaagtctaaggttttcatctaggattgggagttaccccaacaccagcaggatgcaggaaaaagtaactgaccggatggttgcctcaatctgttgattcttcagtgagttagctcagatttggtccaggaacagctttcagagccaatgattacgtattgaactttaccaaggcatctggtgactagaaaactcctggaaggtggtcatagcagaaatg

SEQ ID NO: 456943 - DNA, 436 bp, Homo Sapiens
tactccaatgatggcccagggtggaaaagtagcagctgtatcgggcttcctcatcctgcctgttcccccacacctgccaggatatggacatcttgggatatctctttaccactgaagtagaattgattgttcagctggagcccagagaatttaatttaatgttttttctttgtacctgatgtgaattctagcaacctttgttaggaaaaagcacagcctcagatggaggcagcctaaactgtgttcttgttttgttcatggtgtttctaagcgttttgctgaagctgctctcaggcacccccttcttcattgctctctccaggaaagggttgctagccttaacttcagctgggtgcaaaaacatctggactgtagccgaccttcagccatcagatccttcaaagtggaactttggatggtttttacagacaacatc

SEQ ID NO: 456944 - DNA, 414 bp, Homo Sapiens
agttttcgcaaataagagcccagcccgaaccacagctagcctggtctgaaaggagttttctccacccaacgatctggcagagcaaaccttctgcttctcatcccgtcccccgtcaagagctgggaatttccacatttaaaaataagcctgtcttcagggatggactgcacggaggctgagggatggaccagatccttgatactcaaagtgtggtctgcacagcatcagcatagcctgtgtctcgccagaccagcataatctcaggtcccacactggatcgtctgaatcacagcctgcattttaacagctctcggtgattcctgagcatattaaagtttgactaagccaggcacagtggctcacaccactgtgggagcactcttgggagaccagatgggaagatcactgaaccca

SEQ ID NO: 456945 - DNA, 503 bp, Homo Sapiens
  misc_feature (283)..(450): n is a, c, g, or t
cagtgcacacccgtaagggctctcagtcttgcaggatctcacagaggcctacatttgctttgggaacctgggactggggaagagcttctaaagagggaaggcagtaaggaggtcttccaggaagaggtggcatcttggctagtctttgagcgatgagggggatttcaccagatagagataggacagaagggcatacctggcagaaggaatagggtgaaccaagctgggtggtatcatctgtcattggtggcaaggggagacttagtatattagtgtcccaggnnnnnnnnnnnnnnnnnnnnnnnnnnnnnnnnnnnnnnnnnnnnnnnnnnnnnnnnnnnnnnnnnnnnnnnnnnnnnnnnnnnnnnnnnnnnnnnnnnnnnnnnnnnnnnnnnnnnnnnnnnnnnnnnnnnnnnnnnnnnnnnnnnnnnnnnnnnnnnnnnnnnnnnntccaatttcttcttgtaaggacctgccatattctatttggcacaccttatgga

SEQ ID NO: 456946 - DNA, 505 bp, Homo Sapiens
ccctctataagttaaagggccacatctcaccatgtaataaatcaggcctgctggcatgccaggctttcatatgattggaagttttggtgcagaaggttgagagcctgagctcagtaaacgtcccctctctggtctttagaaagtagagctgaattaactgttgccactgcatagataaagagactgaggctcagagtagcgtatgcccaaagtcaagcctgcagcatggtcttcagtgcacctcccagtggctagttctggccagactgctcccagtgagtgctgtctcttgcctggcaggtaaattgagagaatgaggcatcaacctaataatatccttataaagccaagcctccttgcgcaagtcctcggagacaagaggcatctaaagatccaacgctacatcacagtgtatttgtaggaactctgtgattctgctacctccctataatgctgtaattgactatttgatcagctctaaaaggaatagtgttccaaacagact

SEQ ID NO: 456947 - DNA, 520 bp, Homo Sapiens
  misc_feature (429)..(458): n is a, c, g, or t
tatcttctatggcaggggaaatgaaatggttatgctatttcactgagatgaggctgttagagtccctatatcactcttgcaggcttcatgatccaaattaggcagaccaccgtatatgcctaaaatgccaacaactattcttcaattatacataggtactaggccaaattcaagtagcttctagaccgtctacctttctttcaactactcatctataagaaatgtccatgaaatattgagaaaatagagcttaaccaaattagaatcactaggtatccatactaggccgatgttcagctcagctcaaatgccaatcagtctttatttaagtgtattctattcattgtttgcgtaagcagaactgtggaatctaaatttaaggatatgaacatatttttaagacctgggctgggtgtgatagctcatgcnnnnnnnnnnnnnnnnnnnnnnnnnnnnnngaaatgactgtttgaagaccagcttggcacaccttactggaggggatcctctgaacgccacc

SEQ ID NO: 456948 - DNA, 495 bp, Homo Sapiens
aaattgatatttgttcttcctaggcatattaatttatattatcctttttaactctaacagttgttttcaagggcccgatggctttgagagacatttgagctcccatatttcggccctcctaaaggttctggcttatatttgaactgcagagggcccagctcttaatggctgactgcccttgcatcctggcaccactgtcagtgtctaactcagaagctagactccctgaacagacctggtgaggatggcatgttggcctctcttctgtagaggatggggatatctgatcatgggcatccccccctccatccttctggacgaggcatacttcccatgcctcactccctctctgccggatgctgagagctggccgcatctgctttcccactggctgcatgtttaccttggcatctgctgttctaaccccatgccaccgactggagaggtttatcctgctcctggttcagccgagaccgccgggatcctctagatcgc

SEQ ID NO: 456949 - DNA, 246 bp, Homo Sapiens
aattgaacatatttcaccaagggaaggattatctcccagtatccaccaagaatcaaacttcttatagcacttttttgcttgttcctttttgatgacttctactcttaaaaattatttttttgagctacagtcaccgggctgcttccctcagaaaaagaatgtccatttaaccctatacatatcagggtgtactttgccatttcctaaatagaaatcgttttctttgtgttgggcacacattatgga

SEQ ID NO: 456950 - DNA, 346 bp, Homo Sapiens
tccataatgtgcccaggctcacacagtcttattatgtgtatttcatggagggacattacatggttttcagtcttttggctcttataaacatggttacaaggaaacgtccttgttggtctgactctgtgttctcatatggcaagatcagtaggacccactcctagaaatggaggtggtaagtcaaagaaaagatgcattttacattatgatgcctatggcctagttgctgtttagaaaagctgttccatcttcacagtatacaagaagctctgtttctccacacctccagtattgaacattcttgacatttttcacttggccagttggatgggcacacattatggag

SEQ ID NO: 456951 - DNA, 497 bp, Homo Sapiens
aattaaaattaccgacttagaagatgataaatgctaagtaaaagtagaaggagaaagttgaaattctattaggattaagacagtgttatttaaaggcacatgcacccatttagtacctgcctaaatatttgcccttgtgtaagagccaactcatttcagaaatatatcctgaattccaccagggtgatggttccaattgttaaataaacctactctgaaagaagggtccatgttcctattctctctctgcagtgttgggaggtgatgttaacactctacatgttttgtacctgaccccatcatttcttccattctcattgcttctctcttaaacctcattgtatctctttactgtcacttttctccccattgtcttcttttgcctacagtgtgctcctaaacccgccgtctttggcgcctgttaagctctttccctctaggctttcttttatcaacctcgatctggcacacccgatgcggggacctctgaacagcta

SEQ ID NO: 456952 - DNA, 772 bp, Homo Sapiens
agacagttcttccagtgtggcccagggaagccaaaagattggacaccccttataacatcttagaagttttaaataattatcttcatatccacatagctttacaaaagctcacgacagggagagtattttcttggttctgtagtaatttcagggggtttactgattggaacccttccttttcctcctctctccagtccagctggcattcagtcctttaaacaatgtggctatgcagtacttttgattactattgacttctattatcttcttccccattgtgtacagatgggagaatcctcagcacaagtgtctactactattggatggacagcggcagatgttcacagcgcgtcatgattaattagtttaaattgccaggttctatctgtgaggtagctcaggtagatttaagggcggtagacatgaactgaagtcacgtttgcgcagcgactgaggcattaaccatgttttcatttacacagctcttcgtacatgcagctttttattgtaatagttggaagtgctagttatgttgtagtctccaagtagggggtaggggaaattggctgatcttaaagtttgagaggtatagtttttttcctgcagtgtaaattacactgagttacggaatgggacaggttctcgtatagtctaaattttgaccctgtttcatatttattttacaatactacattttatgttttttaaaagtacccctacccttgaaaaatgaccaaccagataccaactcttaatggcacacattactgga

SEQ ID NO: 456953 - DNA, 287 bp, Homo Sapiens
ttttttttggcttttgaaacaggtatgtaggctttcttgtttaatagcagttaaaagaggaaaatgtacaagaggaataaacatgctcttttcacagaggagctttcccctaaccatgcggcccatctgtatcagtagctttacaagtaagttttagagaaaaaagttccctttagagttaaaaatgggactttcctaattttctctatatatgtgcaactatctgtgtaaaataaaaatgccatttccaacacctttgtgaaaagtaattgtgaatgcaggcaaaa

SEQ ID NO: 456954 - DNA, 974 bp, Homo Sapiens
  misc_feature (49)..(49): n is a, c, g, or t
  misc_feature (68)..(68): n is a, c, g, or t
  misc_feature (79)..(79): n is a, c, g, or t
  misc_feature (159)..(159): n is a, c, g, or t
aggggaacccttaatccctgccaacgggggtccccccagtcaaagaggnacccctcctgggggccccnacatagtgaantgttccaaagaccctgaagtccagcttgccagtggtgaattccttcaattcgggtgccctccgtcccactatcatgtatnttccaccgaatcctttgccaagaatgtgccttgtccttttataatatactcataagtaagtcaagaggacattgaatttgccactccgtagctgggggacaagggagcgacgcatggcaggagtacccttgtaagaaatcttcaccacagaaggagcccatttgtcaaattcatatgtccagttagatagagtcgaaaggggaacaatgatgagataggggccattgagtcttttgtgctccatcagataagtgatgagtgcaatggtctgtatggtctttccaagccccatttcatcggctaagattccgtttcaagttgttattatacagggaaccatccattccaggccctggagctggtaatgctttagggtcccattaattaggagggcagactgtttctccaccctctccgagatggcatgagccacggtgtagtaggactgggagcccctggcactgtactgcatgctgtattcatcatccacgtcttgcttagctgtctcaatgatctgcttagcatccttctcagaaacttcttcgctatttggatccaggagtattttctcttcggtttcctgcctactggactcttcttcctcatcctcttcctcataatcagaatcactctcttcactgtcagatctaggggcaacttcataaccaggattcatttccagccaggcgtccagctgacttgctttgggtgcttctggtccgaacagaaccttgccggtttctgtgtgagtcactttgacagggaggtcactcatctgctgctctcatctatggcacgggatcctctagaacacc

SEQ ID NO: 456955 - DNA, 102 bp, Homo Sapiens
tccataatgtgtgccatcagtgctctgagaacaagcaagacataagccagttcctcaggccacctccagaaaagttgaatcattggattccctgtctaactg

SEQ ID NO: 456956 - DNA, 498 bp, Homo Sapiens
ggttccattacttacaagcttgtgaccttaatccagttactccactcctatggctccatgtccacaactaccaaaagaggtttttaatgttacatttcttataacattattgtgagcattaagttaattaacatatgtaaaactccttggaccatgtctgggtttttaaatctgttaccactgctgtacccagaacgtagcacatagtaggtccttttgttaagtgggtgaatacactatcagtagccatagtaggaagagcttatcactttaaagtgttatgttttgattgacactgtggttgcaaaaacatggtttttggtcaccgtgtgatttgatgtcatatgtggtcacattcattaatgtcaccactgatctcttaaaaaaaagtctgtaaatattgagaagcccatcaagctcacagtggtggatacaagcttccccaaattctaagttttgcttggtagcttgcattttattatgggcacacattatgga

SEQ ID NO: 456957 - DNA, 695 bp, Homo Sapiens
gtataagtgtcaagaatttgaggacatgaaaagtaatcagtcttttttaaaaaagtagtcaaaccagtctctttttaaaaaagtattcaaacctttcttccatcccctgcttgtaaactcacatcctgaggaataatgacttgaataattctaccagaatccaagaaaccaaattggttgggggcagggggtatgttgcttttattgtttccaagatgaagttctctgtgaaactagaatgtggttcctcttatagaaccctctggaattagcaaatgattcccaaatagtacaggtaagactcctgagtattaatgacttcattatattttgttgccgccatacttcaagtcaggatgcttgatgacttgatgtgatatgtgtgtgtctcctcccatccaccttaagataagcaataggcaatatccaattgtgtgagaacctgcattgttcacatgagcctttgtcctggataacagctcctgttcatcaatatgatacattgcactctgacttgctacttctgtctttctttgtggatattcctttctcctctctgattgctttttcttcttagatcattactctagttgatatgtgtctaggttatcattgtatcccatctccctctgctaataagcctgtgacttgatatctaatcttcctcatggacacactatatgtcaggtatactc

SEQ ID NO: 456958 - DNA, 328 bp, Homo Sapiens
ctccataatgtgtgcgcagatagtgacaggacccaaaagcagatcatcacataagagtcagggctgttcgctggggcctgtggcgttggcagcagtgtcctcagccagcagctactgtgtacatggctgggggacggggctttgcatatttggcctcaatcatataaggtaagaatgtgaggagagggatgtgagggaagagcctggtgctgtggaatgcagggacagagggcaacagcaggctggccttcttcctcttgagctgaggagaggcagattttttgggtcttgattgctcttttcttcattggggtcctctagagttcga

SEQ ID NO: 456959 - DNA, 735 bp, Homo Sapiens
ggtgcggtaccttaagcgcgtctgcgtccgtgaacttgctctcgtggcgccgggccttgaaggtcactgcagggtcctggctgaagaggtatgagggtgtgggctggcggctggagtagctggagtcctgtgagaaaggggtgcccaggcgcggtgtgagcggggtgccctgtccataggagttgggtgtgtccaggcggcagctggaataagctgtgtcctgggagaagggtgtcccaccgctattgggggtgacagaggaggagccggagccacagcctgcagacaggcctccatccttgaggcgcttcagggcatctgacagctgcagggtctcattcacgattggagagacagcgtccagctcgcccactgggagggtctggggggtgtatcggccagtgaccaacagttcatagaaccgcattcgggtttcccctttggtgtccagctccacgtggataatgttgcccatgacggaagtgctgtgcaagtgctgaacggcatccttggctccccggaccgtggcaaagaccaccttggcgatgcccaggtgcttcttggtcttggggttgtacaaaatctccacctcctccacctccccatacttcttgcacatgtccctcaggaagttttcacggatgttatcattcagcttggcaaatgtcacctgcttcggaggcaccgggcccacgtagaactcatcgatcttgaatttgggcacacattactgga

SEQ ID NO: 456960 - DNA, 452 bp, Homo Sapiens
tggcacgaggcagttcccaagtggaaggattatgggctgataatcatatccccttagattctctttaacctaatgtgatattttgtaagactttcaagctatctgcatagtcagaaaatcattttagatatttaggcagcaaaagcctcttcacagtactgcatttggcaaggtgccatcctaaaatagttcctcttttccatatgtgttatgccctttgcccagtctacctcccttccctttttgcctagtttggcctttattccttcttactaaagtttccaaacccatgttttcctagctgagccatccacaaaccttaaactgtgaggatgatttactcctggccaatgtccaggcccatttgccaacctccctagcacaactctaaaacttaccaaggcagtggatatgagcgccactactgagggagccttggcacacattatgga

SEQ ID NO: 456961 - DNA, 451 bp, Homo Sapiens
ccgtgataaaacactcctagggccagaacttactgtctgagccatgagcaacccagagcctcataccagggccacataccaccttctcagacactgacaaaacagatcctcaaacctgtacccgcaccgagatcctacctcctcagatactgacagacccaaatcctcataagcctcataccagggccagatcctaccttttcagacatggttagacccagatcctcataccagggccagatcctacctcctcagacactgacagacccagatcctcatacctgtaccacagccaaccttctcagacatggagagacccagatcctcatacctgtactagattcattcctcctcagatattgacagacccagatcctcataccaaggccagagcctaccttcgcagacattaaaagacccagatgcttatatctgcgccaaatcctacttc

SEQ ID NO: 456962 - DNA, 515 bp, Homo Sapiens
ccccttagcccctgtgggctggagcagagcccagctgcagccactcaccaagccagggttctggccagcagcccaggatctggccactgaccactgggatcaggatccagctcacccgctccccatccaaccctcaggcccaggcttggagctgacaccctaggggtggtggccaagggggctctggccttccccaagcctcagccacaacccagacaccagattttaaaacagtttcctaaactgggaatgctgtcattacacccagagtaagagaatctataggctagatataatactgaatattaattttgttcagaaatttggggtagatttttgcatcaagattttacacatctgtagaccaagaaaagttgtagctggagctatgcctttagcttttaaccctagatctctgaaggttcacactcctctgatattacgagtatgtgataaaagtcttgagatgcaccgttttcttaatggtggcacaccgtactggcggggacctctga

SEQ ID NO: 456963 - DNA, 393 bp, Homo Sapiens
  misc_feature (291)..(291): n is a, c, g, or t
tagaggaccccgtccagtaaggtgtgcccagagcacttttacttgagaactacacagagcctcacggcctccagcaggctagaagagccaggaaatgaatgcctcaagagctggcctcaactaatgactcctccagggattgggacaccaacagccttcggctctctcacccgtggggtcaggataattcttctctttcctgtgcgtcacttcccgtacctccgctacggggtgtttcctggcatctcgccaaatgagctgctgtgtactcaatttcctgtgttctctaangaattcaggtctatgacactaagtgatgttagaaatgctaacgtgagaaattaaactggtaagtgatcattttacaggggggaatgggcacacatttatggg

SEQ ID NO: 456964 - DNA, 270 bp, Homo Sapiens
ctataataattatgtttcatcttaatgatcaggagaaataaaataagccgatggaaaacgccagagaaaataataggaagggaaaccattaatgtaatgaggaagaaaaggatgtttcccctgctccatggaactggggatggggtaggtggttaccgggaaggattgaaaccagagacttaccggattcagaggatgggcaatgcactgctgccagacgtagcacttcctgaccactggcacaccttactgcgggtatcctctagaacc

SEQ ID NO: 456965 - DNA, 468 bp, Homo Sapiens
  misc_feature (242)..(294): n is a, c, g, or t
  misc_feature (318)..(359): n is a, c, g, or t
  misc_feature (376)..(425): n is a, c, g, or t
cacgagccaccttcaacccaagagggacaggagtcggtgaacacgcacctcagcctcctcacctctccgaggaactttaaaaaaatcttgtattggctgcatggcagagatggggggattgcttgagcctatgagttcacaaccaggcctaggaacatagtgagaccaccctcttccctcggcccaacccgccgacacccccatctctacagaaaattttaaaattagccaggcttcgtggnnnnnnnnnnnnnnnnnnnnnnnnnnnnnnnnnnnnnnnnnnnnnnnnnnnnntggctgggagcagcaggccacacnnnnnnnnnnnnnnnnnnnnnnnnnnnnnnnnnnnnnnnnnnctgagaccagttcatgnnnnnnnnnnnnnnnnnnnnnnnnnnnnnnnnnnnnnnnnnnnnnnnnnnttggttttatttttatttctacttttgggcacaccttactgga

SEQ ID NO: 456966 - DNA, 195 bp, Homo Sapiens
cgtcgggcatctactagatttctcccagccggtcaaaatatgattttctctcatattctccccacttctttccttccagccgcgacctcactgcgcgttttatttccatccgcgctttaaatattttattctacttctactaagctccttctacctaccacctactgggcacacattatggacgggggatcctct

SEQ ID NO: 456967 - DNA, 466 bp, Homo Sapiens
  misc_feature (320)..(415): n is a, c, g, or t
ggcttctgccatttctgagatcgaaacggttttactgcagctttgtttgttgtcagctgaacctgggtaactagggaagataatattaaggaagaccatgtgaaaagaaaaatgagcctggcaagaatgcgtttaaacttggtttttaaaaaactgctgactgttttctcttgagagggtggaatatccgatattcgctgtgtcagcatagaagtaacttacttaggtgtgggggaagcaccataactttgtttagccccaaaccaagtcaagtgaaaaaggaggaagagaaaaaatattttcctgccaggcatggtggnnnnnnnnnnnnnnnnnnnnnnnnnnnnnnnnnnnnnnnnnnnnnnnnnnnnnnnnnnnnnnnnnnnnnnnnnnnnnnnnnnnnnnnnnnnnnnnncgcataaaaattacccacgtgtgatagagtgtgcctgaagtccccgatact

SEQ ID NO: 456968 - DNA, 529 bp, Homo Sapiens
  misc_feature (420)..(420): n is a, c, g, or t
  misc_feature (468)..(468): n is a, c, g, or t
  misc_feature (501)..(501): n is a, c, g, or t
  misc_feature (518)..(518): n is a, c, g, or t
ttttctttgaatctgtttcatctctgtgacattgtttgtgactggagtgctacctgagtaaattatcatgattacatgaaaagcaattaagagaagaaggtcaaaggaccaacctctaatcactaagtttggtctctaacatttgacagcacatgcctcaaaaagcaaacaaaataaacactctccatttctttaaatatatgtttttcatccaaggatcacacagcacctcccaagtagtctaatgtacagaaagaaaagaaaggaaacacagcatgattaggtgaaaccccaatccatagacagcccgccagcaggttgaggcagggccactagggagggagactgtgctcaagcacggaggaggggccctttagggtttcaaatgggggaatttaggcccaaacagccacccggggnccagccgtattgcttaggcccagttgcaattgaacacacggttccccngttcaaacttcttgggtttcctaggtggggttntgttgcccaacaggcanctttcacaggg

SEQ ID NO: 456969 - DNA, 291 bp, Homo Sapiens
tcagtagctttcttaccagtgactagaaaagataataatgtaagaaacagttctatttataaaggaatgaaagggcaaaatatttagaaatagtgtgagcatctataaaaaaaatcttaaaactcttttgaaggagaagtcttatgtccttcaaagaagacataaataagtgcaagcatatatgtgattcttaggaagattaaatagaattaagattaaacttagtacagatataaaatgtcataaggatgtctgaatattctaagattccttgtcacgtgatcaggagtg

SEQ ID NO: 456970 - DNA, 485 bp, Homo Sapiens
tcactatcaccactgtatccctttccacccaaggacagggtttacttgtgggtggaggaattcttgagttccatagctgggaaaacaacagcaccatttgcctgtttggaaaacaatttgcagtttacaaaacactctgctgtcccttatctcatgggaatgcttggtgcccccctgtgaggcaagcagggtgggaaccattagcccccatttacagattgaggaaacacgggcttgggaggatgaagtcattgccctgtggccacctggctgcaggatggcaaggctggaggaggaaggagaacaggacttttgagagagcacccagacaacccctccctgaggggagatgagaggagggggtggccccaagttggagcagcactggccaatccacagcttgcacagactcaggaagcttgttctgaaataaatgtgtacatcagtgcgtgggtgagtgcatatgtagagtgggagactgtaac

SEQ ID NO: 456971 - DNA, 283 bp, Homo Sapiens
ttcctctcctcccacctccactgcagagacgatagtgtatgctcaatactcaggtgggctaagaatggatggtcaggtgcccagaggaagacaaaggcaaaatggcttttcaacgaaactagaatcctaacagtttttctttctcaaacacttacaattcctgaacccacgctgtttgggggcgtatgtcgtgcagacattgctgggctcccctgacaaaggttgggttccagttcattctgagcccttagccccgagtgggaggagatgaaggaccggccga

SEQ ID NO: 456972 - DNA, 192 bp, Homo Sapiens
ccacagcctgcccccacccccagcatcaggctctgtcttgcgtagtcaggcctagtggggaagtgaagcctgaggacttggggctcgtggtcaggtctgtgggttagatccctcaaaggatagagtcttccaggaaatgcccactgaggggagaaatgaaccaccagtgagccaggattgtgggaggtgtca

SEQ ID NO: 456973 - DNA, 226 bp, Homo Sapiens
ttcctctcctcccacctccctaagcgccgagattataggtgtaagccagtgtgcctggccttaatgttctgatataatgcttagaatgtagggtgccctcaataaatattttttgagttaatctttgggaagaatgaagaagaggtttaaggggaaaggcagcattctgaagtggagcagttaagattcacttacttggtggaggtgggacgagatgaaggcacca

SEQ ID NO: 456974 - DNA, 436 bp, Homo Sapiens
acccattccgacacacagatgtgcccacacacacaccctgaaagaagccttgtcccatgggtgtcattcccacaggtacatgggtgcacagacacttacaggaagagcgatcagaacttcctttggcaaagtccttacacttttcaaagcacttttccatttgagatcagaggctgtgctaacactctctccctcaccccatcctttatctttccccttctcaaccccttcacaggggttccatcagaccccagaacttggccaggtagaacaaggagggcgaagttagatggaggacagattgtggagggccttcaatgctggaggacgtccttgatggggtggagagtaagccgaacattcatgagccagggtgaagcctggtcagagagagacagtgggaggggcatggttgcaaggccagttcgagtgtggc

SEQ ID NO: 456975 - DNA, 474 bp, Homo Sapiens
gcaggagactagtgctggttgctgcccctcttttctgtactcacgtgctgtcctggtccacctcactcctccatgggcttcttgagacacctgctgacctctagccggacctgagcttcagaccctctctccagcaggaagggctgcagactcggcctgttcccagactcggccttcacctcccttctcctcctgtgtttaagtggatggcccctctatccatccaggtcccatgccaagaaccagtgattctagtgggccaccacctccctctcctgccacccttatacctgttcagcctcctaaagagggacaaactctgtctctgcgtgcactggcttgcctgccctgcctttgtcactccaagggagatcttgagacccatgccctgaattggtgctggaatggtctttgggagtcaaactctgatcatgccctccagtggctcctctcacactaaaatcaaaactcttt

SEQ ID NO: 456976 - DNA, 323 bp, Homo Sapiens
ttcttccctccataaccccaggaaaaataacttgattggcagtgtagaagaaggggtaggggaggatagaggtgacctctaggcagatggtgcagccaaccctaaggaggattaagaacctgaagagtttggtttgggatgtgccagcctttgggaccagtaggacacacagggacagttgtccttgaggcagctgggtcccccagggctgaagctcagaggagaagcctgggctgcaaagtaaggcctgggtactggccacattttgggagccagtggaggtgactccggctgggatcccaaagacagatgctgagtcaggg

SEQ ID NO: 456977 - DNA, 395 bp, Homo Sapiens
tcctatcagctactcctgaccagagagaagatgattaatatccccttccctcagggtcttctgccaaccttcatgtgggctcaaagtggaggctaagtgatagctgaatttaggctatgcttggtgagaacttcctctagactagggtaagtcctggcttgggacagaggaaccagggtggacttgctgatcagagtgcttggagtccttatctggtcgtctctttggtttagtacacaagttcctaagttcttctcagaggggaagtcagctgctctagtaggggtattgttaggtagtagggctgtggttatgtcagctctgtgtcatgggggcggcctgaaactagctgttttgtcctatatctagtcacatactctgagtgaggtgtgcag

SEQ ID NO: 456978 - DNA, 413 bp, Homo Sapiens
ccaccggcaggttgtactgtggttctggagaaggaacaggggcaagtttccgagactcacaaacagggactgattttggaggttcaggagaagaaacagaggcaggttttgaaggctcaggagaaggaagaggtgtctgtagctcaggacgaaacaacagagccaggtttctgaggctccaggggagtaagaggagtaggttttggcgattctggagacggaactgaaccgagtttctgtgtttccattgaaagggcaggtatggattttggttctgctgaattgcagggtatttctcctctgttcaggaagaggagggcttttcacaggatctgtgtctttgttcgactgattttttggttatcattccatttgtctgggatgcatgtttgagtacatcctcccggtgcgct

SEQ ID NO: 456979 - DNA, 671 bp, Homo Sapiens
atattttccttggctcgcggagaggtttttaaaattctgaactagtcgccaacactttgaattgggaggttgtacctaacaggctgagaaggcgaggactgcagtgtctcgccgtgtgctgtatccccagggcggggcacgtgtccgtggtgaataagtggatggggggattttctgcttctctgaagaattggaagacctggcaacacagggtctttgttcccacctaacttgggcccaggggaacagccccagcctggggcatccccttcccccagtcccaggccccatgggcagtcatttgtggccctgctctgtcgtctctcctcatcaggcttgtcaacaatctatgaaggcccagcccatatgccagcccctcccacaaacaactcttccggtctcccttgctcacacacagatacatcctctttctctgtccctcccaagaactcacagcacctaccttgcctggcaccagctatttctctcttggtttaaggaattgtgacccatcaagcaagacccagtttagtttaagtcccatccaccgtaccaccatgtctcatgtgtgccagacacagtgctaggcacaggggctgacagatcgagacgatctagttccagtctgttaagacctcgactcttgcatgacaccccccgttataccttct

SEQ ID NO: 456980 - DNA, 383 bp, Homo Sapiens
  misc_feature (303)..(337): n is a, c, g, or t
tcggtacccgaaacggtcagatgctggggtgggtttggagaatgggcagcctcattgttgcaaggcagctttccccaggtgaggctactacagggtatacatccaccacccagattgtagggttcacattttgctgtattttctttatcacctgtgtctctatctatcccacccctctccagctcatgcatagctgatacctcttctcccagtctgcatttgaaggttatagcgttcgagtcattttatctcttcctgaagcagctcctttctttaaagccttgaaatcttgtagataggtcnnnnnnnnnnnnnnnnnnnnnnnnnnnnnnnnnnncatttaactctaggagcagcgtggcatagatagagacactggccgg

SEQ ID NO: 456981 - DNA, 579 bp, Homo Sapiens
ctcgcgaacgtgttatccagattcacagcttcagctgctaactctacccagatgagtcccgaaatcgtcagtggaaatctcactcctgaactccaaatcttacattcaggtgtctactgaacagcaatacttaatattccataggaccacaaatacagcgtgtccaaaccaaactcagtatctttgccataaaactcaatcctcctcaatatttcttctccagattcccagtaatttaaatatgaaatgtagacttcttccttctcacaagcctcctatatttgatgaggtatcaaattatgtttacttattttttaagtatctcttaaatccactttcttctttctgtctacactgcacctaactaaccttagctcaggccctcaacacctagtgcctagattttagtgataacccctacttctaccattctcctgcataaaacaccttttgtggtgtctgcctagctcacaaccttcccatcttctcagaatgtgtctccctctcccactctctgccacctcaaccacacacagagattgggagagggataacacgttcgcgagggggatctctaga

SEQ ID NO: 456982 - DNA, 882 bp, Homo Sapiens
  misc_feature (33)..(33): n is a, c, g, or t
  misc_feature (38)..(38): n is a, c, g, or t
  misc_feature (54)..(54): n is a, c, g, or t
  misc_feature (61)..(61): n is a, c, g, or t
  misc_feature (69)..(69): n is a, c, g, or t
ccttggtttaaaaatgataggtgggagataagnaagcncttggtctaaaacttnaggtctnaagtgtcncatttgggttactggtagacgtgtgttagtggcaacttctggtctgccggaacactttcataggctccctgctctcctggagatagacgttgctggaggcttcagggcttgcagggtggggagctgggaacctgggaactccgagggacagatcagcgctgcataaggcatacaaagagcattgagtcctccctaggtgggggcatcacaacactgagtacggtgcccacctcagggtcccctgatatgtatacaccccaatgaaagggcagacctgctcagtcttggggcaagtccccatccacacaccatgtcaaacaagagcctcagtgtcctacagaattggctgagaagatgatatctgctagagatggaaggggagcagtgccttatgccccaaacacaccagcaaagcttttgcatcacagggttccatctcctcgagggtggcagcaatgggccctggccacgtggacaggtgccctctactctggacagggtgggtgtggccctctatctacatccctgggtttcaccagtgaggaggcatgaagtccaaacccagcctttttcttctctctagaggtgagcacagtgcccccaagaccagacacctgattttcttctgctggaggtacacaggtcactggcgttgaagtcctttctatcagtgcccactcctgttcctcaaacgtcttcagagtcaatgcagctcacatcttagatattccagagaaaagggcaggggaggaatgaggagcaagaggtaaacacacctcccaaccaaaccagagagcagcaaggaggctgcgc

SEQ ID NO: 456983 - DNA, 482 bp, Homo Sapiens
  misc_feature (114)..(315): n is a, c, g, or t
ttttaatcatgggatttcttttcactcccttcaatacctacattgaattttctgaaacaataattttaaaaaataaataaaattgaagtgaatcctttaagttgcaacaaaatnnnnnnnnnnnnnnnnnnnnnnnnnnnnnnnnnnnnnnnnnnnnnnnnnnnnnnnnnnnnnnnnnnnnnnnnnnnnnnnnnnnnnnnnnnnnnnnnnnnnnnnnnnnnnnnnnnnnnnnnnnnnnnnnnnnnnnnnnnnnnnnnnnnnnnnnnnnnnnnnnnnnnnnnnnnnnnnnnnnnnnnnnnnnnnnnnnnnnnnnnnccctagagggtgtacccttggtcaaaacattctactacaaaatcgttccctcagttgagagtccaaggatagggaataatgttaactgagctcctctttctgtggatttgtctattcattcattcaatcatgacttcattcaacaaatatcttatcgtattagcaca

SEQ ID NO: 456984 - DNA, 363 bp, Homo Sapiens
  misc_feature (42)..(42): n is a, c, g, or t
gatatgtgctacatgattatctaaaaattaaataatcagccncagcactaggaggaaagtcaaatcctgggattaaaacaggtgatatgcatatcccaaggcaacacagtggcccaggcttatgctgtaactgtttctatttgattcacggaagccagccctacagtctttaagagagatttgcactgtagcagggaaggataactgaaatgatagagccttgctgaaattgttgttctgccctttatctctcaggaggtaggtatcattattcccatttctagatgccaaacctgaggtcctatgaagcccaatagctggcccaaagtatgtgctgcagctgaactttgaaaccagctctga

SEQ ID NO: 456985 - DNA, 424 bp, Homo Sapiens
ttcccagcatccagccacccttgggtgtcaagtcttttaatattttgtcaatccggtgtctgcgtgacaaataaaattccattgatcctttcatttccagcttccctgctgatatgtgtgtgtcacctttcggctgtatagtccccacttggattttctcctccctgagtcatcgctcagatccgtggcactgtgatgggctctttctcccacccaatgagtctcctggcattgggccctttgccgggtctgcaattgcggtagctgtttctcaagactgcctttatgttaaacaaagaagcagttattggctttaagtcccaagggttcttctagtttttctcctgtgtcactgtctctaaaacagaggaggaaacaaggcctcaccaggtccttttcctccgtgtcagcgcacccgttttct

SEQ ID NO: 456986 - DNA, 567 bp, Homo Sapiens
  misc_feature (105)..(176): n is a, c, g, or t
ctctagagttccccggcatactttgaccttcttgcacccaggaacactagactgcactacatcacggggccatttcaaaaatcaaaatcaccaacataaagcacnnnnnnnnnnnnnnnnnnnnnnnnnnnnnnnnnnnnnnnnnnnnnnnnnnnnnnnnnnnnnnnnnnnnnnnnatgtttttagtaaaatattctgaagtgtgaaatccttcatttctccctcatctgaaaggacagctttcagagacatcattcttttcagatgtctcctgaagttgtgattttcgttaaaagcaaactggagccatccaccaagttagggaacagctatgtccttgtgggttcatctgtggcactggaattagcagtcatcttccaaatctgagatccctaaatccactgtcttgattgttcttttgccagttgtcaacaagcccttctcaaattcttcttcagttattttgcctttcttaagtttttttcaagagtcttgtgtcattaagaagttcttccatgtcctcatcttcaatatcagaaccctcttcccttttccttttctcattca

SEQ ID NO: 456987 - DNA, 379 bp, Homo Sapiens
gccagaaaagcgccaggtcaaatcagtggttgaagaaattcagaaacagaaaatctgtgggagcttaactttgcagcatcacatgctagaacctgttcagcggattccccggtatgagatgctccttaaggactatctaaggaaattgcctcctgattccctggactggaatgatgctaaaaaatcacttgaaattatatctacagcagcaagccattctaatagtgcaataaggaaaatggagaacctaaagaaactcttagagatttatgaaatgttgggagaagaagaagacattgtaaacccttcaaatgaactaataaaagaaggacagatcctcaaactagctgctcggagcgcttcagcacaagagcgcatc

SEQ ID NO: 456988 - DNA, 459 bp, Homo Sapiens
  misc_feature (407)..(407): n is a, c, g, or t
gcctctatccagtaattctctcaaggcgggcatatgcaaaacataatctctaaattcttcaatactaagaaatacctttgttttacccctaaaatcaagtgccattttggctggatataggattctaggattaaagcctttttccagcagaactttgaagacattgctccatttacttctagcatccagtgtgtccagtgataagtctgctgtcaacctgattcttgttccttgggaggtaatttctcttctctctctagaagcccttattattttctctttatcactagaattccaaaatttcaccaagatgtgtctaggagtcagtctcttttcatcaattttactaggtactcgacaagcactgacaatctcaagacttgaacctttctttagttctgcaaagntttcatcaaatatttctttaattatggcctctgccctattctcataactctc

SEQ ID NO: 456989 - DNA, 347 bp, Homo Sapiens
tgtcccactgagctggaccaagggccaccttgacaatgccttagcagtgccccaggcccagataccggagtcaggggagccaggtgctcagagcgcctcacacttgagtctcagaggccccaggctaggcaggggaggtttcctctcctctgcttacttggttcctgggaacactggagcccaattctgagtcccttcccagaacccctcatcgtgccctgaaccatgggggcccataatgcttgcagtggaggccttagacccatgccccaggaatgcacaggccttccattccatacctttatttaatctgcatcttctcagcctcctccctgcccccgtatgtc

SEQ ID NO: 456990 - DNA, 611 bp, Homo Sapiens
  misc_feature (38)..(38): n is a, c, g, or t
  misc_feature (58)..(58): n is a, c, g, or t
aatcctggggtggggggttccccctgaaaactacaaanctacgctcccagctgctggnctccctgtgccccggcggggaaaaaggtggaaaaggcgggcaatgcctgcccgctgaagaaagaacataaataaacgctcccagctgccacaccccttttccttcccacggccctcctctttctcccccaaaaggaaactaaaatgtggggttctgatcattgatttttatacaagctccccaatgtcatggcttctgctctgtaaactccaaggctctgatggccaaaaacgtaggcggtggtggagcagtaggcggtgtcaaggctagatttgtattaatatctaggagtggggtggggatgccaggtggagggtgagcccaagtagacccaagcctcaggaaatccccagaggtgaagatttgatgcacatcccccatccttgcccaaataaaatacaagttagaggtcattgttcacattacagtcacaatgggacattttaaacagctcgttttctgagtacattcaagacataattgaatttattttaaaaaatggatttcccggctgggcacggtggatcacgcctgtcatcccagcactttggga

SEQ ID NO: 456991 - DNA, 240 bp, Homo Sapiens
aagtttccattcttatcttcctttttttgcctaccaaggctactctcttataaagcagttttaaagatttcctaaggtagtgtggtctgctcgtgatctgtgaagaagcccaagagttagaaccttagcattataagattgccaataaggtctttgttactcttctattgtcaggctcttaaaatggggattaaaaatgttattcttctccctcagtagattgacagcgatatcgtattc

SEQ ID NO: 456992 - DNA, 440 bp, Homo Sapiens
  misc_feature (307)..(307): n is a, c, g, or t
  misc_feature (371)..(371): n is a, c, g, or t
tacccctctctcccagaaaagggtcagataagctattttctagtagccctgtttatctccctgtatgacaacaacattagatttttggatattggcagcttcccagcccttcctcagtcacatccagtgcacatctgggcataccatgtgctttctgtcttggcagcagaaggacattcaaactggtctccctgggctcaggagcactgcccagggcagatagagtctcccatgcctgccccacttgcaccacagctgaggactcagcagtgagctctgggttttagatgtggtggacacgccctgngctagtgtggcaggacaccccctctaggagggatgggaatgaggccagggctgtcctgggcagnttctctttagctcaaggtgttgcattctctcggaggaatagaaaccaagcttgggcactttcaggcagt

SEQ ID NO: 456993 - DNA, 210 bp, Homo Sapiens
atcatttgaggccaaggcgggcagatcatttgagcccaggggtttgagctcagcctgggggacatactgagggctcatctcttcaaaaaaagtaaaaccaaactagcgaggcatggtggcattgcacctttagttccagctacttgcgaggctgagttgggagaatcatctgaggccaggaagtcaaggttgcagtgagccgtcccttgg

SEQ ID NO: 456994 - DNA, 391 bp, Homo Sapiens
tctggctgctcttgaggatacactaaagccaaccctcgacacacacattcacagttgcaggcgtgcaggtcggtggtgttacattcacacttgcagacgtgcaggtcgggggtgttacacacattcatgctgttgcaggcgtgcaggtcggtggtgttacacacattcacactgttgcaggcgtgcaggtcggtggtgttacatttgtgctgttgcaggcgtgcaggtcagtggtgttacacacatgctgttgcaggatttcaggtcggtggtgtaacacacattcatgctgttgcaggcgtgcaggttggtgctgttacacacatgctgttgcaggagtacaggtcggtggtgttacatgctgtagcaggcgtgcaggtcggtggtgtaa

SEQ ID NO: 456995 - DNA, 187 bp, Homo Sapiens
cccttttaagtttcaggcagacacagtacagggtgtgggatctgtttctgacactcttgagagctacttgaagacgggctccatctgtgcctcttgaaacaaagacactcgataaaggcacactgaacaaacagtgatgcaaaattgcaaagtcctaggcacaggtgcggcccacactgggtaccga

SEQ ID NO: 456996 - DNA, 311 bp, Homo Sapiens
  misc_feature (294)..(294): n is a, c, g, or t
tcggtacccccatcaggagtcaggctttaggaaatcagaactcagaaaacgagatcctcctggaaggcgatgatgatactctgtcatccgtggatgagaaagatttagagaatcttgccggtcctgttagcctgagcactccagctcagcttgtggccccctctgttgtagtaaagggcactctttctgtcacctcctccgaactctattttgaggtggatgaagaggatcctaacttcaaaaaaatcgaccccaaggtgagaagatgaaggggtttcattttttcttatgagnggaataggtcagcgttg

SEQ ID NO: 456997 - DNA, 250 bp, Homo Sapiens
ctttggccctcccaccttcgggagcaccaactctcccacctgaactggagcagagggtacggagtttctgttgttttaaatcccagcatgcacacctgcatataccccatgctttcctactttttaaaaagtttgggctcccaaggtacagagtcgcctcaacaacagtgcactgagcacggactctgggcctgagggagttccctggggtggacgaagtgggcagagagcacatggccggtgggaggag

SEQ ID NO: 456998 - DNA, 349 bp, Homo Sapiens
tttttccttggcagtcaaggtgtcatatggtaccagaagagggtggctgccaccacctttgctctccagctccagcttcttcttcttggcccagatattgtgatagttctcagccacgacctccaccattccctggagctctctggagagcacaacgtttgagaggtcgaggggagcaggactgtagctgttgccctggttggcctgggacacacttcgaagcttctcattttcccgctgttgaaccaaagcttctccctctttggtcctctccacagtccagcccacagccagcatggttttcagggactctcgcgcaggccagcgataaatttccttctccttctcc

SEQ ID NO: 456999 - DNA, 210 bp, Homo Sapiens
agggttaattcttaaaagtggaatttctggttcaaagaataccacagttataaaactccatgtattttgctaattttctttccagaaatgctaaatcaattttatattgatgcataacaacatggaatttcaattcctgctctgaataaacctttgtttcatagaggattattagaaaatcatcttttggtgacagatatttaaagtagt

SEQ ID NO: 457000 - DNA, 409 bp, Homo Sapiens
ggaagagcagtttgaggtggaccgagagccctcgctggaccgaaaccggagagtgaggggtgggaaaagccagaagcggaagcggctgaagaaggaccctgggaagaagatcaagagaaagaagaaaggagagttcccaggagaaaaaaagcaaaaggctgcgctaccatgatgaagccgaccagagtgccctgcagcggatgacgcggcttcgtgtcacctgttctatgcaggaggatgggctgcttgtgctgtgccgcattgccagcaatgtcctcaacaccaaggtgaagggcccatttgtcacctggcaggtggtacggcccattttgcatgccacgtttgaagagtctttggataaaacatctcattccgttggacgaagagctcgctacatagtcaagaaccc

SEQ ID NO: 457001 - DNA, 647 bp, Homo Sapiens
tcatttctattattaggataaattggctgatcccccaagaagattggagtattctgaagaataatggggggtgaggaaacggaggccccacaggtagatttatgctttgcactattctttggttacagaagcgttgtcttatgttctcggcatcttacagagattttagtgaaacaggtcttctaatttttatactttccctacccagggcctcagcataagtatggcataaaggggctagcatactatgaatacgattaccccacccactaatattgatccattggtcctggacaatgagctcaccttagtcctccattcacccaattggattgattcccttctagaatccactctctcctccagtcttccttggcctgcctcatacactttagtgacctctccaaatccttagagtaaatatagcttcagctttaaagctgggaccttctctgcaaaaaataccttctgtatagttccttataattgacctggcctaaattaatcctcacactcatcctgtgaaggaagtaggaaagtgttattgttcttgtttagtgggtgaattttgaggttgtgtgatagccaatatcttcttccctctctcgctgacgtagttttatcctctggagtcagctatggccatg

SEQ ID NO: 457002 - DNA, 524 bp, Homo Sapiens
ctcatagctgactcctgagggaaaacctgcttcagcgagagcggagagaacggactgggttcttgcctctgcagaaaccctaaagacctgaactcattacctaacctcaatgcagcttatgtaagagaagggaaggatcacacttattctcaaaacacaaaacaaaagtctctaggtctcgtcatggtttaagacaagcctgaattttgcattgaacttcatcatctaagctggaaacttctgggcatgttttttttcctggtgagcagcagcataaaatagctttagaatttattcagaggcctttccctgtgccctagcacacaggagcaaagaccaccaaataaaagaaagctatgccatgagccactgaaaccagcattgtgaaaataatcatttcttgacttctgagagtgaagattttcaaaatttaagacttcttaatgttggtgttttacttatgaaaagatgcctgtggtgctgttattcaaaaacaggatctgcaccccattcctggttttctc

SEQ ID NO: 457003 - DNA, 274 bp, Homo Sapiens
tgtgaactgactgttttcttgactcttcagggtctctaaagtcctgaactcattacctaacctcaatgcagcttatctaagagaggggaaggatcacacttattctcaaaacacaaaacaaaagtctctaggtctcgtcatggtttaagacaagcctgaattttgcattgaacttcatcatctaagctggaaacttctgggcatgttttttttcctggtgagcagcagcataaaatagctttagaatttattcagaggcctttccctgtgccct

SEQ ID NO: 457004 - DNA, 304 bp, Homo Sapiens
atgagtcttatgatggactctgtgaccttgagcctctcacctcgtgaccttgggcatctcatgttctctccacaggtctcggttctggactccttcatgggagctgtcatgcccctgtcacacagcagtgttgtgcccccggggatcagggaccaggatggtcctttcttggtggtgaagggggcattttgcattttccagagattcaagtttccagccctatctagaaagaaacatttgagttttcaggctcgggcaaccgccatgggcatgacttacgctctccctaaagcagttttttcct

SEQ ID NO: 457005 - DNA, 368 bp, Homo Sapiens
  misc_feature (108)..(254): n is a, c, g, or t
ctaaccagtagttatgtagtcttacctgtggctatatgtctataccatgttttcctgaaagtactcaaaagccatttcttaattctagcatattttgctgtccagagnnnnnnnnnnnnnnnnnnnnnnnnnnnnnnnnnnnnnnnnnnnnnnnnnnnnnnnnnnnnnnnnnnnnnnnnnnnnnnnnnnnnnnnnnnnnnnnnnnnnnnnnnnnnnnnnnnnnnnnnnnnnnnnnnnnnnnnnnnnnnnnnnnncactaagttcattagtgctggccagggcagagttgtgaggttgaaaatagactcagttggcccctcccacacatgtgcacctccctgtggcagaaccttccctgactgcccttc

SEQ ID NO: 457006 - DNA, 539 bp, Homo Sapiens
ttagcgagagaggtgctaccaggattggcctgttgtgttgggagttgggataattgatcattgcttgaaagagattttaacagtgcattttctcgttcaagtaaagagtttctttcaactaattcttttatttgttcctttaaaacttccacttcttctcttactgcatacatcaaatggcttttcaccagatccattgcttgttctattttgttgtcaatggctacaacacctcccccagatgcactgtcttcatcaccatcaacaggaatagctatgctgaatacagaggtggccagactgttcataggtgttaactgaagggggtttgccagggaatctgcaacaggcggcttcacaacaggcttattttcagcaatgagagaaagtggtggttgaggtaggggttctgattttcttctagtatcgtcgacttgcccgactaaaggctgggtctgagtttgaaactggcttaggtcagactgtggtagacttgttggtgcgctgtgtgtgcctggcgctaagggcagcccaacatg

SEQ ID NO: 457007 - DNA, 519 bp, Homo Sapiens
ataggtttcttgatttagttaagaaccttatttttagcatcacaaaatttgtattattcctgcaaaatcaaatcatttcatctcctatgttgagctttttacaatttacagtagcatttacaataatatgagacgttttacctgtgacaaaataaacttccacaagctttattttgatcccatgagataaatgaaaaaaaatattatttgaattaattgattttctgtttaaaacacctggtaatactaacataaaactggaataacttaactcttggtgaagtttttttcttctgctaatgaagctaatacattaaagtcatcgtttcacttttcatatatgcacaaaaaaacctgagttcaaaaataagcaaaatcaatttggaacaacagacatttcatccaaaagaaatgtctcctagggtgctatgttagtaaaccttctgcagctgcgtatgttaaatcatcttccttaacatagtcttgcatcattattaacatttgaagtagttgctgttg

SEQ ID NO: 457008 - DNA, 746 bp, Homo Sapiens
  misc_feature (299)..(360): n is a, c, g, or t
cttcctcctctaaagaaaggtcaatgaatttgtgattatccatgcaatactgttttttaagcttttccctatacattaggaagacttacagcaatgaactgatttcagagatggttgaaaatattgatgtcatctacgtgttcagactaccagtcctattctctctcccttctggttttcctttacccatttctctctttgttagtttgattttttttgtttcccttcatctacctctcccacgccaggaagcagagcaaaatcacacatgtgaccctgcaactagacccccgggctgnnnnnnnnnnnnnnnnnnnnnnnnnnnnnnnnnnnnnnnnnnnnnnnnnnnnnnnnnnnnnnggggcactggactgaacccagtggcttcagaacagctcccaggagaagctggagtgactccattcaaagggcactggaaagatgcctggagtccttttctacccaggcacaagccttttctttattgcccaactctgatgcctgaggtaaagcaatagcatgactgaatgtctttcacattagagtgtaatttatccacatcagccgcagcctttgatctcaccaagctgagagaggagagaagtgatgaggcgtacaatgtgtacgaggtgagtgaggtgtatgtgggctgcagcagctgaagggagggaagggccaggaggctgcgggtgtagatagaacgttccccgtgggacttggaggcccttggccagcacatacaaccc

SEQ ID NO: 457009 - DNA, 340 bp, Homo Sapiens
  misc_feature (157)..(165): n is a, c, g, or t
tatttggctataaatgtaacctgttagctaatgggacatgtaagtactatccaattgtccaaatataaaactctgcagtggtagtaagtacaagagtttattcctgctcagctcaggtatggaatctcaagagagccgttgtttagattaaagaacnnnnnnnnngactccagtcaatccattagtaaatattctctcaattcatacaggaaaggtagatgtttaggtggttccagatcagccttgcctttagcccttatgtcccttgatgctcataggcctctcctggctgtctacacccatgaccatctgttacagtggcaccatgcccattagaaac

SEQ ID NO: 457010 - DNA, 566 bp, Homo Sapiens
ggtcatagctgactcttgaggataaaactgcgtcagcgagagagggattattaggagaatcagctcatgcaattatgaaggctgagaagtctcatgacaggcactctgcaagctggtgaccctggatgatagcagcatggctcggttcaagtccaaaagcctcagaaccaggcaacctgatggtgtaattcgtagtctaagatctaaggcctgaggactgaggtgaccaccactagtattagatcctggagtcccaaagccaaagagcctggagttatgatgtacaagaacaggagaaggagaaggtcccagctcaaagagagagaggaagaaaaaaatgcttttccctcctttttttgttctatccaggccccgaactaatcggatagtgcctatcaaactgaggggggatctttttcattaagttcattgactcacatgcctgtctgctctggaaacactctcacagacccacccagaagtaatgctttgccagttctctaagtattcctcaatccaatcaagtgggcatttaaaattaatcatcacatgccctgatgaaaggg

SEQ ID NO: 457011 - DNA, 445 bp, Homo Sapiens
gcccttaatgggttgtttgatgcagatggagcaagatttcctttataaggggtttggataatatttctctttggattagcaatatttattttctttttgaattttcattagcacctattttttaaccttttaatgtaggtaaaaatccatatttttatgcctccttataattcttttagtaaaagtatatttcactttccttacatgctttgcacataaactgtttctttaatagttttacatttaggacacctaattacttttatacaatattccttgcataaattccctattataacattttttacaactttcataggccatctttgacatgcctcaactttctgacttcttttaacactatttctttccccagtcacaccttctgtgtctttctgtaatctctgtctctttcagcctctctttcacttattctctccctctg

SEQ ID NO: 457012 - DNA, 469 bp, Homo Sapiens
atgaaacaagtgtctttgttacataactctcaaagtgcattttcgtaaatgaacaatctatatggcaaatctaactgatctttatggagagttattttatttaattggttgatttaatttcctagcaaacgaaagctgaaaatactatccctgagaacacttacttgttacaaatcccttctgttatctaaacctcatttatttcaattaatttcccatcattctttgtctttaagagtatatagtatgatttaggtatttcacagttttctttcaaggttgcagttcaaagaccaaatgtaaccaaagctgaagactttcaattccactatctaaggcaatttcagaaatcaatgcttgccttcatctgttgctggtgggaatgtaaaatgaaacagccactttggaaaacagtttggcagtgtcttaaaaaattttatggaaccttagcataagacttatcaattcc

SEQ ID NO: 457013 - DNA, 678 bp, Homo Sapiens
ggatcatgaggataaaactacggcagggagagagggggtaatccttacggctgtccaagactacaaataagaaaataacctgtcgcacggagccattggaagcagcaagcgagcgcgtgagggatccgtacaacacttttagactcccttcctctcgcacaccccctctccatctgtcgcaaagggcaccaggaagatgcagggaggaatattccagctctgggggctccagagctcagcagcccagatggggggctctcacaggagccacatcacctctcatgtgttgttactggtgaggaccaaggggctgtcagtatttccaccctcaggaggctttcagagaaatgcctgtgacttcatcaaaaccttctgcccagagaaagaactcttctacagtcctccacccaaggccagaaaggggcctctctcactccctctccagcttggactaaatcatcctgattaagtcattgagcttcttccctagaagccacccagcaggaaggccagcatccaaaatcctggctcctctctatcacttataagttagttccccagtttgggactcgattttctgcatctgcagaatggggagaagagccaatccatgtcttgcgggtgagacgacgcaggagcagcatccggcctggaacgccattaactatctaatgaatg

SEQ ID NO: 457014 - DNA, 513 bp, Homo Sapiens
tcccctccaatcttgtcagtttttctggtcaaaaacctgaacttgcttctctcacacctgcatcatgagccacctttgccctagcttcagagtataaccagaatctcagcccttctctccacctccactgctaccatgtttgtccaagccaccatcacctgtcacctgtcacctggggtactgtggtaaccacccgcagaactccctgtgtctctaaccttgcctctctgcagccatttctcagtaccacagcagaatgctccttcaaaattttgggtcaggccatggtactccaatgtccaaaccctaccttggctctccatttcacttgagtaaaagtcgcatctttctattggccttgaaggccctgtgtggtctggcccctccgttcctctctgactctgtcatcttcaccctcctaccttccaccctctgtgccagcctcactggcttgctcatgttccttgagcacgctatacactgttccctgctgtttcttagccagctccctct

SEQ ID NO: 457015 - DNA, 467 bp, Homo Sapiens
  misc_feature (376)..(392): n is a, c, g, or t
caataatgtctttctgtccatgaatttgaaatatctctatatttattcagatcttttgaagaatttcttaattagagctgtatagttttcctctaagagattgtttacataattgttagatttatacctaagtattttactttttctggtactaatataaatggtattaagttctttatttcaaattctaaatgttcatgctggtatatagaaagacattgactttgatatgttagccttgtattctgcaaccttgctataatcacttattatttcaaggagttatttttcgttgactctttgggatcttatgtatagaacatcatgtcatctgtgaacaatcagttttgtctctttcttcccaacctatatatcnnnnnnnnnnnnnnnnnattgcattagctaagaattttagtacactgttgaataggtgtaatgagaggtgaaattgttgccttattcccaat

SEQ ID NO: 457016 - DNA, 473 bp, Homo Sapiens
ttgacaactggccatgagggaaccaaaactaagaaagagggggcttcaagagggagggagtgtcaacgctttcgaaaaaatcagataagaacaaaactggccattggatttggcaagacggagatcaaacgaagagcctttcagtaaagcaatgaagacgtatgtttcccacgtgggatgagtgaaagtgagaacaggaggtagggctgtggagcctacagaacagccatttctttcaaggagtttttatagaaaggggcagagagaaggcaaagtagctgaagacaaatatgggctcaaagaaggtctgctcattttttctttcttttcgttcacaaggaggatgttgcaacatgctaggcaatgctggggataattctgtattgaggggaagtgctgatcagggaagaagggatgggatctaaggcacaagttgaggggatggcagccttacacacgagcagggacaggaa

SEQ ID NO: 457017 - DNA, 524 bp, Homo Sapiens
  misc_feature (397)..(475): n is a, c, g, or t
tacttggtgtgatggttaatttcccgtgcaacttgactgggctaagagatgcccagatagctggtaaaacactatttctgtgagaccatagctgggtgagattagcatttgaatcagtaaattgagtaaagaagatccacactcaccaatgtaggcaggcgtcatccaatctgatgagagcatgaacagaacaaaaaggaagtgcaaattttccatctctgttcttgagttgggacatctgtcttctcctggttctcaggctttcagactcagactgaattacaccaccggctttcctgggtctctggcttgcagacagcatattatgggacttctaggcttccataatcgtgtaggccaagtatcataataaatctctgcttgtgtatctagaccnnnnnnnnnnnnnnnnnnnnnnnnnnnnnnnnnnnnnnnnnnnnnnnnnnnnnnnnnnnnnnnnnnnnnnnnnnnnnnnggttctgtttctctggagatcactgcctctctcgcaaagcaggtgggtc

SEQ ID NO: 457018 - DNA, 768 bp, Homo Sapiens
ctgagatgacagtcggctcagccgctcttctcttcccacttggcccctagcattgagaaatgcccacctcctgtgtgtgggggccccgggccccccccagcacccatgctacgtgtggagagccccctgggcctggcagcatctcccctctcctggggcctgcatggcagcgccctgagaaaggcagtacctctcgcccccgtgaagatgcagcctgtctgtctgtcctccttttcttccttcctttgaacctttctgctttgcagccccattggatgagaatgacctagaggaagatgtggactcagaaccagctgagatagaaggtgtttcagcagaggatggggacccaggggacactggtgctgagctggatgatgatcagcactggtctgacagcccgtcggatgctgacagagagctgcgtttgccgtgcccagctgagggggaagcagagctggagctgagggtgtcggaagatgaggagaagctgcccgcctcaccgaagcaccaagagagaggtccctcccaagccaccagccccatccggtctccccaggaatcagctcttctgttcattccagtccacagcccctcaacagaggggccccaactcccacctgtccctgccgccacccaggagaaatcacctgaggagcgccttttccctgagcctttgctccccaaagagaagcccaaagctgatgccctctcggatctgaaagctgtgcactctcccatccgatcacagccagtgaccctgccaga

SEQ ID NO: 457019 - DNA, 367 bp, Homo Sapiens
caggaatcagtatacatttgcttcatgtttggatggagaagtagattgctccaggataagcaggggtttaaaataaatgttaaaagtacagaacaggaaattatcaagcagaatatgtgcctgtcttcatgctgtatgttcatccagtgaaaaaatatgcctagttttatttcactagtagacctggatttcagtaggttgatttcatctgttagggatagaagagccggaaagaggatttcagtaggaattcacctgaccatgaggaaagtggtcaaggaatgaagacattggaggcataaggtcttcttctcttccttctggagatttggtctctcatgctctattcctatgacagtagtggtag

SEQ ID NO: 457020 - DNA, 465 bp, Homo Sapiens
aaactatttttttcaaaataagttatttattgtggttgataacctattttcaagtgatcagagaaactaattattactttgttccatatttattgtgcaaggctcagtgtcttacatgcatttgaactcccattgctttcataaggtgaaaagagattacctgcaactttctcatagccccttgatgtgcagtgtgttttactcttcttttacagtctctaagatggtaataaaaactttagtttaaactaatctattatctgtcaaacctgcctcaatgtgtgagaaattaccaagacactatcactttttaaggttcctatttatatgcgttattgaagttagtaaatcatttattattatggaaagtaaaaggaataaagaaaatctgaagataaaccagtatttattgaagtaaaaacctatacctatagtgtattcaagtaatccacctttctctattta

SEQ ID NO: 457021 - DNA, 520 bp, Homo Sapiens
  misc_feature (442)..(442): n is a, c, g, or t
tgttagcaaccagaaacctcttttagcctcgagttccagggactgggcctgcatctatgatgatgattggcaagtctaaaggaaggacagctttaaaagagggaaaaggaggagacagggaacaagaaacgaagaccaaaagggagaaaagaagataatgaaagaaatggatgtcaggtgctacttaatgaggccaccctcaaaggctcctagcctaatctgggctaccgtccaaatacagatggcagaatttgggtaatgttattcatttattcctgcagatagtaactctgggtacatgccaacactccactcattctaaaaaattgtttaaagtgttgctaattgtcctgtgactcattcttcttacccatattctctggttcttaactttagtcctcactctttcatacattttctaaaagagctgtctgaatagatntttctggaaacagatatagagaaagctggatttagcctctttccctaacgcagttttaccctcaagattcagctatga

SEQ ID NO: 457022 - DNA, 708 bp, Homo Sapiens
  misc_feature (251)..(251): n is a, c, g, or t
  misc_feature (262)..(262): n is a, c, g, or t
  misc_feature (277)..(277): n is a, c, g, or t
ctggcccactttccctcccccacctctcctggtgacattcagtgactcagaggcctgaggtcagttgggagccctagggaggtttggaatcccaagggcagactgggttttgcgtctctgccagctccagtgctgagtgaagctgggggtagaatggacctggggctctctcaggcccccttcttcctcccagctccaaaccagggtgttgttggtcctggggcagaggtgagggcttgggggccctacanttcacggttcnggttggcgggcaagntagcaggcccagggcctgggcaccaggagtcatatcctggtccccacctggcacgagctgattgtcattcggagaagctctaggtgggaggcagtggcccttcctccactccctctgctggacccagagggcagtagagggccttgggagggcctcaagttgacaaggagggctctgtccggagaagtttcctgagtgttctgggagcttctgcatcagcgtggggtggacgtcaaaggctgtccacccaggagtcctcccctcagctggtctgcagagaagccaccaccctggcctggaagtggctgcccaagctgctgactctccatgagggggaggctgctttcagggtcagctgccttgtgggcatccttccgggtgatggtggctggacgcagccagactgctggggcacactaaggcctttcttc

SEQ ID NO: 457023 - DNA, 369 bp, Homo Sapiens
gagaaatttcttcaaataaccagtgataagccagggcatttagaaaagagattttactttaaaccctcaattcttttgaaacaagggcaaggcaggcttggggcagggtagaaagaggagacccagttaatgtaattccagaagcaagttgcatttgccaagcagcttacacgtgggcttatgactgggttcctaggctgattatgataaaatgccagggtgatgtgctgggaagtgtgtgattcagcaaatagttgaccacaaaaggccacgcaaagacctttcagctaatgtcctcaaagacacacccatcagacacactgactgactctctaatgtgtgtgtgagtgtgcgtgagataagagttga

SEQ ID NO: 457024 - DNA, 343 bp, Homo Sapiens
tacaaatgctaagtgctggtaatgatgattaatgttgatgttggcttttcttgtctggattttcatttctgattttagtgtgaactgaatcctttatggaattagatgaggctcacagacatgaaaaatacatcccaccacccaacttccccttttttcctgctgtcctgcatcagggaatggcagcttgaagttggcatttgggaagattcattcattcatcccacagttagtttctttatctatttatttgtgtggccattcattccacatgcctgcagacacacttacagtggataagtctaagagctgttcctggcgactcgtccaccagcatgcatgc

SEQ ID NO: 457025 - DNA, 316 bp, Homo Sapiens
atacaggtctgagccactgcgcccggacctgacaaatctccttcttaaacacactcttccactgcttccggaataccccagtcttctgaatcttgcacccccttgccaccctctcactctcagtcccttgggtctacttattctaatacccattcgtgagcctttgaaattccaccggcttagacccagggtctcttctcaactacaccctcatcagtactcctggttttgatctcaatgatcaaatgtaaatttatacaacccaccttgccgtctcccgctgaagtagttttaccctcaagagtcagctatgagc

SEQ ID NO: 457026 - DNA, 369 bp, Homo Sapiens
aatgcaagagtttagaattttaaaggtggaatagttctacagagtggtcctgggagggaggaaggtaacaggagctaaggaggtcaagaatctgtgaagctgtggggtcgaaggacactgagaaaccatggcaggatacactatccagatctcgaagttttcagggaacaagagggtatacctgggagatctacgtatgagaaggggtgaaggtgtgagcttgataagttaagcagagtttattcagaagttgggacaggtcttcctgtggtgtgcatgccatccatgactgtctcctgggggttgtacaagtggctgtgtggtaagggcaactgtggcacagcctcctgttagtgacaggcttctagg

SEQ ID NO: 457027 - DNA, 497 bp, Homo Sapiens
gtcatagctgactcctgagggtaaaactgcgtcagcgagagaggagagaatgtgcaacagagctggccacgttctaaggcgggatctgggaactgaggagaaaggctactgcgaaacgccctgcaaccaaaggactgggaggaaacagaactatcaaaagacagagttgaaggcccttagcctccagaatattctgccatgaccccatatccttcctagggttggattttggaaaaatcaagtaaagggggctctgtttcataagaggttggtgcgtggagaagaaagaggaattgattgacgaatgtgagtcggaacttaccccagaaatggtcacaagagggaataaataatacaggggtggcagctggagggtgatttgcttagacaatattaacttaattttcaaagtcaggggctcctcaagttgtttttgaatattactgtcacagtaatcaagagcgtaatatagaagtcatctctgcatttcatttttc

SEQ ID NO: 457028 - DNA, 270 bp, Homo Sapiens
gagggctgtggaagaagggaggggccccatgcaagctgcaggtctggggagcctgaggatgtcatagggcttcctggtagagtggaaagtgcactcctgaaggtcagggccagtcactacagagaggggacagcgaggagagggacggtgtggccccaagggtgactgcagtttctcaacatgtggcccgtggatcacctgcatgggaactgcctggggaatgcgctcatttgcagattcccgggccttcctccagaactactgggcaag

SEQ ID NO: 457029 - DNA, 196 bp, Homo Sapiens
gagataggcgactcctttgcttacacaagcccctctgactgtacatgcatagaaactacctatctctccagcgcttccttccatatcgtcagatgaaagacttgcttctgccacactgcatgtttgtcagacggcaggttttacccatgatgcctacatatactagggttccctctgcattcatgagccgactgag

SEQ ID NO: 457030 - DNA, 235 bp, Homo Sapiens
atggcgactccatctcacaaacaaaaatactgaggaaggtatgaagacagccaaaagaataaaaataaaaataaaggaaagtacatgaagatgcagcaaagctctggtatcagtaatattctgaaataggaacagccattccttcctgtagaaagtctgtcttgagtttgagagagtctctggaggatgtatgatgggcaaagctgaagttgtcacgatctgggagtcgcccttg

SEQ ID NO: 457031 - DNA, 160 bp, Homo Sapiens
  misc_feature (24)..(24): n is a, c, g, or t
tccgacgatatggcgactcctccntgtatttgtaataccggttacctgaggctggcacatggctgacacttagataagtactcacctgactacataactagaattagcagaaacaatacctgatgtttatgccagtggttgtcaaagtagtggcaggcgg

SEQ ID NO: 457032 - DNA, 220 bp, Homo Sapiens
tatctttgtccagtgcataagattgagccatcaacagtgacaaactgtatcctagaatcccacagtattgggtgtggagaggaatgagctgacagtcctctggtacacacctcctcagtttaccaaggaagctgtgcaggcccaggtctccaagcccaccccgagaggttgtttctttgctgttcgtgggcctggagtcgccatagtcgtcggtcagcta

SEQ ID NO: 457033 - DNA, 174 bp, Homo Sapiens
gataggcgactcctaatatgtgggttgttggtttattacttgggtgtcacaaaagtagaagattttactggcattttccatgtcagtagagtaatttttgcagggtcagattatttttgattaattgatttccatattggttaggataatttgtggagtcgccctatcgtcggt

SEQ ID NO: 457034 - DNA, 448 bp, Homo Sapiens
tttttaatcacttacttccatgtcttactagccattctcctcggtcttttctttctacctgttattaatgactgcctgttgtaggactttgccacagtattacagtatttcagactaggtgacaacattagatctcataattttctaaaaaatggcttaaccaagggtgagatgtagcagtttaaagatatgcatgactgaaactatctctgaagaagttaaaaggtcaccttacggtcttagcaacacatctttctgtgggttgaggaagccacttatgtgcccacactgggtggaactccggcagttcagtgctgttgggattcagggcttctgggctgacgttatttctggcagaaaagcacaaaactggggcttcacttgaaacgatggtgaaacggaaccagctgtttccagagtaatctatgggtatattccagggagtgcc

SEQ ID NO: 457035 - DNA, 408 bp, Homo Sapiens
ccgctgatgtctgagtgcctgctctactacatcaaggatgggatcaccagagtgggcaggggggatggcgagaggcggcaggacattgttctgagtgggcacttcatcaaggaggagcactgcgtcttccggagcgactccaggggaggcagcgaagctgtggtgaccttggagccctgtgagggggcagacacctacgtcaatggcaagaaagtcacagagcccagcatcctgcgttcaggaaaccgcatcatcatgggtaagagccatgtgttccggttcaaccaccccgagcaggcccggcaggagcgtgagcgcacgccttgtgcggagacgccagctgagcctgtggactgggccttcgcccagcgtgagctgctggagaagcagggcatcgacatgaagcag

SEQ ID NO: 457036 - DNA, 324 bp, Homo Sapiens
cacgacagggcgactcctgaaggccaagaaccgtgtccaatacactctgtgagtctgtgtgtgcccagcccgaaggcctggcaatcagaggcatcaggaaaggtggtgagtaactgccccaggcgggaagaataagcagcccttcctaagagtgtgggtcctaaggactgaactaggtgactctctccctcaatccctaacacacgatgatgtttgctcccgaaccagacagggcaggactttgaggggctgactctagctagctgccccaagccccacacgccaagcagaagggaactgagccccagggagtcgcctgactcg

SEQ ID NO: 457037 - DNA, 441 bp, Homo Sapiens
tcccaacagccaaggcggagggccctggctgacccctcagccattcaggagacacccggggcagggtacgtcacttagcagatgggttaggctataaaccaaccctagagaaaggctgttctcggcccaccccaaagctgtaaaaacaaacccccaaaggatcaaggggctcttcaggcagcttcaatcgcctgccagggccaagcccccaaggtgattatttttttgtaatagtcacaaatggaaacaaccccaatgctcagtagcaggtggacagaagaacaaagcgcactctgtcccaaccacgggacattcctagcaaaaaaaggagccgccgctgagacacacagctagcccagctcggtccgaggcaggaggctgagggagagaggcagacagagcgcagaccgcaggactgcacagcgcaagactcatgctcat

SEQ ID NO: 457038 - DNA, 266 bp, Homo Sapiens
tagcagggatagggcagaggatggacagctctttacagctgtgaagcatctccaagggcagttctgtagccacaggatccagggttatttctaacctaccctggactaggcagtggcattgtgacttttgtaatctccaccgtcctccggcacaaggcactttagtgaaaggttgccaaagactgtgtcatcctccacggtgccaccctgaagcctgcttcacagctccctgcggccgttggaaagagggagacagtgtgtgttga

SEQ ID NO: 457039 - DNA, 366 bp, Homo Sapiens
ccagcaatgtggttaataattttaaaagttttcccctcccacccactagtcccatactggccctgtttttcaaatgtgacccaacctagtcagcaactttacaatggtttgaagtattatttcttgtttttatattttatagtgccagtacataaacttcacacatactgttctgcttccccatctttggggactggtttagttgtcccagctttgccttcttcatttgctgctgctttttctggaagagatgccaaatctttaaaaacatctacataatggccaaagccagggccccagttcaaaaggttgtcccagttgaaagtccctgcttgctgccctagcttcatgggcagtgtgttgtgc

SEQ ID NO: 457040 - DNA, 496 bp, Homo Sapiens
ttagttgtcccagctttgccttcttcatttgctgctgctttttctggaagagatgccaaatctttaaaaacatctacataatggccaaagccagggccccagttcaaaaggttgtcccagttgaaagtccctcttctgctcagaatcctcccctggatcccacctccacttaccgtaaaatgagttggctccctgactcctcccacctcaggatctttgcgcaggctcttccacagcagagggcactctagtccctcatatccttgaggtctttgcagaactcaggccttccttaaccattgtcatcaatactacaaaccattctccctgacaccccgacttcccttgtctggttttagttttttcctttgaggagcactcatcaccaacattaactatatacctcacgatcgtattgtgtctattgtttgctgtccgttcccctctccctccaggaatcttgttttattccttggtatatccccctggtgccgaa

SEQ ID NO: 457041 - DNA, 279 bp, Homo Sapiens
cgtcaactgagggagttaacaaaaaatgttggtgttctcaaaatccaatatgagtttctttgtactgaagcccccttcgggattcacacactcttagcaccttctggaaatgttgctcccgaaagcggaggttttgtttgaattattctctgtgtggttgtctggctcttgtgtttatggactccaaaacatattctactgcactctttgccctatctgtgagaatgtcacagccatttaaaatgctacttgagtgtaggtcattgctgttgtctaaca

SEQ ID NO: 457042 - DNA, 433 bp, Homo Sapiens
gatggcattccagtactgggttgtgaagttgcttgtggtgaaatcagcatatggcctccctcaaagctctcggaaatggagttggaatttcagaggttgccaagacctggaatcacattttgctccggttgcaggtattgaggttaccagacgtacagtggtagactaacattgacttaggtctgtgaactgcagcacaccctcctacagctagtgggagactgacgtgctgtatcacctggaattggaattaagtctcccacaaccattggagtagcttttatggacagaagaaaccctttcccagccaggttcccacactcagtctgacttcgtcagcctatcctagcctcccagccaagcgcatcttcagcattttcttgaactactcgtgttcctcacgttccggtgtccgtaatcccagctgcccgcc

SEQ ID NO: 457043 - DNA, 395 bp, Homo Sapiens
tttcatagcaccccgtggcacactggagactggaaacccactggccgttggctcttttccaatctgacctccttctgaatgtcttcctccttttcccctagaccattcaggtctccacagatcctcttactcagccagtcctccgaagatgtccttgacataggagtagtcacctccagatttggggatggtgaccccgagttcagcatagcagagggctcccacaactgtgatgaagcccgtcacaatccagacgatgagagcaaggcccacagaaccagcattctccagcactccctatgcgagacaaagattccagagccgatgatgttccctacgatgataccacaggcactaaccaatccaatctctttcgtcagcccagagagccgaat

SEQ ID NO: 457044 - DNA, 426 bp, Homo Sapiens
ggactggattcttgtagctttctcctgatgcccattccagggtttcccaaggcaactaggaagactatccatggtgaggcctgcaatctaggcttcttgctgatcagtcaggtgagtcacttctataggagggataccagtgtacgccagtgcccagttccaggggaagacagaagtgggtgccaggcttcctgtccagttaggcaggagatgagtcctgctggctatcattgatcagtaccacttcttaccacctccaatttctggcttcctcatggccttcttggggagtccccagcttcctcatggctttcctaagggggaatccccagcttcacggccttcctgggggagtccccaagctctccatggtcttacttagggagcccacagtaatggaagcctgatgggtgctctatcaccagg

SEQ ID NO: 457045 - DNA, 385 bp, Homo Sapiens
gaattccggctctctggggaattccggctctctgagatggcaactgacacccagcctcagtgttggggagcagttggaagcacgtgcctccccagaagaggccaccgccactcagctcctccagacctgccatgtgacgaggtgggctccataacgctcttgagtttttaagagaaggccaaaattcagatcttccatgttgtgaactaattgaactctgtaaagtgcctagaaagtcagataacacctgtctttccaccaaattcaacctgtgggccacccatttgcaacctctgcttttgattcagaaaaagcccaattgtgtggtagggactccctttactagcacttccctctgcagacccagagagccgaattcggtacc

SEQ ID NO: 457046 - DNA, 163 bp, Homo Sapiens
ttttctatacagcaaatactaactccggtttgatcaatccccaaacagttacattttttttacaaatccttgccctcccattagatatgaacaaactccggtttctcatgaacgtttgttcggttagctcttacaggaaacattggccatggaaggactaaga

SEQ ID NO: 457047 - DNA, 491 bp, Homo Sapiens
catgctctatgaccagcaagccgatttttccattttccttttcttcatcaggatccttcatttctctgtacatgattgtgtatgtggctcccaaatacgcctaagtttatctgatttcacattgccattacaggacaattgaagcaatttttgtacatagtaaaagatggttgatctgaaattggtgagtggtaattcaacttcacgagtcgttccaagacctgttactttcaaagtgagagctaatcgaggtgacggagtacattcgacttcttccaagagctctgaatgaggggtccctgggggtggtatttctagatcagttgtagtgctggacattagtacgaccaggtcctaggatcaaaagcaggaaccaatgcagaaaactgtctcatttagcacataatcatcatcccatgttactccggcgtcctcctgtagtttcgtactcttcttccttcctgctccccatagctcggctgcctgctcac

SEQ ID NO: 457048 - DNA, 653 bp, Homo Sapiens
agtgcatctgcacagactgtttttattattacctattgtaaaacatcaggttcactcaggagaaatatacgtgtaaacatttgctgtctgtcatgacaggtttggttgttggtaggtgtcattttaagaaatagcaggtgcagctccatctcccgagtggggtttatggccaacagtctgaatctaggacgtgtgctcctggtttgcagcgctgggcaggcagtgtttttttgtcgtggtggttgttgggatgtttcagaaacacattttaaaaagaaagagatcagcagcgaaaaaccatatggctggctacatctttggattactggactccaggacgcccaagccaaacctttcaaaccggggtacaactttgctgctgttaatgctgcaaagaggaacaaaaacaagaattatagccccattgatcttcatcagaattagggtaacactagctaggaaatgagttcagcagaggacctggcctccaacaagaaatgaaaatgactgattggccaacagccctggcagagctgcccctggtcatactgcgtccaaggcctcagctacactccaagtagtcctacttggagcagcaacggtggctcattcatctccaagtcccaagctcccagcatgctcagtactgctgt

SEQ ID NO: 457049 - DNA, 537 bp, Homo Sapiens
  misc_feature (11)..(11): n is a, c, g, or t
  misc_feature (385)..(385): n is a, c, g, or t
caatgtaagtnagattatgttgctcctctgcttggaaccttccaatggctccctctgaactctttttctcagagtaaaagctcccgtctttccaagtcctatgcaggaatcttgtattgtctggatctgctcctgttacctctctgacgacactctcccatgctcactctgctccagccacactggcctcgctcttcctttagcataccacatgtgctttgccttggtggcttcttctgcctgtactgctcttcctccagatattcaaatggcttactctttgacctcctttgagtgtttgttcaaatgcctctatctcaattaggccactttgatcacccatttaattacaacccacaccatcacaggtaatccccagccctcnttacccatgttttcttcatagcactcatactgtactatactatgtaatttaccctatttattatgcttcctatcaagtttctttctcctaggatgtaagctaatgaaagcagagattattgtctcatttcctggtgtacccccagcacctag

SEQ ID NO: 457050 - DNA, 272 bp, Homo Sapiens
accctgatgcaggctgggaaagcatgcaagcagcggcttgcgcagcggctcagtccagccaccatggaacatccctatcctacattcaagcagcccggtggcagccaaccaggacggcggtgagggccgctgacatacctgcacgtggttcatagacctgctggagaggaagctgcggtccctgtggcgaaggccattcaatgtcattgatgtgctgacgcccgcccagctgaatgtgtgtccaagtgcagcgctgcgcctaccagtaacgg

SEQ ID NO: 457051 - DNA, 688 bp, Homo Sapiens
cctgatgacggcgggggtcattgggcgggatcttgagcgggaagcagggcggctgctgaacgcagctggtctcgcagttgacgccagtgacgaaggaggcccgggcggccggctcaggggtgaagtcgaggtcgtggtccaacagctggccccattgcatgaacatgagtgagcgctcctggtccggagtcagctgatcagtggggaagcgcacgatctcgttggagaccgcgcgagccagagccaccgggaagccgttgcgcttgaccccgggcgtccagccgtagggaagagagaagccgtcctcatactccgccggcagccagcgcacaaaggcacggttggaggcccccagcgtggggctgcgtctgttgttgcacatcccggtgatggtgcggtatttgtcctgctccgggcaagtcacccccacgtcctggtaggcgcagccgcttgacttggacaacacattcagctgggcgggcgtcagcacatcagtgacattgaatggccttcgccacagggaccgcagcttcctctccagcaggtctagagccacgtgcaggtagtcagcggccctcaccgccgtcctggtggctgccaccggctgcttgaagtaggataggagttccatggggctggctgagccgctgctaagccgctggtttgatgctttcccgccgtcattaag

SEQ ID NO: 457052 - DNA, 460 bp, Homo Sapiens
  misc_feature (31)..(31): n is a, c, g, or t
  misc_feature (214)..(214): n is a, c, g, or t
agctccacatttttctgcaagttttcccagnggacctgccctaagggaatactgtaaagaaaaatctggcaaaaatattccctagcaattgaatcagtgcttttaaataaaagaagtggagaggggcttggttaaattattctgacaagtttttttgctagtggttgccaaaattagggatattttaaagtgtcctatcaccccaaaatttggnctttaagaaaaagctatattctgtgtctatagtgtgaagcccacactatctgtgctgcattctcaatgatacaatacctatctggaaactttcctgttttgccaatgggtgcacaaatctaaaacattttatcacaaaaggtacttgaatttaaatttcttttgaacacccagtaggaggaaatatgtacaatacaaaatacctagaagcttcattttactgtcaactggagtttgtgctgtatcc

SEQ ID NO: 457053 - DNA, 379 bp, Homo Sapiens
  misc_feature (336)..(336): n is a, c, g, or t
atagtacactggttattttttttggaaccaatataaactttcatttttaatacatactatctgacatagacttttgggtatatacaaccttcttcttctcttttaaaagttaaatacattccactattaactgaacttccatgaagcaacattaattttagagcatggtagtccataatcagtggttcattgtgatgtgctttatccaacatgtatcttagtgcatggttgaggatgtactatgtgatattttagttaacagtgtggcatttgtgggactatattaaaagcatatccaaactaccaagctataccaagctgaggtaggtaacaccnggcatgtggaaaaactgtggatatggatccttatttataaaaa

SEQ ID NO: 457054 - DNA, 363 bp, Homo Sapiens
cagccaacaaatgcttactgagtgcactgcattaggatctaggaggacatgatgatgaactagtcttcaaagtgcttactttgtagatacaaacagacagataaataaaatatgtaaaagttgtaattgatgcagtgaaggaagcaaacaaggggaatgaggtaggactaggaaagagagacctattttaggtggaatgggaagagaaggcctctctgggaaatattattctagctgaggaccaaagcatgctccaggatcagagggtgccagtcatctgtggaatggtggtagggtagaaagtggttctggaaaagagaatgcaaatgtgggcaagaccgtgggatatctgaggaactgagc

SEQ ID NO: 457055 - DNA, 414 bp, Homo Sapiens
tacagtcatttaactgaacaagtcaactctatttttattttttccagcagagcaaagaaagactcagaaattcatcctcataactccatttcccagtagaacactccacattacgaaaacttcaggtatgtaattattttgttaagtgtgaaagtgcttgaaatccagacttcaggagaagagacagaaaacagcaccaagaatataagcctaaagcccatagcatttcactcatcagtttgtagtggttgaagccacacccaaagcaagaaccacagtgagctgatggatattttacaggaaaacttcaggttatgagtatgtgatggttccgtgagcaagactggcatccttggctggatgggcaagcacacacctcacaggcagctgggcctctcgactggggcgctcgtg

SEQ ID NO: 457056 - DNA, 139 bp, Homo Sapiens
cacgagcgcccacaagtacccctgaatttaagccagctgaaagtactccggaggaagcagagttcacaacagcatcataatgcgaggtacagcccttaaccacagcgcctagtgacttgggcgctatccggtccggcca

SEQ ID NO: 457057 - DNA, 149 bp, Homo Sapiens
cggtacgccggcaacgagcgcctccaagtcatctagagcgcgtgtggtaaagggactgtacctcgcattatgatgctgttgtgaaactctgcttcctccggagtacatttcagctggcttaaattcaggggtactgggcgctcgtgacc

SEQ ID NO: 457058 - DNA, 760 bp, Homo Sapiens
caggatcccggcacgagcgcccaagtttaagtacttattaacagaagtatcaggccagtgaacaggcgtcgggtatgacatgcgataattaatagagccctcttgcgatagatgatcggatgtgatccagatcatgtgctgggaggaccctccaggtaataatgtgctccctcccattgacagtgccttacgaggtaatgacatcacagctgaccatgaacagagtcagagcaaggctggagtgtgggagtgtgtcgtgaatgtctccctattgtgaatggcgcgggtgcccacaagaggcctgggcagtcaacagctttcttcttccataaaatcatgggaaaggagcttctaatgctaagtgtgaggggctggagttcatcccaccagcaaacaaacaaggactccatgtttttgcattgcaatcctcatatttcttttccctagactctgaataacagagctggtcagttttcattctagaattcaatatggaggcagcctggcctcccaatattgttttgaaaaggaggagaaatcaccagaagagctttgctgcaggccatagtttctgtattctaccactgaagatgaacaaccaccactcaggctgggataccacgactcagctcatccctccttctgaagtagctattctctctgaaggtttcctttccggcattagaactcaggcagggcttgtgcggtgaagtacagggctagtggccacaggtgtgtccacttggtgcgctaagccggg

SEQ ID NO: 457059 - DNA, 454 bp, Homo Sapiens
  misc_feature (229)..(317): n is a, c, g, or t
ggacagtcctagtgagaggacacttgacgatggagaggtcggagtggggcaaggcagctcctaaaagctgaaaagatgaggaaacagacttccccctgtaacctgcaggaaaagcaggacctgctgctgcattttagacaggtggctttcagtaagagaattctcttctgttgctcaagccactgagattgtcgtcctctgttatggcagcaatagggagctaagacannnnnnnnnnnnnnnnnnnnnnnnnnnnnnnnnnnnnnnnnnnnnnnnnnnnnnnnnnnnnnnnnnnnnnnnnnnnnnnnnnnnnnnnnaatgacatgacagtcactgatgtcactgtgcacagtgcattactcatcaccgtgctgtgttccatcctgtgactgcaccacggtcctctcatctgtccctctaggtatgcacacttgggcgctcaaccgggaccgac

SEQ ID NO: 457060 - DNA, 287 bp, Homo Sapiens
ccagcattaagttcacattcacctcccgaaacatgagatgattaaactccccatccatacccacacacacctccacccccaccctcagaaggcaaggccctgggatgaaaccacctgggccatcttctctcttctggggtcttgcttctccagaccttacaaaggaactggcaataaaatctgttaaactaattctccataaggacccataggactctcccttaaaattttgaattttaggccgggcgcagtggctcatgcctgtaatcccagcacttgggcgctat

SEQ ID NO: 457061 - DNA, 314 bp, Homo Sapiens
gtggcttctctcgaagtgtttcttacctcataggaggccttggcctgtctgaaattgttctatgtttcatcagattccttgactgacacaacaagaatgacagctgtgatgtgatttagaaccacctatgttaatgctcatacagtaatgacttttcttcttcttggctatttggagatataagggaagagaagattaaatctaagagatggagaatacacttctcattaatatggtcttggtcttttcagacacacacacaatttttattgagttcttaaaatagttgctgtgtattttgactgtggcgctca

SEQ ID NO: 457062 - DNA, 401 bp, Homo Sapiens
ggtgtatatatctctcccctttgacttttctaactcacttcagctaatctttggaatgtgagaggcagctagctttgagacaaattgggggacagagtctcccatgctgagaggacagcacatgcaaaggccctgaagtgggaaattttgggtgtgatatacctccaggaacctagataagactgatgtgcttatggtaagggagagagaggcaggagcctgggctggaaagttggttttctcattaagccgttccttgcaggtgttagtagggagttggaccttcagtctgagttgtaggagaaacctggcctggagattgagcttggagagttcgccatgatcatatggacattggcaccctggacagcagtgggggtgacgatgaagtgttgggagct

SEQ ID NO: 457063 - DNA, 263 bp, Homo Sapiens
cttttctagtaggagttgccaagcacatctggaaagctgtgttccccgaccccccactcccccaacagcaggaggggtgtaacccagggaagccacccctctgacatatgtgctggggggaggggcagagccttgcccctaggaatcctgtggcggtgggttgttgactgatgtgggattgctgtgtctcttgtgctgtcggagagctggcaggtagtggaggggccttgggagctcctaggctgaacttgggcgctcgtgcc

SEQ ID NO: 457064 - DNA, 494 bp, Homo Sapiens
tgttttgaggtttatttgatactagcttcctacagcctcaactagcatgtatatgcttataaattctgtacaaccaatgaataaaaaaactaattttaatcatagtgtgaaaatcaggaacaaaatactaatattttgataaataacataactattcctttctctctccctgtgttggagacttccttaaatcaaacaaaaccacagtttaggtgtgccagactataaaaatcattgctgcttaatgttagttgtgctttatataacaagccttatctgcttctcacaaaagttaccacccagaggaaggtttatttgcaagaatactatacaattttgcagcagaatattagagaatgttctgggtgttacttcaataagaatttccagcatatcattttctcctaatactgttctagttcaaatccacctactgctcagtggggaatgggaggctaaattcttaaggccattcagtctacttggcgctcgtg

SEQ ID NO: 457065 - DNA, 324 bp, Homo Sapiens
ggcacgagcgccccaggtggatggagccccactggcacacgccctgggaagcagagcccagcaggatttcagcctctcagccagacccccttgtgcagtgcacgacctgcccaaccctacatggtagccctcaatggatgaaggaatctgcagtgctgcatgcatgtgccacttctggaagggatgtgtctctgtgtgggggaaaaaggcatccatgctgtacaggtcacagtgctcagagacctgagttcaaagcccagccccactctttgggcaccttgggtctcaggcaaatgatgtgacctctcggaaccccagcgtcct

SEQ ID NO: 457066 - DNA, 587 bp, Homo Sapiens
  misc_feature (482)..(482): n is a, c, g, or t
  misc_feature (555)..(555): n is a, c, g, or t
  misc_feature (561)..(561): n is a, c, g, or t
cacgagcgcccaagtctcccttaggccgacctgagagcttgctccagtctaataccctgatgctccctttgcagccctgtacctccgttatgccaatgctcagtgcagcatttgtggatgagaatttgcctgatgggactcaccttcatccaggaaccaagtttatcaaacactggaggatgaaaaatacaggaaatgtatagtggagtgcagacactaagctcaatgttcatgtggggaaacctgactttggcttccacagaaaagaaggatgttttggttccctgcctcaaggccggccatgtgggagttgtatctgtggagttcattgccccagccttggagggaacgtatacttcccattggcgtctttctcacaaaggccagcaatttgggcctcgggtctggtgcagtatcatagtagatcctttcccctccgaagagagccctgataacattgaaaagggcatgatcagctcaangcaaaactgattgatctcacctgccagcaagagggaagcttttcttctgggctaaagaagtaaggacagcctnggtgangttactgagcagacagaggggacagc

SEQ ID NO: 457067 - DNA, 268 bp, Homo Sapiens
  misc_feature (125)..(133): n is a, c, g, or t
tgacccaccgcgcctggccaattccacttttttgaaagaactagttcttttgtttttaattatggtaatggtaaccaattcagagtaattatggattagggtgctccaacttatgtaactggggnnnnnnnnnttcctaacatggaacatcaagagtcactgtggtatgttgctcaggagctagcagtgtttcatcctctgctcagccactgtccactaaagccacattccaaatacacatcaccaagttaccaccccgtcggtggag

SEQ ID NO: 457068 - DNA, 373 bp, Homo Sapiens
gggggaaaatttttgtaatcaaacccttttattataacttttaccaatagtaaaattggatagagggttccttttttcctgaagtggtgcaatgattaattgaattgctctgcatttttcagatgctggctgagtctagcatattccaataaaatttaagtcaaatattcccatatgttttaataaactaaagctacatggaaactcttagccactcttaataaaaatcagcctctcagattgttcagtaaagtttatttctctaaatccttgaaagatggtgagctcacaaatacccaataaacagctgattatttaattaaaatatgaggactatttgagtcacaacggattcagagttttgtaaggatta

SEQ ID NO: 457069 - DNA, 136 bp, Homo Sapiens
gcctagttgatcttaattctggtaggaaatttggaaatcatctagtgcagcccctcctttttctcaatcatgacatttgagactcgggcacagtggtttataccttaatctcagcactttgggaggaccggggtgg

SEQ ID NO: 457070 - DNA, 591 bp, Homo Sapiens
agtgatgctggaagtccttcgcgtcttgtcaacatcttcagaagccttgcatcatgctgtcatatttctctttaatggtgctgaggaaaatgtcttgcaagccagtcatggtttcattactcagcacccctgggctagcttgattcgtgcattcattaacctagaggcagcaggtgtaggagggaaagaacttgtattccaaacaggtcctgaaaatccttgtttggttcaagcttatgtttcagcagctaaacacccttttgcttctgtggtggctcaggaggtttttcagagtggaatcattccttcagatactgactttcgtatctacagggattttgggaacattccaggaatagacttagcttttattgagaatggatacatttatcacaccgagtatgacacagcggacagaattctaacagattccattcagagagcaggtgacaacattttagcagttcttaagcatctagctacatctgatatgctggctgctgcttctaagtatcgacatggaaacatggtcttctttgatgtgctgggcctgtttgtcattgcctacccctctcgtatggctaaatcata

SEQ ID NO: 457071 - DNA, 516 bp, Homo Sapiens
atatggacgaatcagatcttgactgatgtctggaaactgctccttaaattgcttctgggacaagcagtcaattaggtccacacagcccagaagacaacctgacggatagtcattaggaaattccacatctttcccacgaagaagacgatatgtcgcctggagttctgagacttcttgaggggagggtttttctagctgtggctgctatccaaagtcgtcctctgtggggggtgtaccaggatctgccctccacccttttaatccctctgacaagcagagaagcccagggctgatgtacagagaggcaccagccaccatcaaagccttcctgaaattcttgatcctggattcgcaactggtgctgaaatgagttgaactctagtccaaatcctgaagaacggaaagccttcttctgtgaggctgcacctgtgtggtcaacccactggggaggggactggtacatgttgggatttaccagaactcccaaaggctcttcagaagatctatccaatttgg

SEQ ID NO: 457072 - DNA, 184 bp, Homo Sapiens
cgcacagcatcctgggagcagaataaagtgctcagagaacatgatcagcaccgcgatcacacagcatcctgggagcagagtaaagcgttcggagaacatgatcaacaccacaccacacagcatcctgggagcagagtaaagcgttacggagaacatgatcagctgggccagatgttgctggagg

SEQ ID NO: 457073 - DNA, 181 bp, Homo Sapiens
tcgcgaagtgctaggataacaggcgtaatgccactgcgcccggccacgtcttccttttcttagctttgctttgagaaatcgtttcttatcttggattccattacaatggtcctcctgccatctggcttctccagttggttcgcttatttttccttctcctatcctcattcataagtatacc

SEQ ID NO: 457074 - DNA, 585 bp, Homo Sapiens
ggccgctctagagatccccttcctctcctcccacctaatattttaaaataaaaagtcgttttagtcaattacagtgtgacttgttctaatcctccaagaatggagtagtaaagaaacagcagaaatgacttccctgcattatttcatgaaaatgatcaaaacctttatctaagtcagaacatcaacaagactcttggtctcaggtcatcagtttcctggcactcctcctctctctagctgtagtagcagctactgcttgaagacaacctatatatcccaggcataccctctacacgtataaaaagatgtgcaggtgttacagaccacctacacctaattcacttcctttctaataagatggatggaataactcggaaaagggaaaggagggattttgagccgcagttgtctaaagaattattgattcacagggatctccaagatcatgcatttgaagagttttatttctccacccaaagccctgcagtgaagaaaatccaagaattaagatgtaacatgttggctgggtgaggtggcttgtggcttatgcctgtaatcccagcactttgggaagtgtggggggag

SEQ ID NO: 457075 - DNA, 269 bp, Homo Sapiens
taccctgctacagttttccacaagtagcagagtgacccttttaaaatgtaagtcagattatgccattcttttgctccatatcttctagtggtccccatctcccttagtaaaatccaaaattcttaccatgacctacagatccctatgtaagctcatcctttgctgctgtttttatttgctccatcactggccttcttgctgttcctcaagtcatcccaagcacaatcctgtgtaaaggttgcacctgctgtttcctctgcctcagaata

SEQ ID NO: 457076 - DNA, 511 bp, Homo Sapiens
  misc_feature (385)..(385): n is a, c, g, or t
  misc_feature (400)..(400): n is a, c, g, or t
  misc_feature (456)..(456): n is a, c, g, or t
  misc_feature (465)..(465): n is a, c, g, or t
  misc_feature (488)..(488): n is a, c, g, or t
atgagccaccacggccagccttctcatttgttttttttataaggaagctatctcttcttccctccccaactagggtattctttttccctttcgtcactttgctcatgtactgtattccttcaacttcattaatgaatccatttggaagcagtgaaaaaggcaactcagaaagctaagaagaaatagatagaggaatactcagagctatctgagtgttttctttagtttgttagctctttggagctttgaaactggaaagacccagggagtgatgtggtgaaagagactgagcttgtaagacacaggagcagtgagctaagggagatggagtagtggggacaaattctggcacattcctgtctacactcctgggtagatagaaggncggaggatggagcancccatggtgggggtaatgttggtgacaagcattttcccaccagccagtgtacaagngcctatttnggggaaaaattggactaaccaantgagagaatcgtggttaccaatt

SEQ ID NO: 457077 - DNA, 220 bp, Homo Sapiens
gggtcccctgcttcctgaggcatcccctgagcatgcatccccatcccctctccagtgctgtgcgtgtgtgttgtggttggcactgtcggggtcactttcttccttgttttgggctgtgagcttggggcatggctgctggcctcgggggactgactgtgggctctctggacagatgcttttggtcatggcatctgctgggcagtgagctgttgggctgtga

SEQ ID NO: 457078 - DNA, 176 bp, Homo Sapiens
tgtggtgtgtaatgccaacagctcctgatcaggctaagcctgataatcagtcagactgctacccagcagacgccagccttgtttctccctaaatgttttggagatggggaggatggaagatgcaaaaaagataggaataagtaggaagagggggagcagatttgtggctgtacaag

SEQ ID NO: 457079 - DNA, 421 bp, Homo Sapiens
ccttgttaggacactagtgctaactttcgtttcccaccccactagagtgcactgcagacaaagtaaatgctcaaaaagcatttgcttttactcaaaaaaggcatttgctttcaaagtaatgataaatgttaagtgatttcttaaagtcctttctcctgacccaattttgttctgttataaagaaaatttcacaatatttctattcctattctatttgtactcccctttctttccttcaaaaattaatgttcaaaattctaatgaacaaaccccgtcagagtccctcctactctagcttggctgtttgctttgaactacagcaactgcctgcagccacagtgtcgctgcccagagaattgcctgcttcaccctgaacaaatagcactttgtagcaaactggcactagtgtcctacaaggacc

SEQ ID NO: 457080 - DNA, 318 bp, Homo Sapiens
agactctcgaggatcccccctcccaggtgtgaacggaatgtgagtgtacctgaggtacgcaagttccaggtgtgtttaacttggagacaagtcacttggtctggtgaggccaggacggcaactgagggattgcagagcaacaatctggaaggagcctgaacccctgagtggcacagagctgttcttccaggtggcagtgcccactgcagctgtggcatgagaactaacctctggcactgaagccagtggactgcagagtacttgtggcagcagcctgccctatacccttttataatacacagaaggctgaggtgagaa

SEQ ID NO: 457081 - DNA, 337 bp, Homo Sapiens
tcccgaccgtggggttgtgggtgctgttaatgtgctgtcatgatgctcgcctgtggttgtgggtgctgctctgttcggtcagatgctcgcctgggggcgtgtgtgctgctccatggtgttcagatgctcgcctggagtgtatgggtcctgctccggtgagggtcagatgctcacctcggggtgtgggtgctgctccaggttgtcagatgctcaccttgggttgtgggtgctgctccagactctccgatgctcacctgtggttgtgtgtgatgctccagaacatcagattctcacctgcgggctgtggtcccacgcactccgaaacgctcctctagag

SEQ ID NO: 457082 - DNA, 239 bp, Homo Sapiens
gacacagccccacactcacccctcagactcactctccacacccatccacggggacacagccccacactgacccctcagactcactctccactcctatccacggggacacagtcccacactctctcctcagactcactcctccccacccatccaacagggacacagccccacactcacccctcagactcactctcttactcccatccacaggacacagccccacgcccacgcataaggtg

SEQ ID NO: 457083 - DNA, 445 bp, Homo Sapiens
  misc_feature (283)..(283): n is a, c, g, or t
tcgaatcccccctcctgggaggagtcctgtgcctgagtgaggtggagggttcatgctgctaggatacgagggagtgtgggccggatccatcaggacaagactcagactcgcttctggagaaactgcccgccctttgtcctcggatgatggcaaagagggagcctgccatcttttaaaacacactaggggtgtgcgtgttggggaggggaccgccaggccctgtcctctcttggcctttcccaagaagctcctggcttttggagtcaggcaagtgtggattcanagtcctgctctgcttacttcattggcaaattctttaacttctctgggcctcagagccctcatctgccaaaactaggcggcagctgcgagcagaagctgagatgccggctgtgaaaactcaccggccgccaacaagggattctctaaagtccacccggcggca

SEQ ID NO: 457084 - DNA, 547 bp, Homo Sapiens
actaggacctgggatattagtgcagggctcttttgaccacaagatgactgtgacaactttaagatctttcttttgagccctttgtaatgggcactttgcaatattatttcagagaatctcaactgacattttacagaggaggaaacagaggttcatttgtcaaggaaccaacaggcaaggttgggaagcaaacccatgactgtgcttccaaaagcctttgtcttgaccaccacagaacaccacttccccgaaattctgaagccatctatcttggagtagggaagcctctgccactgaatgcaggtttttcagtgtaaatcatggagccattgctacccctgaaggcgagaggctcccgtaactgcgctgcctgagtctgggcccgcggcacaggacctggtgctgttggtttatggtaaagcaggaaggtggtgcctcgtgctggcagatgatgctgcgggccaggttcgtttgtgtcttcactctcagaagcatggctaatacagccttttaactcacagattcccacgcaacgcgatcctctaga

SEQ ID NO: 457085 - DNA, 452 bp, Homo Sapiens
gcagtggagcaagagctgggggccaggaagggccaccggacgggcagccatggccaggtgaagagcctggggtcccgaatcaggatccacctctccctgctgagcaagatcctgtgcccctgtttctggtgattttgtaagtgctgactgaaccgactgtcgctgggaaataacacacccgtgaccccaagccaaagtttcacccacagacaaggaaacagactccatgaacacgccgactcccgatggtagaaccggggtgcccaccccagccccggtcactgtgtgtcctgcgcaggggccagggcagcccaaggctcagctctgtcctcctgcccagacctcgctcagccccctggacgccgccccgcgcccgctgcctctcctctcctctcctccctaaggctccaggaccatgttcctcttagcctgacgttacctcccacgcactc

SEQ ID NO: 457086 - DNA, 226 bp, Homo Sapiens
cttatgcatggtgggagggctggacattgaatacatcctgaggagacagtgtgggacagcatggtggcagtggaaccagccgtggttctgctcttggtcggctggaaaggagtagatgtaagggatggtttagaataagggaagtggaagaaaagttttctgagctgacaaggaggaaggaaaggccgcctagaaggacactaaaaaggcaagagaagccctaagc

SEQ ID NO: 457087 - DNA, 317 bp, Homo Sapiens
cactttggagctatgagccaggtcagcccagagtcgcaggctcactgtggctggagggagaggcccacttaggggagttgaaggcttccctagcttcctatgaccagagaagtttgtaatcctggaggcctgtctgtgcaagggcctgggggtgactctgggggcgtccaggatagattgcctgagagtgggggtcaccagatggtgaagtgttgtgactggcaaatacagaaagccaggagtgtgtgtcctttgtccgcctctcttccctcaggtctcctgttctttgagattacactggtgaccatactacatgg

SEQ ID NO: 457088 - DNA, 123 bp, Homo Sapiens
ccgggaactcgagggaaatgtcctcattgggccgcacttcccagcagagtctgttgtgactataggagtcactatatattctgattactcatcccttatcaggtatataatgtgctcatgttt

SEQ ID NO: 457089 - DNA, 292 bp, Homo Sapiens
  misc_feature (19)..(19): n is a, c, g, or t
  misc_feature (30)..(30): n is a, c, g, or t
  misc_feature (37)..(37): n is a, c, g, or t
  misc_feature (55)..(56): n is a, c, g, or t
aggagcatactgcttttcntgaacgtctcntgagatntgttgtatgctggaaganncaaggacacttcggttgcgaaccaaactcaactagagtcacctcccatcacaacaatggcatgaaacatcccacacctacaagttaaagctatcagtcctatacagacagctgtagctagctagctagctctctctccctctggagacccacatgtgacactccctctaccttctgtatgattactacaccattcaaacaagcataaggctggtgagatcctctagagcacccagc

SEQ ID NO: 457090 - DNA, 525 bp, Homo Sapiens
  misc_feature (425)..(425): n is a, c, g, or t
  misc_feature (478)..(478): n is a, c, g, or t
ttttttttaaaatattttagcttcttagtatttgggaggttaagggggtctctgagagccctcggccacaggtggctaagcaaagccgtggctgggcagtctcaccagctcgcccatgtctgcctgggcctgaggctgggagggtgtggggaccgtgtctgtacatgggaacatgttactggcagacccctggcctgcctcagtcttttaccacaggaaacaccacacatcatatcccagggggaagaaaggggtgcaggtggggcccggagaactgggccgaatggcaaggcagtgccccaaggccctgcgggaagccttgaggatggagtggatactgtaggaaccagaaattcttccccagaacgggagggtgagatgtgaaggtaggaaccagatttttggaggcttgggagtcctttttnaagggggccaccttcccttccagcctaggattgattccggggacccagttggncctcttggaagagcctggctcgaaacagggaaatgttcagtctgtct

SEQ ID NO: 457091 - DNA, 1065 bp, Homo Sapiens
  misc_feature (11)..(11): n is a, c, g, or t
taaaatacggngccgaaccacttgatggtgtttggaggcgtctgtccatccgtcacatccatcattgcagagtccctccaaggctggaatctggtgcagctttcttttgctgcaaccacgcctgttctagccgataagaaaaaattcccttatttctttcggaccgtcgcatcagacaatgcggtgaatccagccattctgaagttgctcaagcactaccagtggaagcgcgtgggcacgctgacgcaagacgttcagaggttctctgaggtgcggaatgacctgactggagttctgtatggcgaggacattgagatttcagacaccgagagcttctccaacgatccctgtaccagtgtcaaaaagctgaaggggaatgatgtgcggatcatccttggccagtttgaccagaatatggcagcaaaagtgttctgttgtgcatacgaggagaacatgtatggtagtaaatatcagtggatcattccgggctggtacgagccttcttggtgggagcaggtgcacacggaagccaactcatcccgctgcctccggaagaatctgcttgctgccatggagggctacattggcgtggatttcgagcccctgagctccaagcagatcaagaccatctcaggaaagactccacagcagtatgagagagagtacaacaacaagcggtcaggcgtggggcccagcaagttccacgggtacgcctacgatggcatctgggtcatcgccaagacactgcagagggccatggagacactgcatgccagcagccggcaccagcggatccaggacttcaactacacggaccacacgctgggcaggatcatcctcaatgccatgaacgagaccaacttcttcggggtcacgggtcaagttgtattccggaatggggagagaatggggaccattaaatttactcactttcaagacagcagggaggtgaaggtgggagagtacaacgctgtggccgacacactggacatcatcaatgacaccatcaggttccaaggatccgaaccaccaaaagacaagaccatcatcctggagcagctgcgg

SEQ ID NO: 457092 - DNA, 427 bp, Homo Sapiens
  misc_feature (143)..(204): n is a, c, g, or t
cagtatccaagtaatgtgactttgttgtctgtgccttgctttcaggagagaattgtaacataaccctggtcaggcaaccaggtgatatgactctctgtctgatccctaccctggaaaaattgtgacatatttctgacccagcnnnnnnnnnnnnnnnnnnnnnnnnnnnnnnnnnnnnnnnnnnnnnnnnnnnnnnnnnnnnnntagccaagctcacagttgtggtgatgacactaataccacaaaccagccaaaaggagagttactggcacttttaactataactttgaagaaatgggtaaattcctgggtcttctctagataatgtcataaaggattacttttctttcacattttatataaagtctttggatggtacagagagtgtcatcacagccagcacacagtgaacttgatcggatcctat

SEQ ID NO: 457093 - DNA, 402 bp, Homo Sapiens
ttatcacagttcacctgaacttaaccaagtatttagatccttcagcatacggttctctttttttctcacagtgaaacaaggtttactaaccttcttggtgctgtttaatgctattcaatcttaaattcaatctttaccctacttacattcattgttataacatatatttccggcattttatgttttccatgtttagtgcttccttgtcttcctcgtttgctgcagattttgtattttctatttcccccatcagcaccatccctggtaatctggaaaatctatagtatgtttttaaaaatgctaacggtacttctaaagagaaaagttagcacctctataatttctcccacctcctcctttacttctgcttttcactggtatcctcaggaacatatttccctc

SEQ ID NO: 457094 - DNA, 207 bp, Homo Sapiens
aaaagagaaaggaaaataaaaaaaggcataatattttgtctggacttttctgagactggtaacagtggttggtggccctccaggagggcaaacgggcggaagggcaaatgggtggctaagtgataggatgggaaggagacattccttttcactgtcatgttaatatgaacagtttagatgtagtgagaattcagtgaacttgatcta

SEQ ID NO: 457095 - DNA, 388 bp, Homo Sapiens
ctggaatcacagttccactgtataatgtcagtataggctctttaccagatcactaagcgatttagcttttaacttcaatatcacactgagctctgagatctatctccctttgcatccctttgagatttcctaaaccccaggtgttttgtcattaagtacacaaagaaccaagagaaactctgaaattacagttttcttaatttgaactggatcaaatcttagataagcaggtctcactcatccaccaaacagagctagccgcataagttgtaaagtttttcttttcccatcacaaatgcttaccctgggatttagtaaaactggagttagcatctgggcatgatggctcacacctgtaatcccagcactttgggagactgagctgggt

SEQ ID NO: 457096 - DNA, 610 bp, Homo Sapiens
  misc_feature (596)..(596): n is a, c, g, or t
cactgtgacacgtcgttggcacacacgccgcggctcttcggggtatgccttttccaccaccttgggccacagtctgcgcctgcaacacacagaagccgatgaagacagggtccgccagccgcaccaggatgttgtccacacagtacacgtgcacaaactccactccccggcgctccatgtcctccaggatcttgtggtcctccagcgcgcagtagaggcccccgttgccgtctggggccatggcaactttgtctttccgctccaggataaccttgccatcaaaggtcacagcaggcagcaggcgctgctcaaacatgaccacgttggcggggtccaggtggaagaagttgtgctccctgaagaactcgggccgtgggccccagagtgaactcgctggtcatgacgtaccaggggacggtgcagcgggtcccgtggcgctcaccggccagcttgctccacccgccgaatccgctccgcctgcagctggtacagggtcttccggctgggcagccccacacggtacataacttggggtagtcacgcccagcgagtgcctgcctcccaccagcagcatacgccactgcagtgaacttgantaagctcctgtaac

SEQ ID NO: 457097 - DNA, 727 bp, Homo Sapiens
gctggggaggctcatgaaacttacaatcatggtggaaggggaaagggcatgtcttacatggcggcaggcgggagacagcgagtatgtgaacgaggaactgtcaaacacttataaaaccatcagatcttgtgagaactcattcactatcatgagaacagcatgggggaactgcccctgtgatccagtcaccttcctccaggcatctccctcgacctggggatcagggggattacaatttaagatgagatttggttgggcacacaaagcctaaccatatcagttcattctaattcacacatgctctagtgcaggcccactccagtgggtgattcagggatccagccccctccgtctggtcatccaaccatctcaatgcatggcttcaaaggtccctgcagccaagaagagagagaagagtgatgtgagcttttaagagctttagcccagaagtgacacaggtcaggtctagtcatatgacccctacctcctgcaagggaatctgggaaatgtcaggaactgtgtggcggatttgccaaggacaccgtggggaacacacttgctggggtgccaaggccaggaggacacattgttgttgggaagcatggtcccagggcaaaattagctttgcaagaaacttggtaaaccaatgattctccctccatgcgccccctgcccactacccactatcaggctattacatcatgatacgactagacccacagtgaac

SEQ ID NO: 457098 - DNA, 430 bp, Homo Sapiens
gatctagaggatccctatcacagttcactgtactatggacaggtactctggtattgctctaaaagcatgatcttgttaattttctcaacagccatgtgaggtaggtgctgctattatctttgagctcagagagggtaagtagcttgtctggaggccacacagacagtcatcagtaaagccggtattcaagctctggtccaggttttaacaccaccaatagattctcaaagtgaccagtcctgatgggactagatcatccctcaggttgccctgggctaggatggtctgcacaaacaaaaccatcccacagaacaggagagccagagggaggtaaagcatggcagcaagccagcccatcatgttctctgtctgtataaatcccaccctcaattggagagtctccccactaggggtggtgatatggtttggc

SEQ ID NO: 457099 - DNA, 364 bp, Homo Sapiens
caccacagtaacagtggagaccacggagatctcgcctgaggacacaacgcgaaagtacaagcctgttcctaccacgtccactggttaccagccggcatataccacctctaccacggtgctcattcagactacccgtgtgcccaagcaggtggcagtacccgcgacagacaccacctgacaagatgcagaccagcctggatgaagtcattgaagacccccaagatcatcattggctgctttgtggcagtgactctgctagctgccgccatgttgattgtcttctattaacttcgtaagcgcaccagcagcggagtacagtcacagtcgcccgtactgttgagataatccagtgaactgtataagc

SEQ ID NO: 457100 - DNA, 561 bp, Homo Sapiens
tgttcaagcgctggctgttctgcacagtcctggtagcaagtgactgtcagcctctgagaaaccttgaagcacaggttcacacttccgtgcttctggaacattgggatgctggtagaagtcatagggcccatcaggtttcaccatcaggtctgagggtgcctccccaaaaagagtgttatgggagagggtacaggccaaaagttggctgcccaagagtcggtcattcagttcaactcccatcagggggtagaagtgtgtcacaagcgatgccccagtctgatagcaagacagaaacaggctgaggtaatgctttgcttcatgtggcggcagagtctgttgataccagagggatcgagcaaagttgagacacaattgctggtgtatcagcattactgcctgcattgaattctgggagaggagagctgggtttgtgcctgcttcctcttcttgcccatctgaagttcctttgttctcctccaacgttggctgcaccaaaatatctgcaaagtccttttcatgcaggtggactgtgattaagctcctctagagtacctttagcac

SEQ ID NO: 457101 - DNA, 895 bp, Homo Sapiens
tctagaggatcgctgatcacagtccacctgaatttaaataaacagcagaatctggtttttgaggaccaatttctgcctcctggcatcttccattctcttgggcaccaggttcttgaccactctggctatccccagtctcttcagcctgtccactaagttcatcttcaactggccaacatcaggagggtccgggagggtctcaagccatacatctcctggaggaatgtctcagctggtcgagaggccaaaaaattttcagagagatgcactcgaggctcaaagggtaaaggagaagggcaaggtgagtgagatggtgaatttggtggtgtggaagggatagcccagggatttagggagaggctggagggggttctctgaaattgggctgtggtacactttggcagagatgcctcgctcttgtagaagtttggccaagctcatggtgctactgaaggttgtagtggaatctcgtcggttggtgatggactcaccaatgctgagtctataggacaaggcaggagaattcacagccgtgttggatgaactctaccgctacttccacaggataatgaagggaacccagagctgggggtaacctgagtgatgtcagagggatgtaatattctacaggtggtgaaagtgaatgttgagtttgtgcacgacaggcactttcctgggttggcggttgcaactgtaactggtccacctgctgaagtaatgggtggcaggaagatccctgttactggcttggatgttgaaagtttctcttccacttcaagaggttgctgaacctgaaaagtaataccctcctcttcatcctcttctaaatctgagatgtgataaatagcatccccgggcaactgggtaaagcctttagtaatgacacctggtcgtg

SEQ ID NO: 457102 - DNA, 600 bp, Homo Sapiens
  misc_feature (582)..(582): n is a, c, g, or t
atgctgattcacagttccactgagtagcctgtggtcttattgagacctggctgtggaagcagcctcagaacatcttgcatgtcctttccaagggcggtggccagggggtgactacagtactaaccatgacccgaccaggtgccaactctgtggttggtcccctgcaggcattgcgtcatttgatcacatcaccctcaggcccggccttaaggggtctgtcctggtcatccccttgctcatgggcaagaagtctgcagggcagagggaaatgctcacccaaagcttgcgctcttccttctctagaatcccctgcccagatggtttgtccatccagtgcactcgctcccagggcaggccatgccgcccaacgcaccctgagatgcgagatgcagcaaagcagtggctctgcagaacttcgggtagagtttggatgggtgcgtggaggtttccacacatgtgtgcagatcccttggaaagcaggatagagccagaaacagagaggagggtgcccgtagcgccggtgggggctggctcccatggtcacatgcaagagtgaagcttcatggagaccatgattctaantacacctgcctcacagtg

SEQ ID NO: 457103 - DNA, 548 bp, Homo Sapiens
gaggagggtaagaaggtgcaagatgctagttctgagcagtttatacaaggatggtttggaaatccaatctgagtagttcagaccatgaccctgcttagcatgggatgcaggagaaagcagaggcagggtacattcagggcaagatctcggcctggggtctgagtcctgatgggaattcctttcactgcttgaaagttctcgtggcaaagaacttcctctgtatcaacaatacccacttctgctcagagctcatactgctgcctccccatctgagggaatcctctggaagagccatcaccttccccgctctatcccatggggcccagggcagtgcttggtgcctggcagggcctcaaggcagtgtgctatgcgaaggcagagggcatcccctggagcagggctgaccagcagaactctcttgatgatgaaaacctttctgtgtgctgtccaatactggaggccttacccagtgcgatggaggaactgcacttctatttcatgccagcagtcacatgtggccggtgcctactgcagtggacaacaataca

SEQ ID NO: 457104 - DNA, 595 bp, Homo Sapiens
  misc_feature (501)..(501): n is a, c, g, or t
  misc_feature (528)..(528): n is a, c, g, or t
  misc_feature (543)..(543): n is a, c, g, or t
  misc_feature (577)..(577): n is a, c, g, or t
tacatgtgttcttgtgttgtgtttgctctgcaagcagatgtctgagatgtaagaagcttttcttttcctgtggcattgattctgacttagagctgaagtaaagatcactgaaacatcacgtcaaattgaagtcactcataggtctttgtcctttaggcaagacaggagagtcattaagaagcatttcactgtagcattctatcacaatatcatctggaattgttttctttgcccagtaagccttaacttgcctctagagaatccctggtattacaacgtatattgcggcattagaattccaactcttctgctgtggaagtttgaagcgaagctgcagcaaaaccagagaatttcctcaagtggcctgtaggctccttgttatcttatgcccccacccctccctcaacaatatgagtgatccagaactgggcccaaacacctcagctctgggtcccttttttgcccttcttgggccttactctgttgttcaaaggcactttnggattgctccggatgctttcgaacagncatggaaagtaggcntgccctgggatttttaggaggggccaggcatttngacaggaaggggtttttt

SEQ ID NO: 457105 - DNA, 444 bp, Homo Sapiens
ccagccgcttctggcatgaggcaggcggacagcttcattcaggacctgagtccagtgggcagctgaggagggtacatagtaggtggctgggccactctgtccctggagctggccagactgctgcagttttcagtcccaggaactgagaacgtggcgcccggggtaccagtgcaagagatgcggaaatggggatagatggtaagggcgagggtcccttcccggctcccgtctgggctgctcctgagcattgtacaccagttatcagcacaccagggggtccccaggagcaatccaagccgtgagtatgagattctcctgtgtgatcctggggatgggggttcgagcttgaggagagagaattgggtcatgcacatggtctcagccccagcccaccccaggttatcccttcacctgttatgtcgtgtctccaggagccacaacata

SEQ ID NO: 457106 - DNA, 442 bp, Homo Sapiens
tttttattatctgatgttacaggagtaattctggtctccctgcaaggatgactccagtgtgcttagccccaaatctttgccctcccattcgctaagtggtcatcctggaagaggagtgggaggagcttagaggggagtgggagggccttttggaaggaaaagggcttggcaaagaatacaagatccttagggaacattgtgggggactttgaagggagtaggtgggacttaaggaagagtgggagaggcttaaattacagtgggaggggcacagagagcagtggccgcgcattggcgaagagcgaggagaggcttaaaaacactccgtggagtgaggagactatgaagtgattaggaagattttgccacaggcgtggagccgcgagagaagggtttctaagagagtaggaggattttaaagaacaatgaggctagtggcgcg

SEQ ID NO: 457107 - DNA, 612 bp, Homo Sapiens
  misc_feature (18)..(18): n is a, c, g, or t
  misc_feature (35)..(35): n is a, c, g, or t
  misc_feature (41)..(41): n is a, c, g, or t
aacctgtcggaataactnccttccataaatttaanacccangaaatccagaaccccagcccaggccaactgatgaaccccttggatgcctcactgtgtgatccgtgcatttgaaatatctgacagtaagagtgaggccctgggagagatgcagggactctgaggatgggggccaagctgggctgagaaacaagttagtggtgtcctgcagcagcccctacagcaagtgccagcgtgggagggaggtgggtaggcatggggtgggtggtatggcactcacagcactgcctgcagaccaccaccacctgacagctgggccggtggtgccagctaatggctccctagttttctcgtaagtcacgacgtggctaaagctaaacactgagcacacaggttgccttgaggagcagtgactgcctcaagagctcagggctgaggagctggctccagacagcctgttgccaatgttcagctaacatcaccccactcctggttactgatcgacctgttgtgctcttgagagtacccccaccaggcctcatgggtcaatactactgttattgttgctattgttataccaggccccgccctcctaaagcatttgcagggatcc

SEQ ID NO: 457108 - DNA, 418 bp, Homo Sapiens
gtcgggaggatccctcgtccctaggtatctagagagggtgtacaaaataaagtccaagggctttcccagacgtttccgtgaagtgccttcttctggggagagaggagagaaggggagcagaaaatgttttcagactgctcatttctatgtggaagacagcagttcacctcgagtggtccctaatgagagtattcctattattcctattccggatgacatggaagccattcctgtcaaacagtttgtcaaacacatcggtgagctctgttctaataaccagcatgggttctctgaggattttgaggaagtccagcgctgtactgctgatatgaacatcactgcagagcattccaatcatccagaaaacaagcacaaaaacagatacatcaacattttagcataggatacagtagggaga

SEQ ID NO: 457109 - DNA, 366 bp, Homo Sapiens
tctccctactgtatcctagggtggcaactattgccaaggcatctatctaagcattttgatagtggagccgaactttatacagagatccaatggtggcagaaaacatagcgaatcccttctaccagtaccaatgatccgaaaagattagttcttagaaaccagtatatatgtatcttcaaaacccctctcctctggggtttcgttttggaaaagtctacttaatggcctacatcacaataattaactaaaagtagccttactaaaccatgacaaataccatgccatatttttgttctttctaagctctggttccagaaaccccacaacttagaagcgcgttcttctttctagataccctaggacgag

SEQ ID NO: 457110 - DNA, 585 bp, Homo Sapiens
ctataccactatagtaggtgtagtacctttacttgtatcacagaacttgttgcacactttgtgtactagaggaaaacctgaagcagttgctccagctttattcaacaacatggaatttatattggagaagagtcctgcaaatataatgaatttggaaagactttgtttttcaaaatctatagcttagaaaacatcagagagtttagtactaaagtatatttttgcagatgtaaatatgaaaaaaatatttaattcaaaattgattttacgtaaatatgagaatttacactagaataaggcactgacacttcagacattacactaaatcagagtattgagtataaaaatgaatccacaactaaagctgtttttgtatataactttaaaagggagattttctgaagcattgtaatttcattgaaagtgtacttgtttcttgaaaaaaatttttgaacagtgaataatgatgtaatacaactttcaaatttctttacgctgttattttattcctattgtggtcacatgtgaaagcatgtgatcaattgttgctgtggaagggaggctggtggaagggacgtgaaggga

SEQ ID NO: 457111 - DNA, 389 bp, Homo Sapiens
tcccttccaccagcagatgacatcaagagtaattcttcaaaaactcaaaaatcaatcactgtaatccactaaaaagtctaacaatagttttctgcagatgttaggatgaaatccaaatcctttaacaaggcttttaaggccttctactatctgaccccatagcactccagcctcatcttaccattctattcctcctcctccagtcatagtgaacttcttccagttcttctcatgcctcaagattagtcttaccacttagcctttgattatgctattctctcacctggcacaagccttttgccctctctcccatcacctgtctaattcctgcttatccctttgggtctctgtttaactatcagagaggttagaggctgtgaagggaggga

SEQ ID NO: 457112 - DNA, 132 bp, Homo Sapiens
ggacactttagaagtgcagtctctcccccttgctgacttaccatgatgtcggacacccctcacaagacactggcccaatgtgggttgtcttgtccgatatgtgtttgtagatttttgtgctggtgaagggag

SEQ ID NO: 457113 - DNA, 538 bp, Homo Sapiens
ctggtgcaatcttgatgcagagcctaaacagtcctatgaaagagagacagtgtatcttttaattaaattggcactgaaatttcactttccttagctgctattctagtagcttggccatgttatctcgtaattctgttagttcaaatatctttccatccagaatttctaagagtgtcttcaggttattgcgaaaagcttcttgttcattctgacttttctccagacgttgctctaagtcagacagttgtccctccaggtctttgttccgaatttctacttcctgtagtttctgagtcaaagaatccctctgttcttgtagttctctggcattatcaatttcttgttttaacctttctatttcctcttccttcagtttcagtgtctcttccagttcttgtattgtctgatttaattctgtcttatgagtatgtactgcatttgcttggctactaacacattcaagttcagtcacccgcttgtgcagacgttttgcttcctcttatagcacgcagttgctgttccattttcacattagcgt

SEQ ID NO: 457114 - DNA, 281 bp, Homo Sapiens
gcgcttaatgtgaaggaaagagcaaccaagggtaataggggtgtcagaaatagttcccaggttactgcctgtatcaatatgtacagtcctcgagccccacccacaagattactagactatggcaggtgagagttggggactgggggagctacctggttacgagggatcccagttcattttgaggcagctggttgttagactgcattgtaaaaattaccccccaaagatttgaagggataatttatgtatttttagtagagatgggttttcacctttggcac

SEQ ID NO: 457115 - DNA, 527 bp, Homo Sapiens
  misc_feature (47)..(47): n is a, c, g, or t
  misc_feature (125)..(125): n is a, c, g, or t
  misc_feature (167)..(167): n is a, c, g, or t
ctgtaaaatcctcagaagttccccacaactgccccaacacctcaccnacccgtttccctgctgccacaaagtctcccttcactctccatcttttcgaatacatcgtcaggcagggccagaagggncactacgccgcagagcattcgaggctctcaagcacactgccnagcccagcgtgaaaatgcggcttcactacagcccagagaaaagggccaggtttagtcatcgatccagatgcattttcccgggaaatgaccattcccaaacccacagaacagtttggcttctctggatatccttataggaaataggggtgagaggtgggaaaagcttctcaatctcatacagaaacagcacaaatatttaatacaccttttgcaacaagatcttctctgttctccattaagcatcatgtaaatctcactagtgtggttaacaaaatggctttccccaaggacagaagtcaagagcttgtggggccatatattatctagtactaggccatccattatctcctagattaactc

SEQ ID NO: 457116 - DNA, 542 bp, Homo Sapiens
catatcaataattacatttaaagcattacgatttaaagatggagaacagcatagttgattaaaaacatatgactcaattatacgctgtctccaagaaactcatttcaaatataacatacaggaaggttgaaagtaagaagatataagaaggtataccacacaaacattaatcaaaggaattaactgaacgacaaaaatacaaatgatctcatttgaatatgggcagaagacatgaagagacatttgactgaagaagacagatggatggctaatatacacatagaaagatattcaacatcactagccattagggtaatgtaaatcaaaggcataatgacataccactagacatctatcagaatggctgacattaaaaacggtgaccccacatatgctggtagaggatgttagtgagctagatctactcatatgctgctggtgagaatgtataatggtacagtcactctggataatagtttggcagtttctaaaacaatggaaatacaatggctatatgactcagcaatttcacattaggcgct

SEQ ID NO: 457117 - DNA, 295 bp, Homo Sapiens
tgttggtaatttaaagtaatcagttctcacctaagtgaaacaaactgctctaaaattaccaacatgtgcaaattctacttagtattcattattagatgctaagctggaaaagatgagaaacccaaggagaactattgaattaccacatatattgtaatattatgctttaattttgtatgggcagtgttctatcagactaagcttctagcctttgaaatgatttacatgaggagagagcctgtatatctgacttaggaaacagtaagcagaccctattttcacaaatggcgggcca

SEQ ID NO: 457118 - DNA, 250 bp, Homo Sapiens
ggggtgtgtagcacacgctgtcatctcagcctcccaagtgctaggatcacaggcatgagagctgttcttctgcccagctttagaacataaatgtttttccacatcttaaaattttcttcctaaatataattttaacagctacataatggagccactcataaacaatttctgtgactgctgtcctgttgtttgctgtttttcataattataaatctgcagtggacaccctcttacatcactgttatctata

SEQ ID NO: 457119 - DNA, 429 bp, Homo Sapiens
  misc_feature (14)..(14): n is a, c, g, or t
cggggtcaactaantttttgacctttgctctctgaactgggaccaggatgtgaaataatttttgaatctgatgcaggtcgaggtatggctttagaatcaaatggggtgactttttcccctgttggtggaaaactctgtgagggtttggcagagtctgtttttagaggaggggttgttttctcttcagcttgtgactgtactttggagcttggaatatcaggttttgttgttgctgatgatgaagatacaaggtcagtggttggctttaccatcttgggctgctttggtttatcatcagcaacaggggccttgtcctgctcagatggggacagaaggttctttggggaggggctggcttgggacaaaggaatctgcctcaggggggctgcttggccttggctgaaagggagagccatgaaagggttggtt

SEQ ID NO: 457120 - DNA, 343 bp, Homo Sapiens
caacttaataacaactcttgatgaacttgaataccatcagtaggtctattctcagtttccttctcatttggctaaagaagtggtctcttccctgctttattgcatcggcatgaacattgagttattttttcattgctttggacattgattctttctaatgacttccagtaggctacctttctagatcattcttcatttatagtatttacaaaagtgcgtcatactttgttatacgcatcttccgtttctctatgtttcatacagagacaatttgtgtttagatctcatctttctgggagctctcttgaggcttatattcctaatctttcaggcagacccacct

SEQ ID NO: 457121 - DNA, 268 bp, Homo Sapiens
agtgagcctggtcccggtggcctcgtgtccctgggcaacaccgacccaaaggttctttgccactgagtcgagcttcgatccccaccgccgtgcccagccgagttacgagcgtccttctttcctgcctccaggacctgggttgatgctccggcaaaaatctatcggtgcggcagaagatgacctgaccttacctagcacccccagccatgaaattcagccgcagcctgtctgtgcctggttcggaggacattcccccgccacccactcg

SEQ ID NO: 457122 - DNA, 455 bp, Homo Sapiens
tggtctggatttcctgccatcaccaaatgttcctccacttctgtattctcttgcttttgattactttgtttttgctcttcattttcatctggcaaattttcttctctcacttgctcggcttcttcaaattcatcctcaccttgattattagggtcatctgctgggtttatatcttctacagctgccctatctgcctcagattctgggtcggcttttcggggtccttgttcacgaggctcatgtctattacctggatctccttctgcttcatcttggtgctggttgtctctttcataggcacctccttcctctccttggatttcctggtcctctgctgcctgaacgatatcattatccttagcatcataatgagcttgctgccggagctgctcctggtgctgcggccggccctcctcaagctcagcctgcctcagcagggaccactcgggggatcc

SEQ ID NO: 457123 - DNA, 519 bp, Homo Sapiens
gaagaagtagaggaagcctccgaagactgctgccatgttgactctgctgaagaaggtgctgaccatgaagatgaaggagatggtagagatggcgaagcacagcaggaaggcgagcaccagggaggggtcgctgcgggacagcacggctacatttggcttcaccttgacacagaagagcagggtcatgaaggaggcggcgatgaggaggaagaggaagaacaagaggaaccaggcactccagtgcagccagctgctgagccccatcatgcgcatgtactccttcagcctcctttccttctcctgcacgacagcacgggcaatggtgagcgcggtgtaggtgaagctgagcagcagcagcaggggcagctggtactggatggccacgaggaaggggtctgcgatgaacggcgggtacgggaacctcttgatggtcaccgtcagtctctggaacagctggcgtgtggcggcatcggcatggtactccatgatggcccggtccacagcatgctgcacggccag

SEQ ID NO: 457124 - DNA, 499 bp, Homo Sapiens
ccaagctactcaggaggcaggcggtgtctaaggggcagtcaaggccgaggggtattgtgttggggagtagagagcttcccatacaaggtgcagggccttcctgggcccaccttctgggggacatgtagccgctgagctgtgggatccggcacagccagaccctctggtcctcctgtaattcttcgtggagtggagtctctctgcaaagtgtctggctgcttgattgactgtgtttttacatagccaacctgttgagatactttcagaccctggagtcttctagaataatcagctcacaaatcagggtaacccgcttctgggaggcggaacccgactgacacatggcggtttaggggtgaccagcccaaggctgccattggatctggctttactgagtgctggtgagatttcgttttatcattgcattcccagtcctcgagaaccagtgccctgatcctttcagtgcaactcacgtgggcttatttgcaggaccatctcg

SEQ ID NO: 457125 - DNA, 500 bp, Homo Sapiens
cagatgttcaatgctttacagaacaaacgtgttctttactgtgaagttcattatgaacctgaatccctgatcatttaaagcctattatccaacttatgcctcaagcagcaacatttttgtgttcaacaatttaacttactacacacaccttgtgcaaaatcacaaaccttctcatacatttatgagcttcagaatgtaactgggaagtgtagcacagccctttgtccctctgcattgcatggtgagaaacggctaaagcaaccatcgccgcattctgttttatgagcacaaaggaacacctattcttatctgggccacgcgccccggtccttaggaggatgccagatccccctgggattggcaatggcagaggctgcacagcttcctgaagatgtaggtaccacagcaccagccccgggcagggagccaggccaaggggaacgacagaatctttcggagacagcacagcaacccactcatttgtgtgaaccgaaccaaaa

SEQ ID NO: 457126 - DNA, 647 bp, Homo Sapiens
ggggctgctgtgcaggttcgagtcaggatgggaacggagccacgccacttcatggccatcttcaaagggaagctagttatctttgagggtgggacttccaggaagggaaatgccgagcctgaccctccagtaagactcttccaaattcatggaaatgacaaatctaacaccaaagcagtggaagttccagcctttgcctcctccctaaactccaatgatgtctttctgctgcgaactcaggcagagcactacctgtggtatggcaaggggtctagtggggatgagcgggcaatggctaaggagctggccagccttctctgtgatggcagcgagaacactgtgccgagggccaggagccagccgagttctgggacctactgggagggaaaactccctatgccaatgataaaaggtatgggaacacagcctccccctcttctgggctccccctgcctgccaggcttgtgaattgcacaaaggctaaaacctcagttttaaaaacatttctaagcagcttgatgcccttaaatggactatattgcagacttcagcaggaaatcctagatgtccagtctcgtctctttgaatgttccaataagaccggccaatttgttgtcactgagatcacagacttcacccaggatgag

SEQ ID NO: 457127 - DNA, 810 bp, Homo Sapiens
  misc_feature (16)..(16): n is a, c, g, or t
gcttctccactgcccngttcaaagttctatagcttggagcttcctccttgctcctggtgtcagtgacagggatgtttctgaaatgagatctcccctcccctgatggctgtttccaaggctggcaccacagcggcagatcaggatgctcccggctttgcaagatgctcatcttgagctgcaggccatgcagaacctcaatcactctctgcacatcaccaagaagctggtgggtggccacgatcttcttggcattctgatgggagtagttctcttctagaaatgccaggccatgcatatgtcccctgctcagccactccttgtcataccagtagcttgaagccaggcctctgacctggagggtcttggcaaacataacaggtgtatttctcgggcacattttcttccagtaatcccatgcagaccccatgctgccagcactggcactcttcacactgaatcatgaagtcattttcctcctggacctcacagatgcagcggaccacctcgaagtcatagcggtcatccccatcaagttcctcatctgggttggtggtcacatccacatcttggccatactcatcatcactccagagaaagctctcagaagaggactcactcaaattatcctcctccaatgctttcactttccctttgtggtgtccagattctgggccatgaagctgcgggctcatatggacccctggcttgtgtgaggacccacacctggtaacagcaaatgccttgggtggagaaggttcctgggaggtgtcactgatctcctcactgcaggagcattcaggtttggttttc

SEQ ID NO: 457128 - DNA, 479 bp, Homo Sapiens
aacggaaaggctgctgtcctagctgccgttgtaggtccggtgggatctcagctgtagggttggtcatggccagtgtatgtcttttggacctatttgccaagtacctctgcacagcttcctggtctggctccccgtctgagctctcctcgtccacaggggtaactgctggcactgctggtgtcatggtgacaagcggagagggtccccgtgggcgcttcagcagctgctgggcatgcagttggatgttggctccgtccattctgatgcgcctccggccaagggggcccattccattcaacagctgtagcgtgggcggctgtaggagagactgctccgttgtactcaagttgcccggttggttgcaagttttgcataggcaacaggttgtgcatgaagttcaccttaggggccacctgcacggaatggagcctgggggttgactccaggaaagccaggtaggagcttctgcagggaccact

SEQ ID NO: 457129 - DNA, 489 bp, Homo Sapiens
ctatttcattgagtgctttggattaacttctaatgcttcttgtggaggaatattcctgtctgtcttttttactatgaaatgtgctcctgctttttgcaggtacttggcaaataggtccaaaagacatacactggccatgaccaaccctacagctgagatcccaccggacctacaacgtcagctaggacagcagcctttccgttcccgggtctggcctcctcacctggtacctgatcagcatcggtgagtagccacatgagctgtgcgagctccttgaggctcatcggacaggcacccttctgattagtctcacagcgacggtgactagcatcgtggctttaaatagaagccagctcgtcatcctcgaagtcactatcttgtcagctccttgcagtaagcaatgcacagggcaaagggatttgatctgcgcccctggagcaatgcgagattcctctctcccattaccttgcagacctgtatagctgtctg

SEQ ID NO: 457130 - DNA, 410 bp, Homo Sapiens
atcttctccctgacacagaaacttccagagaagcagacagtaccactgtgtatttgaacattcactaaaataatgttttctatggttagaaaaacacatacaaacacatacacacactttgttagagtgtcttataacttaagctcttgttcctaaataaaaatatatttctggaaatttctttcagaggaggactaacttctacacaagatgcatagtacacattgatgagttaaacagttcacatgaaaataaccctttttatttataggctttgggaactagcttatagtaaaaacactgggtaaacaagtctttgaaataatttttcctctatataatctcttttaaatggaccatttgatttatgaataaagtgattataatgcgaaatgctgtcagggagaaga

SEQ ID NO: 457131 - DNA, 592 bp, Homo Sapiens
atcttctccctgacattttgactacagtactcattcctactcttgtctattttcaggggttccaagagaaaaatttaaataggacagagctaaaaacaccgactttcactcactaaaatgttgtcataaatttatgtatcttgatcttggaaaacatcagtatctatgcctcattttaccttttaagatttcagatttatcacccgaagcattttctctattgccttccccttatatcaagatatcctgttggtttattggggttatcctaacctttatgtcagatgaaactcatcctggttgtaattatttttaggttgaattaccattggatttgccaagtactgaaaaatcagtagcacttttgtttaaactctgttaataaacacttctgagtgaattttgctagtgtcattatttcccatgcttgctgagtagaaggttgaattattattacttcataattcatatttgttcaatgcacactgtgtgaagctgagtttaggcctctcgaagacttagcctctttctttctgttcctgtggttttgaataccatttacatgactcacgtctcagattttctttcccta

SEQ ID NO: 457132 - DNA, 610 bp, Homo Sapiens
  misc_feature (389)..(389): n is a, c, g, or t
agtagaactcagcagcttgggtctagacacagagaaaatggacaacttatggtctagagatggcagcacagaaaggaaggtgagttgaacttctggggggaaaataaatggcaggtaaagttatggaccatttgatcaaatcctggtgtgaaataaagagcatacttaggatatgtcttttgttttttcttcttttcctctgacatgcattgctatcatgagtgtccttgaacaaatctctttgggggcatacaaaaccatttctgtaaaacaggtgttaagtatagggaactctgggtccaaaggagaacacataatcaatttgggataaatattgccaaattgtctgttgcacattcctcaccagttttgtgctgccttcagcagtngcccaaagcgcctcctttcccttcacataccgttgccaacataggccattatctttctgagttttaccaagtggaggaacaaaccaaaggtcctcatatttttctgtgcattctggtgattgcttgtcttggcgagcatcttctttttaaaataatcttgctgggggacttgtggtatgcaatgatgactgtggaagtattttagggggcaggtcagagag

SEQ ID NO: 457133 - DNA, 406 bp, Homo Sapiens
  misc_feature (126)..(213): n is a, c, g, or t
aggtgaagtgtgttttttgtgggcaataagtagttggaccttgttttttaattcattcacctagttgatatcttgtaagtggagaatttaatccattacatttaaggttattattgatatgtgagnnnnnnnnnnnnnnnnnnnnnnnnnnnnnnnnnnnnnnnnnnnnnnnnnnnnnnnnnnnnnnnnnnnnnnnnnnnnnnnnnnnnnnnnaggggtggtttgagtcctttctctttcttcttactttgtgtatttgctttactccagtgagttttgtacttttgtatgttttcatggtggcaaatgtcatccttttgcttccaggtttagaattcccttgagcatttcgtgtagggtggtctaatggtgatgaatttcctcagctttgctgtcagggagaaga

SEQ ID NO: 457134 - DNA, 209 bp, Homo Sapiens
cagaatatcatcattacaaatatcggtaattgaaagattatgtaagagagggaaatgtggatgaggtaggatagtagccaactaatgtttattcgaacctttgtttatactgtactgagcttttcttctcttcactagagtttagtccttaatatgcagtagtcaaaattagcatttaaagttagtattgctgtgaagagggagttgtg

SEQ ID NO: 457135 - DNA, 391 bp, Homo Sapiens
gactcatagaggatcccctccgtacggctcactggacaagatacggtggcaatgaatttacctccttcttcataaactgctattctcaaacaggccagagtaggaagaaccacctttttgaacacaataggttcttcttcccagacaggattcacagcatttccttgggatgttttggtcttaaatgccttcctccttgtatccacaggcaaaccaaacatatctacttccacgtaagtcccaactttcttatcagaaagaaactgacctgaaataatcttaacagacaaagtgtttgccactatcccatctacgatgccttcagtaaatggatcaaaatgcttgtcaggcctcctcatgaactctgcttcaatctgaagccacgtacgga

SEQ ID NO: 457136 - DNA, 369 bp, Homo Sapiens
aaggagggcttaagggattgatttttaccattaaatgttcgcagtactgttgctaaacctcgtgtaaatattgataatagatatttatttttaggtgtgtatatatgtgtttagttacaaattgtgtctctaaatttgtactgggacctcttatctagttcctgaagaatttatgtataacccccttacccgatcttatggagagcctcatatacgaccagaagttcagaattcaactgtggagttcattgcttcttcagattacatggtaactattctagtgttaagatttgttatggtactacatattacattggtcatttgtaatttttctgttatagtgaactcttatcgagattttgaagtcac

SEQ ID NO: 457137 - DNA, 265 bp, Homo Sapiens
caacagagtgagactccatctaaaaaataaataagtaaatcacaagaagctgtgattgcgtgaaagcagggcagtgataaagaaatcttatttttaaacaggagattgttttactctgctgatactagacttctctagaaggtttgcatctaacccagtgatttgtggaataatcccagacctccagaatttgcgattggagtgttggtggctaactacttaaggtattatatctctagtcatgatgtacatgagcactacggag

SEQ ID NO: 457138 - DNA, 725 bp, Homo Sapiens
acataaaggaaatcaccagttgcacaagaatgaatacaaaatgatggatagcctaccttaagatcaaagatgcaatgagaaacttctttaaagaaatacagttttcccttgcacagcagtcatttggatatacatcattcaatcagtaagtaattcaggggttatgctatagagccagggatacctatacaacaagattatcttggtcaccctcagggagcttacatttgttgaagatttacttaagaggctgctttcatgatggagtgctacccacaacattgttggcctttgtactttcattccgttgtgctattacctaagagtaagtgactattacttacatactatctgaaatatcttgctttaagtgcccaatctttgcttttatcacctctctttctgctgcctcactgttacttcttgcacaaagtaaaataaccacaaggctcagttggttggagcagctccataagaaatttaggcttgagatcaccctgcagttaatgtgctctgatgttccgtggtgaactgcagacttcaccaccatgcaccttaaagcccaatgcctcaatctcactagccaaaaactgggcccgtattggttagctctatcatttgctgagaaaacagctcaaatcacataacccactgaagaagcaggtccacactcctgggcttggttggctgctcattaagacgtatacagatacactagattgaag

SEQ ID NO: 457139 - DNA, 313 bp, Homo Sapiens
ggctcggacctccgacgtgctcagaacttgagtttggcagtttcacaaaggaagtgagggagggggagaaggataggtggtcaaatgggagaggcagaatgaggccagatccctagtagtctattaggttatggtaaggaggttgggattttattgtaagtcatagtacattggtactacactgtaatttttcaagtggggcagtggtgagatttacacatgtaagtagaaaatggtggccctgtatgttattagtagaaagaattgtgtggtgaagaatagaagcagagagatcagataggagttcattggt

SEQ ID NO: 457140 - DNA, 525 bp, Homo Sapiens
gtggctcatggactttcgcttcatttttttgacctaaggattacgaacatagcgtgacaaaccactgtcataaggtaaatattatctagattttgttttctttttgctagaggaaaaagatattagctaattttctatgaggaagtaaactgcgagaagataagtaacttgcctagagttagtcaacttatgagtggcacatttatgatcctaaagcctatgtttgtaccacttaactccactgagctaattctactaatggttaaactcccaagtcagcaaattattgtaaagatatcctgaatatataaaccactttcagagttttcctttttctcctttgtcatttattatatatgttttcaaagggttgagcttttaacatacattatttaattcggtatatacaacccagagactgatattacctctattttattgatcgaatattgaatctgagagaggtaagaactgttaacaaggttttgaatatgtgagtgggttggagtaagaagtgagcacacg

SEQ ID NO: 457141 - DNA, 576 bp, Homo Sapiens
ttccaaatttcttattttagcattcaaggcactttacatgcagggctctacttccaagctggggcatgtggttccagagaaagagaggatacctcaggacagtatgatacatcttacctaatggtaagtaatttaaaatattaaatttatattaaataggtaatatggtgttaaaatccaacacctacgtgaatttgtaaggcaaaacagatacttcaaagaaatgtatatgcagtgagacatttctagctttatttccagatccctttcaacccaggtaccatttaatctctgtagttagagtgtactctggtggaacactcaccattttatagatgaggaaacagggtcagacaggtcaagtgacctatccaaggtcacacaaatagcaagcagttacgctagacttatactgtaaggcagtctgcctccagtcccgctcctaaccactgtactgtattatctcctcaaatgcattagaatcttcacttccataaagaaatatgctctttgtcaattacttaaggaacacaaggtttagtccatcactcactcactttaccactttcgataaga

SEQ ID NO: 457142 - DNA, 620 bp, Homo Sapiens
tttttttcaatttgatgactgagagtgagcaccactgaactttcttccagcgactgcatgtgagccagtgattgactcttttaaccaactctgctaagtggtcagggtcagacttcatgatctgatcaaattctgcaaacttgccaggtctaaaaaatactttggttaacccaaacttgtagtcattttcatttaagcccaaagctttaaacaaagccttacaaaatagtcttggatccaatcttgcaagtttatctggcatatactttttgtacatgttgtagagttcatgaaatgaagctcgtgatgggtaaccaccctgcatcaagtccaaaacagacaccatccctgaacactgaagctgagacagaatttgagcaccttcaaagtggtggcttgtcatctttaagttaggtttgatgcaacgaataaggcttgctccagtacttcgaagtttatccagaagcaaatttaactgtgtctgaagcccctggctgtgcctgctttcctctctcaactcaactagtcctctctagccatcccgagctggactactccagctaaaacaaaaccgcttaaacttgtttcccacgctgatgaagctaagttttcctgctttt

SEQ ID NO: 457143 - DNA, 388 bp, Homo Sapiens
gtgggaaggcacttgatctttgctttgaaaaataggtgggatttaggaagtttagaggggcaagggggtgggtgcacacatgtgaagggcatttttatgtgaaaatctctggttactaaaaccatgtacagtccaaaccaaatgtgtctgtaggctggttttgacccttgggccataatttgtgactcctaatgtgcaagaaatatacacatttggagtatacataggaaactacgtcagggactcaggtgaaggtatatagtaaatataactcccacttactgaacaacttctatgtacctactgccctctgtgtctcaatttcctcttctgtaaaatggggataatagttcttaatacagggaaaacaccttagaacatttgaagc

SEQ ID NO: 457144 - DNA, 815 bp, Homo Sapiens
gtaatttaaaaaaagttttatttgtgttttcagaataaacgaactaacataaattgtacatatttacagcaataaactacatttcagaagctgcacaacaacttttataagtacagctgatgatttttgacaccagctttcaaatgtgttttcattctttcatttgctgcaacatttaaaatcttgtagtaccaaagcaaaggaaacaccaagttattttatagcaaagccacattattaacaaaaaatactgagtgaactacagtcccgtgactgttatggtatctgtgagtcctgaaatcgagagcacaagcatttcttgtgtccatacctgattgcatgtaaattgattttgcattttacaagaacacacaattactcaaggaataattaagaatagaaaaaaggccatgaagggtaaaagggtcaggaatcagaggccactgaacagtttcttattcactgattcactgcttaggaggaaattggtttttttctttcacgtgtataaatcacagtcaacaggcttcatggattttgtccacagatagcttttgagatgacaaagccataaatgtcacatacattaagcacataaaaaggaattaatgaaacggttagagtattttaatcaaatccctaacagaaggggtacagttaagcacacacagtatgaaagtttgctttcaaatgtaaaaagcaactacagaaaatcacaagtttcattagacagaacagcaatttcaatcagaaaatgcagcatatattgatacaaatagaaatcttgaaatataaaagtaaggagtccaccttta

SEQ ID NO: 457145 - DNA, 565 bp, Homo Sapiens
tatctctaacattatcaagacagaaggaagatccttgctttctgctacctcacctcctacatgcagcagtcaccatggcttctcaaatatgccttctgaacaatattcacatatgacttcccttcatccctacctacctttctagtctaagtcaccaattgtttcatatcctgggatttcactcttttctccaaagtgatcttatcgtataaattatttctgaactatgcttaaatatgctgcttaaaactacccaaagtctttctattgttgtcattttagattctaaaattgctatgaggccttgctaagatttagccagctgatttcctctcccagcttcatctcataaaggtctcccatctgctttccgtattccggctgtggcagaataaagttggctacagcttcttggtcacagctctattaagattgaaatatatttcttctcctcttgcatatgaactcactctaaggaggcttagccaatagaatgcagcagaaatgaccttacctaagcccctggcctagtctttaaaaagactggcagcatgtgttttctgtc

SEQ ID NO: 457146 - DNA, 392 bp, Homo Sapiens
ggttagaatttaaaagcagcaatctttaaggtgattttatttgtagcttctcaggtaattgaaattgtaggatatgaggatgggagtacggaaggagttcccttaaacagagtttttaatgtttgcaaatttagacaattacttgtgtaaaactatctaaaaatccgtcaagtgaaccatggtttaagacaagaaaacattcatgtattagtcttttattctaaatagttgctatatttatattctagaccgtggttcgcaaattctctgcagagggacagagagtaaatatttttggctttgagagctgtatgttttattgcagctactcagctctgccattgtagcacgagaacagccaaagaaacacataaataaataagcatgggtgc

SEQ ID NO: 457147 - DNA, 884 bp, Homo Sapiens
  misc_feature (42)..(42): n is a, c, g, or t
  misc_feature (61)..(61): n is a, c, g, or t
  misc_feature (210)..(210): n is a, c, g, or t
  misc_feature (294)..(353): n is a, c, g, or t
  misc_feature (355)..(355): n is a, c, g, or t
ccaggacccttcagaatgaagacccaaaggttccgggaaaanttgtcccatttttatgctnaggttcaacaaagtatggaccagctgtgtggaaaatatgattggaaagaaaaggcttatgaatcttaatgcttaaataggctgaagtgggggaaacccagcaagtctgtctgtctagattcttctcagcctctctgagcagcattcctncccttctgggtatgggcaggactctctctggaatgggggtcttacaacctatagtcagacaaggtaggtcaggtgatttctttnnnnnnnnnnnnnnnnnnnnnnnnnnnnnnnnnnnnnnnnnnnnnnnnnnnnnnnnnnnnanaaaaaaaggaactggagggagggaccctcagacatcctgtccacaaggctgtcaagggggtttctggcctggcattcctccctagatctgacctacgctctccctgcagcattctctgccctctgacagggcctctgctggactgccaggttcccgtgtggttgggtggagaagatttgggggtgggtagagtaagtagttggctctcagggattttgtctaagagaaagtgagatgggagaaatcgggactgaccgggtcgtaactgaaggtaagctgtttgcagcatcccccttcctgggtgcaaattcaggtatcataagtctaacatggaatcggtctgctctcatatgtggcctggagataagggtatgggaggtctctgggcaggaaggcctcattcacatctgaggggtggagagcgcgcaggcagcaggcagttgttcccaggttggtcacaggccaaatggtagctttcatttggcccttgttgcccctgccccctcttcctccattgttagccatgtgc

SEQ ID NO: 457148 - DNA, 503 bp, Homo Sapiens
atcaaagtcggttgggacaacagaggtccacatgcaaagaattaagttggacccttatctcgccatgcagaaaatgtaactcaaaatggatcacagatctaaattaaaagctaaaattataaaactcttagaagaaaacatatgtataaattttcatgaccttggattaggtaatgctttgttagacatgacagcaaaagcataagaaaccaagaaaaaaataaataaattggacttctgatatggtttgggtgtgtccctacccaaatcttaacttgaatttaactcccacaactcccacatggtcgtgggaggaacccagtgagaggtgattgaattatgggggtgggtctttccagcattgttctcatggtagtgaatgagtcccaccagatctgatggttttaaaaacaggagtttctctgctcaggctctctctttgcctgctgccatccgtgtaagaggcgactgctcctccgtgccttccaccatgattgtgagca

SEQ ID NO: 457149 - DNA, 325 bp, Homo Sapiens
tgataagaggaattttcccttcatatgaatagatactttgtttacaaataaaagataatctattaataaaaatggaagtctaatgtctcccaatggcttaaactaaggttctaggctcagactcatgtcaaaaaatatgatcttattacttgagtagttaaattaagaaatttaagatgacacatcaagtgaagaagggatgatgaatggaacagtctgaaggcattaactgtcaccgcagttgaagtggagtttagagaatgtcatctcaacagttattctaattcacacctgttcttctaaaatgtggttaattcacacggga

SEQ ID NO: 457150 - DNA, 314 bp, Homo Sapiens
tccttatcttttagacatacatattgaaatatttacaaatgaaatgatttgctatctgggatttgcttcaaaataaataggggttcaaagatgaatggcatttcagataaatcaagattggccatggattgatcatgttaacatgagttcattatgggggttgtccttttacatatacctgacatacgccattaatttatttaaaaagcactcactccggatgtctccctattgttttacgaaacacaaggcagcttggcagcgaacttaaattggtattcaactaaactttttcattaaattccaagaagtcg

SEQ ID NO: 457151 - DNA, 464 bp, Homo Sapiens
ctcggtacccccgttgtcagtgcaaggaagaacggccatctcagaacgttctgttgcttggcattgagaacagtggtggccttcacctttcgatgtgaagatgaccgttcactggatgaaaaatctactgagtttacatctttaaagtgggtggtggcatggagaagccaggggaaggaagaagtgtgcttgtatatggcacctccaagcctgaagtccgtggaaaacccacgttcagctgctattacctactggagacgctcgcgctgagcgggctaggaacctctctagagaagaatgctggagggcaggaaagcccaggaaggtgaaaggtgcgaaagcagtgggtagatacgttaattctaaggacctttttcataagcacgttcccagcagctttcttcccacgtccttttagaaagtgggctcttttgcagcactgagaacggcctcactgacaacgg

SEQ ID NO: 457152 - DNA, 404 bp, Homo Sapiens
gcacttacacagtgtgtctgaagatcagtgtcataaatggcaacaaattctctgaaaagtgctaaagatggcaatcgcagggcagaattcacctgtgcccaatacagactgaaccactgtttgcaaaatagcctttctatatacacatgcaaaaccctaattactcaaacatcactaatttgttttaggtgacaggacaatctgttttgttatgtatttaacattttgctgcttcattaaatcaacactaagctgcttttgtgtttctggtggcactggaaatataaaggtatgaaaatgaatggtcattgtccacaagaagtttgaaatattagggaggtaggggaaagactggcacactaatataaatcaatgtgaagcacgcagagggatgcctgctgaga

SEQ ID NO: 457153 - DNA, 388 bp, Homo Sapiens
atcctgtcattttctaggatgtggtgcacgcactttgctgttgcgcatggtgaagtattgtgtctaggtcctgggtcttcatctgtttggctctgctactgtttcctcctcccaggaagtgtggttagacaaataatgtgttttaattacctgtcacactcaggattaatacatactcaggttaactgtagagaggcattggcttcagaacactcctcgtgacaattttaaccattttctttgtctagagtctgcctttttcttttttacaatattcttttatttcaacactaggtttcaatatggtgttcctgctacctcccacctccctcctccctcatcacacatgcaaattgtcagcttattgagacaacccacttagattcat

SEQ ID NO: 457154 - DNA, 351 bp, Homo Sapiens
aatattcttccattttatagtccagctatcttggtggcaggctaccctagcccactgggccaagttctagaatatgctgttttacttttcaaaagtatagaaatgcctacattctgagacagacatgatctaagggttttggaatacaggttttgtacctgtaatagctaccgcataggtgtgtcatagatagattgctaaagaaattagtatttgtaaagcaattagaagagggtgaggcttatagtaagctctatttaagtgtttgataaagtaaacatttcctgtaacatttaaccctagaaatgaagtgaaagataactactttgttagaatagagtgaagccacga

SEQ ID NO: 457155 - DNA, 281 bp, Homo Sapiens
  misc_feature (226)..(240): n is a, c, g, or t
tgttttagcatgtatccactcaattgaatcctcagatacaccctgtgacgtaggtactaggtactagtctcagagagtagagctaccctcattagacagtatagagacttgaacttagattctactgattgcaaaatttgtattcattctgccctactactactgtgttattcctgtcctagcatgggagaatatatcgttcataacaagatcaaaatggcttttnnnnnnnnnnnnnnnctaactagtatccagagagaaccttctgtagctgtataaac

SEQ ID NO: 457156 - DNA, 357 bp, Homo Sapiens
cttacgagtgcggcttcgaccctatatcccccgcccgcgtccgtagcggccggccgctacggacgcgcagaagagtgaggggtagactcagggtccagaggctgttgtaaggaggagtggtctggggttaagccaccaagggttacagtagagcaaagtgagcgcccatccaggagacatctcttccagctcccatctgggcaccagcaagactgaggggtggggaaggaaggctgccagggatgcctggatttctgctctgagggtataggtacctgtcgggtccacacatctaaagcagcagctcaggggaaagggagagcttctgagtggtgttttacttggtttggtttttac

SEQ ID NO: 457157 - DNA, 488 bp, Homo Sapiens
  misc_feature (22)..(22): n is a, c, g, or t
  misc_feature (31)..(31): n is a, c, g, or t
ataattttaaggaaaaaatttncaaaaaaantcctaaaacccttctaaaatcccatgaaactcctaatgggtaatgtggaatccttggccctatgaaaaaacagggggctcctgtggtaggtaatatctgcccccaggctggtctgctttgttagggaagacccccagggtccctggtaccaacagtcatttgcccaagagccagtggggtgaggaagcagggtgtggggatagcaggagcagttccaagacaaggccgtggggtagatgtgtggatgtgttctcagcggctgtgaaaaggaactgggagttctcttcacaaacaggagccacagccagcctcccagcacagtgcaatagctgacccttcaagaaaatccctccgtcatgtgtgtggcaacagctgccactgctgggcctgggcgtcagcctgacacttgctggtcaccagctgggcaggctttgtctccagcagaggccactgactg

SEQ ID NO: 457158 - DNA, 393 bp, Homo Sapiens
tcgtaaggaagctgtcctctaacatatttacactgggaaatcaggctcccattatactaacaggcaacaataaacaatctactttaatagtcaaagtctcttgttctaataggaagggggttcaatgaagttgacaattaactgacaacaccatggaaacattccaagcctttatggtgggaggaagggatatttgtactgtgtagcatgagcaactttctccagatttagtgctacatgaaaacgaaactatgtgaaaacaagttaaatttacaataagaatgattatctgcaaccctatttgttaacaatcaccactagctcttagaagagaaccaatagatttttatagtcctatagattttgcccaacagaagtagcacaaggagatgt

SEQ ID NO: 457159 - DNA, 320 bp, Homo Sapiens
gctcagtcatatcttttttgaaaaatctgctcttttctctctctctttccccagtggaatgcagatatggagctgatgagtctgctttgatcttatgggtaagaaaacatactgggaatggctgaataagacagaaggaaacaaagttcctgataaccttgtagagttaaatctgccctagaccatctgattacctctctattattaggtgagaaaaaaacagaacttcgatcttatagcagtttggcctgtggcttaacatatttcacaacagaagggaaagatgtcagaaggagatttcaaaggactcaggtcggtgt

SEQ ID NO: 457160 - DNA, 273 bp, Homo Sapiens
  misc_feature (72)..(81): n is a, c, g, or t
tgcacgtgagccacagagtcaaggcactgcaattcagcctgggtgacagaagggaaactctgtctcaaaccnnnnnnnnnngcttgcatgttatcctcattattctgcaccctatttttttcacgccatagcagtatgtagatcctcctcattgccttctcttgactgcaaagcattcgattgtgtgcatggagcaccatggatgcagctgtcccctgctgaggagcatgtgggtcagcagtcaatgcaccatcccggtggcagtacggcgca

SEQ ID NO: 457161 - DNA, 754 bp, Homo Sapiens
cacaagatgggactgggcgattctgcttatggcagccacccaggccctgcaagcagtagaaggcttcaggaattggaactggaccatggggcttcagggtataatcatgatgaaacacagtggtatgaagattccctggagtgtctgtcagacctgaaaccagagcaaagtgttcgggattcgatggattctttggcattgtccaatatcacaggggcttcggtggatggagaaaacaagccaaggccatcattgtattctctgcaaaattttgaggagatggaaacagaagattgtgagaagatgagcaatatgggaactttgaactcttccatggctgcacaggagtgcagagtccttaaagagtctaagttcagagttgtgtccagagaaaatcctgcctgaagagaagccagtacatctgccagtgctcagaaggtccaagtctcaatccagaccccagcaggtcaagttttctgatgatgtcattgacaatgggaactatgacattgaaatccggcagcctccgatgagtgaaaggactcggagacgcgtctacaattttgaagagaggggatccaggtctcatcaccaccgccgccggagaagtagaaagtcccgctccgacaatgccctgaatcttgttacagaaagaaaatactctcccaaggacagactgcggctgtacacccccgataactatgagaaatttatacagaataaaagtgcccgggagatccaagcatacatccag

SEQ ID NO: 457162 - DNA, 171 bp, Homo Sapiens
ttcatccatcccttttatctctcatcactggtttatcagtgggatcccaacattggatttgtaaagtgttgggcctgtggtagtggctcagtgatagctattactgttttgcaggtatttctggtctgcccctgtcctactcgcacgctaagtgcccccatagccccccca

SEQ ID NO: 457163 - DNA, 403 bp, Homo Sapiens
cagagaagagccgcccctctagagcagctgatccgtcctgtggggagtcaaaccagtgcctgagtcccttcatttggtgtgggtttgtttttggagagctcaaggagcttgtgttcagggtctgccctaggatgggaaggtagagacccctgccttcgctgagttactcaaggaccttgggtccttcccaccatgcaagaggtcagacctaaattaaaatgttttccaagaaagggagatgtgagtagcagagccataaaacggcctctctgtgaatttggggtggatgctgacctgcccttaatttttccagcttacgcacacagctgtgttggagagttcctcacactggagcttcccagcagggtgggaatgttctaccccaagcgcatgccttctctag

SEQ ID NO: 457164 - DNA, 247 bp, Homo Sapiens
  misc_feature (22)..(22): n is a, c, g, or t
cgggttttctgctgagttcttnaagacctctaggtgcgccgttgatccacacaccaggcttctgcgatttgtgtcagcgcccggttgatgtagccgcgcaacgtgtcgtaggtgaactgcagctgggcgtagaccagattgtgtaccgattccatattagataaatgagttacattggtgccatctgtacttcttctggttctactatgagtaagattccgactggaacagttggccaaacgttcca

SEQ ID NO: 457165 - DNA, 391 bp, Homo Sapiens
gcagattttaaagatgtttcagaaagaacaagtggatcctcttcagatgaaattgcagcaggtgaatggacttggccagggacttaattcagagtgcaggaaaagactgtgatgtacagggtttagaacatgacatggaagagatcaatgctacgatggaatacattgaattaaaaggtcgcacaaagaattgcacagctacaggcaagctttgttgcattgtgggaagtttcaagatgccttggagccattgctcagctggttggcagataccgaggagctcatagccaatcagaaacctccatctgctgagtataaagtggtgaaagcacagatccaagaacagaagttgctccagcggctcctagatgatcgaaaggccacagtagac

SEQ ID NO: 457166 - DNA, 407 bp, Homo Sapiens
gtaggtcatgattgctgagggttttgctttggatttttcatacctataaagtcaatcttgagttgatcagagaaagggaaacttactcctaataaacagactcagaacagaagggacatatgcataaatcaggataccatctcattaatttacaaaggataatctttcttttcattgacaacacctacacccacctgttttccagtgttcttctctctaaacagcaaagccaaagcactctgcacaccaaatcacctgttcagaggtttatgcatgagcatatttcttttaggccgtggtgaagttgataaaccacgcctgctttgtaacaaaattattttaaagtgaactggaattatctagtccccagattgatcatctcctctggcaacgtgactcagtggtgt

SEQ ID NO: 457167 - DNA, 276 bp, Homo Sapiens
aaatatataaagtccttttaaaggactttgtatagtacaaaggctctagagtgatatgtgccaaacaaaataggatggcatctctgctctaaaggatttataatctaggaggatagtttaagagggatggcctcaaggtctaaaaacaggaacttcctacctaaaagacaatggctaaatttcacttacctattctttaggtaataagtagccccttggaagttgttttgctaccttcttatgcattatagagtagtccagagcatatgaaaggta

SEQ ID NO: 457168 - DNA, 433 bp, Homo Sapiens
catgagttttcgccaagctctcttgcttgtggaaaagaggacaatggggcacttcatgacccagaaagaattttcttgaaaatgatttgctttactgaatggaaattctgttttactaaaatagaaaacattagatatagtccaaaaatatttattgttaagcatatatatcgcgtgctataaaactctattagatattttgtagctttagtagagatcaatatgctagtaagttgtcttgcacaatatttacagatttctgctgttttataagtttttatcacttccacgtgcgccatcattaaagattcttctgattccttgcgtaactgtattccatccaatctttgatctatattgccggtgtagtttttctaaaacatgccattctcctgtcagtaatccttcaatgactcagtggtgtgggatcctt

SEQ ID NO: 457169 - DNA, 533 bp, Homo Sapiens
gatgaagaggagcgaacactggtctggagcatatactttgctgccaaatgtgggcgttctcttgactaagttataaaggtagtggtggcaactctctgttattgtctgtgctgtcaatttatcttgaaagtgtaaataaatccagaacctgggggcagatgttcccttgtagtaattctttggtgatatatgagactgctggggacaagaggccttaatctttgcgatcaggtcacacttcttccagtcagcatccgtcacctcagcatcacttccaccatctgttcccgcacctgctctttccaaaatgccccggattactgctctgaacaccattagttctcattaacctttcagagagcagctgtccacatagacgccgaagccaagctggggcccgacacctcatctgtgtcttcacatctgtgcaggactggggtggtcctccctggaggataagcagttcccggactgctaagggctgatagacttgatccagcatgtctctcaaggccccagaaggtccaggtatg

SEQ ID NO: 457170 - DNA, 140 bp, Homo Sapiens
gcagctgatcagtgctcctcatgcattttgaagcttcttatgcccaaggtgtctgtgacagatggctcgtgaagcagcaggaatgcacaacacctctgctattatttttaataaaaaaatactgactcaggaagtgtggg

SEQ ID NO: 457171 - DNA, 419 bp, Homo Sapiens
acagtcactgagtccaacttattcttttattctaaggtgtttatactgagcacaaagtcatatataataatgtccaaagagcttataatagaaaaagaaatgtctaaatatagaggaagatgacactgtggggaaaaccacagaacaaactatccaggtcatccacaaatacatggttcctaaatatccaacaataaacaacaatgatctcatctgaaccaaggttcttttatctatccagtgaaatagtcattaaaaatgaggcaatcaaaactcagaaaaaaacacaggagttaatctttgtggccacggattaggcaaaactttcttagatatgacaccaaaaacacgagataaaagaaaaataagataaattgcacttcaaattaaaagtattcatccttcagtaataacaccat

SEQ ID NO: 457172 - DNA, 289 bp, Homo Sapiens
gaggaccccccacagtactgagtcaggagtggatctgcagtcaaaaggccgaaacaggtatgcgtaagtatcttatgtcttttgctattcctccctgctcattgctgtgaatttaatgtatttgtaaataaaaaatatactgaaagcatcataagtcttatatgggggtttcactaattgtaggcagtctcaaatattaagcaagtgattaacaactaatgagaagtgaaaactagcttaccagcaagctgtggtttatcacaatggttgtagtggactcaggtggtgt

SEQ ID NO: 457173 - DNA, 416 bp, Homo Sapiens
gtccacactataaagtaatttgtgaatactgtgaatagtgtaaatacttcagtcagatttttaagtttgttagtcaaaagagtttactttggagcaaaactccataaaggttataaaatactaggtcttgagtctagcttgctttgtgcagcatttcccagtgctaatgtaaagtgtcccttgaaagcttttcctgtgactaatcagaacagaatacagaagaatcattacttccagctcttctcttattaggaatactcaggaaatacgtaaagtgggaatgtaacattgaaacctcattttgtatgaaagtgtcatgaatatagcaacccaggtctctgtcactgcatctgattgttagtgtgccaggttatggggcttgtgtggactgtgtgaggcacttcgactcaggaagg

SEQ ID NO: 457174 - DNA, 499 bp, Homo Sapiens
gttcgacggagactctcccagctgcagttctgtgttagtgcatccttcaaagctaggagaattctagggtgaccagtgagctaatgttgagtgagcaggtattgacttgaacacactgcaggcctttggctgtctcatgctgtccttactcttcttgggaacagtgagtcactcagctggccggggtggggatgcatcctggtgaagagacagctttccctgaagatgctacagaaagttactgtcagatttcatttgtttctgtttcctgagatcaactaacagaagaatctaatggtgagagtgtcttcattcatgttttacgttttatcaaggcacactggaaagggaattatgtggctgacttcccttggccttcccaagagaagattctgttcttatgtcagtgtggcttctggaagtgtctcctatcctcccatcctccaggcctgtggtgtgacttctgccccgaagtcctactatagtgagggttccatcg

SEQ ID NO: 457175 - DNA, 405 bp, Homo Sapiens
acacctactgagtctaaaaggagaagttagagtaagaggaaagagaatgaacataaagagcagcatgggcaaagataagatgctgggaagggcaggacgctgcaagaagttcagagttgctggagtggagttgagaatctcaagggcagagtagatgacaaataaccaccacttctgcacacaaggagtatagtctgctctaataaaagcttgtctgctataggctggttgtgaggagccactgcgggggtctagcagtggggtgacagaaacagatctgcatcctaaatagactgccttgtggctgcgcagaggacagaaggcagtgggacaatccacataggagactgaataagagagagttgaacagggattgaggcaggtcagtgatggcaggatggagag

SEQ ID NO: 457176 - DNA, 300 bp, Homo Sapiens
actatctcactcactcataatctcacaatatcattcactcacgatctcactcaaaatctcacagactcaaacgatctcagtcacgatcccactattccactcacgatctcactcacagtctctcacgatttcactcatgatctaactcacgatctcactcattcacatacgatctcactcacgatctcagtcacagactcactaactcacgatctcactcatgatctcacaatctcatgatctcactcacagactcactcacgagttcacgtcacagacgcactaacgcacgatctcatg

SEQ ID NO: 457177 - DNA, 633 bp, Homo Sapiens
  misc_feature (11)..(11): n is a, c, g, or t
  misc_feature (24)..(24): n is a, c, g, or t
  misc_feature (48)..(48): n is a, c, g, or t
  misc_feature (62)..(62): n is a, c, g, or t
  misc_feature (85)..(85): n is a, c, g, or t
  misc_feature (108)..(108): n is a, c, g, or t
  misc_feature (113)..(113): n is a, c, g, or t
  misc_feature (118)..(118): n is a, c, g, or t
  misc_feature (132)..(132): n is a, c, g, or t
aaaaacacttnaacccaaacccanattaaacaaaaaaccaaccacgtnaaccaatacacccnaaaatcataagacaaagcaaacntagctagaacacaaaccaaatcnctccncaccngcatacaactctcngttccctaatccccaccttcccttgtaacaatttgccccccccaggtaactctttgttcctgggttggtaaagcattttgtcaactttcctccttgtccttgtttcctttcctttgcctcatctcccaaatcaaagacagtatcccaaggattttaaggtgtagaatccacgcgtgaaccttgaggtggtagattgtcttgtggaatatggttggactctgcaaattgaaagtcgttccgggctagttgcagtctgttaataggaaggggttttcggccagagcaggccacggctcctctctaacgagttgtctcggctcttgaaaagtggctcctgagtctcggaggcagagacagcaagaatgtagggccggttcttaactgtttgcattcacttttctaggccttggcgataaagcatgaacaagaagctcggaagagtgcccagaggttgttggtcgtatgtagtttggaaggagtgggtggcgttctatgtctgac

SEQ ID NO: 457178 - DNA, 403 bp, Homo Sapiens
acaccacctgagtcattttcagttaagaagagaatagtgggaggtattgaaaagagtagaaatgattagttataaggtccaatttgttttactatgtgaaacagtatttattttatttccattttaatactttgaattgcacagattgagtggattttcataaggcagatggcccaatatttcaacttatcataaactagtatacttaatggaaaaggttacaaacattttttaaatatttatactatcaatagatctatttgttccttgatgagataattattttctatttttctcctgctagtttcaggcatccactcgatacttctgtatttactattaccctctcagtcaatttacttcacgagactgttagtgtcacagactcaggtggtggggatcc

SEQ ID NO: 457179 - DNA, 290 bp, Homo Sapiens
tcgaagtgtatgatgaagagatgaggaaactttcaggaaaatgcttatttcctgcttttagaaactaaaagaatgtctcattgtgggttgctaccattatatgcaggaagttttggaatgaaaaagattctgaattcatccttgctaactttatttcagaaagtggtaaaatagctatggagtacagacccagtgaagagattgtagatgtcagatgggaagaagaactacacggtttaatataagtatgtggagataaaaactcaaaggtaacaggccgcgcagagttt

SEQ ID NO: 457180 - DNA, 219 bp, Homo Sapiens
aaactgtcacaccctgagagaccaatagaaacctgcttttcccaaccagctccttcaaggtgaccttgaagggggaatggggggaactaattattgatgtttcattgccccatatcactgttgttgatttgaccatcactgattatctcctgcagggtaagaataaatcttgagcgaagacagtacttctattttgtgtgtatgtgtgcatgtgtgaat

SEQ ID NO: 457181 - DNA, 628 bp, Homo Sapiens
tgaggatgtgattatagcaacaagttagccatcagccacacacgcggaaatgcttagggagaagccttgtttgtaaggtaatgtggacagagctgtacgtggacatcattacttgtcacgtgtcagaggacacactcgggagaaaccttcatggagtgagagtaaggtgttggctggaagtggccccttaagagatacttggagtcaaatctatccactgtacgcccaccccactcttgttctaagagctttggggacagtcttttgaccccttacattcctttagatgtgaagatgacagagatctaacttctgagagcagaggtgtcaagtgacggtccccttggaggaatggtctttgcatctgactacttccttctgcaactgtgttcttccattagcttccatgacactctcctgctttatttttttctacatctctagcctttgctgttccctctcctaccccacctttagattttactcagagttcagtctccagccctacaatctgagggacacctttaccaggtccccttcctaaccctccagtcccaaatccaagattctttaaccacactctaaaagttcttcagactcaggacttaaacatagccgcgcagagttt

SEQ ID NO: 457182 - DNA, 492 bp, Homo Sapiens
  misc_feature (12)..(12): n is a, c, g, or t
  misc_feature (46)..(46): n is a, c, g, or t
  misc_feature (141)..(141): n is a, c, g, or t
aaaaagacttgnaaacaagcttttccagagagccaataaggaatgnaataaataaacatgggaaaaagatgcctccagccctccatttaacattttaggaaatacaaagtttaacttcccactcctagtcaaaatggagtnagcagaggcacgatttaccttctcccaccttaaattaaaacctatataaaatgtatacaaggaagtttttcagatgttagacaaaagccagtgcaggacagtgactcctgagagatggaaaacaaagaaagccctataattgcgcaagcttctacatggggtttctaagctgtggcactaaggctagggaagggaacctccctgggtagagaatttaggggagccaaggtaagatttgcagggcagaatattgggtttcccttaagtcttcagctaaacaccaagcagtgtatgcatgtgaggtaaggaacaggagatacaactgggagctcaatagggttcagaatattt

SEQ ID NO: 457183 - DNA, 436 bp, Homo Sapiens
aaggcaatatatcggactggacaggccaaccactattacaattcagaccagatttctggcccagttctggaaaagtattgctttccaagataaaaatctgttgggcagaaaagaaatgtctgttttaaagataaaatccatttggttaataattatccacccagttttaggttgctttcctcatttctgtaaataaattttcctacattgcctctcccagtgattgatgaaaagtggacttaaattttgaggaaggaacctgaagaacatatccaagtcctcactaccctgtttggtaatagttgcatctaatgtcttctatttttcttcctgaattaactagatagtatagtgtgtaggaagtacaaagcaggtattcatcaggagttacagagatttaacatgggtcattaaagtgctgtatataggcctcccg

SEQ ID NO: 457184 - DNA, 427 bp, Homo Sapiens
tcagcacttaatgacccagtaaatctccgtactcctgatgaatacctgcttagtatttcctacacactatactatctagttaattcaggaagaaaaatagaagacattagatgcaactattaccagacagggtagtgaggacttggatatgttcttcaggttccttcctcaaaatttaagtccacttttcatcaatcactgggagaggcaatgtaggaaaatttatttacagaaatgaggaaagcaacctaaaactgggtggataattattaaccaaatggattttattttaaaacaaacatttcttttctgccaaacagatttttatcttggaaagcaaatacttttccagaattgggccagaaatcatggtctgaatagtaatagttgtttgggcactgtccaagtccgatatactggcctcccg

SEQ ID NO: 457185 - DNA, 1001 bp, Homo Sapiens
gccgctatttacgcgcctatctccaaggatactaaagtggcatctattgtcactggctgttagcactgatcactctagactcaaataagctccccgccgcgcacccgttggcggcacagcaaccagagggccggtgaccgtggaaaacatcaagaaattcaacagttttgccgagttctacccgtactacctgagcgaacatggcaacagcacctgccgacgcctgcactttatcggcaccaccctggtaataggcattctcgcgtacgccatcggcagaggctcattggttctgctgctggcgttgcccctggcaggctacagctttgcctggataggccacttcttcttcgataagaaccgccccgccacctttcagcacccgttctacagcttgctgggggattttgtgatgtaccgcgacatgatcctgggcaaggtgccgttctaggggtgtgacctcatgtcacttgcgcctgaaccattaaaaattgtgcatctgtggagataaaagtctttttgtcatttacggtgctgtatcctgccagggctttttgagagcgcggaatcacctgcgattgaaaaaacagaccttgcgaggagcgaccacgatgcacgagatacctaatctccccttcccaaacctgcacccaactgagcagccaacaccgcagcaggccagcgacaagcagcctgaggccaaagaagcaaaaccagtcgagcgcgaaagccgagactgacgccgtaccagaccgtgtggaaagcgcgcctttgagcgctttccacactgcctgaattatccgagaccttcactatgaccacttccccttccgacacgccggacgccgctgtactcgacgctgccttgcagatggtcgaagtctggaaccgcctcagtgccgacaagcaagcagcactgctcaagcgcttcggcacccaggcaacgcctggcggcctgctgaccacccaattcctgcccccgcccagctgaacactcggtg

SEQ ID NO: 457186 - DNA, 329 bp, Homo Sapiens
cacagcagccggcccgggaggaaattatataggtggaagcaaaagtatcttcattttctcatgtattccccattgattgagtcaatgcagaggggagaaagttccatctcaggaaaaaagaatctactacataatagaaagtctgctagacaatgcctattagattaggacattgacatagatttctatcaatgttgatataagaaggagatttgacattgatcaaatagtgatataattgatccagtatcctagaagaaagagtttgggcctgcagaaacctacacttctgtgttttgtaatcatagcctatatggccgcccggtccg

SEQ ID NO: 457187 - DNA, 863 bp, Homo Sapiens
tgtcaaactatgctacgagctggcggcattgctcgagctgatccaccacggccacagcaacatgggcgtgtgtagacggcggcaagcacagtaatcgctgcctgcccgaggtgggcgggaggccaccgaccgaagctgagattgccgaagccttcgatgccaacggcaacctgttgatgttggaccggggccgaacactgagttgggatgcacgtaaccaactgagccatgtgcatatggtggagcgcacgttgcgcctcaatgacaccgagcgctacgtctacggtgccgacggcatgcgccagcgcaaggtgcgcacgacgcaaaccaacgcccgcaccttggtcagtgagacccgatatctaccagggctggaaacgcgcgatggggatggcgagaaactgcacgtcgtcaccgtccaggccggccgcaccacggtgcaggtgttgcattgggaaggcgcggcgccgcagcaactggcgaatgatcaataccgttacacccttagcgatcatctgggctcttgttcgctggaactggacagtgaagcgaggatcatcactcgcgagacgtatcatccgtttggtacgacggccttcacgcagaagggtgattcgagcgaagagagttatcgcacgttgcgttattcgggcaaggagcgggatgcgacggggctttattactatgggttcaggtactacgtgccgtggttacagcgttggattaaccctgatccggcgggacggatcgacggtttgaatctgtatagaatggtcagaaataatccggttttgctcagagatgatgaaggtctggtacctacgaaagaagagatctacagtcggctcgccctctctatgtca

SEQ ID NO: 457188 - DNA, 655 bp, Homo Sapiens
accccacccgccgacggcgtcatcctcagcggtggcaagaccgatgcccgtgactgcatcaacttcacccacgaggaaatggccaagaaacttgggcgcgccttcacctggccgttgctcaatgtcgagtcgggtcagaccttcaaggtcacctgggcatacaccgcgccgcacaccacccgtggctatcgctggctgatcaccaaggatggctgggatccgaaacagcgcatcacccgcgcacagctggaagcccagccgttcgctgaagacttctatgcccaggtgccgtactacagccatgcaggcgaactgaaggccaaggtcgatcatgaagtgaaactgccgacccacaaaaagggccagcatgtgattgtgttgatgtggatcgtcgccaacaccggcaacgccttctatcaagccttcgatgtggacttcaaataagcccgcgccgttaaacccacacgttctgaaggattagaacatgtcaaagattgactttacctcactgcaatcgccgctcaacgatgccgcttcgccgatgccgagcatcgccggcaaaaagatcctcatgggcttctggcacaactggcctgccggcccgagcgatggctaccagcgtggccagttcgccaatatcagcctggtggatgtg

SEQ ID NO: 457189 - DNA, 318 bp, Homo Sapiens
ccatgtttatgagctgtaacgctcaccgagaagatctgcagttttactcctgaggccagcgagaccacgaacccactgggaggaatgaacaactctagatgcactgcctgaagagctgtgacactcaccatgaaggtccctgcagcttcactcctgaagccagcgagaccatgaacccaccagaaggaagaagctccgaacacgtccgaacatcagaaggaaccaattccggacacaccatttttaagaactgtaacacacaccacgaggtctgcggcttcattcttgaagtcagtgagaccacattcgtgtacaggc

SEQ ID NO: 457190 - DNA, 543 bp, Homo Sapiens
aaactgagttggtataaaaagcttacatttgcagtttcctcatttttggggaaccttacatttctaaaagcaaagttaagcagggattgatgaggaataaaggactgacctcatcttcagcatgtgatcattccttagctactatttcaacattattttactgtcattactttttcttgctactttcaaacttattgctcctgatgtcagcatccatcagagaaatgccttctgggttcacttttccctagactacgatggtttgggggctttgttgcctagcctggctactctcatactaatagatgttttacagaaaatcagcacacggaaaccacatttcatctttttcccacgcatgtacataatgaaacatttcaactcccgaggctgggcctcttcctcctgggaattctgcaggaatgaatcagattacagtatttccccataatgctgatttcataaaaattaaatttcctaacagtcaatacatctctctctcatcatctcatgtcccaatcacttaccctaccaactcagttt

SEQ ID NO: 457191 - DNA, 796 bp, Homo Sapiens
aactgagttggtaatctagagaaatctgcccctctactttattctctcctgctattgacttgttgcagaaaccaagtttggtgtcctgtgttctttcctacatttggaatgcatttgtttgcttccttttggtgtctttcagtgtgttactctatccacagtatttcttgtaagtggaagcaccagatgcttgaatagattcatatttcatagatggttatacaagaatacttcatagaggaaaagatttaaagatttttgcatgtgtttattcatttataaatttggtttcttaatattttggggctgtccttgtatctgcatcctatgacaatcgctgcctaggattcccacaagggatccatccagctacaagggtggtggagaaatgagtgttttgttttcccaggctctatagctgaggcagagaagggagaatgaggagtaggctgtgtgaacctctattcctaactccttcttcctacattggaacacccctagtaagcttcagtgtatctgtatttcctgaatgattatctccaattcaattttgttgcctcccacagaagaaggcatacagtagtgttactgagagagtggtgctattaggacaaccgtgctgactcccctagattttgtttttaatcattgtcagattttggtaattggacaattgttagtaacatgttcttgtgaagtcctttgtaactgcttacaacttttgtttgaaacctctgctttatttagagatgcagagtctattgagagaacatatctgtaaataccagctcagtgt

SEQ ID NO: 457192 - DNA, 519 bp, Homo Sapiens
tccccatagaggattttccatttctcattctctgcttctcatgctcttagcatatagacggaaacttagatttggaattgtgactcttctttttttctgcgttaaatcagcctgcagtgtctgatacatatacttgggtacatttcagatttaaatatgcaatacctttgcacagggcaagatggaaagaaaagtatgccccgtggttctggctgtgttttgaaactaagattgaaggaaggagagtatattcagaggcaagtattctgaaaatactattaatagaggcatttctttgttgatttcttaagcagcctctgcattaacaagagttttagtattgggatagcttaatgatgtgctaatgagggaagaagaactgagccctctgtttagtccctcatactgcattgtttacaaggggtcaaaggttctttgcatatttctacatgagcaaaataattgcagtactttctaatcccatttcaactatcaccctaccaactcagttgggtaccg

SEQ ID NO: 457193 - DNA, 337 bp, Homo Sapiens
gctctagactatccccagaaatgtcctttcctggttttacattttgtctcctttttagttgccttcagtacctgacagttctttttgaaaaccctagtctactttgtctctactaaaggggaaactagaaaaggaacctgatgagtcaccatagggccaatagcgcagagagcgggggtgcccctggtggtcagacttggttacacaccctgcaactctagagattgacccttatgagccacaaattaggaagggctccttcagttcttgcttcttctctgagtgggcaatagctttgcatataggtaccacttaaggaaaattcatttaaaaaaat

SEQ ID NO: 457194 - DNA, 253 bp, Homo Sapiens
acctcctaccccacggggcaatgttaaatttcatcagtacttttgtggatcttttttaagagcctgctcgtttgtgctacatgttgtgtggaatgccaagcagtgtaaattccatttgttgctttcaagcaacatgtaatctatttgagcatataaggctaacattcaagaatagatcacagcaggtatgctatagaaatgtaaaattactggctaagtcaggctgctggggagtgatgatatccgacaatgt

SEQ ID NO: 457195 - DNA, 305 bp, Homo Sapiens
  misc_feature (11)..(11): n is a, c, g, or t
cgcaggggcantgttaatttcatcagtacttttgtggatcttctttaagagcctgtcgtttgtgctacatgttgtgtggaatgcaaagcagtgtaaattccatttgttgctttcaagaaacatgtaatctatttgagaatataaggctaaaattcaagaatagataaaagcaggtatgcaataggaatgtaaaattactggctaagtcaggcaggctggggagtgatggatatgcagacattgttgatcatggagtgagtgagtcatatacaaagttgagcctaagctggcgtggggtaggaggt

SEQ ID NO: 457196 - DNA, 522 bp, Homo Sapiens
accacctcctaccccacgagtgacatcatgagacagtttgatcattttgcagacaaggaacttagaactgaaaagggatgagcagctgcacaaggagcacagctcatcggtggctctgctaggcctgaactcaggtttgctgactttaagttcaaggagcacagctcatgggtggcactgctggggcctgaacccaggtttgctgactttaagttttgttttctgtgcttgaacaaaagcgtagttttattctgtttttgaatttactctcttgcagtgttccaggccaccatggatggatgatagcaaagaaaataagaggagaaaataaggaatagaaccaggcgtaattaggggaagtggcaaggaggttgcggggagacgatgcttttttctgtggggatcttggtgtcagggctggcctaggaaaggtatctgactcctctgcaaacaggctattattataggtcctggctgtgagccccacaagcagcatgagccctagggaagccgtgcctgtca

SEQ ID NO: 457197 - DNA, 554 bp, Homo Sapiens
gggagaactcctgacccgggaggcggaggttgcgtgagccaagatagtgccactgtcctttacacacggttacagtgtattaatattctgtgttattatctctgcacttactattaccagtaaggttgtaccttcaggtgagtatttattgctcattaatatccttttatttctgattgaagtattccctttagcatttcctgtgggacaggtttggtattgatgaaattcctccccttttgtttgtctgggaaagtctttatttctccttcatgatgaaggatattttcaccagatatgctactcaagggtaaagttcagcagtttaaatatgtcatgccactctctcctgcactgtaaagtttccatggaaaagtctgctgtcagaggtattggagctccattatatgttatttgtttctgtcttcttgatgcttttataatcctttctttatccttgacctttaaagtttgattattaaatgccttgaggtagtcttctttgggttaaatctgcttggttctataaccatcttgtacgtggggtaggaggt

SEQ ID NO: 457198 - DNA, 342 bp, Homo Sapiens
gaaaaatgaagatatgccgatatgaaaaggcacagaaattgactgtgtctcctcaccaagaggaagcagaggagaaggtatcacacaaaatcggagagtgaactaactacagaggatgcaggagaacaagagatccaagcagagaccggcaaaaatttactagggtgatgggaaaagagaccctgggaccaaagcaatgcacagaaaaagggtgcacatagcacccagtcatcaggttctgagggatattacttcacgatgaaattgatagaatatctgtgcatctgagtgtcttcagatgagattcagataactggcagggacttgcgtggggtaggaggt

SEQ ID NO: 457199 - DNA, 394 bp, Homo Sapiens
actccagccctcctgagcacacccagcagggcagcttgcatagctagtaaagttcttggagaaggaggggtagcatcaggctcttatctctgtcttcagtttttcacatggagatgactatcacgtcaaaagacatgccgtgcattgtgcttttatcaagatgtaatgtgaagtgtcttcagaagaccactctcctttactctacctccttcataaagcccccttcatcttcatactgccttcggatgtgtcctgaatgttgctgattcatttccttttggacatgttcgtatatgctggttcagattgttctttttacgcaagccttttagttggtactgtgaaaagtcatcagactcctctaggcattgcttcaaatcgtggggtaggacgt

SEQ ID NO: 457200 - DNA, 422 bp, Homo Sapiens
tatacacctagttcatctcatttcttcacaaggtctacctttcatttttgccagatcacccgttgctgttcttaaaagttttccttccgttttgcagagttagtattcagctgtcgaaacttttccaattctgtgttaagtagaagtctctaagcaagcacctaagtgggttggttctttgagaccgacgtattaatattttggctagctcctagtacactttggctttttcttttgttctaatccaaaaagggctgttgtttcttcgggtatggttagggcttttaaaaaaaatagaaatggttgctgaccaaataggtgaatatgctactaatgaacacaaactggaccaattctattccatctttactaaatggaacatattaattccattccatctttttctgtttttggttggttag

SEQ ID NO: 457201 - DNA, 115 bp, Homo Sapiens
tcaataagactttcaataagcctctgttgaatgaatgaatgaatcaatcaaataatggcaggcaatatcaaatacacacagacacacacaaagagaaagtgtcagaaaaggttcg

SEQ ID NO: 457202 - DNA, 301 bp, Homo Sapiens
acacacactgggacaaaatggttttctgaaaaaaatgctaacagctcaatgaaaatttcaattgccgtcttctttccttgacaaagacttgctcataaagtgggtgagttctacccctggggacgaacacctgggggcagctggtggctgagcgtccttcttcccggaggggaccactcctgggtcagtcaagatctcctatgggacccagaatacaacacgacatctgcaattgagaagaagcttaattcctctttgttgaacccacagacaggtgttaaagcctactggtatccctgtc

SEQ ID NO: 457203 - DNA, 312 bp, Homo Sapiens
ccgtgacacgaccttgatattttttggccagataaaaggagagagcaagaatgagatctgaaaaatgggcccacagggagaggcatttgagagaggattgctgaatacaaatccagaacaaagttatttagtgaaatgccaaaatggtcattcatccaaactggcacatcctattagaagctatctttaatgcggtattgccaggcatggtcataaatgtcacaggttagaaatttctgtatgcatggaataaggatatgttcctgctagtatgcagctatatttttttcgtcaccacacaatatttattaa

SEQ ID NO: 457204 - DNA, 324 bp, Homo Sapiens
aacacatcacaccggatagaatacaagcctgaggcaggttgcctggtgtactccttgagcgcaccgatcacgaacgggccgatatagccgccgaggttgcccaccgagttgatcaaggcaataccggccgccgcactggcgccggcaaagaagcgccccggcagtgtccagaacacggcggtgcaggaaaacatggcaaacgccgccaggcacagcgcggccatttgcagtactggcaccgtgagccaggcgctgcagaacaggccgatggcgcccagcacatagagcgcggcgagatggccgtaacggtcgttcaaacggtcg

SEQ ID NO: 457205 - DNA, 122 bp, Homo Sapiens
tatcccaattttttcctttttgggacagagtctcactctgtcaccgaggctataatgcagtgtgatcatggctcaccacagcctcgacctcctggggctcaaatgatcccccctcctcaaca

SEQ ID NO: 457206 - DNA, 165 bp, Homo Sapiens
gactctagacgatccccagttgagggcgggcgacttcaccccctccgccgacgtggagatcatgaaccccgacctccacatcgccaccctcgaggagggcgggaagctctacatggaggtgcgggtggaccggggggtggggtacgtgcccgccgagcgccacgg

SEQ ID NO: 457207 - DNA, 641 bp, Homo Sapiens
  misc_feature (15)..(15): n is a, c, g, or t
  misc_feature (70)..(70): n is a, c, g, or t
ctacacttgtatttnggttagagaagtttaacaaggggtgatttcagaacagaccctgaaaatattttanaggtaaagctttatagtgtctaaacacatcaattagagcagttgtttattaaaatacaaacaagggagaaaccacaccatcttttaaaatacaggcgcgaattccacatcacgcagaagacaacgcatttcgctaagggccacagcattcactggttaataaagccacagctacaaagtaatgagatgtcccacatgaatactttttaaccacttacattcacgtcaacatataaataatggaattaagtaaaaacttcattataatgctattttgttagaaaagtatttgtaaagtggcatttttcccccaagagctgttttcacttaagctttatttcctcggcctggcaaggggagggcttttcagtattgttatttggtacacacttacctgaagaaataagtaagtaacttaaacataaaaaacatagtcgacacacatcttgccctgcattctgacatttgctggaatggtctacagcaggctacaatgctcccttctgaatggcaaatgtctgaaaatgtcagtttattaactgttcacaaaggcaggcatttgaccttgaagg

SEQ ID NO: 457208 - DNA, 252 bp, Homo Sapiens
gcgtagagaaatttagttaacagacagcacatcgttctcttcccgttctaaagctagagcactctatataaactcttcccactactacactgagcaaaagagataacaattattctgatatcttatttgtggtacgtattttgcaaagattagggttctgtgcatcaggcattccctagaactataacatagaaggtagaaaaagaaatagttataaatatgcagagtatttatgttggcactattagcttt

SEQ ID NO: 457209 - DNA, 606 bp, Homo Sapiens
  misc_feature (423)..(434): n is a, c, g, or t
aaagcttaagtgaccacccttgctgccgctgcatgccacacctccctctctgtgctatcttgccgcatttagggactttgttgtcatagttcctctcttactgcaaagggattccaaagctcttgaaaaataggaagtagctcatccttttctatgggctgaggggagcagtccttgatttacgataagaaaattctataatctttggacctttgatagaggtgacaaatacagagatctttcttggaatataatttgtccaaaactattttgagaaagcacacaaggcattaacatttacatttcccattaaagcatagggaaactgtttaccacaaggggacagaagttgatgctgttgtttattgtgttatatgctggttatagaccctcgttttacagttatttctctaaaatgcagtnnnnnnnnnnnngaatgcctagcaacatagcaacctctatgaaatgaggcatatgctgtttctaagactcacaatatgtttttctgaactgtttgctcataaacatgtttattgtaggtgctgcttgggcagggactgctttcctgtagaaatcctctcttgaatacactacactataagcttt

SEQ ID NO: 457210 - DNA, 372 bp, Homo Sapiens
  misc_feature (77)..(92): n is a, c, g, or t
ggccaagatatctcattttaagtgtcatcttttgttttattatgaagacaaaaaaatcttgagtttacgttcacttnnnnnnnnnnnnnnnngacaagagccgagaactcaccaagccccagaaggttctaccctgctcagtctgtaaagcctcaggaggctcattactactgccctcacctctgctgctttgcataggaagagaccagagacttttaatagttctgggacatgagagtaggtcctgatggtttcatgccattcatttggtcaacacaactgctctattttcatgggtccagatgatcagccttgatccgccagtgtctaatatatctccagagagaatcatgccaattagctgtgacaagg

SEQ ID NO: 457211 - DNA, 362 bp, Homo Sapiens
cgaaagttaatagtgcagattatcataggtgtcactttcttagtgatcaccattcatattgctttgagttcagcccattgagcacactgtccacttccagtttcaaacaatatggtgtcagtactaggtgggactgcaacagtggtccagacagcagtagcagctcagctagacccatgtctaggggtgcctcaggccccatggccttatcttgcattaggactacaggttccaagatctcttgcaactctgctgctaaggggcttatactcagcatactccactggtctaagttggtgccccactttgctagagtggatgtctatgccattccagtctggggggttgttacccatgaaagc

SEQ ID NO: 457212 - DNA, 675 bp, Homo Sapiens
cagataatcaaaataatttttatttggttgtagaatgttgtagtacataaagcaaaatgtgtctgcaggatactccaaatttaccaacttcaaacaaaataatgcacagtgaagaattagaaaattatcaaccttactcaatacatggaagtattccttaatcttcatcattttcattaaacaaaataatattttggatgagttcaacatttctatcctatgctttatgtttagtgccttccctgaattggaaaaaatgaggtgttttatttaaatttaacactggtctaagggagatatagaattaaactaaacaagaatcggttatcacaacctcacaacatatatcaaagtattgagattgttggtttactgactgtcacttttcactggatattaaatatcctgagggctacaactgtattttttaacctgtcccagtacctcaacaaaattttcactgaatgtatgaattaattatgttaacaaaaagttaacaataaaagtataatgaagatccctttaattaattttaaaatctgaaaggaaaactggagtcacaaaacatatgttcaaatcttaattcatcacaaattttgtgatttttgacctccacctcaatgaagctcagttttctcagctgaataaaagggattatgcctaatgttagagata

SEQ ID NO: 457213 - DNA, 250 bp, Homo Sapiens
tctaacattacagtaaatggctttaagacctcaacttgaatattcactcagtgcaaaatgttcatcaagatagcaaatgagatacctagctctttcccgggctgcatcctcacgggctttttccttttcttgcctctgttgttcaattcgggcttcttgttctttcctcttcattaacaattcttctacacgggcctgccgctctgcctctagagctctcttgcgttcctaatgttagagatacggggat

SEQ ID NO: 457214 - DNA, 451 bp, Homo Sapiens
  misc_feature (70)..(92): n is a, c, g, or t
ttgctttgaagcccaggatgggcccatgcaactctggcccgggccaaaagaggcggaaatacactctccnnnnnnnnnnnnnnnnnnnnnnngaaagaaacagctaaagaagaggaatgcatgtaacaaaaatggtcaggaatcagatacctctggtcatgagagaagttattaatgttagagatacgtatctctaacattacctatgatttccctttatggtttccaaactcaagtacacatccctccttagcaacttacatcttactctcccagctctctgccttgttcatattgcaagccaacatattcacctccttgcattacctaattcatctcttaggctgaagcaattctaactatctctatgccacagtaattctgtctttagtgttcttacatgttatatatttcgtttgatagtctagccactaatgttagaatacggtac

SEQ ID NO: 457215 - DNA, 335 bp, Homo Sapiens
cggtacccgtatctctaacattatgtattcttgtcatgttgtatctataaaaacatgaaaatataactttacattatttcaattatttacattagttcaagcttgacagagaaaaatcgataagctacaatttttagaagagtaggcccagaggtacaataaatagcattgattgtatatagtcatttctttttcacttttaaaaactcattttaagtacaatatggaaacaattagtctgcaatttggtcattctagcacttattattaaaacttaaaatgcacctccagcattcctaatgttagagatacgggatcctctagatccacctcag

SEQ ID NO: 457216 - DNA, 324 bp, Homo Sapiens
tatctctaacattagcagttattctcattttagatatgataaaactgaatcatagagaggttaagtagctcaagacttttaaattaaacatgaacgattaaacattaaaaagtatccagaaaaattaacttactttttttctaaatgtagtataaatatttttagtgcatctcaagtatgcagtgacttagatacccatattccaattacagatgtctaattttttaacttacatacaggaacaggtaatcatgttagatcagtttgtctcagttccttgtgttttatgtttataatgttagagatacggtaccgagctcgatt

SEQ ID NO: 457217 - DNA, 446 bp, Homo Sapiens
  misc_feature (236)..(308): n is a, c, g, or t
accagtatctaaaacattagtctgaaggatgttctgagggccagacattagaatttgtgagtttttttgttgctggttgtactttcctatttagaagacagaccgttctgacagttgttgtgtagcttcatgccttccccagtaactaacccatgaacagtacaccccttttatctgacttgttgataatgttagagatacacattagggaggccaagctgctttacgcattttgnnnnnnnnnnnnnnnnnnnnnnnnnnnnnnnnnnnnnnnnnnnnnnnnnnnnnnnnnnnnnnnnnnnnnnnnnaaagtcttgcctcatagttgggaaaaattaatcctagaataaatgctattctggtcttgcttagcaaaggttaagagcagaccaaaagatcaacctttccaacaaagctgaagataatgttagagatacggtaccgag

SEQ ID NO: 457218 - DNA, 218 bp, Homo Sapiens
agtatctctaacattaggacaacttctttctctggtacaatcacttattttttaaagttaaaactcattttctcttctgtattccccttcccctgggaaggaaaagaatacatgcacaaagaagaaaaaatgtaaaacacaaccctgccatttaggactttttccaggcttatatgttgctattattctttaaggatactatatgcttcctaatgtga

SEQ ID NO: 457219 - DNA, 281 bp, Homo Sapiens
cggaccgtattctaacattagtttcagtattcattggttatagtatattctgttttacaaaagtgaaaactcctttagatgtgtcaggtatatctgatgtactttaaattctggaacttgattaccagtacatcttcagagcttatagaatctaaccacaaaacagattttaactgaacttccatgtgttgctgtgcatgggacagttaaaacaaaaagtaaagtctgttgtatttcagtaccttttcctcctataatgttagagatggacgagctcgatc

SEQ ID NO: 457220 - DNA, 422 bp, Homo Sapiens
  misc_feature (46)..(63): n is a, c, g, or t
  misc_feature (89)..(204): n is a, c, g, or t
  misc_feature (227)..(250): n is a, c, g, or t
tatctctacacttatgggccacatagtgaggacccctctctttttnnnnnnnnnnnnnnnnnncgctgggtgtggtgatgcgtgtcatnnnnnnnnnnnnnnnnnnnnnnnnnnnnnnnnnnnnnnnnnnnnnnnnnnnnnnnnnnnnnnnnnnnnnnnnnnnnnnnnnnnnnnnnnnnnnnnnnnnnnnnnnnnnnnnnnnnnagaccttgtctctaaacaaggcnnnnnnnnnnnnnnnnnnnnnnnntcaattgcatttttatatattagcagtgaacacatggaaatacatgcaataccatttataacagttcaatcaaaagaaatacttgagcatatatctaacaaacgtatataggacttacttgtatactgaaactgcaaaatgctaatgttagagatacggggatcctctaggg

SEQ ID NO: 457221 - DNA, 243 bp, Homo Sapiens
tctagagtatcccgtatctctaacattatatttatttaatgacatattactgaaaagttgtattttttaaagttatgcacacccagaataaaaatgcttaatagaataattctgtcacagaaactatggtttaacctcctttaacagaagcagctggaaaccctgaccctaaactgtgagccccctaccaaatcttaggcataaatttgacaacgaaagttatcaaatcttctaacaaaagca

SEQ ID NO: 457222 - DNA, 135 bp, Homo Sapiens
gaatcgagctcggtaccggtatctctaacattagtataggtagacacagagttccagcaaagcagtgggggaaaatggtttcgaaagacattgccaaggtacgtaatagtaatattagaccattaaggtccaact

SEQ ID NO: 457223 - DNA, 422 bp, Homo Sapiens
  misc_feature (57)..(72): n is a, c, g, or t
aaggagattactttggtgcaaggaaacaataaatttctttaaatggggtaatacccnnnnnnnnnnnnnnnnggtatttgtgactactgctaggtgattctaggatccagacgccagtttctgttctgtcagaggtaggtattaccttccaggctgtgaagtgaatagagtcccttttgggaataacgattcttgttgctccctggagaaagaatacaatttctaggaagtcctctgtgctacttctgcatgcggttgtgttcttttaattttcatattttgtcagcttatttaaaaaccaaatctcttccatgctttagaaggagaaaggaaaacaatgtatgtaccttgagtgtatactaattaaaggtttacttatgtatgtttgtttaatgttagagatacggtaccgagctcgatcc

SEQ ID NO: 457224 - DNA, 210 bp, Homo Sapiens
cccgctatctctccacattatggtacagtgtggtacttatataaaaaatttttccccccaaagaaatgtccgtaacatttgagtaaacttatttttctcaaggatctgggagtataacctgaagactcaccttaaagaaatcctgttttgcactttatttcatgataaatctgtcgtgctttaatgttagagatacggtaccgagctcga

SEQ ID NO: 457225 - DNA, 265 bp, Homo Sapiens
ctgcatctcaaacacaacaaaaaagaacaaaaaacagctgatacaaaagggacactctgacctcctttttaaaaataaaaataaattggtcctattttacagatgggaaactgatacaaaagagatctaacggcaggtagtaagattaaattttaggctattttcgaacttgggtcactattaaaaacagaatattaattcaggttgcttcgtaagtctcctgtctgctctttcctaatgttagagatacggggatacctctaga

SEQ ID NO: 457226 - DNA, 312 bp, Homo Sapiens
cgtctcctagaggagtccccgtatctctaacattagacatgagaccactgggctagagacaaaggacagctcgttattcactgcaataatagtaacaagggtattggcatttgcactggtttcccgagccacagttcctatggcaatgcagaaaggggacacatgtacatgtagtgggttgcgtataggagaggagccctgaatttaaggatcctgaattttttataatgggcagtaaacatgtgtgtgcttttccctacacataggtaatgttagagatacgtgatacctcaaggaatcatctatcagcca

SEQ ID NO: 457227 - DNA, 372 bp, Homo Sapiens
gcaaaaggaagggtctactgaaaataggttgctaacattgacaacaaagtattttaagtcattgcagtaaggaattactggaaattgagtagacaaagaaaattaatatgagttccattttgatggttacttagcatgttgaacttatgagagtctttgaaatagttgcagtatgagaattgttctattgaacagcgaaacaacccaatcaggtaatagtttttccagagagtgacttgctataagggacagaagttagagacttagattctttcaaaataaaggattcttttttaattgcttgaagaaggatttcttggaatcagcatatcaactgttaatgtagaataccgggacacctctaggaacaga

SEQ ID NO: 457228 - DNA, 311 bp, Homo Sapiens
tagctgattctagagtatccccgtatctctaacattatgaaggctctgtaataaacaaattaagaaaaaatggaatatgttcctttcatttcccattgcatgatattattttgtttttctcgagtatgatttgttggcttgtttatttttatttatttctttttacattctcaagtctcttgatgttgaattagtatgaactttcagattgtttttacttccagatttctgctcttttgttttatatctttatttaaaatagtcttaggtattttatttgaagcttgtttttaaatctaatgttagagata

SEQ ID NO: 457229 - DNA, 317 bp, Homo Sapiens
ggtcgttctagaggatcccgtatctctaacattagcattttagattcggtaggtttcattgcaggagaaggtatattagggtgacctggttttcccgggtctgagaggtttctcaggacatagaacttttagtattaaaacaggaaaactgagacagtgggtcaccctagcatgatgtgtccccggaaaactgagacagttggtcactctagcatgatgcatgtgtgtgtgcatgtgtatgtgtttatgcatacaatgcgaagtctcatgcgtatgttgggaataatgttagagatacggggatcctcgtagagact

SEQ ID NO: 457230 - DNA, 447 bp, Homo Sapiens
gagctcggtacccgtatctctaacattaggattggacccgcagcttagttgagtccatgtaaaaatgtcacaggagaatggaatactgtgatattttgctctacaatgatattcataattctcaatgtagtacaaagaaagatggtgatttctccccaacacctttgttccttccttctttaaaaacatgctttcttataggttctgataattttataggagatcagttggttcatcaacttgtgaactagaaaaaaaagagattctcagcagtgaggcattatatttagatctgtatgcaaaagtccaagaagccaaaatagtatagtttacaaaaaatgaagggccatggaacttacgaacttaaggtagataaataaatatacaaattgtttaaagatggagagtgatttacaagtaggcagtatacattaatgttagagatac

SEQ ID NO: 457231 - DNA, 270 bp, Homo Sapiens
atccccgtatctctaacattaggatgagttttattatttgcagccaattgtaggatttttataataaactaatctatgccagttaaactccagaaataaatccagagtgctcagcattgcgtgtatttctctttgtttccagaaggttttgtggttgtgttgagtgcagctatagtataaaaaatactactaatattattatggttatttatgtcttataaaaacctcctgattggagcatttttttcagtgattataatgttagagata

SEQ ID NO: 457232 - DNA, 250 bp, Homo Sapiens
tatctctaacattaggatagatgtacctgccccagtttatcacaagttatggtgagaaccaaatgaagaagtacgtataaaattctttggaaataataaaacatagtttaaatgcaaaatagaaatagtagaaagtcaccaaagtaaaaatttaggaagctgatcactgtaggggtaaatagatcaaatgagtgttgtttgtttatttcaaaagaaaaggcttagaaggataagagtaatgttagagata

SEQ ID NO: 457233 - DNA, 308 bp, Homo Sapiens
ctcggtacccgtatctctaacattaccaaaaaaaacaaagcaacagagaaagtttcaacaaatcccaaaagaatatatcatttggcaaaacaatttctatccatattgttgttatattagaaatatatgaaaagtaaccctctccccagagacatatagaaatggaaactaaagtggaaatagaaccaagcctacctaaagaaaattgtgcatccttaatagactcattttaacaggaaagcctgaaataaataagtattcagcaagaaatcaaatgcaggctgtggctcacgtctataatcccagca

SEQ ID NO: 457234 - DNA, 211 bp, Homo Sapiens
acgtttctaacattacagtctacttaagctgttttggcacaagcatcacagatatttgaagcttacagaaaccagaacctctaagtcttttcatacctgctactgtttagccacatctctgctctgatcttctgttgctgctcaatagtttcctggacccaaggaaaagaactgacctactcgtcgaaacttcatctcactgttacagata

SEQ ID NO: 457235 - DNA, 458 bp, Homo Sapiens
cggtacccgtatctctaacattagcttgcaacaaggctttgttttcttggggagggaaagatctgttccatttcacttactgttctgaggagggtttcaaggttctgtgtttaaagtcaggatttacctgtctgtagaacataaagtgaacaaagtttgaatagtttagagtaagctagccttttgcacatttacattgacatgtttcttcttgaatttggactgttgcagcatatctatgatatggtattcagtgtcattagtgaaatcttatttttgtttctgtgaaaacaaaaaatacatatatatatttatgcattgtgaaaaatgcagtccatgatgtaaaattgtacatattccagaatccctaacaacctgtactaaatatatgtacaaagaactatgctgtctatttatgtttcgtttacataatgttagagaggggatacctctagagc

SEQ ID NO: 457236 - DNA, 324 bp, Homo Sapiens
agtatctctaacattaaaaacaaaaggatctggccctttatgtgtcagtaaacaggtaagaactctgccctcaactatgcgaccggcggcagtggcacaaagacagcataggggaatgaggagtgacagttgagtctactaaggttgaactaagggaaaagagctgaaggtaagaaaacaagctcttgattgagggataaaggtgaatcaagaaggcaaattggttttgtttagttaagaagattaatgagataaagtcaggaaaatcctatagttttatatgtacattaagtaattctaatgttagagatacggaccgcctca

SEQ ID NO: 457237 - DNA, 288 bp, Homo Sapiens
tatctctaacattatcatcatctatttttactctccagccataggacttaagctcaagtccttttcaaaataaacctataagccttccccatcctatggaagttgtaaactagaaaaacaacagatttagctggtctctattgggctagttttttatttcccttcttcctctatgcatataaacatttttcctcaatgaagcaagaaaaattgggctcatttattttataaattaaactataggaagaacaactataaagtattgagattaacctaatgttagagata

SEQ ID NO: 457238 - DNA, 550 bp, Homo Sapiens
  misc_feature (373)..(381): n is a, c, g, or t
tatctctaacattattagcttgtcttaaatccttcatgaagcttttctgaatattcagatcatactactctctccggcacaactttgaattcagcaatatactttttaaatactttaaccatatgctgcctttttctctttgtttaataagattataacttatcttcccatgatattccacaatgttgaacatacagcaagcagtcaataaataaatgcttgatattaggatgtctttctaatgtttgagatgtatctctaacattagggagtccccatgatactaataagctttcctagctgtgttaagagtagagatgtatcttcttctctctccaacacagataaacactttcacatctaaagctgcttnnnnnnnnntggtggtcataagagtgaggtttgttcagtatattgtggtagagcactaggaagcaatttctagtttcctagtcttggtttgccactatctgtgtgaataatcaccaacctctttgactaccagttgcctcatctgttaagagattagattcgataatgttagagatac

SEQ ID NO: 457239 - DNA, 451 bp, Homo Sapiens
  misc_feature (71)..(89): n is a, c, g, or t
ttgccccaggtaaaggtttggccaaggattcggaattggggtcgggtaccggatttttgacaataataccnnnnnnnnnnnnnnnnnnngtccagttctttttgcaagacgccattccttatatatctttccatcttccataatgcctacaacaagggtgaccacatcataaattattggtaaagatttcctggttatgccaagacagaaatctagcctgcttggtagttacatttctttaggcaaaataacaaattgactttctgctttgaattaggcatatttatgtcaacaggaggccaaatcactgctgggtgagtgacccactgctaggaagatgcccagacgccaacatgggaaaagcttggccaagccaatcaggtgctgccagagccttctttgtgatagcaatgccaacccatgaactaataccctcctaatgttagagata

SEQ ID NO: 457240 - DNA, 527 bp, Homo Sapiens
tatctctaacattattattttaaaaaccacttacattgaatcacttagctggtaaaaaactcttattacgatacatatacttatgttaagcagtgtgttctttttcagctgggtatgatatcccaacggcttgtgactattaaacaaggtctatttatgacatcaaaaacaaaaaccagtaaacagctagcatcaaaaagtttattacaactgtttttaaagtcagctatgatcttgacaaatattacgggtaagtctgtagcaagtttctaatttctgagatacaaaagacaataaatacagattaaaattcagcctacaaacaagattctacatctaattactggtactgtagcttagtttcaatatttcaaacatatgtataattcttaagatgctacaaaaactcatataataaagttattgttcactgacaaccaactaacagttcttcactgacaatatacaagtgtgcagtgccttcgagccttcggtgagccccccagggcctgctgggtgccggggac

SEQ ID NO: 457241 - DNA, 259 bp, Homo Sapiens
tatctctaacattagtaggattctgatggcaattactgtctcattcagatgaacaatataaagaaacaatgttgtattagcacagcctactactgtgaagaggaaaagagttaccccatacaaggtaagagatttcatatttattaacatcagcagcaatattataatgattttgaaaaattgcttggttgttttaggctgaagattatacataaaaatctgtctattggaatcatttgtagcattaatgtttgagata

SEQ ID NO: 457242 - DNA, 485 bp, Homo Sapiens
tatctctaacattactggtatatgctttggaaggctccatcacatttattttccatcataactcaaccaacaatttcagctctcccgtttgttagctaagcaactatcctctgaggacaatactgcttatctaataatagctatctaatactgctattagctgaggtttagagataatttatgtagaatgcctacacactatctggcccaataaacgtatgcaataatgttagagatacgtatctctaacattaggttatcatgatgacgtatgagtaaattcttaatggttaaatgtgagacagttcacatttattcccatagaaatgtcattctcatttgaattcagagatacttctttgctggaagttggaattatagctttacaccaaggagtgacacgtagactaatctggcaagccaaggtagtgtttggattgcaatgtcatgattctattttaaattcttaatgttagagatacgtg

SEQ ID NO: 457243 - DNA, 240 bp, Homo Sapiens
tatctctaacattaagtaatttactgtccctttggaaggtaatatatactcccctaaacaggaaaagtaagtttgcaagggagcatggtttatgtacagtcacaggagtagggcttgtaaaagattctgtagatattgaggaggaggtatgtgtgagacagagcatgggatttaacatgtatagtaatgacctgcttggagatggaaggatttgagccaagttttgtaatgttagagata

SEQ ID NO: 457244 - DNA, 649 bp, Homo Sapiens
cttgaagttgtatgtatatatctaatgggaaaatggaacaagagatgtcagtataattgttttcctattaaatgatctcataacaggggtgtttgtggcataaaaatcatagaatatatatcagtatcttttttacattttcctgatgagaatataaatttgaaatattctcagtaagtgattaaaagtacaatacataaacccaaatcaaagtaatgtgtttcttcagttatgtctgtgctgtatagaactgtcactaacattaaagaaagaggacacatttttcaagatctgtaatttcattgttgtcaaatttatttgtgaaagtttttcattaatctagcatcttgaacatctttttttggtttgggcctttaaaatacttctggaattgtattccctttcccttttataatgtgcgtgtgaataaatttaaagcaccaacttttggattttgccgcttttgtagttatcatcaaaatagtttacatttgttctgagcaaactagctattgaagatgttaacctaatatttagacttggtggcattttgagttgctatatgtgaactgcagcatatcatgtcgtcacttgtatttgtttgtggaagcagagtttgtataatgttagagaacgggatcctctagac

SEQ ID NO: 457245 - DNA, 598 bp, Homo Sapiens
cctcagaagggaacacagccctcttgacgcttgagttttatttagcccagtgagtcctgtctggaccttttaactacagagctgtaagagaaatttgtgttgtctaaagctacaaagtttgtggtaatttgttatagcagtgatagaaaactaatacagccaccttaaatgtgcatacttcaggccccgcaaaacttttatcttccgctgacagggaatataaagagtacaggctttgaagttggaaaacctggtctcgtaacttacttgctgtgttactgtaggcaaatcgctgaactcttccaggccttagtttcttcacaggtacattggagataatacctacaaacctgatctattgtgcagatcaaaagagaaagtgattaataaaacttggaaagtgctctaaaaatgttcatgtgtcattttaagttgttaataaagagtattagagtgactaagtgactccaagcttattagctggaaaaatagaagtaggagagccgattctctgggacatgcctgtagtcccagttacttgggagactgaggtggggagaattgcttgagtccagcctggattccattggggggggat

SEQ ID NO: 457246 - DNA, 360 bp, Homo Sapiens
  misc_feature (88)..(96): n is a, c, g, or t
tcatatttatactcatgtaggactttggggtgggttttcccccccaatcaaaagcactattttttcaaagtcctcgtatacatgtaannnnnnnnncccccttttagttacatgaagaaacctctaggtccaccacctccatcttacacgtgtttccgttgtggtaaacctggacattatattaagaattgcccaacaaatggggtaagttcaaagcagaaactatggtatatcttactttttttcctttggaattgttccttagctatcttatttttcttgggtaatactgccttctgtagacaatggcaaatgagcatggtctctggagccaaatttgccaggcttcaaatcttggtt

SEQ ID NO: 457247 - DNA, 608 bp, Homo Sapiens
ggatcccccccctaatggaatccattttatgcaccccaatacctatgttgctttgttacaggcaaatggtgctttcgtctctcaggaccccatgccctgtgctggcacagtatgacctaaagccctaaacaccaacgcttatgtgcaacactgctcaccaagggatatctcttgacctatgctcccaacacacaaggcacctgcatacaaaggtcatgagagtttgtgggttgtatgccactgatgtcaaagcagatactgttccaattagaggaaggattccagaggaggaagcacttaagaaagaaaaaaacataattgcctgccaaatccttacacgtggttagcatgaaagcaattagctcttgcctaattgaaatattggtatgctgagcattcgtgttcttttcacattccaattctgattcctgaggtacttaaatcactttggtattcaccacagttgcgtatagcacctgagaaacattttctaacactgaatgatgcatgctattcttacatttgtatgtatgtaggactagatgtaacaagcatctataccgtcagtagagcataaattatgtgcggattccattggggggatcctt

SEQ ID NO: 457248 - DNA, 477 bp, Homo Sapiens
tcctgttttacctagaatgcattccagcctcacctttccgtacctttctcatttcttcaatatgagatagtgagaaagagcaaaggcttctggagtcatgcatcttaggtttaagtccctgctctgcccttgagctgtgtgatgtaggacaatttacttaaccaattagctttagtttcctcatctgtaaaagtctctgcacccggagtataagcatattaataaggattttttgaataccaaagtcacatatctaagtatatacatctcttatgtcagaatttgaggtagctgacagatggggaaattgcttttggaggctgagaaggaagcctttcgatcaccattcagattgtactacactggcatgaatttgtgaagttgacccttggggagatcagataagttggaattacagtccttggccagatccttaatgagatcagaacgccaggtacttcccatgcacgaccgttg

SEQ ID NO: 457249 - DNA, 519 bp, Homo Sapiens
  misc_feature (54)..(345): n is a, c, g, or t
agctcgcaccctcaatggaatcttttaaagctcattatcaaaaagcactatcannnnnnnnnnnnnnnnnnnnnnnnnnnnnnnnnnnnnnnnnnnnnnnnnnnnnnnnnnnnnnnnnnnnnnnnnnnnnnnnnnnnnnnnnnnnnnnnnnnnnnnnnnnnnnnnnnnnnnnnnnnnnnnnnnnnnnnnnnnnnnnnnnnnnnnnnnnnnnnnnnnnnnnnnnnnnnnnnnnnnnnnnnnnnnnnnnnnnnnnnnnnnnnnnnnnnnnnnnnnnnnnnnnnnnnnnnnnnnnnnnnnnnnnnnnnnnnnnnnnnnnnnnnnnnnnnnnnnnnnnnnnnnnnnnnncaacaacaaaaaatgtatgcaatcttttcactgaagatttctctcctcatttcttgtatcattttttgaattttttaaaagttggacttcacccttctctggtgcctccttgattagcttaataatcacccttctgaattattttcaggtaaatcagggatttcttcttggttt

SEQ ID NO: 457250 - DNA, 240 bp, Homo Sapiens
attaatttttttgcagagttgtcagcctttttccatgggggaaaaagaggttttgatacaggctgaccaggaaatttttgccaagggaaaatgcctctcccactcatgcagttactgtagcagagactgcccttctccaggaacttccttattccccattggaaaggtcatggcggttccagggtccttttcatggttttctttttcttgctactacttcccagtaggattccattgggg

SEQ ID NO: 457251 - DNA, 468 bp, Homo Sapiens
  misc_feature (120)..(133): n is a, c, g, or t
aggcatatgaaaatttaaaaagctaaacatcactaatcactaggcaaatgcaaatcaaaaaccaaaaaaacagaattatagagtagaccatctcttgtgtctggctggtttctttcatannnnnnnnnnnnnngccacatgatattgaaaggacacatagcatcctgttcatcaggatgtccagcttcagagccagcaggggccaggcaggtgggtgaatgagtgacgtgtgtgaccacaggcatgtcccattggcccattgaacaccctatctgaaaggggcagcggcactcagctccgtttcctaattcctgctgtttaaaggatgaaggtctaagttttcccattttcttccagagaaatctgaaatcccctaaatttagattttgacagagaattcaagaattacaactgtggtgtattttaaacacatttttggactggattccatggggggggtatcctcat

SEQ ID NO: 457252 - DNA, 417 bp, Homo Sapiens
cccacaatggaatccggtcaaggacaacacattaaaattgattgttttgcctctacagtgtgtttttttggttttcatgacattgactttgatttgaataggtcagaccatttcatgtactttataaaggcactttgtagatttgtctgatgatttgattacttcagattaaacattttttaaagattctggtgtttttattgtaggaagtttttttaaaacagtaattctgcaaaaaagcaaggtttgccatttgtattcagtcatattagtagcaagacgactacagatgcatacttggatgataaaacaagtttaaaagctcaagaaaatgataactataaaagccaggaatagtgattactttttagaggaagggagggatcatttggggggggatccttagagtgactgcag

SEQ ID NO: 457253 - DNA, 590 bp, Homo Sapiens
ccccaatggaatcccagttctgaaatttgtcagaattgtgtttatagacagttttattacacatcttcttcccatctattaatattccaagattttatgtcatttcacgtataaggaaagcattaacatttactggtcacgtatcatgttccctcataagaatcttctatcaggcagggtaggtatcattattcaaactttacagatgatgaaacaggctcacagttgacaggtaattttttcagaaatcacaaagtcaaattggcttctggagtctgctgctctatcatgatgcctccatgtcaccactattaactttgcctgaaggaaccatgacttgcagtttctaccccacgtggtcagtgaccatgaatacaaatgacccttactccaggtgattctgaagtttcaggaaggatgacagattccccgctaaattttgaacagtaatattaattacaagtaataaaatatacctaaagatcactacaaataatttagcattacgttaatcaagaggaatatactgaaactgtcagtatcttggaagggtcgagaggatagtgtatcatgcttggtaatggattacc

SEQ ID NO: 457254 - DNA, 414 bp, Homo Sapiens
acccccaatggaaccagagagctcagaaaattagaatcattttcatacttcatttggtggcaaaaccagacctgagctaacatgaagttatttattatcttattctcactttgacaattcatttaactattactgcttattatgggatatggtttcagatcttgcttattaggatatatatggtatatacaacttaacaccattctctaaattatcaaaaaactttgaatttcaaaacatgtctgacctctgttctagataagggattgtggacctgtatcctcatttataagcaagggaaccaacgcttctggtagtgacataaatcacctaaggaaaagcagctaatatggagcaggggtaggattctgtcctagacactcagagagattccatttgggggtaccgacatga

SEQ ID NO: 457255 - DNA, 409 bp, Homo Sapiens
atgtatttgcacttttcaacactgaaatcaagtggggaaaattagtcaacttcagtgtaatgatacagaagattataattttaccactatatactaggcttgggaaaactcctcacctattcctgtcaggtctgcagaagagtcagacttagaagagtcccacttggtagaaaagcaaccatgaggacagccttgggtggcatatactaatgccagataggctggactcaaaacctaagattggcccttctcaccttctccacttaacattccttctctcgtttccttttatttgcttaactttacattattacatttagtgaataaaaaattagaacaaatcattggattaaaattagaactattttgagaccattcttgatttcttaacaagggattccatttgggg

SEQ ID NO: 457256 - DNA, 618 bp, Homo Sapiens
ccccccaaagggaatcctaaatagggtgtctccactaatatttgtaaagtttatgctaaacatagcaagactgatatttgtgacagcccatagacacatctgctctcttaagatgtacaatgtttcacaggaattttaaggggtgttctcgtttatacatttggcagttgtgtaaactttggtcctaggaatagagagagatatgagtctccagggacagcataaacaatcaaatggtaaagaagagaggccatattttctttaacacccttaattccatcctaatctctgctcttgggtgcttatacagcacatgatttgtaactgtagtcactgtaaattatcccttactgcctctttgatgaggaagaatgattaacacaatggaatgttggaaggtttaaagtctacacctcatctttctctggtatctcttgaatttacatagtcaggtaggagttaaaatatagtcatcttttaaaaaaatctctccccttttcacttcacagttctttattttatccatatactcttaagtgcaactgcattttcttttgccttaacagttaaagaatcccagcagggaatgatcataggctactctggattccattgggg

SEQ ID NO: 457257 - DNA, 387 bp, Homo Sapiens
ccacaaatggaatccaaacgcagtaattacttgatattttgagaaatgggttgggaaagtctggagcatgtggcacaacctagggagggttttgctatgttgataacctcagcaaaggtgactgggaagatgcacacagccagggaaagaaagcctcagggcaattaaaatctgcttaagcagaccactgaaagaaaaaagtgaccattaggccaagatatgaagttttagagatctttcatttaattcacagttttgcctgagacaggcccagattccttccttcctgggatatgagtcttctctttcttttccattttaatgcaatatcacttctgtcatatgtcagtagtaccagggattccattggggggaccgacactgact

SEQ ID NO: 457258 - DNA, 670 bp, Homo Sapiens
  misc_feature (549)..(564): n is a, c, g, or t
cgtgtaccccccaaatggatcccatgtgaaggctttggctgtggaaaagcagaaaaccttatagaaaaaaaggatattttaataagctggctaatcctctctagccatacctctttcaaatggattttaaaatcaccatgtaattatagatggagtccaagtcagagcaggaatgtgaaatgcctgcaagatgctccatataggcatactctccaggaggctgtaaaagaagcacagtttcaacttttggagaactttgaaaagcaatatcacagtcagtttttctgtgggttaccacagtctttcaactcatgctaaaggaaggagcattcagccctgactgagaactcatgagttagaaaaactgatatcagaaacccaaaagcagcaaaatatgtcagagaaagtgacaattcaagccacttgcttcttgtagatatctacaacaaagaaaatatgtttgtggcatttcataaaaacaccagctaacttaacattgctggcaagcccaaaagaaaatatacctgagggtgtgctaacataaacttnnnnnnnnnnnnnnnngtgaggaccaggaggatgctttaaatacactgacatgattttccttgtgttagctttcaagggcattattggaagctcatattacctataatacattattgtcttt

SEQ ID NO: 457259 - DNA, 373 bp, Homo Sapiens
ccccaatggaatcctgtatgaaggattcttttaggcacgtgtgtggtttgcttgccagggagaggagtaaactggcatcttgcaatagaagacaagtttctaagtgttgacaatagctagtgcaggaaaatgagcataaatggcaaagcctctcagtagtattataaatgacaggtcactttcatagtctatacaaaattaggaatgcacccaaatgctgttactaaggcctgttaatgcactcaaaacaacaaggacactgagataactgtttccgattctctatataaggcaggcattgaataattattttttgatgatgaggatgtttggcctaggaatgcaattcacttagattggattccatttgcgg

SEQ ID NO: 457260 - DNA, 425 bp, Homo Sapiens
cctgcaattaacctctcaatcactgaattactacccactgtttataccctttaagtgataatcagtccatcaatattttaaaggacaataatcttctgataaaactctagactcttacattaatcaaagaaaagtacagaagaagataagatttactctttctcccccgacctttactggacacagtatagaatagaaatcaatctatttctcagcatgccattgtcctaaataacagctgccattcttagagaagataaactgaacatgtcactcctaagcaaagtgaatgtacactagggaaccaaagcaataatgcagtgtagaagcaacaatggattctctaagacttggttccaatcccaactctgcctttaaacagctgtgtggatctcaagcaaatccctttccttgggattccattg

SEQ ID NO: 457261 - DNA, 500 bp, Homo Sapiens
cctcatgcattgtctcatggcagttaggaatcataatcagatgacctgccttccagacccctccaaaccagtttctttacactactcttcaaaaccaagcaagttcatttatctttgctaaggatttagttcagtcagggcttcatttctattttggattttaataattatcttgagtttgtagcagcagtatgataaggagtgaatttgaaatctaggctatgaatgtttattgtatttcttacagttaactcctttaatctctctgcttcactatttttataaaaaaaggccaataactccagagtgcttttgaggattctggtacataaaataatacaaaggtctatatgaaaatgttaagttagtaacttaatacttctaatttgccaggaatttttaaatgtcattatatttgaataagcaaataaaaagacctttagaattgtaacccacagccatccttagacatggagacctttgctaggattccattgggg

SEQ ID NO: 457262 - DNA, 527 bp, Homo Sapiens
ccccaaagaatccaggtaataagagtagaaagaggtagttgttggtgagcacattccttctctgtaatccctgtctactttgattcagtatgtaaagtaccttacacacagtggctacttgaaaagtgttttctttcccgtctttctactgtagcactgtatctttatgccttgtatagcatgcttcaaaagaggcacaaatcacttcccctccttggttgcctcttgaccagtattaagtctagagactgcatagcgagaaacatcaaattacaggtcataggtgatgggacttctacaggggcgatggcttataaattgcagagccaggacttaaacctgggtctcctgactttaattccagtaatcttttaaaatattgccctaccttttgaaacctcacagtgatcctgcatttattatagagtcattcagttgattcataattaatgcttcaatataattagttgctcataaattgataggtttcctgagcctctggggggattccatactggggggggata

SEQ ID NO: 457263 - DNA, 532 bp, Homo Sapiens
  misc_feature (448)..(473): n is a, c, g, or t
atggaacaaatgaagctaaaggagctgaagatgcaccagatgctgacacagccattatcaatgctgaaggcagccaagtcaatgctgaagagaaaaaagagtatttcatttaagatgcaggccaagattctgagttttactaccaggctgaatgctggagaaaactggctatcatctttcagaagtcatttctaccatcgtctgctacccttattaactcccatactgtactgctatcagtagccagtgtataccaacaatcagctgttgaaagcatcattctttaattactgtaccatccataatgcaggacatttcttactgcctaaatttcacaccattgctcttttaacatacagtgcttgaatatacagccttaacaatgttaatcatctccttggatcattatattgagtggtttttatacattaaaaaatgtatgcagagnnnnnnnnnnnnnnnnnnnnnnnnnnaagtcatagaccttatcagttgccattggacagcggtcactagcacagagttccattgc

SEQ ID NO: 457264 - DNA, 334 bp, Homo Sapiens
gaatcatataagtagtattttacttatactttaacacatgtatgagtaatattggtctataatttccctccctcacctcctcagtattatatttattctgtagttttgtaggcaattaggagctactgaagggttttatgcatgggaataatcaatttttttaaagaggaatacatcccttgacatactgtggaaaataaatagaagatgagactggtggcataggtttttaaagatgccattgtaataataaaggtattagttaatgcagtagtaaattcaagaagtatttggaaataaaatgagcagaaattgataatcatatgcatgcaag

SEQ ID NO: 457265 - DNA, 515 bp, Homo Sapiens
tggaatcccatatcagagcctggatgcccaagggaagggcttatttcacctacgtgatagcacagtttgtactcaggcacttgagaaacaataatttaccataattgaaccagccacaaatatttattttgttaaatcagacccacaataccagcctgtctgtgctttgctggctagaaaatgtcctcatgagtcttaaatttatccttaaaatatatttaaaaaaataatcttaactggctttacctgtacctagttcaaatcgttttctctttatgcacggtgaaatctcaatgttggttactgtttctgcacatttccctcgggatggtggtttgtgagcatacctacctgtgctgctgtgttgcgagcctcactttgctcacctgggtttccccaagtgttgtgtttcaccactgggaggaactggccactgctgtcacctcaccacctaccataaggcctaatatatgacatatgtctaatatatatttgttgcataagtaatactctgg

SEQ ID NO: 457266 - DNA, 570 bp, Homo Sapiens
tctagagtatccccccgaaatggaatccaggtagtatactgatagatttcggactcatactcaaattcacaaagttttgaaaagtcattgtgaatacattaagagaaataacagaatctgacctgcaaagactgcagattttggaattactggattagagtattcaaagacacacaaaattttttttaacaactctaaaattcggatgacagtgcagcattaaattgacacaaaatgatgtgtttttcagtacttgatggcttagatttattgaaatacagtatgtgtaaggaatgaaagaatatccaaagattgagaaggaacaagacaaaaaatggtgggggtggaggataagcaagagcatatgacaagaaaaataagatttggaaacagtgaaacatctagacatgaaaagcaaaacagataaaatgagccagaagaccaagatgaagaaattatgtagaatgtatgaaaactcaacaccagggacattttgaaaggtcaatgaacatcttatagactaccagaaagagatgatagaatggtttgggattccctttggggggggat

SEQ ID NO: 457267 - DNA, 511 bp, Homo Sapiens
gtccccccaatggaatgcaggttgactaaacaagatgcagtttagagattctctggctttaccttgttctactttataataatcctagatggtttgcttatgaggtattaaaggagccaatttccatttggactcatcacctgtgacagacattttggggggggtctgactttaaaaccaggtggcattagaattccccttgcctatgataggaaagtacattattaacctgccacctctctgtaaccctccaaatcagtccaggcaaagctcctttctccttcacttactcataactggccactgtccaagagctagttttaaaacctcaaaaactatacacggtttttattaagaagctgtatttgcttcttgctgtgaatgtttatacaattaatacatactttgaattttttatctctacaaaataaaaaataaaagccaggcatggtggcatgcacctgtagtcctagctacttacggaggctgaggtaggaggattccattgggg

SEQ ID NO: 457268 - DNA, 357 bp, Homo Sapiens
agagggtggaattccaacttcgattcagacatcaaagccagtgtggccacacttgatctatctcatcttctttaatagacttaattcttctcaaggcaggtcaagattctattatctttggtaattttatctaattcattaatcaagaacaggattttctacatgagtaatatgagtaataataatatccatctatgtgctaatcttctaattattttacacatattacttcttttcttctatgaacagcctatcaggaaaattgctggcaacattttagagatgaagatactgaagcacactgtggttgagcaacttgcccaaggctcgcaccggcagaagggtatatgggagatt

SEQ ID NO: 457269 - DNA, 428 bp, Homo Sapiens
agccggtcccccaatggaatccagtgaatattcctttcatcctcaattacaatttatagaaagctgagatctgtttattcatgtgtcaaggcgaagctcaaataccaccttttatccttccctacctctggacaacttcagtctccccttttcccatcctcctgaaagtctatcaaagtcattaccagaatcttccttaatctacagcctgtgttggtccgtgctcattgttcatttccctccatgactgaaaccacagaactcttccctttacttcagtgaggctctgaaagccttgagacagaaactccttaactttcctttggcactgcctactagttcacctgtccctccttgggttagcctccccgtggagtcacaatagaagagttctcctcttcctgaggattccatttgggggaccggct

SEQ ID NO: 457270 - DNA, 249 bp, Homo Sapiens
ctgctgaagccatgtaatttccaacataatcctattagtattgccatttgtttgttgggatgcgtgttttttccccatagttgaatttcttcttttttgtaagtaatggtgatagcagtctgtaaagcttggacttattaaataactggctgtgattaaatccttagttgttttgcatttctacattttgcttaataactttgacaaataatgtatttgatttggaatcattcgcccaggttatgtcat

SEQ ID NO: 457271 - DNA, 356 bp, Homo Sapiens
tgtctactactcggtcagtgccagtggagagcagggggtcatatgacctctcccctttctggatctttctctcatactcacttcctcacaggtgcaagaggtaagaaaataataaaatgaatttccacaaggcaaattacaagtggcacttttagcacatgatgtatcatatggagtatcgagagacacaggagagaagatttaacaccttatttcatctacggtggcacagcatgtagtttagagcattactgttgaattatctgaggtgaagcaccacttatctccaatccatcatgaatggaaatgtgttcctacagttcctgactcatatgtagctcatgtcccatgcaatt

SEQ ID NO: 457272 - DNA, 826 bp, Homo Sapiens
caatccacgggatatgacagcagtgagatcaccagtgagcagttttagcggcatgagcaggggacagagcccaggctaaagtgtctggggcgtgtgcatgcagtcaaaatgctaacaataaatggggacacgctttcaagaagctttaaagtatgtaatatgtaccacataagtattacatatatttatatggataacatgtaatacagaaatatcaaagtatacctgtataacacataacatataatgtgtaatacataaacattatacataaatattaacgcatatatagtaaaaggtgaaatacaggagaaataaagatttaagggttggaagaaatgagatccaaagcacagatggacaaaattagccacggacaggaatttgcacttttaccactgggacaaaaaggaggaatggctacaaatagaggtaataataggagagtaataacaaaagatgagaaaagaaatcaaagaagcttaaaacaaatggccttgattttctctgtgaaggcatgcaagagtggagaagggcttccagttcaagtcagtggacaaagtcgtgtaaagaggcataaatgaaatattcataaaagccaacaagggctggtggacaccagcagacccaaagtgttgatgacttttggaggtcgttattttgataactcttagaagacggattgtcagctgaatgtgtaaaccatacaaggatgccaaattaaactttcatgcaccacttctgaataaattaaagtactaaagcaaacaaacaaggaacaaagacagacaacaacgtggctgacgacagtcacaagatcgccctt

SEQ ID NO: 457273 - DNA, 376 bp, Homo Sapiens
taaagaggtgttttttcctagctgtataatcaaacgagatgtaaaaaagctggaacaactcaaaaatagcattgggctgtgggtagcctagacctctatgtcaagttctagccttcaaagcgtgagaggggacaacattgggaggacagctcatggatctagagcagactgaggttattatgattcctcccaaaagaggatagaagcgctgaggcgctgaggatgtacctccatttgaaagcaaggaaaggcaggacttgtagagcctctccctagctggtacaacttgtgacagatgtgtgcctgtgccagacctcagtttatctttctataaagcaggggtcatgccctccacatgcgtctggaagtaggcagg

SEQ ID NO: 457274 - DNA, 440 bp, Homo Sapiens
ccccaaatggaatcatctacccactatccactcactaacttaacaccttttttgaaaattatttgtccggtaagtgttatttcatcaatgtcactctgtcatgatactgtaattttatagcaagaattgaaatcagcagttcttttaaatttttttcgactatttgagtatttttcctctccattaaaattttaaaataagtttggtaatttcttcaaaaattcctcaggatttttattgtgatttcattcaatctaatttccctttgcagtacttgtagtttttcatataaaggtctttcacaacttgcatttgatttgtttctgaatatttttgattgatgctattttggagttgttttaagtttttactttccaattgtttgctgccagtttatagaaatgcagttgatttttgtatcctgcaacttttcaaatcac

SEQ ID NO: 457275 - DNA, 408 bp, Homo Sapiens
cccaatggaatccaacacactgggaggagaccatctctttttaataacagtcatcgtgaatcagccataggatctaccagatcagcaacttgttttgaacacggacactcccagggctcaaaacctgggcaaaaggccaatagtttgagacctaggttacaagtctgttttccttaaaagctttgagaaatagtcattaatctacttccatcctacataatggctcatttaaagctattaccctataagttagagaaatgtctgataatgggaagaatgttgctgttctcaagctaacacttactgagtgcattccatataccaggtagccaggaactaccctaagtgatacacacatactttttcacttgaatcttcacaaccaccctcagggggattcctatgggg

SEQ ID NO: 457276 - DNA, 451 bp, Homo Sapiens
catgtcctttagtattctttggagactctgcctatttccatttattcattttctatttaatggctttgtttttcttgcttatacatgtctggccaaacacatccagaaaatacagaaagctatgaggaagaaaattgttgtctatgaccctgctgctcagaaataactacagttactgaattggcttgtttttgggggatgacaaacttaaaatcacacccgcaacccccttttcagtttcttctttggagctaatcagtccatgtgagcatggtttgtttaaggtcaggaattctctagaacctccagataagggaacagagattgcttttgggcttgtgagagttgggcagaacaaacttactttttattttaaatccttttctactatttattatgtttttaaaccattgacatggattgccatctcggggggatactctagagacga

SEQ ID NO: 457277 - DNA, 485 bp, Homo Sapiens
  misc_feature (69)..(128): n is a, c, g, or t
atccctttcctcttttcccagttccactgttgttatagtgctgtaatcttggaggggttgctggttcannnnnnnnnnnnnnnnnnnnnnnnnnnnnnnnnnnnnnnnnnnnnnnnnnnnnnnnnnnnaaacgaggaaatgtatgttaagtccttaatcagaacctaggaagttctcaatgaatgatagccatataatttaggttctcaagatgttttgcttttattttaatggataatcttgcatctctcacatttcttttgtataaagccaccaaatatttgtatctgacatgatgatgtccatccctacactgctacccttgcatctcattaactcaccccaccataatcatccaacctagtgttactacagttcttgtcagagggtatgtacattccagttcttgtcagagggtatgtacattccataatgtttagtaaacggatttggataaagctaatatcttcccgctctcacctgat

SEQ ID NO: 457278 - DNA, 537 bp, Homo Sapiens
  misc_feature (144)..(354): n is a, c, g, or t
tcgtctctagagtatcccccccgatggaatccattacaaatattttgagtctcaacccaatttaaagacatttgtatgtcaagtggtatgtctaggctactgttttaagtagcttctgtagagagtgagcagtgaagagtgtannnnnnnnnnnnnnnnnnnnnnnnnnnnnnnnnnnnnnnnnnnnnnnnnnnnnnnnnnnnnnnnnnnnnnnnnnnnnnnnnnnnnnnnnnnnnnnnnnnnnnnnnnnnnnnnnnnnnnnnnnnnnnnnnnnnnnnnnnnnnnnnnnnnnnnnnnnnnnnnnnnnnnnnnnnnnnnnnnnnnnnnnnnnnnnnnnnnnnnnnnnnnnnnnnnaagctattgttattatctttaaaactcataagaaaatagaatgggttgacgaggccatttccatgtgcatatctgcattagataactgccaaaatgatttctcttgtcagaagtgctgtatgtgcaagtgcatatctgaaagtctccagttgggattccattgggggtacgagctcgattata

SEQ ID NO: 457279 - DNA, 374 bp, Homo Sapiens
tgtgctaaaaggtaaacctggaatattaagcctccccttctacggttgttttgacatacaaacatgtattctgaagttagtttaggagatataataaagaaaataggaccaagaaattcagtaaagtagataaagagcagggttggataggctagaaggaaaaagggagtaggacaaacttattaaaggagatgagagcagagagcagcatcaatataaaaatcacagactaggtcacaggtaaaaacgcagaaaggagaaaagagatggtagcaaagacagggttctgtagtggttaagtacacctgaggacagattgctacttttaaacctgacagggcggcgcgtggctcacatctgtagattcccttggg

SEQ ID NO: 457280 - DNA, 118 bp, Homo Sapiens
gttgataactcttattttcatattttatactttaggaaatcttgttggttcatccctcaaaacatagccagactcaaataattcctcattaacttcacgaccttctccctctaggatt

SEQ ID NO: 457281 - DNA, 425 bp, Homo Sapiens
  misc_feature (13)..(13): n is a, c, g, or t
  misc_feature (46)..(46): n is a, c, g, or t
cctaagattgcanagaaaatattttaagggcaatacaagcttacgnaaataaaatgttttctttctttttaaaaaaaagaataagacaactgatgagtctaaataaaccactaggattcccactcaaagaccacaattaatctgatactatgaatccaggatctacggacttctccagtaattaacttgcagaatcttttaaattgtccctagaaaaccaaacaggggaggcagaaagccccaactgaaaatcaggcaccatgtctcaccaccggagggttgtcacccaaccaaggatccaagaagaagacgggcctttttccacccttcttaaggctattgtttagggaacaaaaacacttcccgagtccacacaaaatcttaattgagatttattctgcccggcgtacaagtataagggattc

SEQ ID NO: 457282 - DNA, 400 bp, Homo Sapiens
tgagccactgcacccggctgaatttgaaattttttaaattttaacttttttgcagaattagaattcatagtgttaatgattagtctcatattaagctgtgtttttattattgcgaaatgttggtgttgaatgtcacttttgaaatggatatactaatgcttcaatatgtgtctgtcctttgaaatccatacaagtatcatttctaatccaaataagctatttttatgagtttgtctgactcttagagatggagtgagtttcttacagtcacatagatacaaagtggcagagagtgcataatttcaacacagatccctattggttataaaatctcatatctctgccggatttcattgcaaaagacttgcttgttatattattgaagttggattcctcgggg

SEQ ID NO: 457283 - DNA, 390 bp, Homo Sapiens
ccccaaaggaatcctttcacagagaaaataggtctgaaagcctttaaactgtaactccagactatacaaaattatctcattttgatattcagaacaacggaaggcatggcatttagacgatgcgctgataaatcggctgctccacagagcaaagacggctttcatttaccaacgtgcatctgccgacaggcactgtgacaccaacacgggattctttcgctacagtctctcaacatgagacttcatgaaaggagaagagacctccttcatgttttcggagcattaagcttctggtgcagttcgtatgtcactccaccttagcgagaaatgagctactgccacatacctgtttatcacaccatttctaagcattttctctttacagcctcc

SEQ ID NO: 457284 - DNA, 386 bp, Homo Sapiens
  misc_feature (109)..(109): n is a, c, g, or t
  misc_feature (136)..(136): n is a, c, g, or t
aacaccctgcttaaaaactttttcttttccttttatgtgtgagtaccgtaccgcattggacgtaaagaagtgtttggtcgtatgttttcgttaatgtttgggctacagnagtcttctacctactatcttgtgtttntgtgttattggtaacctacatgtaacagcgcggtggaatcttttttctctttgctttctctgaactttccaaagagtaggcccctatctctcgggggattaactcctcgtggcccctgggtcgttggtgctcccccaccctgtgtcagcatctaaacctctgcacacaggatgttttctctagcgcttatcagatgctttagaagatgcggggtggagatagagtcacgcatgacccatcctgattaccg

SEQ ID NO: 457285 - DNA, 412 bp, Homo Sapiens
ccacccccgatggaatccgtgtgatatttagcattaatattttatttgacacatacagcctgtaactactgctctctttcaaaagcaacgcttttcagatttttataacagacccattttgttttatgaaacatgttcattacagaaacatgagaaaatagagattagtaaaaagaataaaagtcactattatcctaccactttgcggggcacactattaatatttaagcatagattcttccagatgttttgttttatacagcagtaggattgtgtaatgtattctctcttgtagcctattcttcaaagcgtatcttcactttccatgttaacataaatgtccttttatgattgtctaggattccatggatggatggaatataattgagtcatctggtagagcgcatatagg

SEQ ID NO: 457286 - DNA, 466 bp, Homo Sapiens
  misc_feature (418)..(418): n is a, c, g, or t
agtgttctgtgtgcacatttatttctttcaaagattgtttgtgttccagccacatcttctccaaaggaacccacccaagcccgtgtgcaggcttgctgcagggctgtcttcggcgtttaaagtgctactgaggaatacaatcattgtcacgtaagttcatcaccgcactccagcgtcaggccaaacctttccgtggacctggaaaacctgccattttcttctctttttacaatgcagtttcaacataacattggtagagtaaacaacaaaccacaagcctaaatgatgaatggtgcgctgctgcccagctgctaactgagagaacgagggcagtgtattgtgtttcgaatgcaaacggtcatgggacccaagttaacctgagtttgctctgcaggattccgcgggggccttgcccgtngcaggctgctttggggtttcgtgtctagggcggtttgggggcagtggg

SEQ ID NO: 457287 - DNA, 647 bp, Homo Sapiens
ggaatctgcattttaagaatattgtgcactgtgatttaaagccagaaaatgtgctgcttgcatcagcagagccatttcctcaggtgaagctgtgtgactttggatttgcacgcatcattggtgaaaagtcattcaggagatctgtggtaggaactccagcatacttagcccctgaagttctccggagcaaaggttacaaccgttccctagatatgtggtcagtgggagttatcatctatgtgagcctcagtggcacatttccttttaatgaggatgaagatataaatgaccaaatccaaaatgctgcatttatgtacccaccaaatccatggagagaaatttctggtgaagcaattgatctgataaacaatctgcttcaagtgaagatgagaaaacgttacagtgttgacaaatctcttagtcatccctggctacaggactatcagacttggcttgaccttagagaatttgaaactcgcattggagaacgttacattacacatgaaagtgatgatgctcgctgggaaatacatgcatacacacataaccttgtatacccaaagcacttcattatggctcctaatccagatgatatggaagaagatccttaatcactggctaacgtgaataaggaaggattccattgg

SEQ ID NO: 457288 - DNA, 382 bp, Homo Sapiens
atcccttgtgggtatcacatcaatcttgaccaattttctaccctccaagtcatgatcctaagaacagcttgcctcccatttctccggtttgtgctattatgaaggccttattgtttcagccttcttcaatcttgagggttgttgtcactgtatgggtggttcagaaataagtaggtcctgttactatgaagggggtcacagcttttgttggcatagctaaactttgtggctcatggaacagtatgaatgcagaatgtagctttctccacttgtggactgctttgcatagctgccagaggcctccagagaagaccttcagggctttgtggtctttatctgtagcccgatagctaatatcttgtgattcatttgggggaccgcc

SEQ ID NO: 457289 - DNA, 367 bp, Homo Sapiens
acccacgagttttgaaagttgcattccttatttgagtaggaactctctagcccaactccattctatgttctcagctccctccaccccccaaaatacatcagactagcaaggcagtcctatgtttacaaaacgagtttagattgtcatttcattccataactcttaataatactcaagttttatacattcacgtattttaaatgctcggtctgtagaagacactaggagaattgcattccaattactggatggttgctgctctggctttttagaacttgaaattaatttttatttagagcaaaggaggaaatcttttaagaggctaaaatcatgctgctattattgctgtgaaattgtataaagatta

SEQ ID NO: 457290 - DNA, 739 bp, Homo Sapiens
gaacagtagggaaaagcccctgggtctcgcaggagagggtaagtaacagcggcccacagggcacacagatttgcccgtgtgccattatccagaaacagctcatctctggaagtgatcagaagaggaggtaaaatggaatcgaaggagagcgacccggaagggctttacttggccaagaggcaaaggcctggctgtcacacgtgaagatcatgcacccatttctatcaccacattttcatctacactaaatgttctggagggagtgggtgaagggggagggaagggaagctatgtcacttgtattaactcaactgacagtgtcctctaggacagaaagtgccaaggactgcccctccctggccccagtctgaactgggcgctcacggctcatgcgtttcatgcaagacggcaccagccacagtgcatcacagcctgatttaaaatgaaaacgatgtgactcaaagcctccttgcctgtttagttccaaatctgacacagtataattagtagaaccaggaaaagaaaaaattaaatagtttgaaaatgatataagttaaacctctatagttaccacagatttattcctacagcatttctaggttttggagtattccacaccactgtctttttatttttcccaaccacatgtaatactgtgcttcgatggggcttaggttctcactaatgactgtctcttcactcgacctcattttatcctctagagtcagctatgagcata

SEQ ID NO: 457291 - DNA, 373 bp, Homo Sapiens
aagaaaaaacttgtgtaagaccaagatctataagagagagaatgatccattattgagtcaaagatcaatatgtagctggttcaagtacaaaggtaactttttttccacttctaattttcataatttacatatttaatcagagctatccaaatatcacccattacaaaccaacgcttaacgtggagcttgtttcagaatatgtgtgttaggtagtacttacattgtttacaaggcttggtcattcagaacaaaaatgtaatttcaaggtaataagtatgatgttgcagttctataatctaactgggtatattcataaatgtgagtcagaaagtcacaccttagtttaacggtactacttctatggccgcgctac

SEQ ID NO: 457292 - DNA, 372 bp, Homo Sapiens
atgaaagaagaatgtgaagaacagaagaattttattctgttaaaaaacagaattgggtttaaaataattttctaatgctacttagctcttttgtcaaaaagaatgcaggtagttgtgtttctgtttgggagatatttctgaattagggatttcaaatgcctaagaaatgaggtgtttttgatttgtggttttgtccaaaagaaaacagattccacaaatataaacgcgtagtaggtagcacaagttaaaaaatatatagatagcacatttaacattgtctttctagataggcaaaaaatgctgttccttcagtggtaggccacgagggaggccaggttcaattttcagccatgctgtgattccattggggga

SEQ ID NO: 457293 - DNA, 376 bp, Homo Sapiens
ttctcacagaattcatacctaattagataacttagcaaatatgagatatggtaatattttcaaaatagtgaagctcaggacgtgattcacagatggggtcaggtgctttctgagaagctatgtatttaatatagaacttgagggtgaagtcattttctgccacatcctaggataagccatcacattcactctagtacacaaacatgttttttataaattgcaattccaaaagcacttctgttgattctatgtaagagccatgtaagattcaagctgagatttcgctgaaaataaagagggatataacatcactagcagctacccttcttttgaagtggcactgtatgctgcaagacatcacagattccatttgggg

SEQ ID NO: 457294 - DNA, 586 bp, Homo Sapiens
atccagagatgccatagggcacaaatattaacagtacaagacagctttagttttactagaaagacttgtacaaaaaacatcagttcatggattctacatacccaaaaaactgtcttcaaattaattatagtaaaggaagtttaatatcatcctgaaagttgaaatacattacttaccagttataaacagtatgaaggttgtataatgatatccaccaaaacggatccattccacagaaacttttatgtaacacctactctcaaatattatttccatcttttttggcactcagaactaaaaatttgcgtaagcagcgcaagcaatggagatttacctcactacatcttagttttacaaagatgtggaaagcaatattagatgcatcagcttcacccaccccactctagcatccagtattatcttaatcttctacaacagtttccaacaacaaaccctctacttccatgctccatctcccacaccttttcataccatgcttttctttcaaactggattcatagctcctcgacaataagcatacttattcttcattgcttttcatttccctcaaaagagtatgcaatct

SEQ ID NO: 457295 - DNA, 355 bp, Homo Sapiens
ggtaggcagcaggctaggtctgacctgaagcctatagtttgctgacctatcaactaaactgtcaaattctctagcccttgaattaggactatttgtgggttgcatccctttcacttgtttacgtatacctgcacttaggaaacaaaatatttaatgggaaatgatcatttatctgtgtaatgaattatagaccctgttttatttttaaaaaacaattagcttctcattatctggatctgaaatcaaaatcacttagaatgtgtctgtgaactgctagtacttgtcagtcgtgactatataagtgaaaagtaactactgtgagctgctaatcgatgtggttccattggggaccgct

SEQ ID NO: 457296 - DNA, 379 bp, Homo Sapiens
tggaatccatagtgtttttatatgtcccaaataggattgacaggtcaacaagggagactttggtccttgcttttacagacaaacacacggcacacaacacaaaagctacacacatttcctccactacagagaaaggagactcaacagaaccggggaggccctgggggaggactgtcagcacgagcaactctccagatttaccccggcagtcccccggagggcgagtcagagaagagacaacctcgacacagcgaaacgcaatcccgccaagttacaaaacacgtcgtgaaacagccgagaagacagagaggccttgaaccaggctctggggatggcatgtcaaggaagccagggtccccggaccacttctgcaacccca

SEQ ID NO: 457297 - DNA, 343 bp, Homo Sapiens
cgcatgagaaacgtcagctaaatgtagccaccctcttgctactacctacacaatcctctccagtgcgattggaaatcctgaatctcagcaaagatcaggcatgctaaactcaaccctggagacctgccttgcttttccctcaggccacccaggtaccatgtgactttcttatgagatgatcaaaacggtactttgtaaaggaacacttctattcaccaactcactcagcaaaatacttatggcaccccctgtgtatgccaggcatagtattaaagaccagggagaacaagaagagtaaatctagtcccacactctagggattccatttggggattccatttgg

SEQ ID NO: 457298 - DNA, 356 bp, Homo Sapiens
aacgacataaatgtcagacattttagtattttcccacaggtgctgagactctgttcagtctttgtcttcctactcttttttcctctctgttgcttaaaccagataatttctagtgatctgttttcaattcattgactttctttgtcatctctattcttctattaagcccatccagtaagttttaaatttttagtgtttgtatttttcagttctaatattcctatttggttctcttctgtatcttctatttctctgatgggactttctatattcctgtttgtttcaagaatgtttgcttttacttcttatagcatggtctactagctgctttaaaatctcttgtctgataaccggat

SEQ ID NO: 457299 - DNA, 424 bp, Homo Sapiens
  misc_feature (266)..(296): n is a, c, g, or t
acagaagaaatgcagtaaggattaagggacttaagggtgtaataatgaaaatcaattgttctcatagggttgatgtcaaagaatatgtggctgctaacagataggaagcatgaggaaagtgaactcttgggaaagatttactgtttcttcttagatcagctgaaggtgaaaataccaggtggtttctaaagcaaagggccaaattcactcttgaaaatcattctagctgcaaagttctatgtcaagagggaaagaaccagggtagnnnnnnnnnnnnnnnnnnnnnnnnnnnnnnntgcttcatattcctagcaatagcacacagtaccgacttgatatctcaatactgtttttaatgccagtctctcctgtcactctctgtactaaaatctactacatgcatcaatcggtaccgagctcgatt

SEQ ID NO: 457300 - DNA, 490 bp, Homo Sapiens
  misc_feature (389)..(398): n is a, c, g, or t
gtataaatgaagacggaagcttttgccatctcctgaattagtttttggctaaaaatctcattctaggtattctttgagccactcagctcaacgagtaagtcctccaaaccaagagcatgcacatgaagagcaaagggagattacaagacctggtctacagatgtgtaactgaagaagtacgatatatgaaaaggacaagattcgcaaaaactaggataccagaaccaatgtatacatctacctaaaattaagcaccaaaataacagaagagaatgagatcttaaggataacaaggggaagcatctctacaaactagaatgtgtggcttatgagaggtagatcagctttaaacgtgggctgtgaaaaaagacattctaggtgtgggggcnnnnnnnnnncaacgcagaagcaaaacatttccttgcttttctaggaaagagtaaacacatcagtacagtaaaggtactgaattcctgtgacctacatgcat

SEQ ID NO: 457301 - DNA, 403 bp, Homo Sapiens
tacaaggtgaaattaaaggctttattaggcgggcttaacccagagtatcaatggaagacatccctgagatagctctgtaagttataggtaacttatcagcagatgttttgagccttttatgaccctattcactactggctttgtcttctgaatgtacctgtttagtgtacctttttgtcagtttctttcttgaagatgaatgttgccaaggttctcatatgtctattattctttttttgtgttatttatgtagtttcaactttctttttatatgatctgtcctccttcttacatgatccatatcttattttttatatcagtcttccatttactaagctagaatctcagggtctttttctgttttctcctcacttgcatacgagtatatctcctctacatgcat

SEQ ID NO: 457302 - DNA, 375 bp, Homo Sapiens
  misc_feature (76)..(94): n is a, c, g, or t
tgcaaggttatctatgattgctgagtgagaaagagccagttgctgagtattaaaaaagtatgatctcacttttgtnnnnnnnnnnnnnnnnnnnggcctggactgatctgaaatgaccctattaataacaattatgtcctggtctgtattgcatacttgtcattcattacaggatcttgagacacaatgcaaaggatcacatcgcagctctgtaacttgttcaactataagattttgagtaacataacaccttactccttaaaattgccttaaaaaaaatctgaacatcaggaatattctacttcacagggtcgttgtgataattaaatgtagtaatcaatgacaatagtgccagataccgtagatagcctatct

SEQ ID NO: 457303 - DNA, 499 bp, Homo Sapiens
gccggtaccgagtgatgatgtagaaaccttcaaggattgctaaaatctgtagtctgtgcactttaatccatctcttattagcttctgcattttgtgatttgactgagagtgacagattgctgaaaacattcttaaatttgcattgggtattaaactaagtaaaaattttgctttagttatgttttatttatgtacctgttagctaaatgttcaaagtctgatagccaaagctctgcctcttccagttttttcccttttaatttccaatacttttcttaaatcaaaatgacctgttatgaactagttctccattggtatgtctaagagaatgtagacaattcactgtccaagttttttttatacccaaaccttaagaattaagagttctttgaccatactggagacaagaaaagtagatgagcctactgttcataaggtgttatagttgtgtattgctactttatgttttgtttctttgttcagtgattgcctcaccatc

SEQ ID NO: 457304 - DNA, 499 bp, Homo Sapiens
atgtagctaccaaatgcgaactcattagggaggctggacttctaacatttcctgaattctgaccttctccttttggagttgagaaactgatgtcttgcaaatgatgcccattaaataatctctctgaggattcagagaacctgtatgttttggggcttctctctggggagtgtagttttgattcaaaatcaggtaacaatggcaaaacagggtattttagatttcgagaatcttggagttctctgtcaatttcattcagtttagcaagtagcatttctctcttcagtctttcttcttcctctccttgcaatttatccatattctgaattggatacattcctagttggtaccttccagtttcccactctggcttttcttctctttccagtaaagatgccttttctttttgctttttatcaagttcttctctttcccattcatcctcgagagggaggtcctagtcaggaacggagattggagtacggactgtgtcaacaga

SEQ ID NO: 457305 - DNA, 659 bp, Homo Sapiens
ttactggaaggcttcttaacacagatttctgtccccacctcccaggatttgattcaggctggctgctgtggagcctgagaatgtacatttctaacaagttaccaggtactacagatgcttctgttctggagactgtgctgagaaccactatgctatatctttccagggacagtaaggatcccactaaaaagacaagaattcgatttttatcagtttactaaatcaacatcttatatttctatactaaacactagccactacttgaggtttattactgttgtgattatgtttataaaacagggacatcttgcatacccctaatggtgtgaataaaatcaactgtgtcagtacctttgagcacttcataacttaaaattctaaaaaattgagatttggacctacagtttgctatttaacagaccaggtctggtcttgacagtaaagccaccatcaaaagctgcattaagaacctcatccaggcagcttgctgtgacaaaacttaaatcctgtcgtaccgttgcctgggattccctcaaggtctttttcatttctccgaggaataatgacttgcttcagtcccgctctgtgtgccgccagcactttgtctttaattccacccactggaagaacaagacaaagtgctgtcgggctagtcgggg

SEQ ID NO: 457306 - DNA, 545 bp, Homo Sapiens
  misc_feature (321)..(367): n is a, c, g, or t
  misc_feature (387)..(485): n is a, c, g, or t
tatgcatgtagtaactcatttaatacataaccatgtgaggtacgtaccattacgactgatgtttggcaggcgagaaaattgaagtggaaggaggctcagaaaccgttcaagttcgcacagctggaattgaggggagctgggaaacctgtccaagttcacacagctggaattagtggggctggaactcactccaggctgcctggcttccagctcccagctctctaccccaggaattggggttaggactggggtgtaacgagagggacatcgaaaagctcacaaaagacccacagtaatgttaggatgggatataaactacgnnnnnnnnnnnnnnnnnnnnnnnnnnnnnnnnnnnnnnnnnnnnnnnatatggtaatccccactcannnnnnnnnnnnnnnnnnnnnnnnnnnnnnnnnnnnnnnnnnnnnnnnnnnnnnnnnnnnnnnnnnnnnnnnnnnnnnnnnnnnnnnnnnnnnnnnnnnatgtgagtacgatgtgacgaatttcatgccatcccactccatcctcccgacatagataac

SEQ ID NO: 457307 - DNA, 434 bp, Homo Sapiens
cttagccctaaacacgtcagtgttagaactgagagcactttcttttctctgtagagcatcagagtcttctatgaataattccttcctttgtttattcaacgaatatttattgaagtgtctgctctgtgctaggcactgaaaacacaaagatgagtaagaaactgcctaagcctaatcagtttaagactaattttggaaaaaaacaaggagatatgctctttcaatttcctagaaaaataaatttcacaactttaaaaaatgtgatggaattgtcaaaaatagattaaatatgttgcataaattgtgaaatgaaaattatcattctatttattctgtgaacaggtacaattcttaattttttattgaatatcataaaagcagagaaaaactttgagttttcagatattatacccaaatgacagtgacacttcaaa

SEQ ID NO: 457308 - DNA, 191 bp, Homo Sapiens
gcaccagtgatgcatgtagcattgatttgtcatattacatgtacatttattaaaaatcctagcagcaatgttaccaagtaacagtgttactgatattatttcatcaattagaaatgctgaattatttttaaagaagaatctcgctagtgacctttcatctgacgtaaattagagggcttaacctatatctc

SEQ ID NO: 457309 - DNA, 592 bp, Homo Sapiens
cgtagttcgatcaaaccccggcttgccagcagcaagaaaccaccggccatcgtcacattcttgaagaacatggccatctgcacctgatcactgaactgagtatggaagatcattgccgtcacgatgcagtaccccgccagcagccacgcgacgatacgacttttaaaacccatgaccagcaacaaacccgaaccaatttcaaacaccaccgtaggccagagcaacactgcaggcaggtgcatcgcctccatataaccgcgtatagcttcggggttatcgattttgccaacgccggacaaaataaagagcaaagccatcaacacgcgtgcagcgaccattattagagattgtgtcttagcgttcatacttttgactcacgctcacttgagggtattagtagaagaaaagatatagcgcgcaaaacgccactttccgtcgggctctcgatgcagcaagaacacttcctgattgccttcagcacttcccggttgagcatttactagcggagtgacggttccgttggagcgagtacgcgcgaaggcccagtcccgggataacggtcgaatctcgtcaatcgtaaaatgtatcttga

SEQ ID NO: 457310 - DNA, 338 bp, Homo Sapiens
ctatatcagccacaggcaaacgctgtgacaggaaggcaagggttaagaactaaaaagagtttatacagtgtgtgtcagggaaagtgtgcagtttatctctccatcagcaggagttcagactgagggacaacatgattcgggcaaatcgctcacagagttcatgcgtggaatatgaaggtaacttcggtggctcatggaaacttctaatctccatagaacaatcaagccacgttttggcaagaatctgtcagcttttctaggaggtgtcggtccccatttactgacccagataggaacaccatcgatctctcatcttgtatacatgcatcacatcggtt

SEQ ID NO: 457311 - DNA, 411 bp, Homo Sapiens
  misc_feature (144)..(156): n is a, c, g, or t
  misc_feature (317)..(325): n is a, c, g, or t
caccacaggaacctctgggaccaccagacaggtgtgatggtgtcacatagtatcctcccagctttgttctaacaaccaagctctcttggttaggaatttctggtttacagtttaaaatgttagcgtaagacactgatgttcccnnnnnnnnnnnnntacaagcctacttcatgaaaccaatgcctgttgtgcaaataaatacagagttagtgtttacccctggcagggcatttttctttgagttggctgcagagcattaaaaaagacattaagtagattatacatttacatgaagtcccttgttatttttaaccatnnnnnnnnngcatttttctttttgatgatatatatactaattgtgaatgattacaagaggtgactttgtagacagtgtcattgtgtttttttccc

SEQ ID NO: 457312 - DNA, 393 bp, Homo Sapiens
tagcagtggcagctcaagctggctagatagttggaatctaactcatacagcatcatgtatgtcaagctgatatgctggcgggggctggtaatcgccctggacagtaatttccagccacatagtgatatgaccaggccctcatattaagaagagcattctagtagcattgtggagtatgatgccgaaagtagaaatcctgcaagcaattacaatggccgcaggtaacagggaagatgatacagattcaagggatattttcaaggggtagaatttccagactttagtatttaatcagatggggagaaggcagggagagggacagttacagaagggagaagtttaggaaggttcccagattcctccagccaactgggtggatggtactaccattta

SEQ ID NO: 457313 - DNA, 788 bp, Homo Sapiens
  misc_feature (197)..(213): n is a, c, g, or t
  misc_feature (649)..(649): n is a, c, g, or t
gccggtcctgatgcatgtaggacaggcacagtttggaggccttggtccagccactgccccagacccacccttggctctctcctcactaacacccgagaagcccagacttcccagtgtttagcaccacgattaaactctaagcccacaacaaccacgaaccacgggtggagtgagtggaaagcacaaatgaaaagttnnnnnnnnnnnnnnnnngcaatacttgcattctcattagtaggaacatgtgagatgaagcatgttatgttattaggcattctcttgattcggtaaacacaagctgaataaatttataaatatcagcattaagcgagatttaacggggagctgtttatcttctgcctgtcaggcaggcggcaacactctccatgtatcactcgccagccgtgcagtcctcactctcttgcccaggtaagctggggaagagcctgctgccgcccagctctggttgtggaagggctggcaccaaggagctgcgagcttacctcaactcatctcacctcaccatgccggctgcgaggcggcccgtgcagtcggtgcgcaggaggtcacactcccatgctgcatcccagcccctccagaagcagagcatgacctggggtgactttgaggatgctatttaacctctctnaagctaaaagcttccttcgacttgcagcattcaacagatcagtgccgacctgttaaaggccgttcgagagcatcaaatgttactgtttcagcaggtgcctgacacatagtaggtccacaagcaaatgattttcctgctt

SEQ ID NO: 457314 - DNA, 391 bp, Homo Sapiens
ttttctagtacaaagaacaatccagtgaaagtttctctaagcatatattcctagaaatggtatcaaagggttgtggcgataggcacagtttgaattttatgacactgcctaaattgtcccataatacttgtccagtaatgtacaaatattcctaccttcattccagacttgaatttttgccaatccggcttgagagaggtgcattaaagtctaaccctttcagtagatttctgtgtctgttttcttgtatctccaacagttttcatatcacagattttaatttcaaaaatgtctacgaatcgattgtccccttcactaatgtggctcaatttaatactttttacccttggattattttttacttgaccaatatgcagttcaaattttattt

SEQ ID NO: 457315 - DNA, 444 bp, Homo Sapiens
  misc_feature (235)..(245): n is a, c, g, or t
gagtgatgcttagttattcatttgttgttattcagtgattagaaataaatgtttcctggataaatcagagtctatgcactaatttcatgctaaaatatacaaatcttggaaaagactgcctttgatctgcctaggaagaacatgaagttgaagaaataaacacacacacatacacaaatcttcatttatcgctgtagaaactaggaaaataaattttcttatgttacaatgtggnnnnnnnnnnnggcaatgtatcttctattactttgtttctctctcaggaaacagaaaataaaattaaaaattcttctgaaggatgtctgtttttatttcaaaattccatttttgtgggcaacagaataaacgatatgatcaggagtaacactatcctgttgtaacagtgaagcatgtcagtaccctaaggattttttccaatcaaggaac

SEQ ID NO: 457316 - DNA, 525 bp, Homo Sapiens
  misc_feature (51)..(79): n is a, c, g, or t
gatcgggccgctgcccccccgcctgggcgacagagcgagactccctctccnnnnnnnnnnnnnnnnnnnnnnnnnnnnngaaatacatgcccctagattaaactatcccttgtccttttgcactcatccacaagtctcttttcatcagtgattttaggatctgactcgttgtctttttctctacttcagctacttttatcattcttaattatttctgtatcgtcaatcaatctagtacctgcctcttagtttcaaaatcacttactcttgcttagctattaccagtaatcataaccactgtcaaatctcaattgcaagcatattactctttaactaccacctcctatctttaaaccatgttttgtctgtttttttattccagccattctttaaaccctactgtggggcccaagcatttcctttatacgcattcttcctttcttctactgcttattttctgtaatccgtcatcataatcactctattgcattcttcaacgtgtttcccctctctccctccttggtg

SEQ ID NO: 457317 - DNA, 446 bp, Homo Sapiens
ccagttcgacggagactctctcttcaggttctaagcggtaccgggagtttgctatcctacaccagaacctgaagagagagtttgccaactttacatttcctcgactcccagggaagtggccattttcattatcagaacaacaattagatgcccgacgtcggggattggaagaatatctagaaaaagtgtgttcaatacgagtaattggtgagagtgacatcatgcaggaattcctatcagaatccgatgagaactacaatggtgtgtccgacgtagagctgagagtagcattaccagatggaacaacggttacagtcagggttaaaaagaacagtactacagaccaggtatatcaggctatcgcagcaaaggttggcatggacagtacgacagtgaattactttgccttatttgaagtgatcagtcactcctttgtacgtaaattg

SEQ ID NO: 457318 - DNA, 320 bp, Homo Sapiens
acgagctcggtaccatgcatgtagcacaagaaagtcccccaagtaatgccacgcagaaacccagcctatcccacagaaattgcaaatgcctccttgctctgaatgtgaggtgaaaaaagccccagaaaaaccattgaccagctttgaagggatggcagctagagaagaaaaaatactgtaaatactaagaaactgtgttaaaaacatccatttgctattgtcttcatattctttttagaccacaagcttgatggaaatactgtttctaaagcatgcaactttttcacaattttatgtaactttataaagtagcctacatg

SEQ ID NO: 457319 - DNA, 460 bp, Homo Sapiens
  misc_feature (257)..(281): n is a, c, g, or t
tccgtagctcgatcaactaatttttttaactttcctttaaaatcaattgtctactggcacctttttattttctttttaatatggacagggagtctcattgtgtttatcatatcaattaatattacagtacatccttggtaatacaaaattgtacaccttcatcaaataaattaggataaattaaaccaataaattatgcaaagtcttcagaacaatagacaacaacaaaaattcacaattgaaattgcctctagctnnnnnnnnnnnnnnnnnnnnnnnnnttgactttatcagttcagttattgtactatattcaaatcaaagggtctttattacaaaaaagagcttaataatgctatttacaacatattgctaaataatataaaggcagtgttttgtcacggtttatactatatacatatgagaaatggctgggacaatattgaggaagccatgtaga

SEQ ID NO: 457320 - DNA, 416 bp, Homo Sapiens
ggtagctcgatcaacttgtggtgatgacttaaagatccaaatgaactatttcttatgaatgaaagtccaagagcaattaacatgggaaagttactttaagcactttacaatgtggatgaggtttttattctgttgctgaagtactgcaaaaattagaagtatgtatatatatcttcagagataatcaaggaaacaacagatatttaagataaaacatagaataggcattatttgtgagtgtactgagttttgtaactgtggtttaggcagcagtcattttcaataggtccttgggaaattctctaggctgtaggcaacaactttctcctttctggctatgccctaattgtttcattcaggattgctgggaactcctagctccagggaatttgtagtgtgtgatcgagctacggtcc

SEQ ID NO: 457321 - DNA, 634 bp, Homo Sapiens
ttactcgatcaaacctatgtatccctggttgatgaattctgctattgtttgtggctccattagtcttaaggacttcatatcctttttctatttttgattgctgtgtctttgtggaatgtcttgtcatttctttaaggttgatagttatgcagttttatttttactttatttttattgccattcagtatctgcttaggaatctttctgttgcccactgtccatctgccctgaccagtagagttcagaattggtgactctgactgcagagttaacaggcgtgctgtaatacatgaacctttttggggactgtcttgatgctttatgtggagcctggctttcagtattgctgacgagaggtaaagaaatcaggttttagagataagagccaagtcttactgtaataaaaaggttggatgcaagcaaacatctttttctaagtttggtatgtaatctgatgtgctcatcatgccacactctgccagtatatctccaacatctgctgacttcctatcctatggtgacttttctttgcttatcagtatgttgatgatagagttgttgagaaagcagaattcaataccagctttagctagatattgttgatctctgagtacgttgatcgagctacggtacc

SEQ ID NO: 457322 - DNA, 635 bp, Homo Sapiens
ttccgtagctcgatcaacactctccctatattctgttggtttacaagggtcctgccaggttcaaggcaaggaagttcatcagacttcctctcttgatggaggagtgtcatgttacctaagaggagcacataggatgggatgtatgatatatgttggtgtgtaccacgctacttgtcatccttgcatcatttcctccagatcaagggatctgattagccaggattaggtcatggtctgacccccagactctactaggggtggagaaagaggtttggctcccctctgcttctgaaggcaaaggtaggtccctagagctatcctaccaccaagactccacatagcctggaagagagaacttgcccttatctgaagtacctagagtaggcagattcatggagactgtaagtaaaatagagaggttcccaggggttggaatggagggagaatagggagtaattgtttattattaaggtagtttcaatttgagatgatgggaaagtcctggagatggatggtgtgatggttgcacaacagtgtgaatgtatttaatgccactgaattgtatgcttacaaatggttaaaaggataaatattgtggcatgtatatttactacatatagacacacagattgttt

SEQ ID NO: 457323 - DNA, 701 bp, Homo Sapiens
  misc_feature (419)..(609): n is a, c, g, or t
ggctcggtagcgtagctcgatcaactaggtacattcggatacagtacaaagagaaaaaaactgcaggtctgcggtagtatatggaaaagaaacaacagaataaagaataggttaaatgttcctgaaaagaaatattgtctctttatcaggacaataaaacagataaaaagaggttagcaatgacttgtactttccatcaagtcaaccccttttggcctggaaagtcacccctattctgtgtcattcttcttctcctgctgtctctgtcttaaacacacatttcttgcatttttttcactgcagtcattcactaaaatggcttctgttccaactcattgtaccaccaatactggcagagagcaattctaggtcaagcaacttaagtgataagaatgcatctgctggacagttgcagttgnnnnnnnnnnnnnnnnnnnnnnnnnnnnnnnnnnnnnnnnnnnnnnnnnnnnnnnnnnnnnnnnnnnnnnnnnnnnnnnnnnnnnnnnnnnnnnnnnnnnnnnnnnnnnnnnnnnnnnnnnnnnnnnnnnnnnnnnnnnnnnnnnnnnnnnnnnnnnnnnnnnnnnnnnnnnnnnnnnnnnnnnnnnnnnnactacaggcatgagcccccaggcccggccataagcattttaaatatgttagctcattgcatctttgcaacatcccatgatgaagataccata

SEQ ID NO: 457324 - DNA, 446 bp, Homo Sapiens
tccgcaccgtagctcgatcaacctagccctgtttctcagtgctgttttgctaatatctctaatagtcttacttaatcttgttgaaagtagcacttttgaggttaataaggtttaaattaataacccccattgactgtagtctataatactataattttttaaatggcaaaatgccctctgggagctaaggtgtcttaaaagcttagagcaaatcctgttaaatgggacaaagtctcaattcttttttaataagacaaaaacactttatgtagtctcttttctttttcagtgtttctcgaaatttcaattttattccatgctgctacagaatacaaacttacccaataaaaatagcagctccattgaaagagctttcccacaaattgaaatatttaaagcacagttacaggcttgtgtactgttggtgcatacatgtctgatcgaga

SEQ ID NO: 457325 - DNA, 501 bp, Homo Sapiens
tacaatcgagctcgctaccgttatcgatcaacccaatggctgccccccatgctgcaagggtggctccggcggtaaagaatgatccggcaatggcggcagcccccaggacaatctggaatacgccacctgacttggccccggcgactctgggaacaatatgaattacagcgccatcaggcagagtctcatgtaactgcgccgttaacccggacgtgctgacgtcccgcccggcaatccgtacctgataccagccgtcgctcagtttctgacgaaacgccgggagctgtgtggccagtgcccggatggcttcagcccccgttttcacacgaaggtcgatgcggcgaccaaatcgttgtaaatccccgtaaaggcagatgcgcgccatgcccggtgacgccagagggagtgtgtgcgtcgctgccatttgtcggtgtacctctctcgtttgctcagttgttcaggaatatggtgcagcagctcgccgtcgccgcagtaaattgc

SEQ ID NO: 457326 - DNA, 487 bp, Homo Sapiens
  misc_feature (396)..(430): n is a, c, g, or t
gctcgatcaactagttttggtatcaggcttctgctggccttgtagaatgaattaggaagaattccctcctcttttattttctgggatagtttggaaagaattggtattaattcttctttaaaggtttggtagaattcagcagtaaagccgtctggttttggatttttttgttgttgaaagaccttttactactgattctctctcatgacttgtaattggtctatttgtgttttcttttccttctgggttcaatctttataggttgtatgtgtccaggaatttattcatttcctttaaattttcaaatttattggcatattgttgttcatagtactctctaatgatcctttatatttctatggtgtccattgtgacatatcctcttccgtttatgannnnnnnnnnnnnnnnnnnnnnnnnnnnnnnnnnnctgagtttcactaacgttttgttgattttgtttatcttctcaaagaactaactttct

SEQ ID NO: 457327 - DNA, 305 bp, Homo Sapiens
ggaccgtagctcgatcaacaatagcttgtgcttacgtattttgatagtgtatctttgagatagatttctgtacttggagttgctagggcaaaaggtaaatgtatatgtagctttgtaggtattgctgtatatttgaaattactctccgtataggggttgtgccattttatgacctcaccaacaatgtaatagtttccctgtagccttgattaaaaaggtataatgtcagattattgggtatttgtcagtctgatgggtgagaaatggtatctcaatgtattttaatttgcctgtctttaatatga

SEQ ID NO: 457328 - DNA, 363 bp, Homo Sapiens
tttttttgagaggagattctatatgtcacccagactagagtgctgtggcatgatcatagccttgaactcctggagtcaagtgaccctcccgtctcagtataggcatgtgccacaggtcctagcttatacatatttttaaagcaggaagttgatcagtaccaaaatgttttaacaatatgcaatatatttgattttctaattagaactttctgattcttttactttgctgaagtatattttacctacaatacatgcattttagttgtataattcagcaagttttggaaatgtcgacaggggtaatccacacgatcacgatctagatttagaacagttagagcactgtagataatattcatatga

SEQ ID NO: 457329 - DNA, 560 bp, Homo Sapiens
tgaacttcaaaagtggttatctttctgaaaatgtgctggttgccttgggcagtttgatagcggagccgtactccatcaagcatgaggggccaaaactggtcaatgacttggtaccgcatctcggaggccgtaggcgagtataccggcaacggttcggacctggagttggacctgcacaccgaaaatgcctttcaggcttatgactcccgtggagacacctcgccgctggctcttctgcttctcggcgttcgcggtgaccctgccggggtgggcccgaaaacctgggtggccgatgcgagggaagcccttcaggttctggaacaggccgatattgaaatcctatatggcaaacatttcatcattcgtcagccctaccgctggaggaacagtgccgcaggcgcgaaagaaactcatgtgtacccaattctgagcggcccgctgactcaccctagagtcactgctgcgtttacccggacatggtaattgccgctgatcacgaagcacaaaataccctgttgaggttttacaacgcgcttaaaagcgtagcgcggccgctggac

SEQ ID NO: 457330 - DNA, 466 bp, Homo Sapiens
aacgcgcttaaaagcgtagcgcggccgctggacattcaacctggcaagttggtgtacatcaacaatcgtttcatgctccattcgcgtgacaagttcacccccagtttcgatccagaggggcatgcgtatcgttggatccagcgtttgttcatcacgaacaacttgtggaacttccgttcattcaacaagtgtggcgcgcggatattcgaacccgttactcgatgatataaagagataaattaaatgtcgaaccataagccatatacatcaattattcataatataggcactttcctcacgggtgatctcgcgtctccactcattacagcagataccctcgtcagtgttgatggaatgataacctacgtgggtcaggcagcagatgtggatttttcacacgcagacctgctgattacgccaagcagagcacggtcatgccaggtttgatcgactactggggatcctc

SEQ ID NO: 457331 - DNA, 805 bp, Homo Sapiens
attattgaactctcacttcgtagcctcatactgctggctagcggtgatccttcttcctcggccttgctgtgactgggattacaggcgttagctacctcacacagcagatttatagtattctcagttgataaaagtaactttttcaacaaattatatgtaattaacagtgaatagctgattgtaaaggaacatgttctcttgaggtgagtagttaaaagatgtcattgtttgctgctttatatgtacaatgtacatataatgacaagagccagttacagttatttcctattaacatctgacaaatttgtttttatttatttttgccttaaagtaaatccctgcaccattatgatccaagtttgtaggaagtgtatatttctttccatggtttcttttgtagcctcctaacagttatccctgctttcacccttgtcctcgctaaggcctgtcctcaatacaacagccacagttattttggtaaaactgagcatgacagtctccccaaccctctgtgtggatccttgtttcattcaaagtaaaaatcagattccttatagtgtcgcataaaccctacataatctgtaccccttgtttccacgcatgtcccttgacacctacagctaacccctttgttggcttccctccagcttccctgtcctcattgctattctaggacctttgtcctccttattctggaatactcttccccagatttcatggctgactgactcccttacctccttcaagtcttttctcactgcccccttaaaccttctctgaccacctgtttgatcgattacgggga

SEQ ID NO: 457332 - DNA, 479 bp, Homo Sapiens
tcaacgtccgcccccagttgataatcgtaaacttcctgtcgcgtgatacccgttagcacgcagtccgaaagcagtcatgattctctgagttgaacggccattgccctcactggccaaaaaccgctccagcatgccttcctgctgctgcgtagcaagcagagcctcattgttttgaacgttccagcgcacaatggcttgcggtaaaacaccgtaaaaattgttatgcctgtgaaatcatttcatactgatgccaggtaacgtcggtagcattgggcccctctactggcgtacggtagttttccatcaagcgccagcggccgggcaagaattcgtttctgaaccgatacctgcctgggattgaagcagacgtgtaagtagactcaacgcggtgctcgccatacatacggtgagtcatgctcctctccacggcgtcccggcgctcggcggcgacgtgagcatccgttgatcgattacggtag

SEQ ID NO: 457333 - DNA, 127 bp, Homo Sapiens
cactggaataataggcataaaccacatgcccagcctatctattctaagcaattttaaatgtggtatatgtgactgacatttggttctgctggagaccaggttcatcgagctacggtaccgagctcga

SEQ ID NO: 457334 - DNA, 535 bp, Homo Sapiens
  misc_feature (127)..(144): n is a, c, g, or t
tcgagctcgcaccgttagctcgatcaaacccgtggcccatgagctgcatgcagcccaggacggctttgaatggggcccaatgcgaatttgtaaactttcttaaaacactgtgagattgttttgcaannnnnnnnnnnnnnnnnnatagctcatcagctatctctagtgttaagtgtattttacgtgtggccccagactattcttcttctaatgtggcccagggaaaccacaagattggatacccctgctgtagttgtataacttgaaaacaggccatatgcatgctatctccactttctgcatttatgtttactctactctggaatgctaacccagagtcatgaatcaaaatgaggtataaattatgacaggtggggtaacattcctaaagcccataatccagatgaaaccagagctgtcaagtggtaagaacaaaagcagattactagtagcctgccaagtcctcactcatattacttctcctgactgtgaaggagcatcagatgtgaagtcagactccctcagctctaatcgg

SEQ ID NO: 457335 - DNA, 146 bp, Homo Sapiens
ccggtaccgtagctcgatcaacctgagaaacagcaatccaggttatttattcatttatttgagttgagaatctccctctgtcatccaggttagactggattgctcacttggcagcctcaaactcctggcttcaggtgatcctcctc

SEQ ID NO: 457336 - DNA, 381 bp, Homo Sapiens
caggtctgtgggtgaccaactgaattagggatcagtctctcggaggccagtatttgaattttaaaaagtgggaccactttgttaactaatatttgctaaataaataaactgcaggtctgcctcactctgtgaaatatgcttaaagtatatttaagtattaaagtatattctttagaagttgaatggcagcccacttctataaagttgggcttcctcccgggtattcttactttccacacttgcagaaactgggaggaaatctcaggacccttgttctgtcagatagttctgctttatttcttagtaagaagttaagccaaaccatgaattccaccattaagaagctgccagtcttgattctgattgtctactgatgacctg

SEQ ID NO: 457337 - DNA, 150 bp, Homo Sapiens
ccgtagctcgatcaacagaattcagcaatatgtaaagaaatatataccacgaccaagtggtacttattccagagatgcaagggagagctcaatatttgaaaattaatcagctcaatatttgaagaattgaaccatattaacaggctacag

SEQ ID NO: 457338 - DNA, 561 bp, Homo Sapiens
cctcgatcatacctgagggtgtcaggacacagagaacctctgcttaattcgtagtgtttcatcttcgatccttcactcgccccggtttgtaacaactttatgtagcagaaagagagacgagaattgatgttggtctggaagaagtggggaacgtgatactttgttctgtatttactcctatatttatttctttattgggcttgtagctgttttttcttattctacatcaatcacttggatgcataaattcaaagacatatgtttgcgggtctcacacatctgtcttgaatttcatcttttccaccctgtcttctactttccaaacaatttacctcccctctctctctctccctgctgttacttatttcattgtgtgacggaaccctttcatttcaggagctggtggagggaaagaatgcaagccacagtccgtttctatataaaggcatctttggtactgggtggtcacagtttcttagtgtcggacacgattccttttgctgtggacgtggctggtccgtggcagtggggctgaggctgttgatcgagctaggtaccgac

SEQ ID NO: 457339 - DNA, 489 bp, Homo Sapiens
acacacccagcagattgtgttcaggtacagaatgtgtttgtagaaatcccttattattgaaatgaataataatatagctataaatattaatgtctggaggtatccagatgtgccttaacaaatgtaaatggttttcattcagaagtttacatttttattacattataaaatctcatcattgggaactttctaaaccatgaatatcagttcttttaatgaaatttaggtggtgctttatcattttggagaagttgctgtttgggacaatagcatcagtttatcaagaagtgtactcaccatgatattcaacaatgtgttacatttgacaaaacgtgtttagagtaagaaagactaactatactgtctgttatatttatttatgctttttgtagtttagctacatactataattttcattttaaacgttccttagttactacaaataatatttatgttttgcttcttcttagatgtaggcggattcggcct

SEQ ID NO: 457340 - DNA, 373 bp, Homo Sapiens
attggagggagttttcctttgtattttttaatgtatgatattctgtttccagtagcttggaaagtagagatgactaatgttttagccttttcttggagaaaaggaagaactcttcttgaatattttcacagatgattgtgattgctttaaatgacctctgtggcaatttaaattagatggatttaatctcagtaatgtgctggtcgcataaatgtcatgttttaataggaaaagttacttgtaaatctttagacctttgttgtcacttaggctggggagtcactaccctatttggcatcttactagttggggggaccttttccgtgtacagtgatgggacttttgtgacctttactctcactatgcaatagag

SEQ ID NO: 457341 - DNA, 406 bp, Homo Sapiens
aaagcaagtggacatgagggatggggaagctctttatctcaagcatgattattacacgtggattccattatttaggcaaatgctgtctacagacgctccaggagccacctcccaacacctgtctttcacctcttgccagagactcaaagatgagtgggctttcagagtcataacaataataatattaatagctgtcactctgaaatagacatggcaatttatactctgtgggggagtctttagtccctcactggctaagcacagtgcgaagggcacctgtattgtgaggtgatactcagtgggagagtgaagatggtgaggaatagggcatacagtacgtccctccgccttgtaccacccctcgtgaggcaaacatgacccccagcctttaccggatttcggccct

SEQ ID NO: 457342 - DNA, 520 bp, Homo Sapiens
ccgaatccgcatgcacaacagaaacaaggtcggtacgctgaacaggatgtagacaatgcggtgcagtacattgcgattgccgacaaagaacagtgcactcaggagcagcagcaagccaacaggcaaaatccataggaccaggaagtcgaaaacgcgatttgagccataggtaaggcgcttggagtgcatacagtaaagccattccagaaatagaaagccgaccatcttaagctagtggctaagtaatgtcgccggtaggatccaaccgggccgcggcttacgccgggtgcaagtacaacagagaagctgtgctaaagtcagcctcctttttcaaaacgccgcgtgatatgaccgactccagtccgagcgcaagcccttcgagcttgaaaatatacttccgcctgctcagttacgttaagccctatatgggcttgttcgcgttgagtatccttggatttctgattgtcgcgtcgacccaacacgatgctgggttacatcctcaagtaatttgttaacgcta

SEQ ID NO: 457343 - DNA, 571 bp, Homo Sapiens
tgaacggaagagctcggcggctccacgcacgtactgcaatgcactctcgacgcagatccagcgacgttgattctcttcagctgctcgaccggtcatggcccggcctgaaaaaatatcagcgaccaaatcgccgggctctgtcaggaatttgataaaaaaatcaggtacagcaaatggccagccggcgccgtgctgagtcagacccaggctggttagcgcttttctgtgttcccgtccgcgggcacaggagtggccaatctggagcgtgttctttgggatggcgccgttggtgattccgccaaagcttcccgggcggacccgataagcgcgatcaccataacttgtgcttcgatgctcaccagccttgactcaaaagtcttggcatggcgctcagtgtgaggccttagcacccttcgattatctgccttacacaaaatgggatcgcgggcaaaccacaggcatggttcccacgaaacattgagttgttggcgcgtccgacttgaccactgcattggacctggtgccttcgacaaatttatccatgggaacctgtccatgagcgtcagtccca

SEQ ID NO: 457344 - DNA, 363 bp, Homo Sapiens
cataccaaaaaccaaagtaataaatgtggcaatggcctggacagacagattacaaagatgatagccatgattcacatgcatacgtttcctggttcctcaagttatagtttatgttcaatacataaacttctggcatatgaaacaaacattctatctttagattatttgtttaaatggaactttgcatttctattcaaaaaccaattttaactgttttgaatagattacataaaaatagagacaggatcattgccacataggtgggagtggttataactgtgatacaacaaaactgcctcagatataaaacatttgaatcttttgatctctaccatctatgatcgggcttcgcggattcggcct

SEQ ID NO: 457345 - DNA, 871 bp, Homo Sapiens
tcagctcggtcccgatggcaatccgctgttactttaaactctgttccacgccgaatacacgcactgtgtgccactcgttatcattgaggttatagccagcaaaaagagtctcgggacctttgctggaattacagttaatcctgatacaatctagattgaccgtcagtttcacacgtcctgcgtctagctccaggcggagggtgtcagcagagtctctagaagtggttgccatcagaatgccatatgcacgctgggatcggaaccgtaaggaaacatcctcagcctccgtatgcatgactacggggagctgaattttcataaacatgctcccatcatagctcaaaaccgttgcctctctctcacaggacctgccaagatagcctgttccggaacaatcacagacatatctgttccacccatccctgcacatgccattgtttttgcaagggttgctaaggcacggttttgctgtttcctttgagcaggaaggcttcactccagcagtactttgaacttcagccatttgccggatatctttgctttggccatcgatgaacaaatccctgatgcagcccacgtagccatagttgagcagagcagtccacacctcggtggggaagacaaggccagctttattttctggcagcccccccaggtacaactcatcatccaggtccagaatctcactctcaccaggagcagtgtagggagtacgcaacgtgttgacagaaatggtacctgaccgtccgtctctctggaagtccacatgataccattctccatcattcactttcttcaacagggcttttatttttatagtacctgaccccatgtccaggaggaggtagaggtggccatctagcatctcaat

SEQ ID NO: 457346 - DNA, 633 bp, Homo Sapiens
tccaccccctccccagagcactagtcatgccgcaaatgctaggaagtgccattttcattttctccactgtgcgtgtgtgctcaagtctttcgctctcacgtgggtgtacatgtgtgtgagcgtgtgtgtgtctctctctaaagcatgccaagggaatggtccatgtgtacatagactcattgtgctgtagatactgtcctgcattgtaattgtgagatgcggctgtaacaagttgctgggggagatggcggggaaagaggcaaggagcagagtcctccctacatccatggctgtcacatggcatcagtgtgtattcaaaccaagctatgctccttccaagggcaggaccccatattcctcctagtcccatcatcagaaccgagtggggagtcactcagaatatcactgtaaatgaaagtgcctactattcgatgggggtaagcaaacagcataagggatttattgacgttggacgaggtgacctaggggaggaaattttcagattttactctcatttcatgagtctgagggattcttatatttcctggcatttaacagggtaggccctgctccattgtgaaaatgagcagcatgtgttgagtaaatccccagaaacaggaaggtctccaagtg

SEQ ID NO: 457347 - DNA, 1444 bp, Homo Sapiens
gggcttggcacgagctattggatatggagcctttggtgttgtctggtcagtaacagatccaagagatggaaagagagtagcgctcaaaaagatgcccaacgtcttccagaatctggtctcttgcaaaagggtcttccgggaattgaagatgttgtgtttttttaagcatgataatgtactctctgcccttgacatactctaacctccacacattgactattttgaagaaatatatgttgtcacagaattgatgcagagtgacctacataaaattatcgtctctcctcaaccactcagctcagatcatgtcaaagtttttctttatcagattttgcgaggtttggaaatatctccattcagctggcattttacatcgagacattaagccagggaatctccttgtgaacagcaactgtgttctaaagatttgtgattttggattggccagagtggaagaattagatgaatcccgtcatatgactcaggaagttgttactcagtattatcgggctccagaaatcctgatgggcagccgtcattacagcaatgctattgacatctggtctgtgggatgtatctttgcagaactactaggacgaagaatattgtttcaggcacagagtcccattcagcagttggatttgatcacggatctgttgggcacaccatcactggaagcaatgaggacagcttgtgaaggcgctaaggcacatatactcaggggtcctcataaacagccatctcttcctgtactctataccctgtctagccaggctacacatgaagctgttcatctcctttgcaggatgttggtctttgatcctatccaaaagaatatccgctaaggatgccttagcccacccctacctagatgaagggcgactacgatatcacacatgtatgtgtaaatgttgcttttccacctccactggaagagtttataccagtgactttgagcctgtcaccaatcccaaatttgatgacactttcgagaagaacctcagttctgtccgacagtttaaagaaattattcatcagttcattttggaacaggcagaaaggaaacagagtgcctctctgcatcaaccctcagtctgctgcttttaagagctttattagttccactgttgctcagccatctgagatgcccccatctcctctggtgtgggagtgatggtggaagataatgtactactgaagatgtaatgtagctttccactggagtctgggatttgcaattctggaggttaatcatgcttgtactgtaattttactaatgaagttttaaattaacaaccactacttgtatgatatgaataatatttagaaatgttactagacttttaatcttgtaaagtggttgtgcttttagaaggaaaatattttacccagagttgcacatgttttatgaatttagtgcagctgttatggctcacctcagaac

SEQ ID NO: 457348 - DNA, 340 bp, Homo Sapiens
ctctagcatctcccgtatgtctcatgtgccatggaagaaaggtacatttaaggaaatgtaccttagggaacttctgtggtgctctaaagtagtacgggaaaggtaacttaagataccgattgacgactttgccagagggataaagtaaatccatagcaagaggcctggaagagagaataccaggctccagggggccaagccagacttcaggctatctgtgacaccaggaaagatggacaatgcattctaggagcaaaaagaacaggtctcagacagttctggtagtacctcaaacgatagttctggtagtacctcggtgccacaatcccgaacccgggca

SEQ ID NO: 457349 - DNA, 535 bp, Homo Sapiens
  misc_feature (250)..(250): n is a, c, g, or t
cccaccggccagcggattattgtcttaatttgccacttgggggaaatgaacacataaagttgagtgccacatacaaagtttcatagcagagtcatctctaagacctaggtttaaagttctcttagggcagtatgactttaggtaagtcacttctctgaatctgtattctcaactatataatgaggaaaaatatctaccttggagctatggtaaatattagatatgtgaaagtactattcgtttatcaaantacaattctaacatgactcctgattggtcaatcccacaactatctctcccactctccagccgtccttttcagaagcaagcctccaggagagttgataccactattcccaccttcctcctgtgcatccaccaatctacctcacattctcctcccctggcacccaggcacccctggaatgctaccaccctgctccagccaggaggctagaagggtgatgtaggaagattgctagcactaccatggaagttctcaacagcacccccgacccagtacccagtgccatgg

SEQ ID NO: 457350 - DNA, 690 bp, Homo Sapiens
  misc_feature (596)..(596): n is a, c, g, or t
aggaattaataggaaaattttaatatcacaattatcactggattactgttatttttcttaggtttgataatggtatcaggattgtgcagaaaaacattcttatcttaaaagataattcatgttaaagaatctgggatgggaagggccacggtgtctacagcttactttcacgtggtcccatgaaaaaagaaatgtgtataactacagatgtatagattagacagatatatgggtgtaatatagatacatgtctacatgtagatacgcagtttatagggataagagttaacatgactaaatgttaattggcaaatctaggcaaaggttatctattatactgttgtcacttttctgtttatttcgaaaacaagttgaggggtaactttttaaaatcctactgaagtttccaaaaattagctcaaatgccacctcctcaaagggctcttcaggatacatgttgggagaaatgactccctcttctgcattgcgaaggcactttacttacgttcatgattcaactgactgagcgaaaaaaaccatggggcccctagttcaagcccaccaatcttggtaccctctcacagacacatctctcnggttcatcctcacacgtccatcccagcaaggcctagaataggattagtgcttaaagaaaagacactgggacagtcaggtgcggtgtctcatgct

SEQ ID NO: 457351 - DNA, 290 bp, Homo Sapiens
tgatcttccgtgcccacggtatcttccagaggacgagaacgagccgtaagaaagagcgaaaaggaaaggatgagagaataccaacgagaactagaagaaagagaagaaaaattaaaaaagaggccactgctatttgaaagagttgctcagaaaaatgcaagaatggcagcagaaaagcattattctaataccctaaaagcactaggaatatctgatgagtttgtttcaaagaaaggccaaagtggaaaagtacttgagtacttcaacaatcaagggacggaagatcaggc

SEQ ID NO: 457352 - DNA, 327 bp, Homo Sapiens
tgatcttccgtcccacaattaatttgaacacaggcttcaaggaccctacatgtgaggcttctcctgtggaaaataaaccaggcagcatatgccttcacagagtttttattcacatcagtattcttgctttgagttttcatggagagaccatcgcagtttgatgatgatatgctgataacttgtttgtcttcagaaatacgtagtatatattaaggacctagttaggcacacagcaaggctggctccaagaggcttcccagagtgcattcatcccccttctgccctgtcctgagatgagataatggttgccaggggcacggaagatca

SEQ ID NO: 457353 - DNA, 314 bp, Homo Sapiens
tgagaatcccctgatcttccgtccctacatatggcatcaaaagggagctgaaagcatttgaaactctatcagcagatgagatggggcagaaccgagacccggctcccggctgtgtgtggagctgatggcttctgcatccctcctccccacgcctagattctgtgaggagttggaactcctctctgcttaagcataaccctgtcgtttaaaggtgagatcaacctacccaaagactactgcagcactgacttggatctggacactgagtttgagatcctcttgccacgccgacggggcctgggcacggaagatca

SEQ ID NO: 457354 - DNA, 385 bp, Homo Sapiens
tgatcttccgtcccttcattgtttttttggccaggtaaggatttctagattagacattgttttctctcagaattggaagatgttgctgtcttgcttttcagtttctagcttccagtgttgacactgagaggtccaattgctgttcagatttctgacccttggtttgtgaactatttttctttctctagaacttttggagtccttttattcctggggttctaacatttccaatatgctttgatgagtttgttgttgttgttgttcattgcgctgggcacccactgggtccactgaatatggaaattcaaatcttgcattttagtaaattttggataaagttttttgattattttattctctttcactctgtgctctctttttggac

SEQ ID NO: 457355 - DNA, 419 bp, Homo Sapiens
tacgtagctggttttgatactgaggaatactttttttatttgagaatccacaaactaaagacttggctaattgtacagcatttgaatcatcactgataagtgttccaagagccacaagaagtctaaaagtggcttctaggtcttgtactacttccaagattgtgctaattagtgacaaacattgggctttcccttcaatgttatggtctttatgaaaacaaacagaatagttcagggccaatgtagccagagcaatgtgaatgttcttattgctccctgatttcagttctattgcatgggacatcagtgattccctctgggacatcatgagtttttgtcctgcctggccaacaaaacaattgcaaaaagtcctgagagcaagcagctggtttgctggctttcctttagggcacggaaga

SEQ ID NO: 457356 - DNA, 142 bp, Homo Sapiens
cgtggcccctccttagtgccatacaaagggcattggcacaattacttctaggacagaaaagccacgcccatcatatgctgatgtcatagccatttccagatacctcgtgtaccctttgcctgtagcagggcacggaagatca

SEQ ID NO: 457357 - DNA, 384 bp, Homo Sapiens
aggatcccctgatcttccgtcccatgtattttagaaattatccatccaacaggccaaatattcagttttatgattcaaaggatgacagctcaccagaaagaggcttggcagttgcagccacagcacagggaggggcagggggtcaccctccgtgctctcccaaaccagggggtgatgaggccaacaacaaaggcgtctggtccccacagagcacgtgtgcacaggccgcagaagggagactggaaaatctggaggcagaaaactcccttgagggcatcagcccccatcagcagtgcttgtcattcccaaatcctgcccacctgaatttcagaaaacagccccactttaaagaaaagagtttttttcttattttattgactgatg

SEQ ID NO: 457358 - DNA, 383 bp, Homo Sapiens
tgatcttcgtgcccataaccataatcacactcatatgtatgtacccgtgatggcgtccatgttggagcttttatcctttcttcccttttggttggaattcttaccttcctctgttctccaagcaataggtaaacctcaaaacccattttcaagtctcatctcctccctgagaccctccctgatcaattcaattaactgatttcttattccttgtctgttaaaacatgatataaatggaaatacagaaatatgaatagatttgaaaattatttaagaggtagcaataaagatggatttttgtgatagactgatttccttccctctctgtcttctttcataagagaatgtcattttaggggcacggaagatgaggggatcctctc

SEQ ID NO: 457359 - DNA, 626 bp, Homo Sapiens
tatcgatgccaccttttttcagcctatcctcccccacagaggctgctgcgctacttacaaattgaattaaatgagggctgaaacggcacgcttcagcatgtactgtagtcaccgtggaagaacaagtctttccaatattggggcatgtattgatttctaaaaaatgtctgcctggggaatgaaatatgcacatgtatttcatattcacagatctgcttccgaaaacctctctatttaatatcactcaattatgaatttgtttggctttcagaggaatggaatgcattttagtttttataaatttggggagagacaacactctgcccaggtaagaggagaggaagttcaggggtccagctgtccatactgctggctagaggaggagacagatccgggagaggtcctggagtgttttgccttttcctttctccccctgaccaatccatcctgggaaaccccaatagtgtcattgattgccacatcctgggctgcatcttctagcgcccacctctcccgaccccaggccagggctggacgtgaaagtagggcacctgcctggtactcggtgcatgtccttcctgcccacctgcttgtcttccttttcctaactctattcgtctttctct

SEQ ID NO: 457360 - DNA, 344 bp, Homo Sapiens
atcttccgtgccccgtgggctccagggaagaatgtttccttgctttttccagcttctagatgctgcttgcagtgcttgattcgtggctcttttcaccatcttcaaagccagcagcagagcatcttctctcctctctaacctctgtttccatccctacatctctctaattctactgcctctcacttgtaaggattacattgggtctactgggataattcagtatcatcttcccattggcaagatccttaattaaatcctgccttcaaagtcccttttaccatttaagacaaaatgttcacaggttaagcagctggtgagtgtctgtggtcccggctactcggggg

SEQ ID NO: 457361 - DNA, 386 bp, Homo Sapiens
catttggccttgtggctggctcctgtagtgtcaaaatataaaggttcaccaggactccaaatcattttcagtctaaaaaacaaagctgaggaaaaaattgttgatttttaatatatcaaattacatcactctgacaatcacagaacactgctgggaaatttcattctgtgaacgcaaactgtaaccttgattttccaactgaaccaaaacactgcaatttggatgacgataagagtatggtgcaagttcagaacctagaattgtactggtgccaagaactgccaacaagaagtggccaaatcagttgccacagcacttggaagatgatcatgaaacataagctagttcatgttattccttggggcacggaagatcaggggatccta

SEQ ID NO: 457362 - DNA, 480 bp, Homo Sapiens
tacttccatccgttgcatctgagcactcaaaaatactttaatatctatccctttggcaaaggatgatgaattaaaaaatctggaaggaattttagaagcaatatctggttcatcacgtccaaatccaagattataaagaatttcttcaggatcttcctcataaagttccaacaattctgaaacacttgaaactgtcccactacttttcccagatccagtggaattcatacttctccctttctgatgaaactgtaatcttctctctttggccaagatattattgcagttttcaatttgagcatcactttcatggaggtggttggcttcagctcccaatgacaaatcatcttcaaaacttcctccatttctcacaagcacacccttgagtgtactactgctttgttcatccagtgaggctcccaaaggtgtacggcagtccttgagccatatcgcgatcttctcgttgggcacggaagatca

SEQ ID NO: 457363 - DNA, 458 bp, Homo Sapiens
  misc_feature (23)..(23): n is a, c, g, or t
  misc_feature (29)..(29): n is a, c, g, or t
  misc_feature (44)..(44): n is a, c, g, or t
  misc_feature (50)..(50): n is a, c, g, or t
  misc_feature (71)..(71): n is a, c, g, or t
  misc_feature (84)..(84): n is a, c, g, or t
  misc_feature (304)..(304): n is a, c, g, or t
ccggaggcttgtgatctgtatgnaaattngataaacttttcaangccatngattagaatacttgaacagancaggagcctcatngcataccatgcaaggctaaagagtagattaatgatgttattcaaagctctctggatgcaacaactagcaagaattagctacaaattcatttatctatactattatctagttgataatttctaatttcacccatgaagatttcagggctttcttaaagacattttaagtttactgcatttccttgatttactatagtaataaaactaccaatatatacganaatattcatttaggcagcttgtaagaaaaagatacaccaaggtaagtttgtaatttgaaatgcaaagtaatattctgaacagttctccagaagtcaaaccaagaaatttatagtccaaaaagttctggagattgttttaggggaggggaaggta

SEQ ID NO: 457364 - DNA, 516 bp, Homo Sapiens
cctgctgagggcaagtaccactaagcacagtattgggcacacagtaggcacccaaaagattctgtgaagtgaatggctgagataggaatgccaagtgcttacttacctggtgtatctgaaagagcctggacgtgaatcttaggtctaagtatttgaggtgagtcttcagttggacgttgtttagtctgacttgctgtgtatgtgtgtttgggagagctcactgggatactagctggtgtttcattcccagccttaaccctagtcctctgtctgatctgggaatgcgtctgaaagctttccggtagagatggaaatggggcatttgctgattaaattacatactgtttttgtgcggaaggtggagagggaatcgtgtgtgtgcgcccctacgcttgtgcaacacgtggctataggcatgggtgtcggacgctttatcctacatgtgcattaaaggcacaaagtcctctctaaattgtctgatccaccagagggaggcaccattaccatgtctagtcc

SEQ ID NO: 457365 - DNA, 476 bp, Homo Sapiens
gaaccagccaccacacacccatgtccacccaccttagggttaatctttgttactagccctcactactcagaattggtgagacctctccatttctgcttcgcatcagcttacgtggtttgctcacactgacaccaacaaacacctgtcaatccctatgtccctcctgtcttccaaaaatacctagaaattgctgctctatcgacggtagtatttcttgttttctagtgctgctattatttgtctattgtacttggttttgcattttagtcacctgaatgaaatctggaacaaggcggtttcaccatttcaaatctttttttcaccattttatcgtcattcaggttactacaaatggtaagtagaagctctgcaaaagtcaaaactgagtgggaggaaatcattttgcgacaatattctgaactatttcagtccaattaatatttgatactaagcttctacagcatcagatgttactt

SEQ ID NO: 457366 - DNA, 652 bp, Homo Sapiens
ggcatataatatgaattcaattaaatgtttaatttcttttcttcgcctcacttccaagattaaataacaaaaaaacaaaaccggaatccagacgggtgagggtgttaatgtgcctgatgtaggaaagggctaaataaagaacacagcgtttagaatctaagtctaataaagccttttgcagaatacagctccattttttctaacccagactttccattcttacatctcatatatttaatcccatatctgtgcttttggtaacatatccaaagaacctcactctcccaacatccaaatcttatcccccaattaatgtctcacctactattcaagttttccccgacaactgcagcacacaatcccttgttccccttctctactattcctgtattatacaagctagaaatcatcattctggtttctagccacagcttgcctgattagactgtaactcttccatagtaggtattataagtaacgattttattactcacaaggggaaagttgttccccatacatgttaaagaaatacatattgattataatggtccaagaggctgggcgcagtggctcacggctgtaatcccagaacttcgggaggctaacaatcacgtgaggccagtctgtaactcctgacctcagtgagtgtttc

SEQ ID NO: 457367 - DNA, 396 bp, Homo Sapiens
  misc_feature (40)..(40): n is a, c, g, or t
  misc_feature (239)..(239): n is a, c, g, or t
  misc_feature (247)..(247): n is a, c, g, or t
aggaattactaactcctattgtgaaggaagaggagaccantgaggttaagggattttgttaagagcttggctaagggacagaatccaggccagagacccagagtttttccagggactggctcagcactttttccaactcacgttcttcccaggaaggagatgtatatctggggtcacgacaggtggtcaaacctgcaattctaccatctctgcctgctctccagctaccactgtgtctntgcagcanggtagggatctagccagtcatttcaaacccttctatcagcctcctctggaacccattcctgtgaatggacccagggtacagggatggcttcctgtaactagaattaggcatgggacaacagctacggcaggtctaggtctggctttgca

SEQ ID NO: 457368 - DNA, 474 bp, Homo Sapiens
  misc_feature (147)..(156): n is a, c, g, or t
ggttagccagtcaggcagtaacgatgcgctataatcggggtacgaaccgctggtccggttcaaataggcgcaggcctgttctggtaacctatcacgcacagggtattgggggtttcctacctgttgcttcttcgccgcccgttatannnnnnnnnngttcgccaataccttgttcgcatgcctcccccgcccctcgtttattactaattttcctgttcttattccgctatatcgcgctctttcctgtatggctcatgcgttttcggccatttgttcccgcgctgattgtcttatacctttttctatcccgtacttttgggctcttagacgcctcacactgtgtactctagctcataattgtatcgcctccccataattgccctccacctgtcccccagttcttccataagtgttgctggcggcagccccggttgtcgccttcttttttatgttcttatcaactattcgtatgca

SEQ ID NO: 457369 - DNA, 293 bp, Homo Sapiens
acaatgcgatggcattacacgctcgtacgatttgtgacccgcaagtggtagacagtgcgacgcacgtctaacggtttggctaattatctgcttatattagttatataaatttcagcgcgaaccagacgtggcggtacgccagcgtggggttagctaaaaaccacttggtgctggacctgcggttcgtaccccgattatagcgcatcgttactgcctgactggctaacctgtaccttcatcaaaagtggtcatcacgtacccggggtttacctcgcgtgggggtgggtgtggtg

SEQ ID NO: 457370 - DNA, 248 bp, Homo Sapiens
gaccacttttgatgaaggtacaggttagccagtcaggcagtaacgatgcgctataatcggggccgcacattagcagcattaataggcacgcccacccacagcagctcatctcttttcctcttccttttatattagtattcactttatcccaattttccgtgtaggcaaagtctctttatcccttttttcacaccaaaatatttggatatacaaggtttcatgcaccatctcactattggatgcaacgg

SEQ ID NO: 457371 - DNA, 149 bp, Homo Sapiens
cttgttttggctgtggcgctttccttgtcttttcgtttatttctcttgcctttttcaaaacccaggtcggctcgcgttcaatagtaatgtgtcggaggttcatgtggacggcaggcggtcttaagcgttgtatgatgttaacggctacg

SEQ ID NO: 457372 - DNA, 460 bp, Homo Sapiens
tctttgccctatgccattttcctaacttctttaccttcccgccgtattctcggcttttcacttacccactttccatctttaccgtatttttgcctcggtcgccgctgcgtcgttatctagtttacttacccccgtgttttccttatgcatatacctgacctccccccccattacaacttcgccagcgcgtcgcttccccctttctgtatttctttttatcgggcccattccttcccgttactaccccttctggcgcgcctttacttggggccgtaccgcacgtgtccctctctgtgggttgcccattaggctccttattctcgcccatgtcacatactgggcttgtacaagcgcaacccgccttagtgtttaaattttcaagtaaacccttcccgcccaacactgtctctctttctatcacccgtttctttccttccaaactttcacattctcactatgg

SEQ ID NO: 457373 - DNA, 459 bp, Homo Sapiens
ttttatatattccccgttccttaatactattggacgtagctaataacccctgtacatcagttcaataccaagcactgcgcgccagttaaggttgctcgtttcccggtcattcccgtgtttcgtaccacgtttgtgtaggtggtccttattccgtaggagtcttttcctgttcctttcctctcctttttgtcttccttcgtccccggttcctcccctatatgttcaagtttaagtagtaaatggtatccgtcgtcttgtagtcgctacgtggtaccgtgatagtcgttaatattagcacgtgtagttcaaggtatcggctgtccggtatgccggtagtacctgttcaccttgtagtacaagcacggcatcgtggcaatcgtgtagctgtactagtccccgccaggtgcacccgtactagttgctggcatccaggtgcccggcatcaactattttatgcag

SEQ ID NO: 457374 - DNA, 474 bp, Homo Sapiens
  misc_feature (142)..(174): n is a, c, g, or t
gctggtcaccttaccatagacatcaaattaaatttattcagcatcgccctttcccccacggcctaccttaccgcactccctacattccttccagtcggctttttacgtttgccattttagtgtcccctttcaagtttcgctnnnnnnnnnnnnnnnnnnnnnnnnnnnnnnnnnactttgtatggtcgtattatattgttcaactgtatagtaaaacgtagtatcaatccccactttagtcgttgccactttctccccgttaccctcctagcactcaagcgcaacccgcaccgggcaccggtttcacctttacgctgcaccactccgcttttagtaggtcaatgcattcactagcacaccggttcttttgcctgtgttttagtaagtacaaaggtcttcccagttgtggcatccgtgtagtcttccccacgtgtttgcatttacaccggcgttcctttactcaactattggtat

SEQ ID NO: 457375 - DNA, 308 bp, Homo Sapiens
aacggcattctatccggcacccaaacgcgccaattaggctgtgccacgtgctccattttgccagggacaccccttgaccgggtgtcaccccatcacatcactatctttgcaacaatttacccggttcccattttccacagcaaaaggtacttatctccagcacatgctcttatacccagcaccgccgcatatcagcaacaattccaaagcaattctctaataaactgtatattgtctaatagtcaccgtagcgtaagcctaatacgccagtaccacagcaatcaaatagtttccaatatcaatatggt

SEQ ID NO: 457376 - DNA, 480 bp, Homo Sapiens
ctccgcaacccgcccctcttcggctcgctgggggtgggctgttcaatagttgccgctatttttagtcgtcccctacgtctttctcccgtactcagtcgcgcttttgtattaatgccccccgaaatttgtccggggtcagggtccccctagtgcaacagctctaggcaggctacatccgcgcatagcgggtgcgcggccggtgcttaccggggcccagcgttgccgcggtataccccgctgagcagccagttggccaattaatctggcatctgtactgtcaatttttacggccctcaacaaaagttctttaatctgcccgcttatattcagcttattctgttaatgtctcgtgtagtactatttttaacgggtgaaatgtgtataattaaatggtattaccagtccaaatcattagctaacacatttaaaatcatagcgttgcataaattaattatatacagttatcactattgttgcaaa

SEQ ID NO: 457377 - DNA, 458 bp, Homo Sapiens
gttagtgttatgcaaaggtttcgcggtcaacgcgcccaaagaattatgtaacgtaaggggcaatctgcgcctgtgtaggaggttcttattgtttaagtcgtcgcaaaatataatctgtgcatcaatactcccaatattcgggttattactgtcgggcaattgtttttcatcgcccacgaagtccttattattaattatttaaagtatgccttctagcctcgcgttttttagctgcttcatacttcttccaaggtgcaggcctccctcctgttttgtatttcacgcgtcatgcccccctcacactggtcggcccttctatcgcgtctgtggtattccgtatcgtcattcatgcatgtattctccccaccaaagtacggcatcccttttgcttatgcaagccacaacctttcattctcaccgtacccccattcccttctactgcagttaccgtactttca

SEQ ID NO: 457378 - DNA, 493 bp, Homo Sapiens
  misc_feature (310)..(341): n is a, c, g, or t
agcggaccagtcggtctaccatactttaattgaggaacactttcagtttgtgacacaattatgctgtgaatcaggtgttgcaaattatggcccactgcctgcttttgtgtaagttttattggaacacagctacattcagtccatggctgcttttagaatacaacagtagactttaacatttggaacagggaacagaaaccagagccatacagctaataaacttgaaaatatttacaagttgatgctttacaaaatccatctgctgacccctgctctgtaccattgttctcttctgatggtctgtttactnnnnnnnnnnnnnnnnnnnnnnnnnnnnnnnntagatttgccatttaaaatgtgcttttcaagtttgactttttaggatgcaattaattcactaaatacagaactaactaaggacaaaaatttaaagatcagcatctttcccttcccatcacgctcaactaacatggtagaccgactggccgcc

SEQ ID NO: 457379 - DNA, 494 bp, Homo Sapiens
  misc_feature (456)..(456): n is a, c, g, or t
gtcggacagtcggttctaccatatcaagaggctgaactaaattgatttttttaaagataaggtgttctcattttaaacacgctaacagattagatataacagtattagaaagctcaagttttaagttgatggacacaaaaagaaattcagtcccttgtgctacttttctagtgcgccttattaaatccaaatctgaacaatgtaactgagaatgaacaaatgctccttttgatggttgcaaacaaagcacctgttgaatgtcaaagcaaaccatatgcatgcgcacttaatctttgaaatttaagataaggtctgatgttcccaacccagctttttctactgcaatttatcaaacctcagtactgctaggtttacaagctttttcttccgaattttgttctatgaagaggaaaatagtgctcttgagatattataatagctactgattttaatagngtctgaatttaatatgatggtagaccagactggtccgc

SEQ ID NO: 457380 - DNA, 439 bp, Homo Sapiens
agtagaaccgtcagctaggaggttttacagtgatgcaatggagttggctgtactctcttgcaagtccaactatcaaatttccatgaatttcacaaatcagttgtcaaacacagccaccattaagaattcagccgcataaaattacaattaaattatattaaaaacataattaatcattttccaattattttagagacaatggcaaaggcagcagggaccagattcatcataacagcatctagtcaccagttcacgagcatcaaggagaagctgtcacagcaatggccagatcctacattccagacttccagcagttacaatgttaacagcagtggctgccctgatcacctggatcacagctacagtagcattttcttgccactgtttcagtagcaacctcctgattccactttcctgatggtagaaccgactggtccgg

SEQ ID NO: 457381 - DNA, 589 bp, Homo Sapiens
tcggaccagtctgttctacatattcacatttacccaattaattttatttgaaacatctatttatatatgtacaccaaagaaattaaaccctgccattttccctttgtgcttaagaaaccagagccactgttagggtactcacatgtcaaagatattcttaataggcttcaaagttgggtgtatataaatgtgacagaactgaaggggttactttaagagaggtattaaaactacttgaaattaattcaaagggatctttttatttctgtatttaaaaattagatgagagcaagattaccacttcaaaaaaaataacgtaactctcagtcttaattttgtgaaaaacttactttgctatcttgatgagtagaagatggataagtttttctgaactttatcaatttacaaacttacattttaggatattctgaagaaattaactttattacctaattttcaagtctaaagtttatcatataatagctgtccttcttatcattatttttgtttggtcatctcttatctacctagcttcttggttagtaacttaaaggaaaaaatttttacattgcatgtagaccgactggac

SEQ ID NO: 457382 - DNA, 450 bp, Homo Sapiens
  misc_feature (325)..(333): n is a, c, g, or t
tcgagctcggccagtcggttctaccatctccaattgctcccatccagccacaactgcaagactcctaagcctgagctgaacatgctcctatgttctctgcaccctcctatattccagcccaattccaccagcatctcagaagaacagcaaactcttatagtcacagcaatatcttactggccccagcacaattttcaaattggaaactttccaccagtttatctacatcacatcaaaacatgtgggaacgttaaaacacgggcaagttttcaaagtgacaagtgtaggcttccaagagacccaaacaggaatctattcaggaccnnnnnnnnnctcagtgataaaataaaacaacttatcgatcattgaaaaaagttttttagatctcccagtccctagaaagaactttgtataaactcttcttagccataggccatatacagcctaagt

SEQ ID NO: 457383 - DNA, 486 bp, Homo Sapiens
caacgtcctcccaaggtctgaggaacactatgtcaaggcatggcatgaaaggtatacaggtctcccaaggctttagagaagaatgatttgttcatggtgtcactaagcaaggggtgaggggcacaattgggatgaaaacccagggatctacgtaattcctccatctttccactgtctccagagtgggaaggtaggggtagctgagaggttttgaggaccagaggatagcggggagtagtctggatagacttttctgtctctaagtcctgttaactccactctcctattgcttttgcatgggtccctccccagctatcagcatcctgaggcctcctctctcacccagagtattgcaacagttgtgcaaaccttcctgacgaagaccaggtcagcactcctttgggtgagagaggaggcctcaggatgctgatagctggggagggacccatggaggatccataggagagtggctgtaagaggcctagc

SEQ ID NO: 457384 - DNA, 605 bp, Homo Sapiens
  misc_feature (186)..(194): n is a, c, g, or t
cgcggtatcataattttaaaaggttgtgaaaacagtctcacaggagactaacatgtttacagggatgacactggcttccagttcaaaggagtccatgggtaagccacccacagtccccgagagaaggaagcacagccattcacgtggaagaacaatttttcgtggttctcaattcttaaagcaggnnnnnnnnngtatgtgaaatattaaaaatcactcctaccatggctaccactgtagctttactgagagtggtgcttgatacacaccccagcctctcccaaaactgagctcacttcctccaaggggggcaaggaaggtttcctttcaaatgtgggtgttgtagttgaggtgcatgattcaggtgtcagttttgttcactgccacttatgcaggtttgctcagtgatggtgaggaggccctgctctaaggggtccctgcagggggaaggagctgggctcgcccatcagagggagatgggagttccagcccagctgtgcctctctttgggtgggagtctctgagaaggtcatgtaatttcagtgcatcttggctctttatctgaacaatggaactcaagtgggtttgccaaaaggagtaccttg

SEQ ID NO: 457385 - DNA, 626 bp, Homo Sapiens
ttcgcggtatcataaatatgagaattaagcaaagatctggatagggtgaaagtttattagagcaaggagtatctataaatttgttttgttactgtgattctcaattataaattatcgtggtctttctcagttatgtaagtccttaaaaagcccaatagtacagttggtattaaggaatttagaccttaggagagcttatgttggaggtagatatataaacctgtgaaatatatgttttatattcactaaagtaaaataattgatacctcacactaaattaaaatattatcagtagtattttatgcatattaaattagtaatactttccaattttgtttctcattaaattttttcagaatctctctctaggagaaagtacctggaagatattttcatttacaggatatcagcttttatatgctgataatatgcttacaagccaaatttgccctgatgtttgttcttccatcaaggatgttcctgtctctctaaattgatgtgatttttcctttctcttctcatgttgcctactgtatgtttcttttcacagtaacacttctcccctcccaggtctcatcatgctccctggggtagacttagagttatgataccgcgaaggggatcgt

SEQ ID NO: 457386 - DNA, 185 bp, Homo Sapiens
agaatacaaaacattagacactcctgctaggttcttctgcatgaggagggagagacctctgactttggcatccccccgcctccacaccccagacacccacactgaggctaagacagtcctgggctgcttagagcccctgagaaagatttcttgttttgtctttctcatggttatataacgcgggt

SEQ ID NO: 457387 - DNA, 263 bp, Homo Sapiens
cagatacaatattggactgtaagtcaaaataattggtttctaatcttagatttgaccaaatctttaatgtctttgctttaatctgttaagacatatgaaacagtataaatgaaagcagaataagctgaagagactataattttaataatccttcaagtgagatacagacaattagctaagaagctgagttcctaaacgacaattcctatagctggcttcagacaacaggctatgactctgcttcacacacttatgtacacgta

SEQ ID NO: 457388 - DNA, 639 bp, Homo Sapiens
cacagtctcaactcctaccgatgctccctcctcctggctgacagactgttttgaagcacatcctgggtatcatattgttttatctgtaactatttcagcaggtatctctcaaaaattatttatgatacttttcaccatatagaatttttgaagatacatactattgcttgccaggggcaccataaagcatttctgtaaacctgtgtttctccccgatttacacaaagagggacataagtcatggcatccagtagccctccttccttccctgttctgttcacatgctacaagccccttcaggtcccaactcctgtattgtagcagagcagaaatgtctagaaagcctattgtcataaaaacaatcagaacacaagctgtaacataattcagtctgctttccttacgtagaaatcagcaaaatcactttttactcagctacctgaatagtcattccaagttgaaaagcaaggtctatcctgtgggggtgttgaaactgccttttaacgagctttcattccgattgcatttggggacctcaaaaaggcatttggcctcctgagcgccaagtttcagtggacacatctggatacttctgtctctttttaaactcttttttttattatgataccgggggatcgt

SEQ ID NO: 457389 - DNA, 155 bp, Homo Sapiens
aattagtacaacaggaagctgttagaccagttggagaagtgaaatgtggaggtaatttagcttattcatgacataactcagattagaaaaagaaatccaagtttcctgactctgttggttttttttgcttatgataccgcgaagggtatcgtcta

SEQ ID NO: 457390 - DNA, 815 bp, Homo Sapiens
  misc_feature (16)..(16): n is a, c, g, or t
  misc_feature (26)..(26): n is a, c, g, or t
  misc_feature (134)..(134): n is a, c, g, or t
  misc_feature (181)..(181): n is a, c, g, or t
  misc_feature (216)..(216): n is a, c, g, or t
cccccccaaggttaanatttggccangctccataaatttgggttgggcggggtctccctcctaaactgccccaatatggggaattaactagaatcccagttaatgacttcctcccaaatatcaagtcaaaaagntttatcagtttatccttaggtcagagaaaggtaagactcagtctagntcttcctttcagttttcttcctttacagatttatnaaatgcaggaatagagatacagatatggtatttctaaaagttccctgattttaaaaacatgaccccttgatttttggaagttcaccccattttatggtttacaaaaagaaaacaatatgacacatgttagagcacagataaagaaatatggtcaagttagcttgtcagaagaagcacccaactctgcctacactgaatcttgcttttatatttcatgatttacagacacattaaacagccccaaataaataaaatctgtgccaaaggaatgaatttctagtaaagggtaacatgcaatttagcagttttcttcctttaccaacacttacagagtataaggtcttagtgaattgatggtctgactgtagtcagagagacataatctattcatgactgatgctttgacacttcctcctaatgcttttaagtgaatgattaactccaacctttctgggccctgtgcttttccatttagccctgagaaaaacccaggtagaagattccaactctctttacacatcaccaattctcagaataagtcaacagtcaagattcatttcttattcttccttcgtccaaccaaggcgtcgttgcttttg

SEQ ID NO: 457391 - DNA, 482 bp, Homo Sapiens
tactacccccggggtaggtgccataataagataaaattcatctccaaatgtctacagagatctagtaaagccgcctgcttctctgaagctctaagcagtctagttgagaagtaacatgatacccttccatgaaagctcagacatttgattaaggttctgaaaggcttcattatacctatccaggtcgacccacttgtcctagatttctttttatctgcctcaaatcttgtaaagaaaaggggacttgtactttgataggaccatattcactatgcatttcctgtaaaggaagaagtgattctggagcgcatatcaggtcgaactcttctaacaggatgaggttcaaaagggggcctggataagggggacgagatgatccaagaggagctgggacctgggctggtgcaggggcctctgtctcctcttctaaggaggcagactgttttttcccttctgtctggattaagtctggctgatataac

SEQ ID NO: 457392 - DNA, 206 bp, Homo Sapiens
cctggcatgttgaacacactgaaggaagtcagcctgtgccacctgaagatcaacattcctggcactctagcacttgaggatagtctgaatgaatgtgtatttctttgtctctttctttcttgtctttgctctttgttctctatctaaagtgtgtcttactccatttccatgtttctcttgctaatttcttttgggtggctttatca

SEQ ID NO: 457393 - DNA, 102 bp, Homo Sapiens
gcaaaactcttaagtacatgtattagaaattctgtagcagaaactaagtattaccttatgtttaaatgtaagtaaaatgccccatgctgggtgtgcttcaca

SEQ ID NO: 457394 - DNA, 139 bp, Homo Sapiens
agaggaactcatccgggggatgcgtgtgggctcctgcagagatgggtatgaaggcccaggagccactccccacgctgttgtgggccctgcactcgtaggtttggttgtgctctaaggtctcaacagtcagcaggctctg

SEQ ID NO: 457395 - DNA, 406 bp, Homo Sapiens
cataattttatggtattacacagggaaagctatgactgcaggatcagtctaactatactattaggtgcatgtattctcttttcactaacttatacttgtctatctagaatacaggtcttccagtcagctggtcatttaccaggtgtggacttaagttgctgggcttgcagtaagaattgccagccactcattgtgcgggtctgcgtggagctttaatcagaaaaagcctccactttctgtattatgttaacattggctcatgcatataactatctgctgctgatgtagttctccatcttcaagatttagagtcggttaaccaggtcattacatcttaatttaataacaagcattactgtagagtgattgtgtatagatctgttagctgtcagggtgtgtttaccac

SEQ ID NO: 457396 - DNA, 153 bp, Homo Sapiens
gcctaaattgatcatataatctttctttcagtttgcggctcactgaagggtgatacatcaaatattatttgtttatctatagaagcttagcatttacattagctctctacatacggtacatacgagttagtgacattagctacgtaaggggct

SEQ ID NO: 457397 - DNA, 130 bp, Homo Sapiens
tgaaagcacacccttatcactctataaggcccagcggtcacatccagcataccacctgttttcctaaatcaagttttagaggaacgttgcctgacccatttgtttacttatcctctgcagcttctgatta

SEQ ID NO: 457398 - DNA, 174 bp, Homo Sapiens
cgtcgatctaaggatccccctagtgggaagaaggtaggtgagttcagaaaggaaactgagttgggttttgaagaccgagtgggatttaccacatttaaagtagaaaatgtggtaaagagctgggatgaaacaggtgtgtttaatactcattgcaggctggagtatgggaccata

SEQ ID NO: 457399 - DNA, 190 bp, Homo Sapiens
tgatgaaagcacacccttatgtgacatggtaagaacttaaactcttgtaagatagacgcttttttgcaagagtgttacagcccattattgagggaagaggtctgatttttgcttgaggaatacatcattaaaaagaacttctggtctgcttactgttttactttttccttgtggcaacagagatattttg

SEQ ID NO: 457400 - DNA, 347 bp, Homo Sapiens
  misc_feature (241)..(241): n is a, c, g, or t
tgttgatgatggatgttgattgttgaatgtggacttgtgttgctgccttgatgccaatgtgtgcaatatgaaactcatgctgtactaaaattttttggttgtgttcaaagcattattgttttgcctgacaatgtgctgctgcgttgctgctgttgcagcctggtatggatgcctccactgttgattgagatgcctcttgtctttagtcttgtcttttgaaagaatgcttttcattttatangtctttcattctgaactgaagactacttgtgccactcaatgttgctagactattagaagcacagatttcaggggtgtcagtgggtgtgcgtcatcaggggatgtct

SEQ ID NO: 457401 - DNA, 309 bp, Homo Sapiens
tgtgaagcacaccctagatttacaggggaaataagcatgggactaaaaacagctggccatcttactgctgaaacattaagagaaggatcaatcctgtttcacccaaacagggatgagtcactgcctcacctacgggtggcagacatactacaggtggtagatatactacctgtactacctgtctacaggtgttagacacactaccacctgtaggtttcaaagtattgagtagagaccatatttcacatgtctccactgaactgaccccatcaccgtatctctagcaaagccagaacctcctcccagatg

SEQ ID NO: 457402 - DNA, 321 bp, Homo Sapiens
tgattgaataaatgtgtgagttgagggaaagtaaggagtccagaatgacagagatttttggctttagcaatcagatggaagctgttgctactaaccaagactgagtatacaggagaaagtacagactggaagatgctgaggccatttttgtccatgcgtcactacatcagacagtgacaaggtatcctttggatctgccaggtaagctttccccacatgtcttcagttacagagtagagtctcttgggcatataagtgggcatttgacccagttctggccaattatagcaccccaccgttctgtctataactcttgtgcac

SEQ ID NO: 457403 - DNA, 152 bp, Homo Sapiens
agaaacttccattttcccagctggatttcagagttgttagttatagaccagtaactcctttatgtctcccatttcccctctttttgaaccagaatgtctgtagtagttgtcctatggctatcccaccattgtacctagggtggctttcacct

SEQ ID NO: 457404 - DNA, 167 bp, Homo Sapiens
cacagaacgggaaaaaatatttgcaaattatccatctgacaagggattcataaccaaaatatctaaggggctcaaacaaatctataggaaaaaaatctaattacccaattaaaagataatctgattaaaaatgggtaattagatttttttcctatagatttttgatg

SEQ ID NO: 457405 - DNA, 149 bp, Homo Sapiens
  misc_feature (76)..(76): n is a, c, g, or t
cgccaagcaacagtttatcattaaacaagacatcaggggagagcgcgaacgcagtcccccactaccataaattatngcaatcgagatttccacatttgggaaattcgcaggggtcagcacagtcggagtgcaatgctgaaccggggatc

SEQ ID NO: 457406 - DNA, 365 bp, Homo Sapiens
acggtaaccacaccccttaaaatgtttcacacgtgttccttccgtctcttgagaaccaacatctgtagttcaggcttcaagcatccctcccctagacaacttcacttccttcataagtggtcttccaacattgtccctcttaactccatcctccacagggtagccagcacgatctttccaaaaagcaaatctaaacactttcaatagctacctactgcccaggagacacctagggtctgtgtggccactagttcattcgtcatctggtttcactttcatggctgagctaaatgtttcactaggtggtgatttgttcttggcaacaagatgatcttttgcaactgcgagtctcactgaccttgcaa

SEQ ID NO: 457407 - DNA, 354 bp, Homo Sapiens
gtgtactcagtccaatcacttgcatttttgaggtgggctataaccgaatgctaaggttgtcaggagggcccaggacattccagattgaggatggaacaggttgggcaaaagcactgataagtgaaagtggaaagtattttaggagactcctataactccttggtttgaagcagtgtgctatctataatacagcactggaagatgagtcaacagtaacttgatatctgattgtagaaggccttgtatgtccaggtgttagattctggactgtaatcgaaatagggagtcactgaaggttctagagcagtggaattctaagcaaaggatgagattatctaatgtgggtgtgtattc

SEQ ID NO: 457408 - DNA, 382 bp, Homo Sapiens
aattgtgcagggactgcttgagtctttgtttttgttggtctgctaagaatgtgggtcagcataaggtagcgattcctgaacttatcacttgatcctttacaaagagggggcaatggaagcaacatggcttgtgaaactgtattccttaaagtagtgaacagatcaagtaacaaaaagagaatatctgcgtggtagctatacagtgggggcaagttattgatattgatacttacaggttagtattgatcaatttaaaaagtgatgtaactattccaaaactctgtaaaaaacactcttctcctttctcgatcactgactcggtacactaggaccttagtctgccctgaagcggcatgttcagagactctggccttttctcaag

SEQ ID NO: 457409 - DNA, 419 bp, Homo Sapiens
ttacataatttttatgtaaccataattaaaccaaattagtctttttttcttcatacttttcttcggtaaatagtgaagaaataatgggcatatctaattaaccagttctagtgggtgttgtgatatctttatatctagttcagtctcagatgtatgaatatgattatatagtcatgattgaagttcaaaatgaggaagcatacaaaatcctcagccactgaaaaattcagttaacttgtttatactcctgtaagctctagttagtcacaagacaaagtatatagtaacactttgtaatgaagtaacattttctgcccacattaattttactaaagacctaaattgttaaaattaattgccaatctctggatatattatgcttagtaagtgttttgaaattaaagaccttaaacatttca

SEQ ID NO: 457410 - DNA, 607 bp, Homo Sapiens
atagtgtacagtgctgttctgtggcacaggattatgtaatatggaactgctcaagcaaataactagtcatcacaagcgagcacgtgtctttgataataatctgaaaaagaatattgtttctcggagaaggatgtcaaaagatcgtccagctcagggagcagtttgccctactagctcctcggacagctgtcactgacgagtctctggctctttagaatactgatcccattgaagataccacgctgcatgtgtccttagtagtcatgtctccttaggctcctcttgcatcttcctcacgaagaataggcttgttgttttacagtgttgttgctccattccctttgacgatccctaggtggagatggggtatgaggatcctccaggggagaaggtcactaccactgggcaacaaccctaggtcaggaggttctgtcaaggatactttcctggtcccagataggaagataaagtctcaaaaacaaccaccacacgtcaagctcttcattgttcctatctgccaaatcattatacttcctacaagcagtgcagagagctgagtcttcagcaggtccaagaaatttgaacacactgaaggaagtcagccttc

SEQ ID NO: 457411 - DNA, 414 bp, Homo Sapiens
  misc_feature (333)..(333): n is a, c, g, or t
gtcaattttattgccaaacaaggtaaatgggtaaacaagtaaatccctacctcccccagcccccacaaccccagggctactgcttattaccaggggaaccatttttccagagcccctcatttggaatggttggaagattgccacgcaacaaggactacccccaaaagggctaccattcaagtctggtgtccaccaggaccacctgtgcttaagctcgatctaccccattccttcctttaccatcttctctaatttaggataacagtatccacaaattaagtgctactgttttccaagaactaaatgatttaacagttccctaccagatagganctattgtctccatttcacagaagacaagaggaacaagttgagaatagcttgaataagtcaagacacttgctcctttgccaa

SEQ ID NO: 457412 - DNA, 512 bp, Homo Sapiens
  misc_feature (140)..(140): n is a, c, g, or t
cggctgggcaagaagctgatcgagcccctcaccaatctcatccacagcacgtctgccatgtctctcctctatgaatgtgtgaacaccgtgattgcagtgctcatctcgctgtcctccggcatgcccaaccacagcgccanattccagctttgtgttcagaaattaaggatattgatcgaggactccgatcagaacttgaagtacctggggctgctggcaatgtccaagatcctgaagacccaccccaagtccgtgcagtcccacaaggacctcatcgtgcagtgcctgggacgataaggacgagtgaatacaggctgcgggccctggacctgctgtatgagatggggtccaagaagaagccagatggaggatcgtgaaggaaggtgatgacccacgtagacaaggcagaagggtacaacggagagagctgaaggactttaactagaggtggtcagtgaaggcgtagagagcgctcataggtaacttccggatccagaggggaaagatagctc

SEQ ID NO: 457413 - DNA, 370 bp, Homo Sapiens
tcctctcgtctcctcctcctccttgctttttccttttctgtgtttctttcggatagcagttgttgctatgcctttaaattcacaaatattttgtctacaatatctaatctgccataaaaaccgtccactgtatttttcatttcagacattgtagttttcatttctagaagtttgatttgcgtgttttttaaatatatgtccagtctttgctctagctacattttgaagtatatggactacagatataacaattgttctaatgtcctgtctgctagctacattttaaaatatatggactacagatataacaactgttctaatgtcctgtctgctatcatctgagtcagtttctgttttattcctattttca

SEQ ID NO: 457414 - DNA, 234 bp, Homo Sapiens
ctttccgtgagactttgagtggcccaggtggagtctgaagtgacagcctctatcttaacactcagtctaaggctctttccactaaggagctgcctctacccagggtccaggaagggctctcctaggcacctcgcgtcacagcccccgatctccgccagacggtgatcagcacagcactaccgtgtaattggacgcacttcgctcatcgtggacatcctagtctcacgagaacgt

SEQ ID NO: 457415 - DNA, 168 bp, Homo Sapiens
agcacccatcgagatttttcatggaaagtgacaattttgttctcaaatgtatacagacatgcaaaggaactacaatggccaaagcagttttgaaaaagaagatcaaagatggaggaatcacactacctgttttcaagactgacttactatgaggctatagcatcaagt

SEQ ID NO: 457416 - DNA, 222 bp, Homo Sapiens
tcggtatcctgacacctatcgagatatacagcagcaagaaaatgagttgacctggattgcagttacctgagcatttgttttgtaattattcattaaacagaacatttctgttttgcacacttttctataagttatctttgaaaacaggaaaagtttttaagaatcaatgccttacatgaaaaggtctagcattaaaatgcacattccaggaccgggcatggt

SEQ ID NO: 457417 - DNA, 141 bp, Homo Sapiens
taattctattcatttacaagaaaaactgagtggtctgcttttcaggaaaacccattagtgaaccgtgagtgtacttgtcatgtttaaatcgagtgtctcttagccatgccataacttagtctcatattctttttttattta

SEQ ID NO: 457418 - DNA, 185 bp, Homo Sapiens
tagaggatcccccgaagtattatcaagagaaaagctataatatctttagaattttaatggcaggtatcaatttaaaatgcgcaaataccataactagtaatgctttttgtaatgtattgaaagaaacctaagttaggcaataatattgatgatgaatattatgattataacagccgatactaaat

SEQ ID NO: 457419 - DNA, 282 bp, Homo Sapiens
tttcgaccgggaggtgtgagcgcttcatggactcttagctctcttttatcaacccaaaacttatagcacagtcttggatcaaataacaaaccaggcaaaagagggaagagaatgaattatggtcagcaattcagaagacacactagaatcttccagtgactgtcctaaaaagtccagcaacagcctcgtgagcagtcaactccttttatctttctgtctctgttactctcatcactgaagatggcaaagaaaagtatgcttccgtcggacgggaacctctag

SEQ ID NO: 457420 - DNA, 305 bp, Homo Sapiens
cagggtttgaaagagatctctgctgtcataatctacataatgaacccattaagtaatgaagacacaaatgacacaaaatcagtgtctaaatatacagcagactgtttaagtgttggaaaagtttgaacaacgtgggaaagtagatctagcaagaacccaaactaacacggacagcttcatggaatagccagttcttgaagaacagatagaattttttaagttgaggagaagagaatgagtggactcccaagcacacaatgcatttaactgaagtttaaagatgcttccggtcggacggaatcctc

SEQ ID NO: 457421 - DNA, 276 bp, Homo Sapiens
  misc_feature (16)..(16): n is a, c, g, or t
ggaactagtagtgttngaaacctaataaagaaattagagggaactggcgaggcatttttttcccttagaccttaagccatgtgaggacacagttcaagtctccatattggaagcagagtctgaatcttcgcaagatgaatcttgcgagtgccttgatcttggacttccagtatccagaactttgagaaataaattatattatttataaattacttagtctgtggtattttgttttagcagcaccagaggactgagacacacttttttcttctcaga

SEQ ID NO: 457422 - DNA, 244 bp, Homo Sapiens
atccagatcgatgctttgatcactgacgaagccgacgtgtcgatcatcttctcgttcacccgttcctatttcatggtcgatgtacccgtgccagcggaattcatcggctttctcaagcgcatcctgccgggcaagcacattgccgagttgtacacctccatcggtttctacaagcacggcaaatccgagttctaccgcgcgctgatcaaccacctggccaccaccgacgaccagttcatcatgg

SEQ ID NO: 457423 - DNA, 701 bp, Homo Sapiens
gaaatgaacgaacatggtcacagatattaaatcatatacacactgtggcacatacgagagctattccctaagttcttgccgaaatatatttttatattattttttaattaaaaatttactgaaactcgtactcctgaaatgaaatagctattgtctttatagaaaaggatggaccataacatttaatgagagaactcaagctgtaggttatagtttccagaccattggtcacttactcaccatgcttcctactttctgtcttttcttctatttccccccactattaaggattatttggtggctccgtaattgagcaattttttggtctgttctttaataagtgtttacttccccctaccattttattagtgaaatgagttttttataacgctattatatctatgttgttttaaaaagctacatacttcttctcattatttaatcttgtgagagatttgctattatctggagtttcatattatccataataattttgtttgttacataatcaacagaatggctaaaaattaaaaaggtggaaaataacaagggttcacaaaaatgtagcaaactggaactctcattcactgctaaaggagttttatagctgctttggaaaactatttggttatatttactaaagctgaacatatgtatgttctatgacccaacagttctagtgtatactcataagacactgg

SEQ ID NO: 457424 - DNA, 602 bp, Homo Sapiens
  misc_feature (18)..(18): n is a, c, g, or t
  misc_feature (29)..(29): n is a, c, g, or t
taataattggtatggaancctttacctanggagaattttgaaccacgggcaaaagtaaattgaaaagccgtaatgaaccttgggcacacatcccgtcaccctctttcaacaattaattccatggcccaattgccttttaatttataacccccattaacttacccacttctgtattattttaagcaaattccattctgcccatttcatctgtaagtatgtaatatttctaaaagataacttttgttctaatataatcacaaaatcattgtcagaccaaaatggaacaaacaaaaacagtaattctctaataatatcatcgtatttgattactgttcaagctccccattgtcttgtggatatcacgatggctttttcctagtgcaattgtttgaatcagtatccaattagagtccacatattgtgattggatggtctgtttcttaactctcttagattccaggtttatacttcatctcttttttcgcttgctatatattgaagataggggattgtcttagggagttcctattacatagattatgctgatgatgtcagcacatattattgttcaacattgttcacataagctgttcgttccattt

SEQ ID NO: 457425 - DNA, 253 bp, Homo Sapiens
aggatgtaaaatggaacgaacagatccggcttttttcttaaaaccacaacccaagggcacataaagtatttttaagatagctgggaaatgtcattcttcactgtgaagacctagtccaacatatcaatatccacaacagcagaaccagagcagtggcaagaactgagtattggtgaaaaccaggtttaaaggggaagaacagaggaaggcttgttagtgctggtcctataggtagcaaatgttcgttccattt

SEQ ID NO: 457426 - DNA, 127 bp, Homo Sapiens
cgtctgaggatcccgaaatggaacgaacattcaaaacaggaaaaggattctaaacctcctatcagcagccagacatgactatagtctaggtgctgctattaagtgtgcaaaagaattccatttgtcc

SEQ ID NO: 457427 - DNA, 474 bp, Homo Sapiens
gctgaagcttcatttttctttttcctctccaggtttacttttagaaacttccttaaaggatgtttggtagaataaatctaagttctcttcctttttcctttcccactgctggacagcaatctgtccaatccactgtcacataagaatattcctttaaggccgatgcctgcttagccagttaaatccaaacgacagtgtttgtaggaaagggccaggttaaactggtatttttaacggctaatttgggattgacctatattatcattgtgataatccagttgaggaaacaaaaaagtatggatttagcagtagatagaaatgagaaaattggccaaggccatcataaagacttagaatgcttatgctaaactatgtaacagtagtgtatgtattgtctgatatagttctcagttataggatctttgttctggggcacagcaggaaggtagctctgccaggtaaggatctgtagat

SEQ ID NO: 457428 - DNA, 317 bp, Homo Sapiens
acttatttaatgggcgtgaggagtatattttctgattttctttttatgactataaggcagatctgacaccattagttttctttctgtcataaatatagatgaatgtaatttgacaggcgtcactacaaaataggttatagataagttcaggcatctctccttccacacagaccttttatactcagttctgatggagctgcttgaatagaatgaccaaggtttgattttaggcttctaggtcacagtttcaccttgacaacagttctttcatttccagcagtaacagttgctaggatccctaaggtgctttcattttt

SEQ ID NO: 457429 - DNA, 472 bp, Homo Sapiens
gactggcagaccaagagcatacagagcgctgaccggctgacagggctggaccgggagactctgcaggagaacctggaaaacctaatggacatccatgtcttccaccgccgccggcccccagtgtctacaccatgtgctatggagaatggcggctgtagccacctgtgtcttaggtccccaaatccaagcggattcagctgtacctgccccacaggcatcaacctgctgtctgatggcaagacctgctcaccaggcatgaacagtttcctcatcttcgccaggaggatagacattcgcatggtctccctggacatcccttattttgctgatgtggtggtaccaatcaacattaccatgaagaacaccattgccgttggagtagacccccaggaaggaaaggtgtactggtctgacagcacactgcacaggatcagtcgtccatctggatgctcaccaaatccggacacctcag

SEQ ID NO: 457430 - DNA, 249 bp, Homo Sapiens
tatatggtgagcctgaggatgagggaagcccagaacaaaaaacaccaggacattacgatctaccattgctttcataggaggccccagaaatacgttgattgggtaggcatgagaccatgagacatgactagtttcatcctgttaggtggccactgagcaataaagaatatctttctagagcctgcatatatcgcttcacccatcaagatctctactccaactcattcgggggctcacccacatcccggg

SEQ ID NO: 457431 - DNA, 712 bp, Homo Sapiens
  misc_feature (193)..(193): n is a, c, g, or t
  misc_feature (281)..(362): n is a, c, g, or t
actgcgcctggccaaaaatgtgatttcttatttcccacattgccaattccatttcaattaactataatagctatgtctattgagcactcaagcgtattctagaaactgttcctgattctggggatatatccatgaatgaactatagtccctgttattaagtaatccgtagtctgactaaaccattagaaattnaaaaaaaatggctactttcaaagacatcttggagttcaggagtcccacactgcgaaccatattacctaataatccaacctgcttgtannnnnnnnnnnnnnnnnnnnnnnnnnnnnnnnnnnnnnnnnnnnnnnnnnnnnnnnnnnnnnnnnnnnnnnnnnnnnnnnnncccagaaggtccaggtatgcccctggttcagctccttattgatttcatcaatacgccgcgttggccatctccacctcctctgtcagctccccctctagcttcttctgctcttctagggactgcttgctagtggtgatgtattcctccagtttctcaaatccgcttctgattctcttcaatttcccgcagctttttgcttgatcttgggcctctgtctctactttcttccgttcttccagatccagacggtcctggtcagctttctggtctcgattgaatttctccagctcctggcttagggtagctgctttcttgctgctcttcttcaccggtgtcgatcgtggcagaaa

SEQ ID NO: 457432 - DNA, 432 bp, Homo Sapiens
ctaggcaaatcacatcatctctgtgagcctcaatttctttttttaaaatgtggatgatgttagcacccacttcatagggcttctctgaagattaaatgagataatcctataaaggacttagcccattgcttgctcagagcaggtgcttggaggtgatgtctgttattgtctgcatcagagtgggtgggtaacggcacttctggagccctctgcttgggttcacttccagctctcctcctaactagttatgtgactttgggcgtgttgcttgacctctctttacctcagtttcctggtatgtaaaatgggttgactgtgaagattaaataagttatgcgggtataagagcttagaatgtgtcttgcataaagtagctcaagacaagtgagcattatactaattattaatattatctagtggctcaccatatat

SEQ ID NO: 457433 - DNA, 345 bp, Homo Sapiens
tcgacaggtttgttgggctggttgtctgacgggctgtgtaggcgccacttactgaggccccaggactgctgaaatggcaacaaataacactaggggctatggcagtgtatttcactgtgatgtagtaaagaattgttatctgctgattctcttcaacttcctctttggtttcaagcccctggttccaagggagtgctcctgcttgtccattagtaagtcacaagaacagctggtccaaatggctaggtgtaacagcagggatttacttctctgtgcttcagcttttgagcacaaaagtggtattagaaaaggaaacttaggctgggcatggtgctcaccatatac

SEQ ID NO: 457434 - DNA, 202 bp, Homo Sapiens
tatatatggtgagccctcatttgggcttctatgttggaaaccacaccctaccaagatgaaatgcagaagtgaaatttgtggaaagtggtctgggtggaaccctcctctaaatcccatctgagatctcaaaggacactggttctctagaagagcctagaagacagagatgggcaaggaggggtctcacagctgcccacaccag

SEQ ID NO: 457435 - DNA, 349 bp, Homo Sapiens
  misc_feature (251)..(251): n is a, c, g, or t
  misc_feature (326)..(326): n is a, c, g, or t
tgtgtgtgtgttcatgctgtggaactggtctcacacaggatgtgtttccctcatttcagttttggcagttttgggttttccaaggtaccaccagagcagtgggtgtgtgcttttggggtaccatatgctcagattaagtaggaggatgcatggacacactgccccatcttttctgacacacgcacacgtatgtacacacatgcacgcaccctccttcccctaagcaaaacgcagatggaataagaaaacanaaagctgctttcccatcccaggccgagctggaaccaagggaagcaatctcatcctgcgacaggcagtgtggtgcnctccacaccctgagatttcagac

SEQ ID NO: 457436 - DNA, 692 bp, Homo Sapiens
  misc_feature (597)..(652): n is a, c, g, or t
atccccggctcatcttagttcagtgtcaaaggagataaggagcagaaattgaggtttgctttccgtatctatgacatggataaagatggctatatttccaatggggaactcttccaggtattgaagatgatggtggggaacaatctgaaagatacacagttacagcaaatcgtagacaaaaccataataaatgcagataaggatggagatggaagaatatcctttgaagaattctgtgctgttgtaggtggcctagatatccacaaaaagatggtggtagatgtgtgactcttatcagagagtaccacccaacacttttgctttcttctccatctctgaagatctgctcaagacgtccagcaatgctctctgtgtatttaaatggaagtatttttctctgtgaagccacattttccaacatgagcctcatgaagccaactaagtgttattgaactgtaattctctcaataactcagtgtagcactttaaagtctgaaggacagcaacatgagaagagcatatcaatgtggtggagaaagggaaggggttggctttttaatttatttttcttcatcttttataacaagaaagtatctnnnnnnnnnnnnnnnnnnnnnnnnnnnnnnnnnnnnnnnnnnnnnnnnnnnnnnnntcaggttggctttaatcttatattattgatcccagaatct

SEQ ID NO: 457437 - DNA, 260 bp, Homo Sapiens; identical to SEQ ID NO: 219700

SEQ ID NO: 457438 - DNA, 301 bp, Homo Sapiens
tttaatataaaaatatttttatgatcaagccatgttataattattattcctctgtaatcaaactatttccttttccccgatattaattattttggacatttagttctgtcatgaattgagaatgtttggctacataagacataaagaatttgtggaaatctagcatgcatgctgtggaggcaaaacaactgtaatagaagggtagtaaatatggataacagaatggtgatgtaggccctagagatggtaggaagtaagtgaaaagcagggagattgtggcctgagatatgaatgtatcagg

SEQ ID NO: 457439 - DNA, 328 bp, Homo Sapiens
catttcagttccaaatattttcactaaggtattgtttttttgggcaaaaatgcatagtgaacattgtggagctgaagtgagggaacttcgatttctgagaaaccactagttttaagggttttgaaggaagagttggaggaggagaggaagagaataaattcacagttaatgagtttccagtattttctgtcgcattttacgttgtaatggaaaagactgggaactgaactcacatgcagtttgtcaaatcactttttccctagcattcaggattgatgagattaacggggtgttaaaggtaaactgaggcacataattaacatggaca

SEQ ID NO: 457440 - DNA, 287 bp, Homo Sapiens
atatctattagagaaataatctgagacttgggtttcctaaggatttgtccttcctaagctaagttatttggtccaaagtacgtttctctaaatatctctatagccaaggtagttatgttccccagttaccctaagtaaattaacatatatgatctctcttaaattggaatccactgcacttttttatcagtcccatctttatctgggtaacttctcactgttttcctcatcttagcgacttaatccaggcctcaccccatctgtcactacagaagatctgaaatgag

SEQ ID NO: 457441 - DNA, 410 bp, Homo Sapiens
gacatagattaagggaagaactgttagacaaaaaggaactaggacttgataatttaggaaattctcagtctattcagctttcaaaaactgctaaagttagaagatttgattacaagagagtatgctctggagagaatgccaaaggtttggctgagcagtcttttgcttgtgccttggaacgattttagataaggtcagtattttaatcacacagaaaagtgtttgaaaagattaagtatatgtctcatggatcccctcacagatctcaataggagccaggaataaaaatgggattatcctgcatatatttgtggaagagcctcttgtttgatggatttactccctgtaacatgtgtgggagacccacaaagtttttgagaatgttgtatcagcagaaacactgccagctt

SEQ ID NO: 457442 - DNA, 574 bp, Homo Sapiens
ctgtaacatagtacttcatactagtcatagggaacattacttccaaaagcagcccatttcatcagagatggctctaagtattttatctctcattttgaatgagacctgtacctcagtaatttaaactgaatctgctttggacctctgaagcaacatcctttcaggtatttgaagatcattttcattactgtgtctttcccttctctaaaaattttcttggctgcgcatggcagctcagggtctcacggtaccttattgggaatggtcaaaggtgcctggaggagccacagtcccaagcagtagactcagctctcctcttcctttcctgggtttactttatttttcactatcagcatctgttgcactatattgtcgttatgtacagtatttgtttgttgattacccattctccatggctagaatgtcagctccaccagagcgcaggaatcttttgtctactttgttcaccgttgtatcttctatgccttgaagagtgctgcacagagtggcctcttattaaatatttctcgaaataatacatattcaccttcattgaagatggaactcaaatgag

SEQ ID NO: 457443 - DNA, 221 bp, Homo Sapiens
cgctctagagtatccccggctcatttcagtttgggcagctgtggaagcagctgtggagaggggctcccctctctgctcagcatgctctgatctatgcacgtttcagttctatgacataaatcaataaaaagcactaaataaattaagtgagcagcagaattgtaaatcgatttcaggcggagaacagagaggttgagggaacgaacaagagactattatag

SEQ ID NO: 457444 - DNA, 454 bp, Homo Sapiens
aaaatttccatttggttcttctttatatcttctatttctttcctgagattttctgtttcttcgctgactttgtaatttttgtttgtttcaagtgtgttagtaattgctcattagttagtaattgcatttttatggtggttgctttaaaatctctggcagataattgtaacatctttgttatttcagtgttaccgtccatagattgtctttttaaattcaagttgagatttttcttgttcttagcatgatgagtgattttcaatttcttaaacctggacattttcggttttatagtaagcctctggatcttaaatgttgttttagctgacttccactgacactcttccagcagagggaggacagtactggacagttactggcaagtgggaaaagcagtccaagctccttttagaaaggaagtaaggggagaggagctcctcgttacttctggggt

SEQ ID NO: 457445 - DNA, 630 bp, Homo Sapiens
catttttcaggcaattttatttcatcttcctttttgcatcctatggacttgtgactctccgatgccctaatgaaaccctgctttctctcaacatctagaattcacagactaattctgattttttttccctagcttgaggtatggaatcaactattcttccaacaggcagtggtttctcttttcagaaaattgctttagaagccacaggcactaggtctacaaataagcttgttccatattccaactagaatttgtcaggatgacagcaaaaatatccaagagcataaatcactgtagggacagaacagataaagtctccttataaaaaatgtccatgggttcttattgacatttctaatttacctctattttaatatgttcttttgccttactctaataaaaagtttatgaatccatttttcaacttttgagcaactaatttttcttgttttcattaatgttaacaatcacaaaaagccatatattgtcataccaaatcacaagtctaaatttcactgccaccaccccaaaatgcaggcggctcatatcttctcttctttcttgaccgtcagctcagccatcctgaaaccggctttacagtgtgcagatcccatcaattctttggtcagc

SEQ ID NO: 457446 - DNA, 222 bp, Homo Sapiens
attcataaaatctagcctatgagatttaagcccccttttaaggaaggttttatcattattaccatagctccattttattgagtcttattttgtaccaagtcctctaatggactctgatatgtagcaatttgttcagtcctcataacattccttactgttgtacagagaagtaagctgaaacttcacggaaggagggatgagggggatcctgctagaggcgac

SEQ ID NO: 457447 - DNA, 519 bp, Homo Sapiens
  misc_feature (504)..(504): n is a, c, g, or t
cctcacctactgtttctcaaaatgtggaccacagactacccgatcctaatcacacggagtacttgctgaaacacaggtttaggtccttagtcagaatctcagggtgtgggggttcaggatgacaaactttgccaagttcccaagtgactctcatgagctctaagctttgagtctactgtctcatcctttagcgatgcctcattttagggctctatcctatctacatgagcagtgtcatactaagggaggagttctcagctcacctttaacctacagaggcaaacaagatgcatctcaagtgcagcgatgctctgaaacgtatttcctgactggctatgatgcaggccatgctgtgggaaggaggcattggcagcccattgatgccaccctaggttgagagtcagaggggaaggtggtctttggagatctgtctagagaatagcagtaattggtacaactgcaaggggaaggagcctcttagagaatcaagtagggatgaggggntcctcaggaatcaga

SEQ ID NO: 457448 - DNA, 582 bp, Homo Sapiens
aactcatccctgcttatgcagggagggtggaaaagaaagaatgcttaaacactgaaaaggggattccagttcattaactatagggctgtcatggactgcacagattttgtgacagtatagtaaagaaaaatagttataaagactcctcctgttcagtgataaaattcctaaatattgaaaagagttttgcaactgtggatgaatggccattgctgaataaagctaagtgatgacgtgccagctcccttcatctgctgtgaatgtttttaaagggaagtggcagacttagtatgtgtattttttaaagcataatagatgattcaaaatctgatcatgttttctatagtcaatatccatagctactaaagcattatcatattttaatgttccttattaataacaatcagaacttaacctcagaatccattgtttattggttatttacatgttcaataatgctttcttgaatagctacacaatcaccacaccgtgctaggcactgtttatgcaaaagtgaattaagtaagttttgtgtccccaacaggttgctctatctagtcaaggagggatgaggggtcccga

SEQ ID NO: 457449 - DNA, 426 bp, Homo Sapiens
ggaagtgaaatgaaacttaaacaattttcaaatcctgactggatgtaatcctgggttctctatgtcagtgctggttcagctttttcataaaatgaaatcagggtttcaccttgaccctcctggacttgtgcaagcacagggagatacaggatcatgctggacggagcataccttcagttgccagaggagttcttagtcctcagctctttattattcttgtgcatctgtttccttaaatactctctgcagaagcattagcatgaaaataaaagagtacagcaacttggaattttccatttgtagcttccttagtctgtggggtcaaagttctgtcctcagggatgctaatgcaaactctgtgtgctgttccagggcaaatgtttctcaactaaatgacaaggagggatgagggggatactctagagt

SEQ ID NO: 457450 - DNA, 426 bp, Homo Sapiens
tcatccctccttccttcattattgtaggtgttatagtgatctgtgatcagtgatctttgatgttactgttgtaattgttttggggcaccacaaaccatgtaagacggccaacttgatcgagaaatatgtatgttctgactgctccaccaaccggcagttcttccatctctctccctccctcttcttgggccttcttatttcctgagatacaacaatattgaaattagggtattaataaccctgcagtgacttctaagtgttcaagtgaaaggaagagtcatacgtctcccgcttgaaattaaaagctagaaatgattaagcttagtgaggaatatgtatcgaaagctgagacagagtgaaagctaggccccttgagacagaaagttgtgaatgcaaaggagggatgagcatggggatccgctagag

SEQ ID NO: 457451 - DNA, 399 bp, Homo Sapiens
gagctcggtacactgctcatccctcctttcaccgtgttagccaggattcgagttgacgtctaaagataggatatccacaggtagatgagaggaggagctacatagtaaagctgaagagccagtgcggagatggcacatgtttgcgaagccgctggttttatgtgcctttagttgaggttgcttagttgaagttaaggagatgggatatcaggatggacaggtcggcattgcttctaatagtatcttgaatgctatgctaaagaatttggattttatgctgcagctcagatgcggcgctcacttatgttcttaaacagggtggtgatgggatcagtgctttgtgctttaggcatgtgcttttttggtgttattaaggagggatggggatgctctagagcg

SEQ ID NO: 457452 - DNA, 420 bp, Homo Sapiens
ctcatccctccttgggacattgggatataggggattgcagctggtgggaactccaggccatgatcccactccgcaggcattcacctccagaagagaggaatgaggcttgctgtgtcaggctcacactcattagaaatcccagggctgagatgagcactcctgagtcttaacccccagctctctgtcctctccgtgctccaagctgcctcctgctggacttagccaagggactcagggacattccacacactgttctcccccttggtcactgacagtgactgttctgtgacagtgatggagacaaaggcatttctgagaacttcagaattattaccctgactcaattaagtggaagttgttctcattctcattgagcctcctttctgctcaatatctggcctcagctcttctgcgaaagga

SEQ ID NO: 457453 - DNA, 141 bp, Homo Sapiens
accgatgctaaagcacgtaggtgaaattttgaggaaaacttttgaaggacagagcaggttgacaacacactgtaaccactgatcagttttgatggaagcgatgctgtgggaagcactcagcatcacataatggtacgagct

SEQ ID NO: 457454 - DNA, 172 bp, Homo Sapiens
aggatcccctctctccacactgggagttaaatatatttaatttaatgatcattatatatgtgggggttaatatgttgtttttctgtccctttaaagtctttacatgtaattgtagctgaataatcgttatttttcttttgcatcttaagtcttagaaattaaggtaccggct

SEQ ID NO: 457455 - DNA, 376 bp, Homo Sapiens
gggtctagaggataccccgtctctccacactggagtagaccgtgtttttatatgtgacatacacaagattctttggcaagtcagtgacttgtcagtccatcaggatgaatcagcggaagtcctaggtgaggtgagaatgtcagcacagtgagccccttgccctgagtttatcgggcatcccattaaggtagctgtcatagctcctattttagagaagagtaggcagtcattgttcaagatttagcttactttaaaaactttcaggggggaaggtcacttttagtataatgacaccattagaagtggcatgtggctgtttttcagattacagccattttggtgtgcccaagtgttaccagtgtggagagatggtacc

SEQ ID NO: 457456 - DNA, 248 bp, Homo Sapiens
gatctagaggatcaccctctctcacactggtaaaagacttggctctcattttcacagagctccccgcctaggagtcttcaacttcaaaatcaaccaactcctgctgcttttaaaatttggaatgccacacccagcaagtctgcctctcagcatctactgagagtcccaggtaagacagcttgttcctgggctgtgtttatagagtgaaaagcgagaaaggccttcacatccatcgggtaccgagctga

SEQ ID NO: 457457 - DNA, 325 bp, Homo Sapiens
ctcctccacactgggggaaaggggaagggagaaatggggaaagaaaagccagcacatggttactgctgactgtctgcccggccctttttggacactggcttattgaatcttcacaataagcctgggatgtagtcatttttattttatagatgaggattttaggattggagagtcacacatttgagagactcaggggatttcataatacaccaagtgatcttatattactagggaagttcatggacaaacacacctacatccctttcacaattattggggagtcctgctgaagtatgattgtatagccagtgtgagtagaggtacc

SEQ ID NO: 457458 - DNA, 162 bp, Homo Sapiens
ctctctccacactggagatgtatgtgcctaattaaaataagatgtactctttaaatgatgaaaataaaaagtgatcaaaatagatttttgttatcccttggggctattgggagtttaaacgcaaactgcatggcttgctgtgtggagaataattatgtggtg

SEQ ID NO: 457459 - DNA, 304 bp, Homo Sapiens
ccggtacgctcactccacactggctctctccacactggtgctacgtaaagtgataaacttcagcaacgggtactatggaaacacagcccacacgacatgaatcccagctcaagtgtgtaagggagccaggcttctgagctgagtttggaaggatgagcagctagttaagcaggaagaggtaggctacaggagggggtgatccagacaggagaggaatgagctatgaagccatcagttatgggtagagacctagcaccattcgtcattctacgggcataccaccagtgtgcgggatcctctgccg

SEQ ID NO: 457460 - DNA, 280 bp, Homo Sapiens
ctctctccacactggatcttcctaaacttaagcatccagagaacaatgcccttgtcagagataaaagaacaaccagaccgggcgcggtggctcacgccagccacccactcctgcccagggtggccttgtacagagtggtcccactttgggttaatgttctatgctcccttcctgccctcccgtgattgtctgggaagcccgagagggtaggcgatggtgcagctagcccctggaggccccccaaccacatctggctcctatactaccagtgtggagagag

SEQ ID NO: 457461 - DNA, 245 bp, Homo Sapiens
  misc_feature (47)..(111): n is a, c, g, or t
ccccagcgtgttttaaagggaaaaatagcgcccccgagaatagggtnnnnnnnnnnnnnnnnnnnnnnnnnnnnnnnnnnnnnnnnnnnnnnnnnnnnnnnnnnnnnnnnntgactttcgactcagcacactcaggcacacccaaggcaggaactcacttccagcaggggtctgggggatcttagaagctcagaaaccacagccagccccaaccatgctagagagcaccatccagtgtggagaga

SEQ ID NO: 457462 - DNA, 308 bp, Homo Sapiens
cgtccatacgcagcacttgcactgcatattttaaatacatgtgaacattgtgagctgacagccctgcttcttacaaggctctcctgccttcgtactcttacagacgtagggagaaagtagggcaaacaaagtgactggaactgcggcatactttggaaatgaatgccagtgattaattgtcgatgcctttcatttgtgttagatttcattcaaaacgagagaagggcccagactcaaaatccccactgaagggaccagaagtcaactccacattaagactcgggccagagtcaccagtcatggcccag

SEQ ID NO: 457463 - DNA, 440 bp, Homo Sapiens
tctctccacactggacttcctcatgaatagtaagttcagagagttggctacaacttctgctgcactgaacacactggtagggtttctcctcagcatgggttttctggtgttcaataagatcagtacatgtgctgaaggctttcccacatgcatcacacttatacggcttttcaccagtgtgtattttttgatggttaatgagatcagaacgccgactaaagcttttgccacactcatcacatggatttggtttcttcccagtgtggattctctggtgtagggtaagagctgagcactgactgaaagccttcctgcactcactgcatttatatggtttttccccagtgtggattctctggtgtttaatgaggtctgagatctgactgaaacttttgctgcactgtgtgcacagataatagtttttctccagtgtggagaga

SEQ ID NO: 457464 - DNA, 359 bp, Homo Sapiens
ccccgtacgccgaaaaaattatacttcttagattccgttaagaatactttctggggtgtgagccacctgagttatgtagttagcaaaatgaacctggggaagtgggaagagctagtattctcaattggcaagggattgattcttcaatgggttcagcatttcacttccctctgaaattaagtggcaaagtaatagcatcccttaaaaaacaggacattggtgagaggtagaatagcaggaggaattttgaaacatggagggatggctactggaaaagaactgatgaagtgcagagtctctccagacaatggtagaaaccacaggactacattaagattgggcgtacggggagggtaccg

SEQ ID NO: 457465 - DNA, 123 bp, Homo Sapiens
ctctctccacactggggagctggtagtttgctgattggagtagagtcattgaatttcacagctttatgaatggatagatgttaaaattaggtggcaagtagtatcaacacacgtgttttggta

SEQ ID NO: 457466 - DNA, 345 bp, Homo Sapiens
ttttctcctgtgtgggtcctcttatgcgagccaaaagtggagcagtgggtgaaggcctttccacattcactgctttcataaggcttctccgcagtgtgaatccgtctgatgctgcttgaggtgtgcccttcggttgaacgccttatcacactccatgctcttatagggcgtctccccagtgtggataatgtagtgttgaatgaggtctgcactctcgcaaaaagcttttccactctcgttgcattcaaagggtttcactccagtgtgaatctgttggtgccacgtgaggtatgaccggcaggttgaaggccttcccacactcaatgcactcatagggcttctatc

SEQ ID NO: 457467 - DNA, 258 bp, Homo Sapiens
  misc_feature (156)..(172): n is a, c, g, or t
ttttacatagaacagaaatttattttctcacagttctggaggctgggaagtccaaggtcatggcactagtatctgatgaggggcttcttgctgcatcataacatggtgaaaggcaaagaggatgagagaaagacaaaaaggggccagactcattcnnnnnnnnnnnnnnnnnggaaaggaattcccactctgtacccgggtgggaaaaagccagtgtggaaagaggggatacggagcctcaaattgcgaaatcggggc

SEQ ID NO: 457468 - DNA, 533 bp, Homo Sapiens
ctgaaccaaaagtatctaacaggtctcaatcaatttagaaatctcctttgccaaggttaaaaatgcacctgtgacacagcctcaggcggtcccgaccacaggtgcccaaggttttcaggctgcagtttggttttacatattttacagagacatgagacatcaatcaatacatataagatgtacattaattcggtctggaaaggtggaaaaactggaattggggggcttccgggtcacaggtagataataaattatcacattctttgagtgactcatcagcctttcactgaatacacaatttatatatgagagggagtagaggaatagtcacttatgccttaatctggctcattgactctgaatttttacataaatagggcaggggaagcagtcagataggcatttgactcaggtgtacagagggacgggttctgtcccacacctgtgcagataagctctcggtttacattgccagggggaaattcaaaataactattttagggtggagatcttgaggtccccagtgtggagag

SEQ ID NO: 457469 - DNA, 170 bp, Homo Sapiens
ccactcaaaataatatttttattagtgcatttgcaagtagattaacattaattaaaatctttaatatacacatttcttttcttatgtgaactttggaatatgttaaaaatagatgataagaatcagattagacaggtaagcacatgtctgccctgtctcacagtgcaacc

SEQ ID NO: 457470 - DNA, 344 bp, Homo Sapiens
gtacctgagtcgtggtcagatctataggttcagctcaactgtcacaaactgaacatactcatggaatttccactcaaattaagaactagaaaatccctggccctcttagaggctccttcgtatcccttccagtcactaccaaccacccaccccccagggtgaaccctgtgcccacttcttacagcacatattagtcttgtttggaatcaaccagcctgtgctcttctgtgtctggtttcttttaccaacattatgttctcaagattcacctgtgttgtgcggcattacagtttgttgtcattgctgtgtagcattctcttttgtgactacaccacgacacagtg

SEQ ID NO: 457471 - DNA, 628 bp, Homo Sapiens
gtattgtatacacagtggaaagctggttttatttgggagacaatgggagcttttacattgttgagcaaaggagtgacgagatcagtcttgctttttagaaagattagtttggcagttacttatttgtaaccagaattagacagcaaatcgggatgcagggggagaagtcaggtgactattagtctgcgaagtaattctgggacaagagcagtggtaatggaattgaaaaggattaaaagtgtttaccaggttttagcaataaatccaatgcgaggaagaggaacgtaagatgacattttaaatttgagagtggtagtaccattaaaaactaatgaattttgattaactagtgctttaggccctttgaaattattttgaattttggttctttctgaacaatgcaccagatttctagacaaatacttaaggtgtttttagacatctatttagtgcctattatagcatggtgttagcttccgaagagacaagaatgatgaaaatacaatcttatccattagtggcattgtgagaggtctagcagtaacttgttcatcctatgccctgatccaccctttctcatttccttattaagcacacaatactgagaccagaataaagcagtgcattt

SEQ ID NO: 457472 - DNA, 425 bp, Homo Sapiens
atttcattaaacccgaccctccaagactctcaagacataaaagtatgatacatgagttaatttggtgagttgccatcatttcttactttcaagagtttttcttttctacaaattctcccatattttacgaaaaatgttttccatatccattgcctctacagttgtctatgtttctttggcacccgaggcacaatttagcgctaaaagcaccatcacaatctttcataaatattcctgtaagaattcttttgatcccaattgagatatcatctccaggtaaagacttcctcataacagctgcatttctacccaacatgatttcaatggtgtttaacaggtttgacttctcacagaaatgtcctccagcaaccactgcctccacagtgtttcagccctaaatcagccgtgtatcctctagaggcagc

SEQ ID NO: 457473 - DNA, 217 bp, Homo Sapiens
acctgaggtcaaatggtcattatttgcttttaattaagggaaaacagacatgaagtgcatcctgaaaattcccacaatggaaactctcaggcacaaagtcaaatggctaattattaacagagctgggccaaacacttattttaaagtctaatgccattacctaaggggagggtattatgcacctaccaggggtcaggcaccgagccaggttggtagt

SEQ ID NO: 457474 - DNA, 207 bp, Homo Sapiens
agctcgcaaaaataaaatggggagtgtggaggattgcatgaatctccctgtagccagtccctagtgcatggtttagtattcttgttgtctagggatctgtgagggctttgatttgggggcagtgactttctttttacatccccattttatttttgtgagaacttgggagcctgaactcccatccataccactgaatgagcggtaccg

SEQ ID NO: 457475 - DNA, 201 bp, Homo Sapiens
gcctcacttcagttctagctccaatcattttctgccttggtaacaccacacttgcaccttgcttgggctgttctgtacctggaaaactcttttcacacccaccttcctggacagcttggggaacagtagtaccaagacacttttccaaacaacagcttgggcgtccagcgctctcttctgttagtccctgtgcattatgag

SEQ ID NO: 457476 - DNA, 257 bp, Homo Sapiens
cagtttagagttttgaaattcactgccaagaaatgtatggggtattttattaaaaatacactgttttacatatgaaggcaaagtaattttcattttgtttctgaggtcatatctgatttactcagcattttgttggctcctcccagctgacgtctctctttagtaaattatttctgtggtacaaaacttagagtttagggtctgtcataagaatagtttgaagatcttttttgcctaaaccaatctgacctttgcct

SEQ ID NO: 457477 - DNA, 358 bp, Homo Sapiens
ctagcggattcccggctcatttcagctttattttttttctcttctgtatattaatatgtccctttcaggataactttcatctgttctaggcaatgacacctgctattaggtgttttctgcctttggcttggtcctcagttgtgctcatcttagaaccagcctccttttttctgttgttcagcagcagttccccagggttcactctgacacaaatcagtggtggaggaagacttgggaatagggaatgtggtctctgccctggagccgtgtgtcctttaggagaaggcacttcaaagcagcagctgttcccattacaccagccgcagctgataccaggagttcatacatgtcccaggtt

SEQ ID NO: 457478 - DNA, 221 bp, Homo Sapiens
ctcatttcagtttggttaaggaactgttctcagacttctgtggcattgagtcagttgctttggttaattctgttctctgagagtttatcctgatctctacctagacaagttaataactgtcagatatcattcaaataaatgataagtagtaaggatttgggtctttctttttgattagcctttcctgaatgcttgttactttctaagcctgcagacttcaa

SEQ ID NO: 457479 - DNA, 181 bp, Homo Sapiens
ccgactcatttcagctccctagtcatcactttctcaagtctcctactctgcccaacccacccattccaacacatatacatatatacatgtcttatctagcagtactgcaaggtctctaagaacaggttccatgtctgattgatcttgtactgggacacacagatatgaccaatactccact

SEQ ID NO: 457480 - DNA, 306 bp, Homo Sapiens
ccaaggagctcttgggtcctgtccttgtcaactcctaggtatgaaagccttgctctccagccctggctggctggtttgctaaaaggagtctatttgactgcaacagacttggtggaattacggatgttccaaaatactgagttttgtaggtcaagaggccccacgttcccctcttccctggaagagaagagaagtttgctttcagcactcgcttcctaagcttctgaagaacactcagaagggagtggcaatatggacaaaaggaggttttcgttttataaatttaatcttgattgtgtttaacca

SEQ ID NO: 457481 - DNA, 154 bp, Homo Sapiens
agatgatcccccctcatttctcatgaactttctcttgttagaaggctttcctaattactgtagataattaggaaataattatcagatagttatgtccatttatgcatgtacctaatatattttgagcacatgaataatccaggcactgtgctag

SEQ ID NO: 457482 - DNA, 467 bp, Homo Sapiens
tggctcatttcagctcagcatggctagggagacctcaggaaacacaatcatggccgaagttgaaggggaagcaaggcactttcttcagaaggcggcaggaaggagaagtgatgagtgaaagaagaagagccgcttaaaaagtcatcagatctcgtgagagctcactatcaagaacagcatgggggaaaccatgcccatgattcaattacctccacctggtctctcccttgacacgtggggattatggggatgacacttcaagatgagatttgggtagggacacaaagcctaaccttatcaattggactagcttgaactgatctctgtagaagacatgtctattagaaagaaatttcaaattaagtggaaggcagggcagcaccctttaataagacagaccaaggtgggagaataagggtgagagctctgaaagaggtgtcagcataagcaattgtatgctcccacct

SEQ ID NO: 457483 - DNA, 414 bp, Homo Sapiens
agctcggtacccgttccttgtttattgtatagttcagcactcagtacagaaacatgatgcatgtggagaatttgctgtaactattaaactcaatttccttaatttatgaaaaattttcagattaacatgatcacctctcagcctactctcaatattaagtttcctagaggagggtaaatcatccacttaaatagttaggacacaaataatacttctaaaagattctagtttccccacagagttaccaaataataggtatgatcaaggacaggttatatggttggcgccatttttcacaatttagtttttatagtgttctagagatgaattcatcttgttagctcatcaaaataataaagagtgattcgcatcttttagaaaggcccaagtgctttacatgatgaagaggtgaag

SEQ ID NO: 457484 - DNA, 310 bp, Homo Sapiens
cagtgaaatgcatttttcttccaactgagcctgtgacagtgacagttgtctcttggtgtatttgttctttttatttgtttgttccttgtctgtctcccacactgatgggcaagcagcataagagcagaggctttgcctgtaattaccgctgtgtttctagcgcctagaacatcacctggggcaggacattccatacatatctgtgaatatacgaaagaatggatgatgccccagtctctttgccctgctatagatggacctgccccccgagaatgcaggcagaagtcactttgggtccagtaactgaaat

SEQ ID NO: 457485 - DNA, 335 bp, Homo Sapiens
ctcatttcagtttggaaacacagtagactctatcgaggccaggcttggtcacttccttcccatcagttctgtgttgagttgccatctctcaagatggtaaattgtttcctgctcgcttttatcctctctggttctcttacttttaggacccttttttcagtaagtaatttgtttattagccaggacccaagactaagttatttacatgtccattgtaaatgcaatgtaaatgagagttctgataaaatatttttgtattttgtaatatcaaaggaatttctatatcgtaggactcagtggggacttgcatgcacatccaccattgtctctgagta

SEQ ID NO: 457486 - DNA, 146 bp, Homo Sapiens
ctagaagatttttgagatgatgagtgactccccaaactgacattttataaagattaatctgggaggaagtggtgtgtaagcctgcctggactgggtagtgcctggagataggaaaacttgttgagaaggcatagaagtaccagcac

SEQ ID NO: 457487 - DNA, 504 bp, Homo Sapiens
ggtccgactctagcaggatccccctacatttgcaggaaaatattttcagttcagtaacatagtcattaagtacctactttatgataggcactatagcaggagctacagacacaaagatgaacaagatctggtttctatcctcaaagtgctcatactccagtaagggggaaataaaatgcaatgtgataagaactattctaaattattcttggcaaggtgggaggaaaacttgagagtaaagctgggccattagagttaggtggagttttgccaggcaaacaagcaatggaagggaagggtattatgtttagaagagacatgagagtatatgaaaggtatcagttctagcttaatgcagactaaaataaactgagacaaatatctagaaatgataggtgaagtattttctaagctgttttttaaaaaatgcatatcagagcttccaagaaagactaaagacaaaggaactgaaattatgccgttaccgagctttaatttgtaatc

SEQ ID NO: 457488 - DNA, 381 bp, Homo Sapiens
  misc_feature (251)..(289): n is a, c, g, or t
catcccctcaacccagtacagggactgttacatagcatcttccatttggtgaacgttaagctccaactcccattgtgctaatgcatgaaagccgccataaatacatctctgcctttcagtgaatgcccatggattagagtctcaacaaacagcagcagatgcttctctaaagtttaccttcccagttgctgaaggactttcacccatgttcactctatctctgttgttttttggacacggggtctcacctnnnnnnnnnnnnnnnnnnnnnnnnnnnnnnnnnnnnnnnaatgggagttggagcttaacgttcaccaaatggaagatgctatgtaacagtccctgtactgggttgagaactgaaattagaggggtaccgcg

SEQ ID NO: 457489 - DNA, 477 bp, Homo Sapiens
tttacttcccagcaggccttttcaggcttatgcacatgtaggggtttggtttcaagagagaatgtagaaacatgcaagagttcttgaggcctgttgttagaactgacacagcatggtttccaccacattttctgttaaagcaagtcacaaagtgatctcaggttcaaccacctgatgggaattactaccaggacacatagcagaaggcaaagaaagaggttgaggaataattgcagctatttcattcagtgtaggaagcaaagcaaaataaattttcttactaccttatttaattcatcccatagagcctggacactgattttttattattactatgtaagtatgtgtgtgcatatgtgtttctgctgagaataccttgtacatagtttttatcttttagtttgcaaatggctggttttcttttctcggggaatttttttctgagatgaggatttgcttcctctgaatgactaagct

SEQ ID NO: 457490 - DNA, 463 bp, Homo Sapiens
tcatgtcttgtcttacctacggctttccccctctttctgcgttttctccaccctttaccgctgagtcagcctctgtataccattattcatgatgggaactcagcttgtcggacagttggttttaaggcacaattagaaaatattccttgatagtacaatgagtttgcagtttttaagttgtggttttggccagagatattaataagggtttggacgttgagtggaatactaagaataggaaaggggatgtgcttaaaatacatctcatgtgccttctgtttaattacacggtaatttgtaaaagagtctggtttctgtggccttgaatactaatatagactttccctcgccgcagctttctctccagtcatccgctctgaggcatgcatagtctcacttccccatgtttttcctgctggcaagaactatatgcacgctctgaggatctctgatcgtcctttta

SEQ ID NO: 457491 - DNA, 631 bp, Homo Sapiens
tcccgctctagagtatccacggctcatttcagatctatcaccaagtcttctaagtactctctccaaaatttacccccaatatattgaattcctctccatttctacagctcccacccaaatcaagccaccatcacctttctcctgggctactatagtagccccttgactggtcaactgcatttatgcttacctttctaaagattactctccacagcaacagcaaatggtgtgtaaaaaacgtaaactggttactattactattcccccagtctaaatgaccaaccaaataaaaatctttcagtaccttctcactgaactgagaatgaaataacaacctgcagcttacagcgctgtatctggctctcatttctccaatcttatttcatttctctttaccccttatcagctacttcacttcggccataccagcctaatctctttcttcgttaagactcagttcccatctcatggcattacattcttgacattccaccccacctcctgaacaatactttcttcttctggatgtcagccaggtctcaagagcagcctcccaatattgccactcacaacaattcatcatttctgcctatttgtttccttcacagaactgattacaaactgaaatgag

SEQ ID NO: 457492 - DNA, 332 bp, Homo Sapiens
ccgaccccagaggatttccggctcatttcagctccaagaaattaagatactgaaacttccatttcatggataagatatcccatttaacttaagaaaatttgcagttaattgtgttacgttttttacttcctgctggactttataattatctcctggctaggtcttgtaatgtaaaagctttctcatttcctccagctgtatcagttacatacagcatactggattttcatgtttgtcttaatataaccacttaatttttcaaacttaatttggctaaggtttttcttttaacaatagtcatatagtacactaatctgtggtgtttctttatt

SEQ ID NO: 457493 - DNA, 396 bp, Homo Sapiens
ccacttatgcatgagaatgaaagaaagtatattttagaggtgagttatcatccatgtatttcaatgcatgagaggtgccttaaagtcaagagtttcagtattgaattcatcatttacatcactatctgtacttttttcagtatctccaagctcagttaatagaaataacattttttagatcctatgaatcatcttaggcctatttcttactcccacatctgatcagtcaacaagttctgtcaaatctgtctatttcgcttattcatttccttctgtctggaactctctgcccccagaggctgacttcttttttatcatttaaatctcaaatcaaatgtcacttactgcaaaaggtctttgatgaccctccaaactgaaatgagccgggtaccgagc

SEQ ID NO: 457494 - DNA, 122 bp, Homo Sapiens
tttgttttcttaaaattctgacctggttaacagacctcattttctaatcctcaagaattgttcaaatgtgttgttcaagaactgctttatggcatacattcaggatctcaaatcagcctttt

SEQ ID NO: 457495 - DNA, 306 bp, Homo Sapiens
ctcatttcagatccaaccctcttaactatgataaaaactctaaaccatcaacaccacccccatcttgacttgtgtcaccttaggtagaatctgagcccttcaccttggggaatatgtgagtagtaaactttattttatatctgtaattcctatgttttattcatcctagcattcataaatttctgaggatgctggatgttcatataaataggtttattagctttagatagactaatgatgctttattcaaatgtgtggttatttcagatcaaagaaaaggaagcattgtgcttgacacagggctaa

SEQ ID NO: 457496 - DNA, 449 bp, Homo Sapiens
aacggctattatcagttcctcgagttatttagaggtattactcaagcaatataagaaatggcaggagggaagagcatactgagcgctatgtatggtgttttacaaaaatgtagttttcattgcactcttatatagctcataaatactatggtgcttactagataagtaaactaaaattggtaggcagtttactaaatggtcatcttagccggaagttatgaatcttagattcaaattcaagcctaattgtaggggcatatgtttgaaataacatgtaattactgagtacagttaggtattacttttgaaatgtgagctcttctttagaattttctatctgtaacccaccattttccattgacacgagagactgaatacagtttgagcagaagagtatttttacccctttgaagtgataggtgagacttgatgtagagatctgaaatgag

SEQ ID NO: 457497 - DNA, 428 bp, Homo Sapiens
ccgaccggagagtcattaatgttctctattttgttttctatttcattgacttctgctcatagcattattctttcctgtcatgtattttcttcaagattaatttatgtctctttttctaacaaactcagatcagctgtacatttcatttttcaagcaacacgaagcttgagctgaagctcagaatggtttcagagggatgtgctgacagatacctcctaattaatcatctacacatttttctagaattgtaaagacaggaaaaagagttcactgaaatttgtcaaagagataacacactcaggaagtgaagagagctttgtaagaaagacatttacagctgctcatgaaatcagagccaaggaaaaactttggaagggattaactttttatacaatttggcaagccctgcagcagtattatctcattag

SEQ ID NO: 457498 - DNA, 403 bp, Homo Sapiens
aaaaagtgaggaataggttttaatgggtcttgtgtgttttttattattcaggtttttaatcacagttctgttccaaggttatcttactataataagcagttatcttttgatcacccaattcctgaattcagtaagcaagttacaattcaaaaaggaagaagagtaaaaaccttttattgacagtgactttgccactgaattcaagggaatggaactagctgggaacccagttaaaaagaaaatatttgctccttggactacttttactgagatactgttagtaatgacttgcattcacactttcttgaattgtgaaaggataattgtaaaaagttagatgggagaatcacagttttgttgttgttgttttttctttgaggacagagtttccactcttgttggc

SEQ ID NO: 457499 - DNA, 450 bp, Homo Sapiens
  misc_feature (383)..(383): n is a, c, g, or t
  misc_feature (419)..(419): n is a, c, g, or t
  misc_feature (424)..(424): n is a, c, g, or t
ttttttttgcagactttctttacccgtgcagaccatatggaaaactggccattagtgatgtatttttctccccgggctcctgagcccactggcgtcaagttgctccatctgattcttaaattaattttcatcagttgtaaaactctcaagtgtgcacaagaatgagcctgtcttcccgtgtgaatgtgtaagtacagaaagaaggttttaaatgcacatagacacacactcttcaactgccatacgaagcgtctgcttccccagtcatttcaggaaccatcagattattcacggctgggaggccctgggagtcttacaaatctcgctattgtgggccccggaggttgaaaatttatcctctgtgggagtactcctgtccctgnggacagtgactaggaggtgaaagtcaccccaaccantcctnggcccgttggcccttggccaggccag

SEQ ID NO: 457500 - DNA, 327 bp, Homo Sapiens
agggataatatgacattaacagacaagacacttttcaggaagacaggtaagtcatttgttattttctcactactcttgtttaacagaaacatatagtggtgcatgtatatgtgtgtactgtatggaaaaagtggaattagagtttatctagaaaagaaaaaattacctcatctaagtgcagaaatgaataatacgtaaaccataccatacaattgtctctatcatatttccacagataagtcaaaaatttttaaaatcttattgttcatgcataaatgcagaaaacaatacctttagtatatgtttgtgttctattgtactttcaca

SEQ ID NO: 457501 - DNA, 574 bp, Homo Sapiens
  misc_feature (488)..(488): n is a, c, g, or t
  misc_feature (504)..(504): n is a, c, g, or t
  misc_feature (545)..(545): n is a, c, g, or t
caacttgtatggagaccatgtgggaaattccagctattgggcatttcctttgtttagctcagcaaattctaaatttgccagaaatagtcttttacgaattggaaccgttgtcttctgatgcctcagtgtaatgcttttctatcgaaaataatgacttctctattaagtcctccccatcgcagacctaccttacatcgaagacctactttgccttataggacctgggaagcagcgctgaaggcagaaagtacaacagtggtacactgctgtagggcaaactgaaaatcctgataactgtgctgaaaaactggggttgtgtcctcagttttttaaagttcttgggagaagttaatccattgggaaggaaaaaccttttcacggaactacctttttaccaaaaagtgtgggctactttaaggggtctttgtggactttgtgtatggaaacacaaaagggaagttccaagatgctgttacttgggacagccntatcccatggaatgcnggggaagttattcttggggttatggattatttgggagaatngcttatggtaccattttccacagttctgg

SEQ ID NO: 457502 - DNA, 450 bp, Homo Sapiens
  misc_feature (427)..(427): n is a, c, g, or t
  misc_feature (440)..(440): n is a, c, g, or t
ttttttttcagctcatttctttaataaggatacgcattcattacaaaataacaatttgacaagagatcagacaagaacaagagtccacataagggagatggagagcattgccaagcagaagtgggaatgagagggccgggggcaagggctgtacatgtgtccttcctatggagacgaaggcagggctcctggtgggctgaccttggcgaagctaggctctgccaggccctgattttgaagttttcagccccagggttttcagaaagcagcaaatcaagtccttagatgggcaggagtcagggcagaagggtcactatctttgaagaggcccccctaaagtcctgatcgctaaggcaggtggggatggaggaactcctgggtgccccatggcacacttgttcccatcaccttcaccagacagatgctnttttcaacttttngcctcaattt

SEQ ID NO: 457503 - DNA, 370 bp, Homo Sapiens
atccccggctcatttgagctctacaaattactctttctgaacacagaactttaaatattcccttcccatttatgacacgcttataataaatcataaaaaggactctaaacagaataaatggaattcttacattttaaaacattttcttaatataaaggataacaattcaaatcatattttacatttctacgtcttcatattgcactaaaattattttacatggaagaactagttgatgcatcataataccttagaaacattttttgatattcacatctatattaataaatatttcacagtctacttaaatattctactatagagcaaatcatctaacaaaaacaaatctatagtgttacttttttttaag

SEQ ID NO: 457504 - DNA, 804 bp, Homo Sapiens
agccctgcttgacctgtgtgatccgagaataatcttgtttaatctccacaagtttgaggactaaactgggtgccacagagaattaagtaactggtcgaggttgtatcagtaagaagggagcacggaacagattcaagctcagggagcctggttggacttcaggcccctgtgaggctgactctgtagtcctggagaaactcaacagccaggaacttaaggaccatttgtgtgtggcatttgggctaaccagactggtggctttctaaagaagatggaaagcatcaccgtttcctgtatttaaattatttggtgatctcaatactggttgttagccaaagtacacaatggagacagcctatttgctctactacttttgatgtagaaatattactaagcttgagctgattaatagaactgttacacatttctgtgctccccttactggtggcatgaaataattcttttaaaacctgccatgtgttcacatttaaaactaaaagtaatttagattgcatggatttgagaagcccatgttgacacgtaattgccaacagatgggctttcaaatgtaatgaagtgaaaatggtcagtaccccatgtgttggattttgcaattttccaaagtaagctgtcatttttggcatgtcatgctagttaagaacacaatgtatttatagctcaattatacattttctgatgaatttggcatggcattttgtttttccatcagtcacttaagacaggacatttgccattccaagaatgaattaacactcttctaagtgatctatgaactgaaatgag

SEQ ID NO: 457505 - DNA, 497 bp, Homo Sapiens
tctaaatatgctgcgagtacttaaggcaaaatgagttacctctagcttttcatcaacaaaatgggaatacatggattttgagacataaagtttttccaacaatatttttaggatgggtctttaaactctgaactcataatcccagcaccacctcaactttatctcgcaaggaagaaaagggactaggtgcaagtttaccagcacccaagatggccctgtcacaggcggcacctccctccacagccactcattttggctgcaggatataattaaactactcacgattttgtaccaactgaaagaaaacacacgacatcagagtaactgagaaacatcctttgacctttaggattcccaactctttagcttccgtgtctctgtttctcttcttccgtcaatattaacagttgtctaaagaatattttcattaataaaattatgcttgctacattcacgttcaaactttgaactcaaatgatccgtgtatcctctagagt

SEQ ID NO: 457506 - DNA, 277 bp, Homo Sapiens
cactcagttacattaaatttcttctgcacaaaattgggctaattccatacatatttttgttatataccgttcacctgttctgtagtttgtcaggcaaggtccacctcatcatttgatatccagctgtagcaattcctttccttaaagcccttcacccactgaagtcatcctttatgccagggtggtaggaagtatgttaaccgttgttacagtactcatcacactatatagctgctatttgtttttctttctgcctgccagacaaggagctccctaa

SEQ ID NO: 457507 - DNA, 370 bp, Homo Sapiens
tggagacataattcgaatcaagggaacatgatgtcaaggctgcggttttaacccctaggatatgctatcttgtgtgtgggaatatgaaagtcacctgagtacgtatctatgttcagtatagccaccatcttcccatgcaatgattcatgacctgtgtttacccttgttaatgtggcataaactgctctcccaaggccgtcacagtcaactatagaagtagctacaaataatgttactgccacagtctaaactcctctaagttgagcaaattcagaacaaatatcagaaaagcaatttatatttttagacttactaataaggtgttaaatttctcattctacaaacatttattgaactaagatgagccggg

SEQ ID NO: 457508 - DNA, 566 bp, Homo Sapiens
ctcatttcagatcttcccagagggattaaaacgtgatgaatcagcaaatccccctcaaactgttcctagggagctggttggctgtaagtcccacagaaagcatgatccttgcaggcaagagcccccacagctctggggatttttcagcagaaactgtcagagacagcctttgactcctggaatggttcccatgccagcttgaggcactgggggacattccattttctcttttgtagaccctcctccctctgtttttgggtccctgctcctggcttctgttgagtccagcttggctcttgaccctcctcgttcctgggcttggagccaccttaaggtaagagagaacccaaccaataaacatgtttggagtatcaacccaggcactatgctgggttctagagaccgcaagatgaaccagtcatgaagcccgccgtccaaaactctatgtgcacactgttgagatgaagtgagtgcacatagaaaggaaaacagggtagcaggacctgatttaacgttgaataaatgacacaccactggagttcagaggagttgatgagaatcacgct

SEQ ID NO: 457509 - DNA, 359 bp, Homo Sapiens
ctcatttcagatcaatttcatttcttgttatcactcagtagtcaaggagaaggaagcatcaaatgtttaagaaaaaaatactaaagaacttacattcaacatatatcgacaaacttttaaaaaactgaattggaaagttgccataaccagtttcagtgaaggaaaacctcaagtcagcccccataataatggtgttttccaggaaattaggtttagggtaagtggtctgttagaaattctgaaaacatttttcctctttttaaaaaacaggtcacagtaaaaattaatggcttccttcaagtacccagtacactcctatatacatgtaggtagaccataaattaccagtgagctccaat

SEQ ID NO: 457510 - DNA, 429 bp, Homo Sapiens
  misc_feature (88)..(149): n is a, c, g, or t
ccaccagctcctccagtaagggtttcaggatgctgaaatcacggtgcgggcggggctgcattccttcctggaggtcctgggaaagaannnnnnnnnnnnnnnnnnnnnnnnnnnnnnnnnnnnnnnnnnnnnnnnnnnnnnnnnnnnnncctcattttcttgaggttgtcagctgggagctgggctttgctcctggaggcttctggttttttctcatgctttctatattactccctctgacaacagtacattgagttcctctatcactcaaatctctctaacttcttctgctcgacaggtctgactcagagagaaagttccctgctttcaagatctcatgtgaagttaggttgggaaggagagcaagcagtgatgagttctatggaaactacctcccatgatctccccaccagagcccaactcagccat

SEQ ID NO: 457511 - DNA, 144 bp, Homo Sapiens
gccatttgtttcttctttatattgttttgagctttcatttgtttcaagagttgtcatcatgttcattaatacatttttatgatggatgctgtatcagttcgttctcgatctgaaatgagtcgtctatactcaagaatcagcttg

SEQ ID NO: 457512 - DNA, 247 bp, Homo Sapiens
ggtttatgaattattaatgtaacatggaaagtgcttacaataatgcgttgtacaaagtagaagctatatgttgttattgtattgctatttatctacttaaataactcttactgtagtatgtattgctcaaggacagagattgtgttgctcatctttgtgttatcccacttagcatagtttctaagcaaatagtatagttctttcatatatgcttatcaagtaaatgaatttgactctacctcctaat

SEQ ID NO: 457513 - DNA, 301 bp, Homo Sapiens
ttcagttcttggaaattttcttgaaaattttttggggcaatttctttccttttgtattcctttctgggacttctactatctgggttttgaatcttctgtactggttctccaattctccttattctgccactccttttaaaatgaacttccctccttatttcatagtgagaaataaaaacttttaatgtgaggagtgcaaacccattttaattatcaggcccagagaggcactgaaatgtaagtgtgtgacagcagtcacacctcattctcccgtgatgtgaaatgagccgtgaatcctctg

SEQ ID NO: 457514 - DNA, 714 bp, Homo Sapiens
  misc_feature (67)..(67): n is a, c, g, or t
  misc_feature (89)..(89): n is a, c, g, or t
gtggggacgccttcccccatggatccagacttgattttcatgccttttggattggcacagatgacanccgtttcagactggccatagcnttcgtacagctccacaccagtctggtgtttccacttctccctcacgtcagggttgagggcctctcctccggtcagacagtgcctcaggctctgaaactggtacctggtcagatcctcctgcacaagcagccgaaagatggttgggacacagcagagggtggttatcgggaatttggagagagtattcaggataactttggcatcaactcggggcagctcatgcacaaaaatgcaagatccattaggccaggcagagaagagagtccaggctgccttcacccagccagtgtcagtcgtgttccagaagatgtccgattcggtcaaggccacccaccgtcttccgctggccacaaaacccagtccgtagctgctctgggagtgctcgaccatcttgggggccccggtggttccgctggtaaagtagatggccagcgggtctcgactctttgtcctcatgcagttgtgctctgtagaagcctccctgtaaaacgtaaatacactaggtggcactaccacggtaaaaacagttagtagcaccaataatatgtgtaacaacaatatgactaccgtttcataaataccacatgtgaggtgctgtgctgaaagctctggcttgggtaatctg

SEQ ID NO: 457515 - DNA, 427 bp, Homo Sapiens
  misc_feature (238)..(294): n is a, c, g, or t
  misc_feature (313)..(330): n is a, c, g, or t
ttcctctcctcccacctctcttttggttactatttgcatggattatctctttccgtcttttcattttgaaacaatttgtgtcttgggtctacagtgagtattttgtaagttgcatatttggattgtgtattacatcatttaaaaaaaatccattctgccgatctttccattggtcagattatttacatttaaagtgattactgaaacaaaaaagttaattgaccggcatggtggctcnnnnnnnnnnnnnnnnnnnnnnnnnnnnnnnnnnnnnnnnnnnnnnnnnnnnnnnnnggacagagagattgactcnnnnnnnnnnnnnnnnnncttacttatggttggactcaggcctataatcccatcactttgggatgccgaggtgggcagatgcctgagcccaggcgttcgagaccatctgggcaat

SEQ ID NO: 457516 - DNA, 377 bp, Homo Sapiens
ccgttgtcagtgtgttcccagatcacaacatctttttcaatgtcttgaaggttgaaattccctagtttgcttaatgagaatccttcaatccatgatcctagatatacaggcaaaaggggttctttcctctgctgaagaaagaaaatggccatcagggcaaacacataaggtggcagacctccttcttcagggcgatctatactgcaaagctttgcccagtacctaaatgcaatcaccaaaggaaccagctttggttctagttttccaagggcagttaaatgctttgttgtcagacaagcattttcatttcccgcgctcactttacacagaagaccactttgcttttctctgcacaccaccactgacaacggcgggta

SEQ ID NO: 457517 - DNA, 427 bp, Homo Sapiens
tgtcagtgatggccagacttggggaatagctgtgggatggctggatggtaagaaggtttgggagctgagacagattgtgaaggcagagccaacagaaccagcatgtggatttgtgtggggcagggctcaaaggaaggagggacacgggagagctctatgggggaaattattgtatagtttccaagtagagaaccctgatgggaaggccctgaaggccagggtaagaagcctggcctttgtcctggggtctcaggccccatctgtttctgaaaagctggcccagggcagcagtggtgtggtgaacggtgcaaggcagaaagaaatggggccagggagggccaggtgaaggctatggcaacaatcaggctggaacagacaatgaccctggctatgagttccagggcccacccttgactactcactgaca

SEQ ID NO: 457518 - DNA, 357 bp, Homo Sapiens
ccgttgtcagtgcatcatcgtctcaacttctttttaatgtccatgggcacccatgcaacaggtaggaaaacctggcccaacaaaggcagtctttaattttgctcactggtggtaagagccggagtgcgagtgttggacatcttggaaaatttccccaggcggcacatgagatgatatttggatacttgcaaagaactttctagaatctccacagcaaagagttaaagaagtgtagattgtccctcactgtaatgattacggggtcttgtttttatttaacatggagcattttgtctgagcttctcatctccaaatgcataaccccagaaggcttctccacccttgccccttcactga

SEQ ID NO: 457519 - DNA, 161 bp, Homo Sapiens
gctcggtactctgcaaaaagtatcactttttgcatatctcctgttggcctctgcttattcatggcttctactcataacatccctagcataatgctaccttatgacctatattcaacttctactgccataccaactggacatgttctttcacactgacaact

SEQ ID NO: 457520 - DNA, 204 bp, Homo Sapiens
cgttgtcagtgtgtgctttctttggaggtgaagtaagttggatgtgaggtgacaaagtgcagggcatctgtggccctcggggaccatgtgccctgccacaggggcagccccgggaccccagccaatggctgctctacagaaacagccacccatcttgaaacactgacgacggcctcactgacaacgaggggatcctgtagagtc

SEQ ID NO: 457521 - DNA, 157 bp, Homo Sapiens
ccagaaacatcaagtgcttgccggaaaaactccatgatgaggagagggaagattacacagaccaaatttaagaatctctgccttaggaactcaggggctatcctgcctgaaccatcgataggggatattttcaagtcacctcaaccactgacaacgg

SEQ ID NO: 457522 - DNA, 311 bp, Homo Sapiens
acgaaatcgagcacggtccccgttgtcagtggctgtgacctggccgacgaccgcctgtcgaaggtcagtgcgccgctgccccagaaacagcctgtgggaaggcagggcacccacatcgactcgcagcgccgggacaagtcctctctcctccgaaacccagctactgggcttcaccatctagtccaagaagacacagatcttcgtacgcacgatgcgcggggcttggcccttccgagccactatcctacgccctagcatgtgctactctggcgatatgagtggctgaggccctagaacttcgtcactgacaa

SEQ ID NO: 457523 - DNA, 529 bp, Homo Sapiens
ttcgagctctgtacacccaggagccctataccctggggtccgctgggtcagctggctcttcaccgtggggccagcaccaaaggcctcctcactggaggagtctggggtctccactcgtggcccattggggatgggcgtgccaccattcatgaggcggtagtcagggccagcccctggccgagtcgactcgggaccatccacggagtccgagggggtagagacgtccaggaaggagcagaactcccagctgtctgagaggatatcggctgtcatgaagtccaggtggcccaggtcaaaggggccacccatgcccgccttgtcagtgctagaggtgctgctcacagtggccgtggtccagtcgtccggctccagttcaaagtcgaagtccgaggttagcttatcgatctggctcaccacctccctcagctccttggccacctccttgagctcgcgaaggatgccctcaagctgcccgatgaccatcttcatgcgctgtcgaatccgctcccgctcaccaccactgacaacg

SEQ ID NO: 457524 - DNA, 393 bp, Homo Sapiens
cggtaccctgtcagtgcataggtttctctgttctgaacgtattgtgctgaatcactgcacgtttgtaaatatactgaaatctacttcatttcatgcctagaacaggcagatttagtggcatgtaaattatatctcaactgttcaaggaaaggaaccaccttggctcagcagcatcacaggacaggacaaaacgccaggaaggacgtgaggctccatctggaccgcagctccctgagggctggaggcctgggcagagcagaggagggtcctcaggccggagtcacagatgagcaggagcattagggccccctcagcacagagtgggccacatggtggatgcccagcaggccacccggggtccccacatccctccgcctgtctcactgacaacgg

SEQ ID NO: 457525 - DNA, 566 bp, Homo Sapiens
  misc_feature (84)..(103): n is a, c, g, or t
ttgttaagaccttaagaaatgtttggcatacctttagactaagtgtttaacagttcatttagacctgggttccctaatagaggnnnnnnnnnnnnnnnnnnnngacagatcccacagtgaatttatatttggtttacaatacacttgggctgtaagatgttttaaaattattgttctttgctttaagttaataccatattagtattttaaatttatagagtacctttgatttcaatatgctgtataaattttagttacttggtaataaccttattgcggaattgcctttttactgaaaggtataaacatttcttgcatggtgctcacacactcatcacactcacacgctcatacactgtctttctgaaatatttgaaccgtgagagctctgcccacaattgatattagacctttccacatattattcttaaacccacagtcagtgaattgtttggtatttgtcaatgctaagaaggtgggactaatttaataatttgatcccaaattttagattcctcaggctattgggggttagaatccaattggaccctcaagattcagctaga

SEQ ID NO: 457526 - DNA, 134 bp, Homo Sapiens
gggaccctggctttgataaggtctgcaagaggcctctggggcaacagcttggccttcatgagttgggcgagcctgagaacagccctgaggtgggggggttttgtggttccccagttttcaaatgttcactgaca

SEQ ID NO: 457527 - DNA, 178 bp, Homo Sapiens
tttttgtatcaaatgcactttttctataatacctgtcaggaagttaaaaagggccagagtgtctggtataaatgggattgataactaacagttgttgaacgctttctatgattctacccagtttgcattaattaatctccattaacctcatttaccttccctaataacactgacaacg

SEQ ID NO: 457528 - DNA, 115 bp, Homo Sapiens
tacaccattggtttgtcgggggctctcaggcctttggccacagactgaaggctgaactgttggcttccctacttttgaggttttgggactcaggctgatccaccactgacaacgg

SEQ ID NO: 457529 - DNA, 389 bp, Homo Sapiens
tgctaccattatttgtccatggatttgtcctgggctctgggaccttatgaaacccctttcctaatgacataagaggccaaggtgcaatccacccacctttgataccagaccctgagggcttcatacctgctgatgggttttcttttctaaaaggaatgctcgccccagcagggtcctgggctgcttgagcagccagctggtgagaccatgcacttctctgttctctcctccccctgcccagtgagttagcacagcagtagcactgcccttgagcacagttctttccccaggccaaagatggttttgtgaagaagctgctcccctacaagtctcacgtgtgaaagggctcagctcagagtggagactcgctgtcaagtcttaagcgatcc

SEQ ID NO: 457530 - DNA, 360 bp, Homo Sapiens
ctctagagtatccccgtgtgctcctcggaagaagaaaaatagtcagcaagatctaaacaccccagatactcgcccagctggtctggaagaggctgatcagccaccgttgcctgtagaacaaggaattaacttggataactcaggccctaaactgccagaattttcaaaccggccaccaggttatccttctcaaccagttgaacagaggccacttcagcagatgcctcctcaactcatgcagcatgtgtcacccccaccacagccaccacagcagcagccacagtcacaactgcctcagtagcagcaggcatcaccttccagtcagagacagtctcagcagttagcccctgagttagcagt

SEQ ID NO: 457531 - DNA, 474 bp, Homo Sapiens
tgtgcttgaaaaacttcgatttaaatgttccactttaagaacacagcccttttacacatggtttctatcaaagttttctgctgatgaagctgattgaatttgcagattgctatggaattactaagggcaaacaatgcatatgcatagtcaggtctcacctagctggcatttccagctgatgagaggatgtctttgtatctccttaaagaatctttatatctttccctctcccttctttatatctccttaaagaatctagcctcttctgtgggaaaataaaaataagagctgggaaagggcacagagctaaaatctctgctctttcaatagggttcacccttagaggagggtgacagagagtcacagcctcctacttgagccaaagcagttcagctttggttttctctattggggttagatctaaagatttgtattttttgaagaagcacacgcgactggggatactctagagcg

SEQ ID NO: 457532 - DNA, 170 bp, Homo Sapiens
ccctgtaattctgcaattttaaagcgggtgtggatttgagagatcgtagacccattcttcattatatatgtaaatgctgttcctttacaaaggatatgaatacattttatattttggaatctgctggtttcaggcatgttagatcattcggctgccattgggcggggatc

SEQ ID NO: 457533 - DNA, 463 bp, Homo Sapiens
ccggaaatccaacccggcaaaggaaaaaaaacaagagagattggaaacaactgaagaaacttagagggacaggaagagaaggggtgggactggcagggactacacatgtaaaatggaaacaactggcattcagcaaattgacctacagccactggcaaatgggacctgttcacattgaccagggtccttcaggagaatgagatttgttagcaaacaggaaacagtgattttcagagtggtactaactgtgctttgcagagttcttttacttcctgttatcttgactctattattaccttgtattttgcttctacaaggcagcctgagctctttgaaaactccttagtctaaagcctctgatggccaatggtctgcatctttcccatgtgctcctgaggtacaaaatggacatttcggctgccattgggccggctgccattgtgcgggtgccgagctcgcatgg

SEQ ID NO: 457534 - DNA, 542 bp, Homo Sapiens
ggccacaatgctgactcttccctcctttaatggctgctgctaatggaggacatgtataattgtgaagttgctgctagctcataagcagatttaatgcacagtcttcaacaggcaatacagcacttacatatgcttgtgctggaggctatgtagattttgtaaaggtgctcttggaatccggtgctagtattgaggaccataatgaaaatggtcatacccctcttatggaagctggaagtgctggacatgtggaagtagccagattgctgctagaaaatggggctggcattaatacgcattctaatgaatttaaagagagtgcccttaccttagcttgttacaaaggacacttagagatggtgcgatttcttttggaagcaggcgcggatcaagagcataaaacagatgaaatgcacactgctctgatggaggcttgcatggatggccatgttgaagtagctaggttacttcttgacagcggtgcccaagtgaacatgcctgctgattcatttgagtcaccattaacttcggctgccattggg

SEQ ID NO: 457535 - DNA, 345 bp, Homo Sapiens
ctggccggctgtggcctgtctgaaattataaaataaagtaagttctactgtagaagtgtatgcagaaaaaacaaagtcctcaaaaaatgaaaagacaataaagtatcattctgaaaatcatctagcataaaatttagttatacttcctgcctatcatgcttctcttaaactgcaaaattttagtatgtagtcataacagaaagggtattttataatcaccccagtttctccttctaaatgttttactacaaaataatacagggaacaaaaagattaagctttgccaattttgaaaaacttttataggaagaactgtttcatcatttacttatatatctaagtgct

SEQ ID NO: 457536 - DNA, 413 bp, Homo Sapiens
  misc_feature (366)..(366): n is a, c, g, or t
taaataatagctgtcctaatgagtgtaaagtggtatctcacagtagttttgatttgcacgtccctaatgactagtgatgttgagcatcttttcacgtgcttattggctgttttatatcttctttgggaaaatattcaaatcctttgcccattaaaatttttttagtatctctttttaatatttatggtgacagcagtaaaaataattatacctaagttgttactgagctcttactatatgccaagcactttttaacatatattacctcactgaatccccattttacagacaagtaaagtgaggtttacaggaatttggaacccaaggtatgtctcctaaacctgaacaggctctgacttgtcttcntgggcttggggttctcactgcatgtgaacactcacacgcttacacac

SEQ ID NO: 457537 - DNA, 680 bp, Homo Sapiens
tttatatatgtacagaaatttattataaatttcattgataaaaatgatgtgcagcacataatttataaataaaatatacaatgccatttattgtaattctagaaaagttttttacagaatgcttttgttgatttttgctgactcttctatccaacctgtttgcaattcaaccatgatatgacacaaccagactacaaataaatgtttgttactatctgattcaacaaagcagtcactcatttcatggaatggatatgggctgttactcagtgaaaagacacatgagatggttcagtgctaactcacccttctgacagaaaatgccagaaagtttccaccccattgacaggcttggagtcttgagtaccatctgggtgggtggagctggcactggcacgaaacctctccactgctatcctgacagagatggggcatgtacttcccagggccacttgccaacccagggaggttttccatcttgctggtttggtgagggaggctgctttcaagatttcaagtggacactgctggcctggatagggctgatgggctctgcctccaagaggtgttcttcgctttgtggcattacctctctgaagtactttagagtactttacaggcctgctttactcctcagaatcctgctgcagagctgagggctggataatttcatgttctct

SEQ ID NO: 457538 - DNA, 319 bp, Homo Sapiens
tcgtgacacaggcctgcctgttttctccttttccattcttcctctgccagaaagcactgatggagatagtccagctgattgagaatgtgtgtgatgtttcaggaatccagtgaccttccgggatgtggctgtggactttacccaggaggaatgggggcagctggaccctacccagaggatcctctaccgtgacgtgatgctggagacctttggccacctgctctccataggtcctgagcttccgaagcctgaagtcatctcccagctggagcaagggaccgagctatgggtggctgagagaggaaccacccagggctgc

SEQ ID NO: 457539 - DNA, 323 bp, Homo Sapiens
atgcctttttattttccaggaaagtaatacattcatcttgcttttcttgcgtttaaagatcaggcgttttacgtagagtcttaagtaaatcagttttggaagtcttcatttaaaacctcaaaggcatggaagttttcgatggcaaaggaattatgttgtgatgccattcgtatctcctctcctctatatgtatggcttttgcacttgtttagttgatttaaaatgagtttctttttcatccttttcctactgcgttgaggcctgaactagttgtcagtttctgacattccgcgcactcgtatcggggggctctctagagtctg

SEQ ID NO: 457540 - DNA, 498 bp, Homo Sapiens
  misc_feature (369)..(369): n is a, c, g, or t
  misc_feature (409)..(409): n is a, c, g, or t
  misc_feature (473)..(473): n is a, c, g, or t
tatactgtttgcggtagagtaatttattgcaaaggaagaagaatattttgaaatttacatgcagaatggactgtatactgtgagagagagggttcaaggcaggctgctcataagggtgagatggcagagactggcagtagggagactccctttatgggagtcttacatgattattcataaggtggtgggaagaggtgttgctagtaagcatgttctgggtggtcttctgtgtgcacatgcacagtagctgtacatgcttgttcatatgttgcatgtctcattagcatcttaagtctccacccatgggtgtggtttttttactattataatgagcaaagcgtcagtctgagaacaggtaaaatcaaaacngtccaagctttgtagaggggaaattccgcactgaagatanctttgtttgactgagctcaattacagtgcaaatgctgaggcttattatggtgaccatacggtcncataagttgctacatcacaagaaca

SEQ ID NO: 457541 - DNA, 408 bp, Homo Sapiens
  misc_feature (393)..(393): n is a, c, g, or t
tgtcaagtccaacagaattttgatcacaagctcttggtgctcagcgtgcagctgagtagcagaaggcaaacaagcaagttgatggagaaatctctgtgcagggaagaggaagaagacgtgccacacaccaaaggttctgctttatagggtctttctatatctggaggtaatgctgtcattccttgaatcgaccactcagcattgtctgttttgtaacatatcacattcacacacaggctgaggaccagcttgttgaaggagagaccttcctttttagtccatttaaactcattacatagcatccatgaaagaaaggttctatattgcttgggacttttgataatgaaaggccaggtcgtgactggtctgtagatctcctaacccctatgctgnttgctgctacccaca

SEQ ID NO: 457542 - DNA, 371 bp, Homo Sapiens
  misc_feature (183)..(214): n is a, c, g, or t
taatacgatcgagcttgtaccgcacagtagtggtttcatgtagctcttgttctgttttcaagtggactgatttaatttttttagtggttattttaggaaaagtattccttctttaatagatcacaaaatcttccttagttttacatcaaagctactctattttgggccatccaaatcctgacnnnnnnnnnnnnnnnnnnnnnnnnnnnnnnnncccacggtccgtttatagactttgctaaacatttggcctagaaaaattccaaacaaccactacttgctgctgccagatcttttctgattgacttcaccttggtccgctattttttctttgttgttcatgttgtgctaccacaacaggtaccgactga

SEQ ID NO: 457543 - DNA, 339 bp, Homo Sapiens
  misc_feature (179)..(210): n is a, c, g, or t
actcgagtttggtacccaacaagtagtggttcatgttgctctttgttctgttttcaagtggactgatttaatttttttagtggttattttaggagaagtattccttctttaatagatcacaaaatcttccttagttttacatcaaagctactctattttgggccatccaaatcctgacnnnnnnnnnnnnnnnnnnnnnnnnnnnnnnnncccacggtccgtttatagactttgctaaacatttggcctagaaaaattccaaacaaccactacttgctgctgccagatcttttctgattgacttcaccttggtccgctattttttctttgttgttcatg

SEQ ID NO: 457544 - DNA, 298 bp, Homo Sapiens
gtgtggtgcacaataaatctgatagccttctttgttcctgtgtgtaatatttcttttttctctggctgcttttaagattttctcttgttggctttgaacagtttatgatgtgcattggtgtggttttctttatgtttcgtgtgcttgagattggttgaacttcttggatctgtgtgcttacagaattcatcagtttagaaagctctcagccattacttatgtaaatattttttctgcctccttctccttaacatataattatctgcttattagaccattttatgttgtgctacacaca

SEQ ID NO: 457545 - DNA, 441 bp, Homo Sapiens
cctcaaaaattgccatcccttagcagcctctggctctatcatttattctcttactgttgctggaatgatctttctaaagataagatgctctttgtatatattagttgcccttacccttcctgactctgtcccattcttggctataccgtggcacccagtgtccctaggctcacctctacctcttctccaatgtcatctgtgttacactctcacagaccctgtgcttcagccacaaaaggtacctcactctaccttagagatgtcatggccttttacatacttgtcttgctttgtgcagtttcttctgtctctcatataatcattttgtctgtctacacagaaatctctacactccaagtagagttaaatgtctaaatctaagttaaacattatttcccatgaagccttccccatttccacgaggtaatttgttgtaccaca

SEQ ID NO: 457546 - DNA, 425 bp, Homo Sapiens
ctccaacgatttctcttccctttactaccaaacttatttctagatgcacttctcatgacaaaggaagagttgtcctacccccttaatactcagaatgtggtcagtgaaccagtagcatcaacattaggtaggagcttgttagaaatggagaatctcagacctgcccgaaactccagattctgaatcggaatctgcattttaactcaaccccaagtaattcatatgcacatgaaagtctgagaagcactaatttacatctttctattgtcatggttcagaatattatctcctcctgttttctccaaagcacacccagtcattcgtccccttcttctataccacatcttcttttccactggctccttcccctctgcctataaacagcctaagtctcccttaatcttgtcgggtaccagctcgagttc

SEQ ID NO: 457547 - DNA, 392 bp, Homo Sapiens
gggtgtgcacaagagcgaaactccgtctcaagaatacaaacaaaataaaaaataaagactacatctaaccaggtaaggtcacaaacaaggaaactcttccactatcagttctcaccagagtattctgtaactgtaaaagattaggccttcagcagctcaaaactcagcatctgctgcctaaggctctgccacctcaaagactcttccttgtaagactgcaggccaattgcccaccaactggcccagaccaagatgccttttgtcttccttgctccctctaaactggttccataacgtttgctcctatatctttttcctcttgatgctaagcattattttgttaccttgtgtgtgctgctacccacaggtaccgaactcgagtcgtatcatgt

SEQ ID NO: 457548 - DNA, 479 bp, Homo Sapiens
tggtatgcacaaccctaaaaatattttaaccttttacaatttgtttttgaaagctgaaaattaacctgcatgttgtctgccactcatgcttctctcttccactcttcccactggttcttttgaatttatcacttactcatcaagtattgcaggggttctgtatacatttctgttttggggtctgtcccagagaataaaaggacaaaatttgtttaaattctgacctaattgtgtttgaaaactaggtatagcaaggaaatttcaaaaaaattatctcgagataatttgcttttataaaaatatataggcttaggatttgttttggtatctatacaataccaatgggtgaaagcaaagctagacttaaatgctgttacttctttccctgaactccaaccttgaaataacactttggtgaaacagtgttagtaattgatttgttgctacccacaggtaccgagctcgattgtatcatgtaa

SEQ ID NO: 457549 - DNA, 501 bp, Homo Sapiens
gggttataggacgaacacatatgaaatgtccatcagggaagctcattagagattcaatgctcagggttttgttgggtgctggtaggcaccctctgcctagtgggtgccaatgctatgcagtcccagaaggaaagcataaaccaaattgactgcacacattgcaaggcacagtgagctaccctgattgtttagggaaagtttcatgtggctgtagggaacagcttaccagtcaatgcccaaccttgcaggcctaccttctaaagatagtcatctctggcctgccatgtttactgttttctgcacagtcagccaccaaccttatgatgactgactatgcagaaaagaataagcagcatcatagctgatgccacaaaactctattcttttaaaggcaggtggttcagtgaatattgtggcaccgaggcatctgagaggaaggtgtgctcaggatatgaccattcatttctctggagcattaattctccctttgtgctacccaca

SEQ ID NO: 457550 - DNA, 615 bp, Homo Sapiens
tacatattacaactcgatctcggtaccctgtgtgtagcagcaacagtatgtcaatttatatagtcagcaacaattaagggttgattagggcttagagcagaatagatgcccagtttctgaatctgagccaattttcagattcagaactttttgaatgaaggggagcctgggccataaacaggaagactccaatatcatggtgagattatttggtaataatttgcttgtgctttgtcaaaactatctatggccatttaatccagtaactcatcacaggaggacagtgaatacctaaatatttcaaggactattggacacagaatttgaattaaaattaatatttgttgatatttgtcatcatgacctcttagaataggaacagtgggagctacataataaatgaagtcctggctcaggtttggctatggtgtgttccctgagtccatgaatgcccccagtggtcattttgccagtacctgaatgtatacttggattggacagacttgggagttggcagaactcaacattgattccttggccaataagataggagccatcatagtggataaggcaagtgaaattctccgaaacagcccttaattggcggatctctag

SEQ ID NO: 457551 - DNA, 493 bp, Homo Sapiens
tgtaagtcaggatattgccttaagggggtgctcgggaatctggttgtgtagacccaaaacaccaaggcagctctgctaagtcacttgcagttttattccctcccatttctctttgggcatcctgtcctagaactgtcaagaaagggttggtattttatttgaaggaaaatgtgggaaggaggctcagccaagcattatcctattcaattcagaccatcacgtgatagggacaagcccttctcaatctctgctgccactcacatcagcagctttccagaaataagcaaagggaatggaaaaacccttaatcgccaggccacggtacatgcaatttactggtatctattgccctgtctttctaagaagcttcttttttgggagatttcaaaaaaatgatgagaacccggcacgggatgaagctatgagggtgccccatgtagtgtgtcatcttcccctttcccagcatcaccaggccgtctctgtcatgtgctaa

SEQ ID NO: 457552 - DNA, 567 bp, Homo Sapiens
  misc_feature (229)..(300): n is a, c, g, or t
tgtgggtagcaacacaacctttatgaacttacaatatagaaagggtgattattccatctgacaatgagtaggatacaagccattcaacatttgttaagagttaagctaaaacaaactacctggaggctaaacacaaacagtataataaagaaagcttctgaatcaagttatgagtatcatatccttttctggggaagaaagttacacttgtttttgttgatttaaactnnnnnnnnnnnnnnnnnnnnnnnnnnnnnnnnnnnnnnnnnnnnnnnnnnnnnnnnnnnnnnnnnnnnnnnntcatttgtgaagaaatgtgatgctgtgtttcaatttttggagtgaatttttcctttggtcacttcaaattttatgccttttaaactcatttatgtgctcttttacaactttcttttgacaaactttgggaaaatgcttgtgtaactgacctttttactaattattatagtgcttaaaggttcatattctgtcctagttcttccttcctctacactattttggaaacatatttataatttagaggagctagaatattaattgtgatac

SEQ ID NO: 457553 - DNA, 389 bp, Homo Sapiens
tagcaacaaaactggagcttcacgttttcacagaagagaaagagcagccgcagagcaaacttgtacctcaggaaaggagtcagtttgctcataatttttattaattccaaagaaacttaaatctaagtaagaacatgatgcctgttgtgcagccagaccttcaaaatgagtccccagcccccttctaaccaggttgcttccaatgcatccttcccatgtagaaattgtatcgctttccttgttaaagaaatgtctccatttgtcgctcgctggtgcatcactgcaggtccccatcagagccacttgtaggtctttagacctacaagtttagaccaagttcctttaggaacagaggcttaagctgagctgactactacttgtgaaccaca

SEQ ID NO: 457554 - DNA, 461 bp, Homo Sapiens
atctgaccaagagataggtggccaaaagtcctcaagacagcagctaagcaatcggatccatcctccaccactgctgtgtttgcttgttctctttcttcaaaaatatctgccaggctgttcttctcatctgccatcagaaaagtcttttccctgtctgacagtttctcttcctcccactctccctcagcctccatcataatccatcgctcatcctcctcaaactttagctcagactctgttttctctctcaggctgggggttatgagaacatgcaattctggatctaacagctcttcactcaggcaaggggagagaggtggcatttccacagtgccggctgtgtccccgagggggtgctgcttctcactgaagcctcccttagctaaactttttgctggccctcggccacggttgcacttgagaatctggattcctgcattacatctgtgttaccacttgtt

SEQ ID NO: 457555 - DNA, 415 bp, Homo Sapiens
tgtgtagcacaaagcagactccatcttaaaaataatctttgtcatatagttcgaacatatctatcttatgaggattagtgtctgtgattacatttttcattcagtctgttgtcttcctggttgttggaatgatgagcagcttcctactgaaacctagacatttggggtactaatttgtaagactctggatctgattcatagttctattttagttggctttttctgacactgctctggcagaagtcagagggccaccatctcattactgccaggtggtgtcaggagcctgcttcactgtttcatcactgttgaccctgaggagttgtgcctcctggttatggatgagtgagaggggagttcttattccttagtaggccaccactcatatggaatgtctcattgttgtgcacccacc

SEQ ID NO: 457556 - DNA, 394 bp, Homo Sapiens
  misc_feature (44)..(141): n is a, c, g, or t
  misc_feature (164)..(209): n is a, c, g, or t
  misc_feature (211)..(276): n is a, c, g, or t
tcagcactctgtatctagctaatctggtggggacttggagaatnnnnnnnnnnnnnnnnnnnnnnnnnnnnnnnnnnnnnnnnnnnnnnnnnnnnnnnnnnnnnnnnnnnnnnnnnnnnnnnnnnnnnnnnnnnnnnnnnntctagtggggacttggagaactnnnnnnnnnnnnnnnnnnnnnnnnnnnnnnnnnnnnnnnnnnnnnncnnnnnnnnnnnnnnnnnnnnnnnnnnnnnnnnnnnnnnnnnnnnnnnnnnnnnnnnnnnnnnnnnnggatgtgggtggtgccagataagggaataaaagcaggctcagccaacattggcaacacggtggggtggcttccacaccgtggaagcttagttcttttgccctttgcaataatcttgtt

SEQ ID NO: 457557 - DNA, 566 bp, Homo Sapiens
  misc_feature (115)..(136): n is a, c, g, or t
cccccggggtccctcccgagcttgtttaaccgccggcccgtgcccaacttcaaagcccccgggttgctttttagggaaccccctggggggccaccaaacggggaactttttcccnnnnnnnnnnnnnnnnnnnnnngaaatgacccttatgtatgtgcttatcttgtttcttagctgccttccccactagataacagggtccgggtgccttgtcctcccattgtctatttccagtacctggcacacagcaggctctcaatgaatatttcttgaatgaggggggcataaagatttaagctggtctttcacctgaagtgtccctcaatttaaagtggttgtattgagttaaaaggcactgtcaccctttaatggaggttgaatcccagccttgtggtgagcaccattagattatcccaaagcctgttctgtagtttctggtggttggcattttattccttgagagtcccagagacttttttcctcgaaagttccagagtttatttccctttactcctgtccagagctgattcactgaaagtcttgtgctacccacagggaccgaccga

SEQ ID NO: 457558 - DNA, 282 bp, Homo Sapiens
tacacagaggtcctacacatgaggctcctgcgtgcaccgatgtgtactgactgccgatgtgggccccaccctgggttctgaagatgcccttcttaatggagagctcccgatggagggctccaggactgatgctctccctaaggaagggaggcctcagatttggagagggacaccaacaggaccagaggaggactgaggggcactggcaccaataagtggaagggaacagcgtggtaacaaaaaagagccatgccactggcatgctggagggagcctcatgtg

SEQ ID NO: 457559 - DNA, 107 bp, Homo Sapiens
catgtaggccctatgatgatgtttccccctccaggctaatggaacggctagtacaatgcctgaagtgagaaataatccactgtatttgaggaataagaactaggaca

SEQ ID NO: 457560 - DNA, 194 bp, Homo Sapiens
aagaagattgcggatgagaaaccaggttgaataagattaactcagaaggggcatgataatattttcatgtagtctcatgataacataatctcgattactagaagagttattacacagtagtgtggaatgagatgaagtaattgagtgcctactgcatgtcaggcacttcacaaagagtattcatatttaatttg

SEQ ID NO: 457561 - DNA, 158 bp, Homo Sapiens
cttccttccaaatctgcctaacaaaggcagcaggatctttaatactgttcagctttgtcaatggagacaggatactctagaaagttgagagattccctggtccagtcctgggggaaggaaaaaatatgcagtttagcatagatggttgtactgtccgg

SEQ ID NO: 457562 - DNA, 277 bp, Homo Sapiens
ctcactccccttccaccctcagtggatgataatatcaaggagtgtcctcttgctcctcttccaccctctcctcttccaccctcagtggatgataatctgaaggaatgtctctttgtcctgcttccaccctctcctcttccaccctcagtggatgataatctgaaggaatgtctctttgtcctgcttccaccctctcctgttccaccctacatctggatcattatctcaagactcctccacttagctactcagtgagccgaggtggccctagcaggac

SEQ ID NO: 457563 - DNA, 752 bp, Homo Sapiens
  misc_feature (739)..(739): n is a, c, g, or t
cggctccggttttgggctgtcgtgccccgggagtatgggatgtcggggggacgaaagctggacattgctgtgggcttctgtcttcctgtgttgcggaagatactacttgacctgcagagaacccacgaggatgagtctgtcaacaagctgcatcccctgtactcccgaggcgtgctctccccagttcgccacgttcgaacgcgtctctatttcaccagtgagagccatgtccactccctgctcagtgtcttccgttatggaggacttcttgatgagacccaggatgcacaatggcagcgagctttggattatcttagtgccatctcagagcttaactgcatgacccagattgtcatcatgctttatgaggacaacacacaggatcccttatcagaggaacggttccatgtggagctacacttcagccccggagtgaaaggtgttgaggaagaaggcagtgccccggctggctgtggattccgtccagcctcttctgagaatgaggagatgaaaaccaaccaaggcagtatggagaacctgtgtccaggaaaggcatcagatgaaccagaccgggcattgcagacttcaccccagcctcctgagggccctggcctcccgaggagatcacccctcattcgtaaccgaaaagctggttccatggaggtactttctgagacttcatcctcgaggcctggtggctacgctcttttcatcttcacggcccgcacatccgtactgncccggtaccgacc

SEQ ID NO: 457564 - DNA, 506 bp, Homo Sapiens
  misc_feature (31)..(31): n is a, c, g, or t
  misc_feature (42)..(42): n is a, c, g, or t
  misc_feature (57)..(57): n is a, c, g, or t
  misc_feature (67)..(67): n is a, c, g, or t
  misc_feature (97)..(97): n is a, c, g, or t
aaaaaacccttcaaacccatctcggtgcttnaaaatggcagntggtaactttttgcnaggctgcggncgtaatcctgaaaaatcggggcaactggangaacccacccagcactgtggtgctgaaacagccctgtgcaactgtgagcctaggccactctgcttcatttctgtgggtggccgtgaagatgaaaagagccggtaagccaccaggcctcgaggatgaagtctcagaaagtacctccatggaaccagcttttcggttacgaatgaggggtgatctcctcggaaagcccagggccctcaggaggctggggtgaagtctgcaatgcccggtctggttcatctgatgcctttcctggacacaggttctccatactgccttggttggttttcatctcctcattctcagaagaggctggacggaatccacagccagccgggcactgccttcttcctcaacacctttcactccggggctgaagtgtagctccacatggaaccgttcc

SEQ ID NO: 457565 - DNA, 205 bp, Homo Sapiens
ttttaacggattcttcaggatcaacatgaaaaattaagtttaaaggaaaactagtgtttttcaaaaattgcaaaattacttcgtatttttaaagctagacaaggcatttttaaaaaaaatttaacataaacattccaagcatgtgtccctcgaatggcatttgagaaaagggagcacaggggaagtctcttgcttttcctattca

SEQ ID NO: 457566 - DNA, 252 bp, Homo Sapiens
atgatggaggtcggagtacccaggtatgcgataggaatctagtgtagatggctggaagtaagagtggccaggaaatgctaagttcagtcttgaagtgtgactgggaatcaggcagctagaagcatgagcggcttattccaggcagaagtatgagccacagttagaagcagcatagggacgtaggggacacatacggcagttgaggacttttagctcctaacctagctgagtggtacggcctgccgattctgg

SEQ ID NO: 457567 - DNA, 208 bp, Homo Sapiens
actgaaattttacatggacacaaatatctaggtgcaggtaaaattaaagctgagatattcagactcactgccagttggaggaaaaaaatcagttataacgcattttttggaatagagggaaataatttgataagtacaactttttgtttgaggtgtagctaatgttagacatgactgagctgttctacacataagtgttgaatagtga

SEQ ID NO: 457568 - DNA, 320 bp, Homo Sapiens
  misc_feature (209)..(264): n is a, c, g, or t
tccagaatattcatgccgaccactaggagagtccaaacagtacattcttttgagtagcaattatgttattggcccagttcaaggcactgtgttaatatactatttcactttggatttgattatgccctacagacctggctggtcaaggatttgatatacacatattggcttgggattcgagctttcttttttatttaaatcacaaaatnnnnnnnnnnnnnnnnnnnnnnnnnnnnnnnnnnnnnnnnnnnnnnnnnnnnnnnntgggtatgtttcaaggcatttttttcgcatgagcgcagctgatgcgataaattgac

SEQ ID NO: 457569 - DNA, 424 bp, Homo Sapiens
acacagaaagttaaagatgaaaaacaagcaaaggaaaaagaagtagagagtttaaaacttccttcagaaaagaacagtaataaagctaaaactgttgaagggacaaaagaagatttctctttgatagattctgatgtggatggacttacagacatcacagttagctctgttcataccagtgacctttcatctttctgaacgcagatactgaggaggaagttgtaacgtctgatagcatggaagaaggagagattacgtcagatgatgaagagaagaacaaacagaataaaacaaaaactcaaactagtgattctagtgaaggaaaaactattaagtgtacggcatgcgtatgtctctacaaccatatctttacatcaaaaatacttatagtgattactgatcgatgaggtttttctcagacaag

SEQ ID NO: 457570 - DNA, 255 bp, Homo Sapiens
  misc_feature (16)..(16): n is a, c, g, or t
  misc_feature (77)..(102): n is a, c, g, or t
gtattttctgtttaanctgctgagtgttctgttacagttaccttggagatgagctattctggtatcggtgacagttnnnnnnnnnnnnnnnnnnnnnnnnnngaagactgagccaacagttttctagtactatgtgcacaaaaagttaatataacaggcctgagactgcaaatacttagaaaggactgcttataagactggcctttagctggtgttaggaaacacggagtatgagagggttgccaccattccata

SEQ ID NO: 457571 - DNA, 322 bp, Homo Sapiens
ccccgactagccagaccctgtgaggctcatccggtactcaatcaagtgtcttgaatgtcacaagcagatgcgggactacatggtcctggctgcacatttccacgaggactacagaggagacacagggtctgggtagagtggcagggctggaggagggggactggcactgcccgaagtgaggccatgtttgggagaggatgaaggggctggggctgctggtgccgtggagttcacaggggccgacacgaacatttggtccgcagagatagcttcaccagcagctgggaacactgcatacgagcccctgctctgtggtaccggg

SEQ ID NO: 457572 - DNA, 143 bp, Homo Sapiens
ctgttattttcacaaagtgattccaaacactatgaccttctgctttcacagacctgtcttctcaacttccacactgttatctgaaccttgtctatacttgactctcaccgccccatcttgtcattctgacgttctacatacca

SEQ ID NO: 457573 - DNA, 620 bp, Homo Sapiens
cctttgccccctaattttattttgttttccctcgttgtgatcaattttaaaagacagttctcaagcagcacaaaacggtgtaacttatgcccctcccttatgctccactaaaacaagtctcttatgtaaatattagggtcactcaattccacaccttagaaccactggggttaaaaggcaaccttctgcagataagtggtcttaacaaacaaatataaaagcagactttagagtctgggtttcaactaattctctcaaagagggactgagcaggactcataaacataaactcatattccctacagattaagactttttatgataatacctaattctactgcttaatataagacagcgttcagatttcactcttccatatacatattataatgggacaatatacacttttttaaaagtctgagtttttcttcccaaaataacaaaaatattttttaaagtgcatgtatcaattcattaagaaaaaaataactaagaatggtctaattccaaattgctacctacttccatgataaagctaccctgttatctaaggattgagttttaatatcagagtcctgaggacatgtcatcaagcaacagaggttagcataaagcccttc

SEQ ID NO: 457574 - DNA, 488 bp, Homo Sapiens
  misc_feature (13)..(13): n is a, c, g, or t
ataatacatacanatgtatgattctgtgtggcttggagaagttggcatgtgttacagcaagtcttagtattgtgaatcatatctgtaattgtaagaagtgtctgtatgtccagcgattctatgcacagggaggtaagtgttggtgttatggagcaagaaagtgttttgtgggattagtcgttatgttgttttaaggatttgtatatgtagggttatgtccatatactgtggctcctatttgggtgttctggagctagtctggtttctggggggtcattctaggtgtggcataatgtatctctatgtttcagatgagtctcagtgttacaagacaaggctagttgaagtggggtatgtccaggccttgttgagtctatgtgtatttttgagcatttcttctgattttaaactaagttttgaagagacaaggaagtgttttatggagacagtttgtgtgttaaaggtagagcctgtgtagttccatgtgt

SEQ ID NO: 457575 - DNA, 352 bp, Homo Sapiens
ggggtttcacgcatgcgtgccataggccagtgcttgaattcttggggaatgtttatgggtatggagatggggttaataagtgttctgaagctgcttgcacttgccatttgcaaccaggagttgttttccttgttatgctgttgttatatattttgtgttttgctagaagtatgttgaaaagcacaggtagtcataattcagccaatagctaacagcactggtttagtgagaaaaagcaagacatggatctataaatagaccaggaatatcaccctagttctgataacttacaatccgtgacatcagggaagttagttaacccttctgagacttgtttcacatctgtgataag

SEQ ID NO: 457576 - DNA, 309 bp, Homo Sapiens
  misc_feature (215)..(215): n is a, c, g, or t
aacaagtttgtttactttgacacccacgtataactaacaaggatcttttgagtcagagattgagtaacttgccagagcctgtttggaaatagaccctgaggatttttcagtatcagtggttggttatgcaatgtctgtggcacgccctataaactaagagaccacaccttaaaagtgttacaaacaggaaaggcatgttaattacttactacatnactttgttatacaaggaactataacttattacagtccgatgatttctggccttgatcgtttagggttcacagaagatactgtagtgtactataa

SEQ ID NO: 457577 - DNA, 354 bp, Homo Sapiens
gctttggcccctgtttcgcgtttttccgagcctcggtaccctccccgtacgcccaagtttaaaacagaaggatatttaaaatatgaaaacccagtccctgtcttagaagatgactcatatgctaagacagttctgcctccctgactcagaatgctgagtgactcctgacattattagttggaatgggaagtttaaggtcaagttggggtctttacctgcagtgacgaaaccacttcttgtaatgacagacttttactgtgttggttagaatagccagtccttggggagcctctagtctgttgtagctgaatgatttggaagtgttctttcatacttcactgtgtcctcagcagt

SEQ ID NO: 457578 - DNA, 407 bp, Homo Sapiens
ggtgactctacaggatcctttccccgtacgcccaaaaaggagagagcatgttcaccatgatggtcctgtttcacccagtgcgtgggggtgctccagatgtgagcagtacgaacgaagacaactttcctttgatgtgcgacacaacttgttaccaaccttccccaagcatatcttcctgtttcctgtgggattgtagtgtacacttgtttaatgattgctaaagtaatggagaaacaaatgtgaatctggcctgcatgcttcctttccttcctcagaaacaaagtggggctctggaattcttgcttgtgcctggtgggaatggtgtcaggaaacacaaccctgagtttcattaggttgagatttggcagcaaagcagccttgggcgtacggggggagatcctctgaga

SEQ ID NO: 457579 - DNA, 372 bp, Homo Sapiens
aatgcaggcgctgtgcagtacaggatggactgcaggcggtatttgactgggtagatattgcaggtggtacattagcttcaatgtctccaattggaacagatctcggaaactgtcaagcagcagattgaagagctaaagcaatttaagtctgaggcctatcaacagacagcatagaaatggaaagactgacatcatcacagcagacgcttttgctacagaacgtgacagaagagagtgacaaacacactgttcaagacccattaatggaactgaaattgatatgggatagcctggcggagagcatcatcaacagacagcatacactggagggtgctctactaagccttgggcgtacggggagggtaccgcgct

SEQ ID NO: 457580 - DNA, 165 bp, Homo Sapiens
actctacaggatctctccccgtacgccaagcattgttgaacaaatgtatatcattattctgagagactagattacgctttcacttattatggggaaacctagggggagaaatcccacaaatagcctaaaatcccctaaccgacatgccatttgggcgtacgggga

SEQ ID NO: 457581 - DNA, 378 bp, Homo Sapiens
caggatccttccccgtacgccaaactccccttggctggcctcacagccagttgcgcaacattcgtcaacaccgctttccacttctcatcagctggcactgccaggtttcctagcttcaaaacttaggtctgtctttatcactctcatatagactaggtttgaggtaggttccagtgatttttatcccagatccccattctccactaaaataaccttcaatgtagtctccatttggcatagtcagtgttccaaagtaatgcttaggcccagaagacttcattggtgaattctcccaaacattcagagaagaaataataccaaagcttcgcaaactttctagagaataggggaggagggacactccccaatacttctact

SEQ ID NO: 457582 - DNA, 302 bp, Homo Sapiens
tccccgtacgcccaagagtgagtgcttttacatttgaatgcaaaagttctataggtcagtgatttccttcctgacttgtgtcccaaaatgtatataaaatgtgtttgattacaacatttcttcttttcttcataaattgcccattatgaaaattttatttgggaaattgggagaaattggcctattaagctactagaaaaatgtcagaatccatcccataaggcttcactagtttaaaatcacagggtttacaacatgtgtatgtcgtgttgtaattctgggcgttacggggagggtcacgc

SEQ ID NO: 457583 - DNA, 406 bp, Homo Sapiens
aaaagggaatggttaagttacttcctaatagtagagttttccctgggaccatgggaaaaggatgatgccaataaatggtgttcgttataggttagaatatataagttggatttggccaaagttcatccagtaataatagttctattttattggtaaaagagtttacataatatataatgtctgtgttacccagtggtggcatatatgtgttggcatgtgtgcagttaaattctagaagtacttcatggcagctgtttgatgacagggactttatctcatgcacttctacgatatatatgagtgtgcatccattttagaatcgaataataataatattcagtgctgaagtggaaaacaaactaccctgtgggaagtacagtgggctacgttagcgatggtagatcac

SEQ ID NO: 457584 - DNA, 432 bp, Homo Sapiens
tccccgtacgcccaactatgtagtgtctgccatctgaatcccatagctattgaacgaatccatcagaaccttgccttgaatactgcactcaggtttaatgctgtggggcttttcttgataaggttcttggtgataaccaaggtcttttggtccgtggcccaaattgcacacccgtcccatcagatagcagcctggtgaggctggaggcacagtgctgctgtattatttgataatgactagaaaaggctggtccccttctcaccagccttctgtgatgcttatgtacccatgagaaccgtttgcccagcatcttagtggggatggctaagtttggatcctagagaacaggaacatttaaagctacctagattattcctatctcaggtctttcctgggtttagtgcacacttgggcgtacggggatacaatcct

SEQ ID NO: 457585 - DNA, 470 bp, Homo Sapiens
cgagctcggtaccctccccgtacgcccgatgatttttaaacaaatatcctacagggaaagggaagatttagaagaattttttacatccctttatacttcattaaagcctttttggtgtatattgtgaaattatatgcctagtccagaattaaggacctggaataggctaaacaagaaaatacaggttagtagagttataattaatcctcataagtcagagaataaaatgggcaagaagagtagtcaagtacattgaatagagtcttccattaacgtaattcagaattgccctggcttcccaagagcattttcatgtttcactggtcaagtgaaatacctaccctgtcttatctcgatcttcccacattacttacttccttattaggttcctctgtaattctattgactgaaaattcactgctgtggaaatatatctactagtggagttaatccaactatttggcgtacgg

SEQ ID NO: 457586 - DNA, 240 bp, Homo Sapiens
cgtacgcccaagagataccttttccgatgccttgtcttgcacaggtggccctgaacctggaggaggaggggctcggcgcttcttcatctccgacttcacggacacccctgagatgctgcccagcgagagggatggacccagcgtaagaggaccgtgagtgcatggatggggagttgggggtcgttaaacagcccttactattgcttctttttgggcgtacggttgggccgtacggggaaa

SEQ ID NO: 457587 - DNA, 405 bp, Homo Sapiens
gtccctcgtcttttgataggtagactttgctgtaattataaggataccgagaaaccactttcaataatgctatcttaagctggttcaataatttgtggtgatattatttaatttcaaatgaagttattgcatggagcaattattgatcaatatgttaacataagaaaaacatttgcatcaactaattcagcagcttcaggtgtggagaaagaatccccatgaaaaagaagtgaaagttagtcttctgtggattcttacttttcaaaggcatgtaaagctacaggtaaaaattgattatgtgattcatttaaagaatataagactgagcaaaacagttcaggcctttatacccgagtgtaaatactgcaagatatctgaataaatttaacagtataatttactctt

SEQ ID NO: 457588 - DNA, 191 bp, Homo Sapiens
tcgtcttttgataggctagagcattatattatcaaacaactactaaggttacagaattgatttctgtctataaattttcataaagaatctttgattggatttttaaaaactcttattatttgttcttctatcctaacgtcaggaaactgagcccagatacattctctatacaatctcagctgtagtaccta

SEQ ID NO: 457589 - DNA, 277 bp, Homo Sapiens
tcaaattttgataggatgagaagagcatgaaggacaagaagcttaccataaaaaatatgagagaaggacatttcagactaaaggaacaagccagttcaactgcttagcatatttgaggaggggaaagtataaaactgtcacttaatgagcatagatagggatcaagttggacaggaaggctagatgagaatataaaaagtttttgaggtgatggcaagaatttagccccctgtttttcatatagggatcctatgcctatcaacaagactgtgggtac

SEQ ID NO: 457590 - DNA, 299 bp, Homo Sapiens
cctggggtctgacgtgtgtgcgtgtgagtgtgtatacatgcttaacgtatatcacgttacttcacctatgtcagtaaccaggccaaatacttgttttagccctcagtaaaaacaccaggcacttcctagttgtaaaattattcaagcttcttaacttcctatcctcgatgcacttaatcatcaaatggtgataatagcgccgcttttgggggagtcgttccagtagatggaaagcatctggaacaggtgtcagcaagctcctgccgactgtcatctcagcggggatcctaaagagtcaa

SEQ ID NO: 457591 - DNA, 275 bp, Homo Sapiens
tcgtcttttgataggcatctaggttacataggaagctggcaactgcctcgaggtagctgctggattgagagcctgcttcccatcttggattcttgctcttgctttctattattttaggatttcctttattttcttattgtcttgcaaactcagctgtgccctagaacaggtttttaaaaagaattgcatccaacatttttaggaagtttattttatctagtatcttatgagaagtaaatattcttctccattttctaccactttgatccctatca

SEQ ID NO: 457592 - DNA, 280 bp, Homo Sapiens
tcgtcttttgataggctgtgagaggcatgcagacggcaatgttcccatgttctgtgatagctgcaaggtgagaggtgcggtcttttactcagagactggtaaataagatgaaggtgccatgtgggtaaattgctttcatctggctcatgactgttttttgttaagcagaggaacgccagcccaagcaaaagctaagaatatacgatggctgaaatttattaagcttcaggccaatgttcatacatttgaaatgatgtcagagctcagaagactactcacc

SEQ ID NO: 457593 - DNA, 188 bp, Homo Sapiens
tcgtcttttgataggagcaaataataaaaccagagcagacatatggttttcaaagatttaaagagagagtgaaatgaaactgcaaaagacagagccgagtaagacatggtcctctgtgccagttgttcccaagaagtccaaagacattacttaactcgtcttaactacttcaactttctcgctgcctg

SEQ ID NO: 457594 - DNA, 372 bp, Homo Sapiens
  misc_feature (27)..(27): n is a, c, g, or t
  misc_feature (351)..(351): n is a, c, g, or t
tgtttaattaacatttcttgttcaccnagaccccactttattaaaaagcgaaatggacaatcagaaaggttaagtgacttagccaaggtcacacaacttggaagcagcagatcaggaagaaaaatccaggtctgctaggtaggccagtcttctgtccaagggtgtcctaggaccaggtcatctcagccatgtggggttgccagatgtttctgcatgtggataaagatagataggccaagggctatgagggggcagaataagctagaaattcccagaactttggtcctagaagggcccttaagaatcatccaggctggttgtgggtgccttcacgttctgttaattcccagncacttttgggggagcccgagg

SEQ ID NO: 457595 - DNA, 540 bp, Homo Sapiens
  misc_feature (21)..(21): n is a, c, g, or t
  misc_feature (35)..(35): n is a, c, g, or t
  misc_feature (380)..(462): n is a, c, g, or t
  misc_feature (516)..(516): n is a, c, g, or t
aaaaagaaacacacatcaaanggctcctcaaagcngaccttacaaattgaaaaactgctgctttgtcaatttaaacaaacacaatttttaatcctctgttaattacttacccagggttctaggactgactgagaaatacgggcttctttctattggtcacattcacagccaacatttcctctgtgccaggtcagaaagacagtggtcaccttcgtgaataatttccttgagccaagctgctctcagccttgacccaagcagcctttccaggggctggtctatacccatgatctctcttctctggcacacagaaagtgaatggtcagactcatctcttgaatggcaagccacgtgtttattacatttcttgttcaccagannnnnnnnnnnnnnnnnnnnnnnnnnnnnnnnnnnnnnnnnnnnnnnnnnnnnnnnnnnnnnnnnnnnnnnnnnnnnnnnnnnaagaaaaatccaggtctgctaggtaggccagtcttctgtccaagggtgcctagnccaggcatctcagccattgtggtt

SEQ ID NO: 457596 - DNA, 245 bp, Homo Sapiens
aagggttttaaagataattagtgtgtaggtctgtaggcttatgatggtaaccacaagttgttaatggcattgtgaaaagtttttagttgcgctttatgggtggatgctgaatacatttggatttgatacttagaaaaagtatttcttcagctttaaaaaattgtttaaaagttgtgatcatatgtctaccatgtaccagcttcaatatatgtaagaagcgtacgtgtggatcctctagagcagcc

SEQ ID NO: 457597 - DNA, 203 bp, Homo Sapiens
cacgtaacgccttcacacattagctcatttaatctttcctgaagtcaccaggctggagctaacagtcacagctgccatctgtgacccggtccatattatttctaacgcagtgtatacggtaagttgcaaaagggccaccattctccacccttcctgtatctgcactttgcagtgtgactctacaggaagggatcctctaagca

SEQ ID NO: 457598 - DNA, 234 bp, Homo Sapiens
taacgccttccttcagcagtggtatgaaaagccaaaaccagagagaaagaatccttacacctcctctccactaaagtatcactgtagagaaaactaagctcagaatatactcaataacataccaaggaaaaaagtgagtgtgactgaggggacccccgtcaccaaccgcagtacgccctgctaaacggtagttatcttcttgtccttggtggcttgcttgatggcagcctgctc

SEQ ID NO: 457599 - DNA, 377 bp, Homo Sapiens
agacaaaatcggagggctttgaacagcagtgtgtgctcaacacctggtacgtagcaggagtgagaggcaggaacagcagtttgagggcttgacagccccttgtgtgcgaagcgaagcattgtgtatgatgtctcatttaccactgtataccacatgtccttcccctgcagctttggctgacatctgtcattctaccctactcctgttggccttactttctcccttttacccctctccacgtttgctttaggctgtcaagtgtttactgcaccccataaaaggttagatcctcccaccaggcctgatctgactactaaggagagactgtctgtatctgctggagggattgagagaattggtacagaagcgttacgtgt

SEQ ID NO: 457600 - DNA, 301 bp, Homo Sapiens
atgtggctcgttttttattcctgtttactggggaaatggtgacagaacaaatgtcagactcaaaactgagaattcaaggtagtgattttccagaatcactcagcaaataacaaccatctgttcccctgtattcactggaagaaaggacaatttgcctccctcctgcaccctccctcgtccctactaaattatacccatgaatatataaagtgaactgaaggcaccgtggcatataagccacggactctaaagcaaagggatgtaaatttcttttccctctcacacccaggataaaatgggc

SEQ ID NO: 457601 - DNA, 269 bp, Homo Sapiens
tgatgtgacacacttaaacaccgcattatcacctacgcattattctcaccaagctatctttctagaatctatatatgggggaaaccatcagaccatttcaagtttgtgggccatcaccatacaactggtttggacacctccaaagataaaactaggggcctttttctagattcaaaaagcacgtgcccgcatggcccacgtggtgaaccccatctctactaacataccaagataagctggaagcgttacgtgtaggatcctgctagagt

SEQ ID NO: 457602 - DNA, 206 bp, Homo Sapiens
cgtaacgccttcaagattacacacaaacacgattcttaaaaattacctggatactgactgtaacagaacaatcataatagaagttatttttagcctcaaggggaaatcataaggtcccaaaacattatgagtggccttaaaggctgagagagtggcagggcctgtagtcccagctacttggaaggctgaggcagaattgcatgaca

SEQ ID NO: 457603 - DNA, 284 bp, Homo Sapiens
gtgatctagaggagctcacacgtaacgcttctggcatacatggtgctgttggtgtgggtcagggcaggattggaactagtacatgggatttcccgcactcccagttcacttatctatccactacaaaacagcatgttaattttggaaatatttataccactaggtcatcatgacctttgaatataaccactggcaccaattatataccaggaatctccttatgcctcacctaactagagtcattgcccatggcagtatggacttcagatgtaggcgttacgtgt

SEQ ID NO: 457604 - DNA, 451 bp, Homo Sapiens
cgtaacgccttcttctggatacatcttccttcccgtgaggccatagtactgcctgcagtgggacctcagggttggaaatagggtctttggactatgacccacctgcagactgggttggagggagtggggcataagccatcaggagatagtattttttaagattttcggctgctcttccctcaggcatcaaatacagttagacccggttgtgtctttttctaatttggtcattttaagatcttgggtctagaggaaaaaagggtattgataataaggagatcatggttccaggcactttatctctttgggacccgtttccccactatgtttaattccatggttgttctagtttcaatggagtttttatctttcatatgttttaagtctcagttgaaagaagatgaggtggcagggaaaggtatgggtccagtgctcgtgaagcgttacgtgt

SEQ ID NO: 457605 - DNA, 306 bp, Homo Sapiens
acacgtaacgcttcatagtgggttgtctttatcaggtgatatgtagattttggtcttttaaatttttctgtactgtcttaattatctattatggacagaaattatttttcaattctcagaagatgtttagacgtaggggaactttttgcagctgtttttatttgagcagctacaaacaaaatgtaaatatttcacctaaaatgtatatttgttcacagtaaataaattgtgaaatttgattagaaatgttaaccaagattcactaaattggtctcagcccattaactatgaggaaggcgttacgtg

SEQ ID NO: 457606 - DNA, 224 bp, Homo Sapiens
cacatgatctttgcagtataataaacagttctgaaaaacacatagtaactgtagacaaaactgatatcaggattatatgtcatatagatagtaaggtttgactctttccgaacataagcagaattttaaagaaattattcccttcatattcctatcctttgttggccagctaggcacaagagatagatctcaaactgaggcgttacgtgtgggtcctctaggtc

SEQ ID NO: 457607 - DNA, 328 bp, Homo Sapiens
tgccgaagttccattttatcagcaggtagaatctactagatagggtcagtctattcagtttatggatttctcagcccttttcttatctagaataagataaatgtccttattcacgttaaaactatgtgtatcccacctgttgcatgctttttctggatctagtaaccttattatatttcaaatattcccaagttctcagcatctccccattacttgtcgatccctagaaatatcttcctgagctgacatgaagtagcccaatgagcagaggttcctacgtaagcctttctgtggacacagaactccctcccacacatatactcctagc

SEQ ID NO: 457608 - DNA, 458 bp, Homo Sapiens
  misc_feature (102)..(305): n is a, c, g, or t
ctgtccgagtttacctccgagcgagcgcattgccctacagttaattctaccacataagtgaggtcctagtaatctgtcactctcataaacagcccagtgtcnnnnnnnnnnnnnnnnnnnnnnnnnnnnnnnnnnnnnnnnnnnnnnnnnnnnnnnnnnnnnnnnnnnnnnnnnnnnnnnnnnnnnnnnnnnnnnnnnnnnnnnnnnnnnnnnnnnnnnnnnnnnnnnnnnnnnnnnnnnnnnnnnnnnnnnnnnnnnnnnnnnnnnnnnnnnnnnnnnnnnnnnnnnnnnnnnnnnnnnnnnnntaccctctatgataaccattctttcttcaatttacaagaataactaatttttcatttatcattgatatacaacagctattgcttttaaaaaaagataatcgccatttcccctacattacttctaccacataatgaggtcctagtaatgtgtca

SEQ ID NO: 457609 - DNA, 302 bp, Homo Sapiens
  misc_feature (155)..(155): n is a, c, g, or t
  misc_feature (173)..(173): n is a, c, g, or t
ttaatacaaataacaaaatgtggaaggtaggcatgttaaatccacactatcagagtgggttttaaagagaaggagaggagacatccagcctttagaaatccataggaaaaagatggttctatttttataccataattgcaacaggaggcgagagntgattttaacgaacactngaagttaaaagcaattaacttggtaaaataaaatataggtaggtagataatcagatatatgtaaaaacaaacttcaaaaattattttaacatcataattttagataaattgaatcagtggcttattctt

SEQ ID NO: 457610 - DNA, 231 bp, Homo Sapiens
tctagaggatacacacgtaacgcctcctaactgtgggatttgaaacactggtggaaataattaagatttcaacagttattcagtttacttaattgtcagcccataattaaaattttatagaacttggggaaatttgacttgcgggtgatggattccccatgagtctccttcttcctgaacgtctctgaattttggggggttattaccctccggttgaaggccgttacgtgt

SEQ ID NO: 457611 - DNA, 273 bp, Homo Sapiens
acaacaagatgatcttgaagctgtactcttggcattatattctcaagaaaatcaccatgacgacgtaaaatgaaactttatttttccagaaaatcagttgaatgggaattccagttctgggaaataaagaaggatatgcatttttggcccggacctttcctgtttgcttgggcagcagtggtactgctcagtgttgttaataatgggactgtgaacttgaaccccatgcttacatcctggtcccaacctttgcaggccttaaacgcctctgca

SEQ ID NO: 457612 - DNA, 260 bp, Homo Sapiens
gaaacacaaacttaactaaaagtaaaagaggaaaaaaaccctgtaatcccaatccccagagagacaacagtatttcctacatatccttctgaactttcttttatgcctaggaaccttcagacatccattttttactgaaggatcaaatcattcctaatgttggaaaacctcctcattaaacagttgtgaacaggttgtctcatatattctgtccacattcccatttgacatatatacgatcggtaggtttgctaaacgca

SEQ ID NO: 457613 - DNA, 423 bp, Homo Sapiens
ccatcttctgtaatctctaaagaaaggcttgattgattcaagaccaacattttggctagagtccattatagagatcatggtgtgcttcatgttgaatcatgtcaaatgcacatggtacctggataacctcccatcagtgtctctaagcttgacctttggattacaatgaaggcagtctgatctctccatcgccaaagttttgttttacctttagagatagaaaagagtgagtgtgatattatgtagcattctacaagcatccagcttcccattaatcattcatttaatgactttatcgccaactgatagtcctttcctgaatcaataatttcattagagtctgagaaatgatgtttttctaattcttttgacttctcttctctgtattagctgcgctcgtaggagaggatccgctagagtcac

SEQ ID NO: 457614 - DNA, 224 bp, Homo Sapiens
gctcaaggccttagggtttcctcttccctgctcctgatctatctatatattcagtaatgttaccaaacaatgttaattctacttcccaaaatatgatttgtatctgaccctctctcacctgtcccataaccactacagtggtttaggactattattactttcctagaccatggaaatgaccttcttcatctaatctttcctcccacatactgtgcgctgtagga

SEQ ID NO: 457615 - DNA, 401 bp, Homo Sapiens
tcctacgagcgcattgcataagctgttttgcagaggctttttacttagccatttgtgattttctcttctttttgccattgtttccaataattagatgtcctagacacaaatagtgactgtcaggcaatatttaaaaactttcttaaaagtatttattttgaagtaattttttgatttaggagtaaatatatcttttggtatttttaagtcagaatcttatttagaatatctcaggtaataagtattaaagaattatatgacattgttatttatattttctgttcactaacggtaatacattaattttttagttttaaaaggaaaatagcaattttgcatttttgtgaaaaggtaaatttgagtcatcacatatataaatgttacatacgtgcgctcgtagg

SEQ ID NO: 457616 - DNA, 380 bp, Homo Sapiens
gaggatccccgtcctacgagcgcatgacaggtggagttgcaggtagtttttatcaggaagtctgatggagatcccaggagctctccctccaaacaaaagtaatttgcattcctgaaagaattgtcaaagaactgaaagatgcaaggattgcaattcctagcaggtacctacttaatacaactgtctggctaatacagaaaacaaatatttttagaggatgactgtgttttaatcttaatgactacaaggaagagctggtattaatatgtgatctgcttagttcagtacctgatatgcagctatcattctggcaaaggtttctctatctctacaaacagaatttcagaagcaatttgctttcatttggctggcgctctaag

SEQ ID NO: 457617 - DNA, 468 bp, Homo Sapiens
  misc_feature (248)..(355): n is a, c, g, or t
tgttggaatataacaaaaatgatcatgccaagaagcctattcgtatattgatttaaatttatgtcaacaagtagatgctggattgacatttaacaaaaaaagagtttgaaaacagctacatttttgatatcaacactattgaccggattttctacttggtagcagacagcgaggaggagatgaataagtgggttcgttgtatttgtgacatctgtgggtttaatccaacagaagaaggatctcacttnnnnnnnnnnnnnnnnnnnnnnnnnnnnnnnnnnnnnnnnnnnnnnnnnnnnnnnnnnnnnnnnnnnnnnnnnnnnnnnnnnnnnnnnnnnnnnnnnnnnnnnnnnnnatcctgtgaagccacctggcagctctttacaagcaccagctgatttacctttagctataaatacagcaccaccatccacccaggcagattcatcctctgctactctacctcct

SEQ ID NO: 457618 - DNA, 1016 bp, Homo Sapiens
  misc_feature (258)..(365): n is a, c, g, or t
ctccagatgtagtcatattacacctatgatcatgctcaagatgcctattcgttttattgatttcatttatgtcatcaagtatactgctggatgtgacattttactaacaagagtctgactacagttacattttcgatatctacactattgaccggattttctacttgtgtaacagacagcgaggaggagatgaataagtggtttcgttgtctttgtgacctctgtgggtttcttccatcagaagaatgatctcgcttnnnnnnnnnnnnnnnnnnnnnnnnnnnnnnnnnnnnnnnnnnnnnnnnnnnnnnnnnnnnnnnnnnnnnnnnnnnnnnnnnnnnnnnnnnnnnnnnnnnnnnnnnnnnatcctgtgaagccacctggcagctctttacaagcaccagctgatttacctttagctataaatacagcaccaccatccacccaggcagattcatcctctgctactctacctcctccatatcagctaatcaatgttccaccacacctggaaactcttggcattcaggaggatcctcaagactacctgttgctcatcaactgtcaaagcaagaagcccgaacccaccagaacgcatgctgattctgcaaaatccacctcttctgaaacagactgcaatgataacgtcccttctcataaaaatcctgcttcctcccagagcaaacatggaatgaatggcttttttcagcagcaaatgatatacgactctccaccttcacgtgccccatctgcttcagttgactccagcctttataacctgcccaggagttattcccatgatgttttaccaaaggtgtctccatcaagtactgaagcagatggagaactctatgtttttaataccccatctgggacatcgagtgtagagactcaaatgaggcatgtatctattagttatgacattcctccaacacctggtaatacttatcagattccacgaacatttccagaaggaaccttgggacagacatcaaagctagacacttgcatccaga

SEQ ID NO: 457619 - DNA, 481 bp, Homo Sapiens
  misc_feature (81)..(188): n is a, c, g, or t
ggtggatggtggtgctgtatttatagctaaaggtaaatcagctggtgcttgtaaagagctgccaggtggcttcacaggatnnnnnnnnnnnnnnnnnnnnnnnnnnnnnnnnnnnnnnnnnnnnnnnnnnnnnnnnnnnnnnnnnnnnnnnnnnnnnnnnnnnnnnnnnnnnnnnnnnnnnnnnnnnnaagtgagatccttcttctgttggattaaacccacagatgtcacaaatacaacgaacccacttattcatctcctcctcgctgtctgctaccaagtagaaaatccggtcaatagtgttgatatcaaaaatgtagctgttttcaaactctttttttgttaaatgtcaatccagcatctacttgttgacataaatttaaatcaataatacgaataggcttcttggcatgatcatttttgtaatattccaacatctggatctccagttaaacggacacttgcatccagaggtcgagca

SEQ ID NO: 457620 - DNA, 557 bp, Homo Sapiens
  misc_feature (295)..(402): n is a, c, g, or t
agtcggtacctctggatgcaagtgtccgtttaactggagatcagatgtttggaatattacaaaaatgatcatgccaagaagcctattcgtattattgatttaaatttatgtcaacaagtagatgctggattgacatttaacaaaaaaagagtttgaaaacagctacatttttgatatcaacactattgaccggattttctacttggtagcagacagcgaggaggagatgaataagtgggttcgttgtatttgtgacatctgtgggtttaatccaacagaagaaggatctcacttnnnnnnnnnnnnnnnnnnnnnnnnnnnnnnnnnnnnnnnnnnnnnnnnnnnnnnnnnnnnnnnnnnnnnnnnnnnnnnnnnnnnnnnnnnnnnnnnnnnnnnnnnnnnatcctgtgaagccacctggcagctctttacaagcaccagctgatttacctttagctataaatacagcaccaccatccacccaggcagattcatcctctgctactctacctcctccatatcagctaatcaatgttccaccacacctggaaactctt

SEQ ID NO: 457621 - DNA, 890 bp, Homo Sapiens
  misc_feature (508)..(615): n is a, c, g, or t
agactacaaaataggagacagatttccaaaagagccttgtagggaaaactgctctttgccaaagatggcagagattgtgtctcttcgatacaatctcctgaatatcggaaatcaataggggaatgtaaacctgaaatataaagcctgaaacatatgcctatacagatggtctctttcaagcctgcaaatcgaaatttaaaaagtttaaaggtaagaatctcagtgtgtacacacatacacacgcctctgtctctctctaacatgggcatatataatttacctggtgggttcgggcttcttgctttgacagttgatgagcaacaggtagtcttgaggatcctcctgaatgccaagagtttccaggtgtggtggaacattgattagctgatatggaggaggtagagtagcagaggatgaatctgcctgggtgtgatggtggtgctgtatttatagctaaaggtaaatcagctggtgcttgtaaagagctgccaggtggcttcacaggatnnnnnnnnnnnnnnnnnnnnnnnnnnnnnnnnnnnnnnnnnnnnnnnnnnnnnnnnnnnnnnnnnnnnnnnnnnnnnnnnnnnnnnnnnnnnnnnnnnnnnnnnnnnnaagtgagatccttcttctgttggattaaacccacagatgtcacaaatacaacgaacccacttattcatctcctcctcgctgtctgctaccaagtagaaaatccggtcaatagtgttgatatcaaaaatgtagctgttttcaaactctttttttgttaaatgtcaatccagcatctacttgttgacataaatttaaatcaataatacgaataggcttcttggcataatcatttttgtaatattcacatctgggtctccagttaaacgacactttaa

SEQ ID NO: 457622 - DNA, 233 bp, Homo Sapiens
tggcgcttggagggggcgtaaaactcgcagtacagcgttgaagattttcatctgacggtacctggttgtttttgatcttgtttttgttgagtcgcccgtaggttccgggacgtactttatgcaacctggaaaagactgtattagaaaataatttccatatcaacctgttttagaattttattctattttcgtcgaaaccacctgctgcgctcgtaggagaggatcctctagag

SEQ ID NO: 457623 - DNA, 311 bp, Homo Sapiens
cggggtttcttcctcaaaaaccctctgacgggacctccagagcatatagagaggccaggttgaccttgagcccagtttgagagggacaggggtcggggacttggagtaaccttcgtgctggttctcccgcctcagttgttagttcaggccttctttccggcgggctttccggcggggtttcttcctcaaaaaccctctggcgggacctccagagcatatagagaggcccaggttgaccttgagcccagtttgagagggacaggggtcggggacttggagtaaccttcgtgctggttctcccgccggaagga

SEQ ID NO: 457624 - DNA, 351 bp, Homo Sapiens
agcctttccggcggggtgagtgggcctctgagtggtgaggagggaggtaacagcactaccacttgactcgccaaatgccagcatcctggcactaatgctcaaattccagtttaattttcacaatttgattcactcattaccatctgcattaaacaatatttcttgcttgaggatagacggttgcaggggcactgtgggcgagtgttcagatggttaatgccttttattaccgcagtagatttttactattctcttccctccagctgctgaaggaaggttgggggctactgagctggggagaatgctggggtcagggaccagggtggggagtacatgcccgccggaaaggct

SEQ ID NO: 457625 - DNA, 302 bp, Homo Sapiens
  misc_feature (97)..(145): n is a, c, g, or t
attttttgaaatttgggccgggggccaacccttttcgggggggaaaaccctttaacttaaaaggaaaaggtttgccccctgccccccaatttggggnnnnnnnnnnnnnnnnnnnnnnnnnnnnnnnnnnnnnnnnnnnnnnnnngaacctctgattacttcgttttttgcagttgacaaaagagaaatatttcttagctgcctaacaagcaatgcatgtgcagtttattctacctgcattacagtaatgtgtatatttgaagcttagcatcacttgcatattcagaagaccatccccgccg

SEQ ID NO: 457626 - DNA, 392 bp, Homo Sapiens
cctcgttgatttcatgatgatattctcagcatgagcctggcagccttgcctttttacctcttgggatgatgcatgtactggtggtagagccctgcagggtcaatttaacgagtgtaacattgtgattttccatgcggtttctcagacccactgagcaaaatgcagcaataaccagtgacagaggaaatcgatttttgaagtaaatacttttggaggaggggaagaaggtacattcccttcatatttaatgttgccaaagtaggttgaacaagtttttatattagtaccatttggcatttcaaaataaatagattagccaccattaacatcacactctgcccccctcacatgtttaccaccaaaactcctgcgcagagactggtcctcttttc

SEQ ID NO: 457627 - DNA, 349 bp, Homo Sapiens
agcctttccggcgggcccatgtcaggctgtgtcacatgtcaggctgttggctatggctgtccccactgtgcacctttgcttttgcggtctcgtttccagaacttctctgccagtgagaaccccatgacacccccccattttaaagccttctctggctttcctgcattcgttaggaaggcatactgcctcctgctgccgcggccatccctctgcaatgagtgcttggtgtccctcagactttgtgcctgcagctgcccctggccttcacatggttccgccggcatcgcagctgtgctgtgtccaagcttggggctttcctttactccatgtccccgccggggtcctctag

SEQ ID NO: 457628 - DNA, 450 bp, Homo Sapiens
  misc_feature (133)..(133): n is a, c, g, or t
taactacttcaggggtaatacgagcacttgtaaccctttactctttcaaaagctcaaaataacaggacctagtcaaaactagactgcaggccacagacagagtacttccttagtacggctgtgtttccttccnaattgtaactgtagacttgcttaatctagcctgtttgtccttcttttaagattggcatgaaggggttagaaaacatgaacattttggattttccttaccattttccccaatcctacattctcatcatttgcctcccaagacacagcacatgaaaatgtgatccattgttttgccatcacctaataaagaccaacagctttctagcctcaacaaagcctgcagcacctactgcttgactgtcttcaacaaacccatgccacatttaaaatgtttaaacattaaccttcccagtcccaggtatgatgctttgtgttact

SEQ ID NO: 457629 - DNA, 457 bp, Homo Sapiens
ccgcggaggcgaatgatggtggtgggccatggaggatgtcatggccgccgcctcccgctgggtggcgcaagtgctgaggacgaggagtccggtgggttggtcatgctcactaggccactgaccaagctgaagaggggctcgggccacaaggtgttgccactgttgggtgcaggctccagggaaaagcggccagtataggtgatggggggcagtcgagtggtttggctggggtaactggtctccaccagcaccttctcgttgttcagagagatgtcaggaaaagactctggcaggagagagagaagcgggaggcctggttactggacaacaatcactggaggacgaggacgacccgagcttcccaggcaagagaccggccggctaccattgactcccgaggtagttataattgatcgcagcacattgcatgtacccgactcgcctttaaggatcctct

SEQ ID NO: 457630 - DNA, 337 bp, Homo Sapiens
cgtacaaggccccgccaggttcgaggggaataaaaggagctgagcccagcctttgttctggcttcattctcgtgctctgcgcagacatgtgggatcagacaccagaggcaggagagtgacggatggaaagataaggagggaagattcctgaatcagcgtcctggataaggtggtttgaccccagtgactgagcattctgagttgtacctgaaagagggcagcccagggatgggcagtgtggcttgtgccaccatcaagtgagtgctggcactaggggtcatctcatgtgggcaaattgcggggccttgtactggggtaccgatgctcgaaattcggt

SEQ ID NO: 457631 - DNA, 711 bp, Homo Sapiens
  misc_feature (421)..(492): n is a, c, g, or t
ataaaaatataaaagtttatttttcttagtggttctatccatgcagtcattcagggattcaggttccttttcatttcttgctccaccttccccttgggtatgaccaaagctggatcataggcatgtgttatgttccagctcataggcaaggaaaggatgtgggggagcccccacccagaccccgtgttggcatatgtcacttctgaccacattctgttgtcaagaactcagtccatgctgcacctggatgcaagggattacaggcgtgagcactgtgctggggtccaaattcagttctgttacagcggaacagattttggcaggcagctgccactctcaatttcatgtattttcctttgctccaccttccatccgtgtcttcccccatgggggccaagcccttctctataggggtccttcnnnnnnnnnnnnnnnnnnnnnnnnnnnnnnnnnnnnnnnnnnnnnnnnnnnnnnnnnnnnnnnnnnnnnnnncatcaagagggctaatccaggactggggtgcaacctgcatgagcatccccctagcctggctggcagcccccagccagacgtgtggttcaggccagaacctgtggcctggggggccccagaaggcccagctcctcaggtgtgggcaggaagtgcttctcatacccagagtcaagcggggcggtggcctgggcgggctgtgaggactccataaccggcggg

SEQ ID NO: 457632 - DNA, 306 bp, Homo Sapiens
tacaaggccccgtgtacaattataaggacaaagtgcctccctcctggagactgagggaccccaggggcccatcccatctgtccttccaggccttccaccccagcaggtacctgcgaggatcaaatcttccaggcgtccccttggagccggcaagcagctgggcagggtgttgctcccgacaagccttcaggtactcctcctctagggccgcgtgggcagccttcagccgctggaagccctgaaaccagaccaggccaggaagacttgagtgctcagtccccgtggccttgtagcggggatcctcta

SEQ ID NO: 457633 - DNA, 401 bp, Homo Sapiens
accaggaccaagtcaagggcttccagcggctgaaggctgcccacgcggccctagaggaggagtacctgaaggcttgtcgggagcaacaccctgcccagccgcttgccggctccaaggggacgcctggaagatttgatcctcgcagggagctggaggcagagatataccgtctgggaagctgcctggaagagctgaaggaacacatagaccagacccagcaagagcctgagccgcccgggtcagactcagctctggacagcaccccagccctgccctgcctccatcagccaacgcacctgcctgctccttctggacaagcccccatgccagccatcaagacctcctgcctgacgcctgctaccatcactcgccgccgccagcaccttgtgccgtgaaaggcg

SEQ ID NO: 457634 - DNA, 451 bp, Homo Sapiens
ccacgactagcccgacagggctctgagtgtgagcagtgtgctcccctgtgctgctggagagccatgactgtcactgccgagatatttagggcaggtggaaacagcccagagctgagctccaagtaattggtctctaagggatgtggcaaaaagtccccgtggcaaaacctgctctgcctggctgggggagcttcacagaaactgtcctggagggactggcattctagctctgcaagttttaggttggaaaactcagaaatgcccccactcagctctgtcccaggtactcccgtaggtatacagtgatgaagtgatctcaggagacacggttctctgtccagatgtgcatgttggccgtctggcacaatctctgcttttgcctgccttggagtcgtatgagacgatggtgctcctcggtgctggctgctgtcatacctcgttttagttatcc

SEQ ID NO: 457635 - DNA, 545 bp, Homo Sapiens
  misc_feature (254)..(254): n is a, c, g, or t
  misc_feature (504)..(504): n is a, c, g, or t
tattttatctgcatgttccataaagcagctgtatggttggctataatatagatttatttttttcttttcagccagagattttaatacccttgatgcagtaataaatggacatcaaaagaaaacatttcttaaaagttgccaacgtattttaccttgaaaacatttcttatttgttatcctagtaggctggggaaagcttctctccagatgtctcagaaaaagatctcctgtttctcatggccccgtccagggtncaaaccatgttgaaagtcagtgctgaaatgcatgatgctgcgggtgtttgagagcctttgacctctgtccaccctttggtctttgctcgtcaatggcttggtcttgtatatgtatctggggggcaggggctttgtactgggcccggggtgctgagctttccagaacaggcagagctctaggagacctaaggaaaaccacaggacaggcggggattctttttgaggaggctgaagtagatgtttcagctgnaaagatgggtggtacgctgccacagtgcctagcggtactgt

SEQ ID NO: 457636 - DNA, 740 bp, Homo Sapiens
aggaccaaactgcctcctgggaagcttaacttcaatgctgactgcttggattataaagatcagacatcctcgtggaaattccaggttttgtgaagacctgtagaacctctttttgtgggtgatttttaaatatactgggctggacattccagttttagccaggcattggttaaaagagttagatgggatgatgctcagactcatctgatcaaagttccgagaggcatagaaggaaaaacgaagggccttagaggggcctacaaaccagcaacatgaaatggacaaaccaatctgcttaagatcctgtcatagttttagatcattggttatcctgatttgcaaagtgatcaaaagcattctagccatgtgcaaccaaacaccaccaaaaataaaatcaaacaaaactaagttgtgaaggaagggagggaaggtcatagccttcttaagcagaggtgttccattgttttagccaatccttggttgaattttaggaatgaacagtgtctcaagctcattcacgtttcatgaccaactggtagttggcactgaaaaaacttttcagggctgtgtgaattgtgtgactgattgtcctagatgcactactttatttaaaaaataatgttcataaggagtcaatatgtagtttaagagacaatcagtgtgtgtcttataaatggtacatctgtggtttttaatctgtgctagacttcaaaactgtgatctcctgttattgtatgcaa

SEQ ID NO: 457637 - DNA, 275 bp, Homo Sapiens
caagcgaacagcggtacatgagatgtcagagtcaagctttctatgctttccaaacggtgtctgtattttgattttttaatgggctcctgaacaaggctgtctgccagcacaggccaaatctggttaagaagagctcctgtacctggaaagggtcccttgagcaagtacttcaagtcatttatccagggctggctgcttttgctcttggcctggagactgtcaactttccaccagacctgccgcatagtagagcacatcctctcggagagggcgcg

SEQ ID NO: 457638 - DNA, 458 bp, Homo Sapiens
tttttttcctgtgtttagcttgttgaaaagttttgcatctgtccattaagggaagacataatcaactctatgttgcccccccttagagtcactgtgtgccaccccgtgttcctgtgattgcaatgggggattttgtagagggtgatgggtgggttgctttatggcaccacccaagacctttagccatcgtctctctcctcccctcctattttattttcctccatagcacttattgccacttcaagtttttatatgtttagtagtttatatcctcattgccatttgagggcagggaccttagctgcttgttcccctggtatacccattggcataccgtgcatgctccataagcatttttactttagtaatggtgggagaaggcttgttctaccaggtagccatacacataatggagctataataattaaactgtgtggcaccagccaccatatccccgt

SEQ ID NO: 457639 - DNA, 615 bp, Homo Sapiens
tggtgaggaaaggtatgtacacagtagcctcgtgggttactaggtacccgtcgcttaatgatagttttaactgtctttccttgatcttgacctgtcttccatactatgttttaccttctagccccagaccgtgctgtgcatgggatggggtgggctggcctgacctgattatgcattacaggagaaaaattccactgtccttttgattaggacggtttagcaggtacatttctcagaattgcataaaggctgtagagtcacttttgccacccgacatgtgtatctttacgatctgcggatctacaccgcatgtaattctgttaatgttaaatttgctggcatgagagagataatcataacaaataagagggatatgatttgagggaccaaattctatatacggtgctgaattattttgtgacataaattaagatgaagttcttctacagcacatgttggaccaaggctgtttctggatcttaaaatgaaaggactctacaccctcaattttaaatgaatataaaaattctgataaataatatttatagccacatagttcaagattagttttctcaccccagctgggaagctgtggcactatccccgggggatcct

SEQ ID NO: 457640 - DNA, 504 bp, Homo Sapiens
  misc_feature (13)..(13): n is a, c, g, or t
  misc_feature (98)..(98): n is a, c, g, or t
  misc_feature (338)..(338): n is a, c, g, or t
tgaccctaaagangatccctaaggatccagaagactggccccaattggaggaaaatccaagtttccatgattaaagaagtggaccccaggaaggatgncctaagttaatggaggggggtggtggaagacagtttatatcttttgggtatttatggcaggtcagaattaaagatttaactttttcccttactctttacataaaaagctggtttatctgaaaaaagtatcaatctagacttggcaataaagtggcacttaggcactatattattgatatctacaatgacctcctggatgcacaaaagaccctgaagggcttttttgatcagcaaaacaanaacagaaaagcaaaaaacagttaatttttgtttggtcaagtttactcaaccagaccaccttgataccaacaatgctggagagcatttggcaagagcagggccacaatgccaaattccttggaaaggtagacttcctatgatactttcatggattggcaaatttgtg

SEQ ID NO: 457641 - DNA, 887 bp, Homo Sapiens
aaccccgtccgcccaaaagaaagagacaaatatgtttgttgaattgaacgaggaactttcttgattcctcacaaaagctagctgtctcgtcacctgcgtgaaagtcaagcatcccctcatgaggcagaaatgaaattctgtacgacctctttcagagtaaccgattgctgagtctgcttcagatcactgtctgcaccatgtatatatttcactaaatctttctggagtttccaataaataaatattcattctttaattgccacaggaagaattattttattcttagaactttgtgtatttatagagaaggtattcatgttcccaaactgtctgttcttgccatatttacaggcacagactgtggggctcccagtgaccatgcattcaccgaacatgaggctgctgcgatctgccctcctcccccaggcatccaacgtggaggccttttcatttccagcatctggctgtcaggcggaagctgcattcatggaagaagagtgtgtggacactccaaaggtcaatggctgtctgcttgaccctgtgcctcctgtcctggtgcggaatggatgccagtcactgcccagcaacatgatggagacctccattgacgaagggctggagacagaaggagaggccgaggaagaccccgctcatgcctttgaggcatttcagtccacacgcagcgggcagagacggcacactctgtcagaagtgaccaatcaactggtcgtgatgcctggggcagggaaaattttctccatgaatgacagcccctcccttgacagtgtggactctgagtatgatatggggtctgttcagagggacctgaactttctggaagacaacccttcccttaaggacatcatgttagccaatcagccttcacc

SEQ ID NO: 457642 - DNA, 293 bp, Homo Sapiens
agcgaacatgcggcaggctaggggtcgaatgggagctgtagccaccagcctacaccacagacacagcaacgcaggatccgacctacgtctgcaacctacaccacagctcacagcaatgccggatcgttaactcactgagagaggccagggatggaacctgcaacctcatgattcctagtcagattcatttctgctacaccacaaaaggaactcctcacacctaggcattcttttaaaatgactggaaacatcttgttttcttaagtattagaaacatcccgcatgatcgcttg

SEQ ID NO: 457643 - DNA, 358 bp, Homo Sapiens
caagcgatatgcggggggactcacagaccatgctgctgcagagtggtggctgtgcgaggtcgccgtggggctggctgccatgcacaagctgcacttcctgcacagtgatttagccctgctggaattgttttctcacctcctgacttaaattgtgaaatgtgggagattactggaatagtgattcagcagtgtacaatggaggattatattgaaacagatgataaaaaagttttccctctgcgatggactgctccagaattagtaaccagctttcaagacagactgctaactgcagatcagactaagtatagtaatatctggtctctgggtgtgacactttgggagctttttgacaatg

SEQ ID NO: 457644 - DNA, 295 bp, Homo Sapiens
gctgcgatgctgagccaagccgcatgggggtgagattgttcaccgagcccagtttccctttgcagaatgcagctcttagcagcgcgttttgtgccgttttggagctaggccctcggtggggcccttccgagctggctctgggtgggttgctagggccagtgcacacagggcttcttcaggtcaaatgagctttctccgcgaaggagaagatgtttggatttggtttccagtggcggagaccaccagccaagcagcagtgcccacggagccagaggcagcccagaacctcctggcc

SEQ ID NO: 457645 - DNA, 500 bp, Homo Sapiens
ttttttaaagcactttaaatttcagttaccagctcccatgcaaaaagaaattcagtctagtacagccactctgtaagcccacacaaaaagagctccccaaaactgttgagcaaagttaagtgccttttcggaagccaatctcgggatttcgaaagcctggctttgtttttctctgtgtgaaaaaatattccagattgtaacatgccgtcgcttcaaggagtttttagcagcttccttgatacatgaaaatcttgttctctgaaagcttcaggtgttgtcttcccagaattggtttcactatgtgtgatgccctcgctttcttcctttgggcttgttagttccttcatcattaggtgtgagacgtgttatttatagatgcttcgactcctgggatggctcttggaacacagccctgccatgtctatgcacagaaagcacccgatttgtttctgagccgtcttgataatctctaccgtgcactaatccccgtggggatcctc

SEQ ID NO: 457646 - DNA, 557 bp, Homo Sapiens
caacgcgaacatgcggagattgggaactgggtgaaatgttttattgtgcagataagtaattttgttggagcttagaattaattctttcagtctacggatcccttgaaatgcatcttcatccactgagctaatgtaattatggtcaagataaagccatataagctggttaaggccggcaaactgattggatttgagcttctgaatgctgttgaaccttaatgataagccttgtgaccctccagaaatgttctcagggatatctgcgaaagcatgagactcacagtacacaattttgccatcacatctgcagttctttgggcaagctctctgagcacccgtgagcataacaagcagcagtgtaggaagtagcaccagcaccacactcatgcctttcagctgcgtaattaaatggaaacccatcctttgtcatccaaaaacgtttcccccctctctcagctttcttcttatttggtctcttgtgcggaaaccaccaccaccttcatgacacagtgcggctgtcattcacaccattctgatcccgcatgttcgcttggggt

SEQ ID NO: 457647 - DNA, 783 bp, Homo Sapiens
  misc_feature (725)..(737): n is a, c, g, or t
ttgccctggctgtactagaggatcccccagacctcaccacacgtattatcatagctggcatttataaaggactcactagtactagtcattgtgccacctaactgttctcacttagtctacagaacaatcacatgtactactaattgctattctccttttagagtgaagggaactgagacttagagagggcaagcagctctctaagtcacccaggctgtaagtggcagatcccaaattgtgccccaggactgtcggacgccacacctgtgctgcatgctactactcttaaccagggtcctgccccccctcccttagaagatcacattcagatgagctgaaggcagatcccatggtcgtcgattgagacagcattaatgcaatgtcagctgggttgatttctaaccacatcactgaaacactactaaaatcaccataaacgtgcttagaccacattacgtaatagtccatatgctgagaagccagactgtacatccacccgagtcattcagaattcttagtctggtctttcacaattggcgccctctgtcagactcagacaaggctctattttgaattctaatgaggaccaagcacactgaatatttaaactgccattaccaagatcctacttttatgtaaatgtcctttatggaagttacagatctggaaatacatagaggtacccgtgggaaaatatccagtcttatttgcatttagaagctagnnnnnnnnnnnnncagtattgttttctacttgatgctatcattgggtgtggctaggtat

SEQ ID NO: 457648 - DNA, 556 bp, Homo Sapiens
ttcgagctcgtaccccataccttacccatcagagagctagaaaggtaagaatggtccattttcgccctttcctggcgagagcagagtgagccctccagtaccttcttctcaagggtccgcagcccagagcccgaggttttcctcttgggtctgaacgtggcaagtgattcacagtgattcacttctgcctttttgcatatactagtatcgatacatggtggtttcttgatagcatgggacccacttcgtgtgctcccccgtgctctgtaagtgagaggaggtggcatgtttcatcacttggggggtgtcaatgagtggtccctgaaaagtttcggggtcactacttggagagccccaccagtcaagaggtgtacccccctgacttcatggtcacagtgctgtgtccaccatgatttttctgtctgtcattttctttgagtgttgaattatacctcagtgggattttactttcaccataaattttctcagccatttattatacatttggtataatatccattcaatgtttgtgttttgaggccttggagtctcctta

SEQ ID NO: 457649 - DNA, 483 bp, Homo Sapiens
cagacctaaccccacacccatcttcaagttattttgaagactaattctttattttgtgttgctgcttgcagttacataaaattgagacattaactagggttctttttgagggtgcaaataatacttttaaggaattcacttaacagcaaatttgtttcataagaaaacttttctcctttctttagcttctttgaaagaaaggatgccttgatggaaagtggaatcagtgggggaagagtaattttggttacagcagtattgatagggtactgagacgagaggccttggaccaccagattgtgataaagtttaaggacatagatgagaaggaaattacctggatgaaagagagttgtgaaatctgaaaggtagtttgggagaactaaaaacaatcttggatatatgtttagttttgcccagagtctatccagactccttaagatgcttaggatttggtggggttaggtctggggtaccgagctc

SEQ ID NO: 457650 - DNA, 380 bp, Homo Sapiens
attatctgggtttcttggtcaattattcaatcatcacagtcattcagtgcactgtttgtgagatttggagaaccaatgcagtgccagacacagagaacttccatgtgcccagaaggagaatggagctgagcaaatcctggagattgacaactcctctttgcaagttatctcgaagtatttttttctactatgttactcatctgctccaaggctttcaaaggctctcttctgcctgtggaagaaagcctaaacatcttggaatagcattcaaagccttccttaatatttggagagcattagtggcacaccagcagttacaaagctactatatgttgaacccaaataccaaccacgtggggtgagtctggggatcctctagt

SEQ ID NO: 457651 - DNA, 657 bp, Homo Sapiens
cgactcggtaccccagccctaccccacacatgacccacaccgcctcacgtgaagctgggctgagagccctttctcccatccattggaggtcccaggagtgtcacccatggagaggctatgcgacatggctagggctggttctgccatctgagtttggtttcctggaatgaaaaggcattgccatctccattcctctgccctcttgagccagcacaggaaggtgaggccctgggatagcgcgcctgctcagataacacagagctagttagctagtagcaaccgtgttttctccagatctgtctagatacaaaggtcagaaatcttatttttatacttttatattgtggaagaacagcatgcaacactcacatgtagtgtgtggatttacttgaacatgttctttttaacatgtagttatgaaaatctccttttttgcctctactggtgaggaaacatgaggatcagaggccacatttttaattattgttagtgtatttggaagtctgaattggagatgtttgtacctctgtctaaacagttcccttgagaacttccaagcctccggcatcttttcctggtgagtgtttctcctgtgcttggttgtgtataatggagctaactcctaagcggtgggggttagtactgggggatcctcta

SEQ ID NO: 457652 - DNA, 708 bp, Homo Sapiens
tatttgcttttcttcatgaagtgaaatgactagtgatttgggcccaaaccagaatctttttagctcttgctctttctctgccattttgtgtgtgcagttgtgtaactctgctgcaagccatagccaggtgtctgtgatcactgcctcatccccctaccccactgaaaggaacagcagctgatgagaaggcggcaagcctgtggggctcaggaacagcgcaccagcagaaacggaaactgtagcaagctgctccttgaactgcgtcataaagagatttgtctttatcagtcattcgtggctattcatatattcagatactgaattatccatgccgttgagggggtcaggaatggaaaagatattcaaaatccacaggcaatccaaagctttatttgcaccaacagctttagcttctaacttgttctcttccagtttcccggaacttctattaagaatagaagtgaatggatgggtttgatcagggtaaagagtcaaatgtccaaatgatgggaaggaacaaaggaaggacagtaaatgattggtaacaccaacaggctgattcattcctgaaagatccagaggtaaccatgtcattattttttaaaggcaaagagaaatattgttatacactgggacttgaaactagtatttttggccagacatggtaattcatgcctgtatttccagtactttggaagccaagtactg

SEQ ID NO: 457653 - DNA, 646 bp, Homo Sapiens
gtgttctaacaagtactttaatggatagggtttgctgtctaaaacatgaagaggtaactcaacattcctttcagtgccacaggttaagaacttggagaactggctttcctgaggagcttctagctccagaggttgtacatgctcatggcagcaacaacccattgaccacttcttcaaagtagttcactgccaaggagaatcaaaattcaatttggattcccaatactcagcctaccttcaatttcccatcaagcctatattcttagcctttagtttaagtgtgggttatcttaacagctcacttggcctcagttcaaagtgaaatttcctgagtccttgaaagaagtagaaacccaatcaatgagtttttctcttggtctctactttgtgagaaggatacatttctagaaatttcaataccttccaagtgtcagaaggaaatataatgtagctgttgaaatttgcgatgtaggataataaggtactcccttagtgccaggtgcccacgtagagcaaagaaactaaagaaaaagtgaaatcatattatttccatgtaaaataaataaagaaagaaatatccagataagcttgattgctccttctgcttctccaccacccatgcccctttgagtgtggggttaggtct

SEQ ID NO: 457654 - DNA, 419 bp, Homo Sapiens
gcgtagtcgatctagaaggatcccgcaggatcctctgtgcttatatcttcccttttccatgcactatttttccctcccctacaaggaggtggctggggttcttccttcctgcctggacatttggttggtcctgaacttccgtgtttttctcctggctggtgtcctctaacagttaagtgagagtggctagcttgagcttgtctttgcttcctcagcacccagcaagtagacccggcaactcaattatggttgagttgaatcacttagtggttgttatggtggctgccaggacttgataaaacctgttctttgcttcctctgggccacattgactttgtcatctggaatgtgagcctgtcagtcctgtgtgcaacgctctcaggagtggccaaagtccgcacacactccccgggggtccc

SEQ ID NO: 457655 - DNA, 604 bp, Homo Sapiens
gctcggtacccccgggattttgtgcacatgttgaatctttaattatggaccccccaagatgttcaacttagtaatgccttatcgtgttccaaggcagaagtgggaggagagggaggaactaggtttgtgactaaggaattactctcttttaatagaattacataggaggataggtaacagttgtgcagaggaaggtctctgaatacccatgatgtgtcaacttggaaatatttgctcatgcaccattctttttcatggctagtcacaattttatgactttctatgaatttcatatctaattttaaaataatctataacataaaaatgagaaaccaagctctgagaaaacagtaaaggtgaaagcaacttaaattttcatgtgtcttaccaaaaaattacaacgttatatgacagaaaaaagtgccatgaaggcacaaaatatcttctatgactactttgaataccacattgtttttaagaactccaaatgtaattgatacatattagcgacatgtaacctattgcacataagatatagcagaaaacttccagaattgttttcagcagatagttttagaaatcagtacttatttggcacgaaatc

SEQ ID NO: 457656 - DNA, 258 bp, Homo Sapiens
acttttgtgcacgacgaagaagcacagtgaggaggctgtagtaattgcctggctggacatttataggacctgccaagggatgatttgaaagttgtttgcgaaattccatccacatgattaggtagaccccggcaggccccgtttctggcttggccactccatggattgtagtggatctatccatgagtgacagcctcgttaaggagacagacctataagtgagtaattacactgccctctgttgcaccaaaaccccgt

SEQ ID NO: 457657 - DNA, 218 bp, Homo Sapiens
ccccgggattttgtgccggaggcagccgaaacccgggactggctgtgagtcggggaatcggatgctaagatcttgaggatgacacagattcccggttgtggagggccagccctgccaagggatgggaatgaattgtggacacaggacctccccggagcccgggaagtcaaaagagtatgaagacatggtaaccagaggagtctgccacactggcacca

SEQ ID NO: 457658 - DNA, 279 bp, Homo Sapiens
ccagactctgagctgctttatgaacacctcaattaaattacttcattggagtgatttgagtaatctatctatagtgtaatattttctatgaataattttctgtaaccttatttcataagttaatatctaaaaagtgtttatttccaaattgccaaataaaaggttttatattagtcattagaatgtaggcatctgtgtctctgtatgctaagaattataaccccaaattatttttgtgcttaaaaaataaatgatgtctccacgatggcacgcatatct

SEQ ID NO: 457659 - DNA, 209 bp, Homo Sapiens
  misc_feature (195)..(195): n is a, c, g, or t
cgtacgaatactcatacctcgttacagctccttgctcaagaaacacgggctggttgatggttccagtgaatcctatcagaattagccaaatttatggagtggaaaagtcgctttaagcccaacgttcttgtgctggagagattcagggacaccagaagatgccaaatcctgctctcacttacatgagcagtaatngggtaccgagctcg

SEQ ID NO: 457660 - DNA, 311 bp, Homo Sapiens
ccactttcagcctcttgtgctccagccactgcctccctcccctgctttgcccaagtgccctccctgaactaaagtttccctgaacacatagccgggcttgcacagctgccaagccctcagcgccctctgtccagctcttactcagtccccgagatccagactagatcccacttcctctgtgaagccttccctggcctgcacccctcaacaccagacctgacctggaacagttacctaaggcttctttgctggatatttagatgaagaggtgcctcccaccccttagctgcccctctgacaagctcgacctt

SEQ ID NO: 457661 - DNA, 412 bp, Homo Sapiens
aaggtgtgggctcacgatacgggattgaatgactacggggatgactgtgtacgtacacgtctgtcgcagctgaggaagagggggccacacttgatggagcttgatctggactctgatgtattcgcatctcccgagctaaccttggcctagatctgcagaaatccctttccttttctttctgtaaagcaaaagctgaaaattttcaaaaataacatgaccagagaacgaaggcaagtcaagtacagagaaaacactgtagcatgaaaacaaacgtatggattttgcatgaatttcaaaacagattttacaactttctcatcctactggatgtacaggtatagctacaggtttggctaatggaaatttcagggcacctgcttctttccccttaaagctatcagggtggagtgac

SEQ ID NO: 457662 - DNA, 308 bp, Homo Sapiens
gaaggtgcgtgagcctcatagttccgtatgctagtccctctgtcccctgtggtgcctagcacagtgtggtgtggagtaggagttcagtgagtgcttattatcaggctgcctgcctgagggtcccaaccacgcacacctggaaggaagtgaacccaacctcctctctaatctgctccacctcagcgcctcctgaacaggacctgcacttgcttccaagaggtctcatagtccacctcttgtcaagattcaaattgctggagaacctagctcagcgcccatttccctggcaccttccagcacatgagacc

SEQ ID NO: 457663 - DNA, 308 bp, Homo Sapiens
gtagaattgagggtatacacattctatctgtatgtctatgtatctgtaattcagaaagtcctttatttctcattgtgagtatggaatgttttcctgtctccagatggtattcataaattagatggttaaggctctttaacaataaagcctcattatgggttcattttccctctcaaactctgtagaacataaccagtttgcaaagcctctagatttgggggtgctagatattccatgcagcttgagacacatccgtcaatacaccgatacgttccacccacactcttgctgtcccgaagctcgacctt

SEQ ID NO: 457664 - DNA, 394 bp, Homo Sapiens
cgttaggggaactcagaccggaagggtctgagcttagtcacatggccacacccagcagaaagaactctaggaaatatggtcttatgctaggtaaccccaaacccagctaaaactgttgcttttgaagaagggtgaaacagacaatgtggaggagaattaccagtctgccacaaagagaaagaattctatgtgaggaaaacgctctagaagagggagctgattaattagttatatctcagccgagaggatgttatgagaaacacagatttgggtttaatagaaaaacttagaacccttcaagaaggaatgggcggacttgagagtgtcctccgcttctgaaaatgatcaagaaaaatggtaagaatgtacacctcaagggtggatggggtaccga

SEQ ID NO: 457665 - DNA, 907 bp, Homo Sapiens
  misc_feature (151)..(151): n is a, c, g, or t
cttctctggctaacttttagagcctggagtcagacttcttcacaacaaatagcccagaaccagctgggaactctctggcccatatgacacatgacactgatacagtaccagaaatgcatggcaccagctaataccactgaggggcaggagngcaaactctctctcagaccctcatccatcacccccagaaccaggaaaaggtcatgatggctcttggcagcctgctcagcaccagggcaagaacaactcaggctggacattacgagagtaaacacaatagatttctgtcccagaccaagagcttgggcaccaggagtgggcattctggttcactgttaggcaaaaaagcctttggggaaattaccagctctcccgtcatccccaccttccttgaaaggcagcatgtggggtgggaagaacaatcagaagacaaattttaatctaaatcctgcccctctgtggccctggaaacttggcccctttgagcttcagtcactttgtgaaatgacaataacattcaatctccttcaacctcattactatggattaaatgagacggtgtctggggacatgcttggagaatgtattgtacaactgcttaggaattttcttctgcccctaaacctggaacttagagtggagcaaacagtaaacagtcactgtgtgtcggttaagggaacagagcctcagagccccgacaccctggaaacgtttcttttttgtttactaaatttctagcaacaccgtgttttctacagaggtggggggaaatgtccatttaagtgcaagatgaaggggcctgtgaaaggaccctccaaggcaatcccatgtgctcccgtctcctggaaagaagagaataggaccacgcgtagtgaccagggaggaatcgtaccatacgcgtctcagc

SEQ ID NO: 457666 - DNA, 207 bp, Homo Sapiens
caaggttgagcttccacaacatttctaagttccttcctgatggtaaagggccaagatctccaagtctgtgtatgaatacaaattgacctcctgcctgcatctggggttcctctgaatctggcatccctacccctaccaccatctctatccattttgccttaactcacacagcttaccaggaatcactcaactaagctcagaccctct

SEQ ID NO: 457667 - DNA, 286 bp, Homo Sapiens
ggcagtggaaaggaccaggcccccaggggggaggccccgcccgcagggacaggccctgagacctcaagctagccggcccctctcctctcagtttcagcaaacattgaaacctcgaataatcaaaaccccaggcccccacggcatttcctgcctttccactcaactaggaaagaggaccagaaagccggctgtcatccaacaggaaagtgagcccttaaacgggggcttcagctgtgccccagggccactgaaggggagacctgacgttttcacactttcccagaag

SEQ ID NO: 457668 - DNA, 523 bp, Homo Sapiens
caggatttttgttgtataagagatgtagtgacgcctcccttcagacattgtgggagatggagtaaactgagggctagaaggcagagagtaagtgccccataagcagagcagttatacctccctctctgaagatatgtgtctgcatggcatgtgtactgtggtcacttccacagttggttatgaaattggagctagtgtctcaggatgacacagcaacattctcagagtaggaaggatagatttatatgtacgttatcctaagtgatggtgaccattattaaaaccagtagggacttctagcttgacttcagcctatagtttcaagcttctctcccactaaatgctttagcagccctgttacaagtagaagagctcctttactttactttcatcttctgttttcccagtctccccagcacagaaagtactgatgagtagtaaaatgaccaaaagctcccttgtcaaaggaaaaaaggtgcatttatcattgataacataccaggctcttacccaagctcagacc

SEQ ID NO: 457669 - DNA, 288 bp, Homo Sapiens
aaggttgagcttaaggtctacggtggaatacaaaaatcattcttaacaagtccacctatgttttgttatgatctgatacatacaaatccctaggtacatagtgcctgggtggacctggattctgcaggtgtggaagacgcagctgttagaggaggcaccctctttgatggggccatgccaggctgtcaccaacgatttggcatccagaggccactggagcatatgagaagcagttaaggtgccctgaatgttccagagaacattctggaacactggaagctcagactt

SEQ ID NO: 457670 - DNA, 172 bp, Homo Sapiens
ttaccactgaagattcatcttttatcttttgtaacagctaacctgtatgtatcaagatcttcttacaaccagtgtcaaaataggatgcaggaactggaaaaagaaacacaccactcacgtgcacacatgcatacacatatacacacacaccctgagcataagctcagacctt

SEQ ID NO: 457671 - DNA, 454 bp, Homo Sapiens
gtgaaactggctcattttcagattgtttcatttcagacctcagaataacatttggcttttacccttgcctttttcttcactgcttaaaaaatgataggtgtttgctattcaaagctgattaagagcctggacttggtcctggcctggcttccaggatgcccctctcctgctctcctccctccctggcttctccccatcttgctgccctaggttctgtctgcccatcccctggatgatctcatccactcattctcaaggctttataaaccatctataggttgacagcttctcaattaacatctccagtctaggcctcgcttctgagctccagatatgtcaagaagccgtgacaccatcccaaacagatctcccctctcaacttgctcctcccaccgtcctcatctctgtaaatggcaactccacctttgcagttgctagctcagacctttccggg

SEQ ID NO: 457672 - DNA, 314 bp, Homo Sapiens
actctgaggatcccctttttgccttgcggaccttcagctcttctcctctcacgagaacaccagaaaatgtaaacaaaatgtatattttaccaaagttcaaatggcagattaatctttttgatgttatataaagcttagatcaagtacatcatttgtaaagatgatcacccatctactggtgcctctcttaatgactgttaaattacccctttaatggataattaatgcatttaatgtctctcactattatgataacttttatgcaaatttagaatgataatagctgacaaacacaatgctccgcaaggcaaaaa

SEQ ID NO: 457673 - DNA, 475 bp, Homo Sapiens
gtgtcaaggtcagggagaaggcattagtgcagatgaggtcttggcaggaaacagagaagagtctcggttcatggttccatcaggctcctgagcaacttaaaacagtctgctccaaaaacggagcagagtcattggtaaatgtgagtgtgaagaaagggtgagtgttaagccaaaaaaggaactttcccatcagagaagctgccgtagcagtctagccaccaaagatgagttcaaagatggcagatttattggcccaatttgtcaccctgtgaaaaatacggttattactcaaaatatgtcaattgtgcgatttcgctttttctcccatctcagaatgctcaagtttattacacacttgaccaccgggtgtaagatgtccagactatgccatgcacactaaacgattcggaactcccaaatccagcagagatagttgatgaggattccttaagggaaacagagatgcagggcagcc

SEQ ID NO: 457674 - DNA, 148 bp, Homo Sapiens
tacgcggttgcctctactccgtatgtcatattttcatggaattcagtgaattgcattttgaggaccagtgccatttatgatgctggaggattccaccacctttgtggtgttgtttcctggaagagattctactactgaagtggtgttg

SEQ ID NO: 457675 - DNA, 148 bp, Homo Sapiens
tcctttccgctcaaccacttgcatcctttccgataccagttggaaacgactgacggccggacggtagaaatccgtgtagctttcgcgatgcactgcttcacgcacggaaatgaggttaccgagcatgccccggatctgtggtccgacc

SEQ ID NO: 457676 - DNA, 637 bp, Homo Sapiens
tactgccgttgctctactcctgtatgctaatttatttatttgcagtatcagcgtagtgtaaggagatagattgcttacctctaatagcagctgcagtattttatgtttgggaaagttaaatcagactgagatgtagtaatggttattctcagcacctgacacatgccaaaacaattcaaaagcagcagcaaaacactacattttgggtttgattcctcatcctgtaataataacaactttactctctcagcctttgcttaatttaaacccgttttgtttctaatgttgtattaggcattggcaaatacagcaaactcgtatcggcccagtcttgtttagcctacaaatagttacagaaagagaagtacctaagctccatgattactgccctaaattcatgtagaagtgtaaacgatagagaaattctgtgctgatagcatcacattgatacatctcgaattggagctttaagtaatgttggggtttggatgggtcgtaagaatgctttcgagatgactgaatgctaataaagcacatgctactaataagtagcataccatgggatccactggtagccatatatacccttgcttagggcagacgtggtctattcgaatcttgtgagaatagacctctc

SEQ ID NO: 457677 - DNA, 288 bp, Homo Sapiens
  misc_feature (20)..(20): n is a, c, g, or t
aactactgctcgtgcgggantggcaatactggcagccgtcgccgccatcgcagcgtgaggttccccccactcatccccgtgcttcacgctggggcagggcgtggacctgtactggaaccgccgggggttgcgccgcctgtcccggctattgtggtagtgtgggcacgcatagccctggcggcacaggcgtggcggcttcgggcactgctccgtcttgtagctgcccagcacgaagttggcatcttgccaccgggggtcctcgctcaggatcttctcaattcatgcctg

SEQ ID NO: 457678 - DNA, 642 bp, Homo Sapiens
atgaaacagtatgcaagccctatgccaactcagactgatgtcaagttaaaattcaagccattatctaaaaaagttgtatctgccgctcttcagttttcattatcttgcatttttctgagggaaggaaaagccacagatgaagacatgcaaagtttggctagtttgatgagtatgaagcaggctgacattggcaatttagatgacttcgaagaagataatgaagatgatgatgagaacagagtgaaccaagaagaaaaggcagctaaaattacagaaattgtaaaccagttgaatgccctgagcagcttagatgaagatcaagatgactgcataaagcaagcaaatatgcgttcagctaaatcagccagttcctctgaagagcttatcaacaaacttaactttttggatgaagcagaaaaggacttggccaccgtgaattcaaatccatttgatgatcctgatgctgcagaattaaatccatttggagatcctgactcagaagaacctatcactgaaacagcttcacctagaaaaacagaagactctttttataataacagctataatccctttaaagaggtgcgagactccacagtatttgaacccattcgatgagccagaagcatttgcgaccaggaagta

SEQ ID NO: 457679 - DNA, 801 bp, Homo Sapiens
acccagttgctgttagttctgtttccactgctaataaagacctactcaagactgggtaatttatacatgaacagaggtttaattgatcttacagtttcacaagactggggaggcctcaggaaacttagtcatggcagaaggggaagctaacatgaccttcttcacatggcggcaggagagagaaatgagagcctaacaaagggggaaatcccttataaaaccgtcagatcttgtgagaacttactatcatgagactagcatgggggaaaccacgtccatgatttgattacttcccaccaggtccctcccatgacacatgggaactacaattcaagataagatttgggtacagacacagccaaaccatatcacccagttaaggagaacaggggaggttgagctaccagatgaggtttaggaaatggagtcaaagtaaacggaacaagattaggtaaggttaagagaatgaggttgattgaagttgtgaggacaaggtcagttgaagtcaagggaatgaggttaaaagaaggaggatggttaaggtctgtaggaggaagatgagaggacatggttgaggtgagaaggatcagaagacaaggcttatgacatttagaggccgaggttggttgatgatgttgaaaagtcaaactcaggtgatcaagagtcagtgtttgggtgaggttgagttccagttaggtagagaggatgaggtaatgttgagaggagttaagaggttgagttttgttcttcaggattgaagatccaagattgtttgagctcatagatgtcacagggccgacc

SEQ ID NO: 457680 - DNA, 540 bp, Homo Sapiens
gtttgtgtaagccattcaagtctgtctttcctgtgctcttcagtgccccattcattaatatagtgttaataccaagtactgtgatcagtcacctgatttttagtccttatgaaggtgtttcatggaaagttcttcaattcagtgttcctgcagggttgacaatctttgcagggttctatactgctatcttgctccaccttcttctccaatcatcacctttttgaaaaaataaaattagagcctggctgtttaccagcagtgaagcctttcatttaaacaggctacaccatttgctcacaaattacaaatacaattcaggaatttcacagattagctactgagagatgagcaatcccactgttggaaacaagaagctagagagcttttgggaatgtagctttatgacacatgactgttaaattgttaccattcattagtcattctgtctgttggccatggaccttagtatatcattcgcataaactggtttgcacaacactaactgtgctgtattattgattccattccatagataggtac

SEQ ID NO: 457681 - DNA, 614 bp, Homo Sapiens
tcagtcggtaccctgtaacatctatgcgaatgctttaccaccctgacaaatgtactttcccagagaatgtaaccatttacactggtaaaaatgttagtctgcccatgaagcaggcgggaaggagagctcagtcaccaggtacccagggactggggtcagagtccccatacaaaaatgtgtccttttgtggtgaaactacttcccacctggagccaaagtctgggccagtcttagccatttctgaatgaagaacaggacattagggaagtgcaatccagaatctgagaagaagtaaaaaattctcaaactagaaagctgctgagtcaggtctatacagatgcagggtcttaaaaattgtaaggaaagaaaagaaaaaagcttttagttaaacaatggcttataatgacttctgcaaataggtgactctcggggaggtggtggaatctggtgcatcagaatctgtcacaagaaattccagcaaagcaacgggggtagaacacaggatgatttagctttctgtaatgtaagcagaaatattactttatcaaataattcacttttacaacctttctctccatccctaccctcctctcacatagatggtacagggtacc

SEQ ID NO: 457682 - DNA, 490 bp, Homo Sapiens
tgataaatggtgactattagcctaaggaagagacacaatgagtccacaaaggagatgcctgtgaaacaggtcaaacaaactccgatttctataatcccttggaaacagaaggaagcactagaaaacttagcatcttttcttttcaacagcttatctataatattccttttctcactgccactatttataaccttcaagtctcattgcctcaatattcctaaattactctttttagatattattttaaatatgagtaaattcattaaataaacactgtaatattttatctagctcattatttccttacaaattttagtgaaacacttttaaaaaaagatcttccctctggtacaagttggtgtttgcaacgctgagactaatgagaatgaaaagatcttccgtagggtgagaggcttttcgtttagggtcaccttatatgtaggtattctctctcttttcctctcattctctaacaccctccctctccctg

SEQ ID NO: 457683 - DNA, 813 bp, Homo Sapiens
  misc_feature (133)..(154): n is a, c, g, or t
  misc_feature (163)..(455): n is a, c, g, or t
atattaatctatggtgtttatgaagtatctcctgtcattgtattgtttcttttctctggtagcttttcacattttcttttgattcttgatgttctatcttacaaaagatgtgtcaaggtatgaatttactacnnnnnnnnnnnnnnnnnnnnnngagatggannnnnnnnnnnnnnnnnnnnnnnnnnnnnnnnnnnnnnnnnnnnnnnnnnnnnnnnnnnnnnnnnnnnnnnnnnnnnnnnnnnnnnnnnnnnnnnnnnnnnnnnnnnnnnnnnnnnnnnnnnnnnnnnnnnnnnnnnnnnnnnnnnnnnnnnnnnnnnnnnnnnnnnnnnnnnnnnnnnnnnnnnnnnnnnnnnnnnnnnnnnnnnnnnnnnnnnnnnnnnnnnnnnnnnnnnnnnnnnnnnnnnnnnnnnnnnnnnnnnnnnnnnnnnnnnnnnnnnnnnnnnnnnnnnnnntcctgtttggtactcagtatttatgttaaggactcacattttttattagtaaaaatctaagttattatctcttcaaatattctttactattccttccattctcttcccctggaactcttttcagatgtgtgttgaaggctcttaattcatcctctttgtctttatattctttcatatttccctctttgtctcactaggaggaagaactcagtactggtttctaatttactaaaacctctgtatcgtctctactggttaaatctattagcaaaaactattttaatttctaatcgtttgtttacagtattactaatgggttttgttaatttaataccgccaggttttcccagtacacaac

SEQ ID NO: 457684 - DNA, 522 bp, Homo Sapiens
  misc_feature (483)..(483): n is a, c, g, or t
gggcgagtgtaatattatacaatcgtagttccagtaaaactaagatgtgaggagagatatttacaggatattgacgtcaacctacacttgctatctgcagtgcctgtccttccttcctgaggattcaagttaccgtctggtgtcatttctattcaacttgaaggtcttcctttagtatttcctttaaggcaggtttcgccaacaatgaatcccaccagtctctgcttctcagggaatgtcgttcgttccctttcacttgtgtagaacggttttgattcctggctgatggttcttctctctgagcagcttgagtatgccactccactgccttctggtctccattgtttctaagaagtcagtggctggcggtattgaagctcccctttcatgggatgggtcattcttctctgaggcctttcaacattttctctttggcctttgccagtttgactatgatgtgactttgcatttattctagttcanacttcctgtgctcttgaatgtgcatttttttaattaaaa

SEQ ID NO: 457685 - DNA, 682 bp, Homo Sapiens
tcagtcggtacctgtaacatctatgggttcaaccatctcagttcttaacttagctgaaagagcagaggtgagtggtgaactgtatttggtttggggctaggcacacctgtcttcctcttttcagatgtcagcttaaatgatcatgagatctttgctgccttctcttcttctagaggcactttcttctttagccaagctggtctcccctttcctccttgctggcaggggtgccctcgcctcatctctctgcctgtccaacccttccgcagttttctgtgctcagttcaaacctggctgcttctggtagcccatcacatatccttgctgtagtcagtgctaagtcatcatttgatgaatgtgtactacctggtagttcgtagaagaatattggagtgacaagagactagaacccctggtctaatggctgcaagttcaactgccatccagccagggtgagtcagtttaaagcactggtaggcattcataggccataacgaaacaaaacaccgtgctggcctgtaagccaacctgccaagttacacaacctggcctctttttttggctatgatttcaggagcatcccttacatctccaaataggttttgtgtctttagctcccagcatagttcagtgcatagtagggtcctcaataaatgcatagatgttatcaggtaccgactga

SEQ ID NO: 457686 - DNA, 506 bp, Homo Sapiens
caattatagagaaaagaaaatcttaacctgtttttactattcttattgttggtggtagtattagctttgttgtatgtatagaatgaattagcttggtgtggttgggaagtgagatttttagtatggcataagatcagtaagatcaaataaaatctctgtggtactgttcatcatgtatttttaccattaaaaacaaatttcccaattctgtccatgtttgttgcagttgcaaagagcacccctagggcccagtatgtggtctccaaataccatttcctcatctttgccatagtccataaaccatcagaaagaggccagtcttctgaggatccttcagactcaacagcctcggactcgagggtactgcagaacacgacagtctatgaagtcacacccagaagtgaggtttggtggggatgggtgctgctctacagtgggaagagcagaagggcctatgcctgagtacagggattgcggaaccctgaggcctgaacgatcacagatgt

SEQ ID NO: 457687 - DNA, 524 bp, Homo Sapiens
aagttcatttattaaatgaatatgctaggcactatgaatatacagtaaactaagacataggtctgtcttctttaaacacatagtctaatgggagagataagaggcaattacaattcagctagataaaggactttaggcactaggaggagaggcacctatctagatttgatctgtctcagctttcaagagaaagtttacttgtaataggcgttggtgcagaaggatgtgatagatttccatgcagagagaacatcatgagtgagggcatataaatgagaacagcatggtaagctatggatattagtttggagcaatagagaagccagtcttgtttataagacctaggaattcaggctaggccacagtaagatcaggggagtggtacattactagttctagaaagaccatagcttcagtaggagaatgtgttgatgggaggcaagaaagaagcacaggatgcaaaggcgtaagaatgatacaatggactgtagggactcggaggggaagcggggaacggggtcgag

SEQ ID NO: 457688 - DNA, 587 bp, Homo Sapiens
atcgagtcggtactctgtaacatctatgcatgcttcttttttattcaggttccctctatcctttcaaatttatcctgagtgctactttgctctttaatctaaaatcatttaacaatttgcctaattggtgtgtaaaacgtgctttttaccaaaatcggctctataactcaggattggaatttttcttcccttgactaaggctgcctgccgctgagatgagcccacagtctaaaactgcacatacaaatgttcttgctgttgtcattatcaaaacaaatgctattgctgcgcatgcttgtctgatgttgtactgagcagatacgaaggagtaggaaggagaaagaatgattctcgcactgtcttaaaattcctaatgtgtctctgacctcagcaccttaattttaaataatcagagttgcatatgtactgtgcttttggtttaagggctgaaacatacacacacacaaatcatctagaagaagataattttatatgagatatggtaatacattcaggccatgagagtgggacatttttcacaaacatgtctgattcctagaactttaagttgtcccatagatggtaca

SEQ ID NO: 457689 - DNA, 562 bp, Homo Sapiens
taggcggtcctgtacatctatgataacagagacagcttttaaggatctgtgacattaagaattttcagtcatatcaatgccaggaatggaaagccaatgaccagtcaggcctgtcagttgttgcctaaagcaataaggacaagctgggaattcatcacactggaacttcatctgccagctgcattcacacattttcaccacctgaatagttgattctcttcaactcccacgtggctcatttcagcatacagtgttttgaaatgaatatttgattaggcagggtagaaagaggtttagacttatctgaggtgtcaccataatgcactttaagtaattttaagtatcaggagctaggtgtcctaagtcctgttctttgactattgctaaaatggaccttgatcctaattaaagaagattaaatgagatgagacatgtggcaagacctagcacagtgttgggcacctaactgtttataaattaatactggtttcccatctcttttacttctgtctattgaaaaatatcctgaagattcctcatagagcctctgcatagatgttat

SEQ ID NO: 457690 - DNA, 546 bp, Homo Sapiens
ttagctgggattaacagcccatctcagcactagcacagtgcatggtgcaacagagcaggcagtcagtaactggttgttgaatgactgagttacatgggaagggctgggccctccagggctgactgacaggtgtgagagtttggaccactgcatcacatcagctgtcagtaaggacagtcctcatctagccactgaagcagagtgcccacatcaggagcagccagtgctcaagctcccagaaactgcctagtgacctgccttctagacctgcctcctgagaatggggctggccaccttcgaggagagggaagtgagccccttcctgcctcggggtgggcagcatctgtagctgacaattgtatgcatgttcaggacacaggatactcaactcttcgggttcagtgtgctgtgtggagggagaggaagttgacacacgtgaaccatagaataaacaacgaccacagaacatcaaggtagagatggggctgctgggtatcaggaaggcttccaggaagaggtgacaatgagcggcgatcaagtctctcg

SEQ ID NO: 457691 - DNA, 777 bp, Homo Sapiens
gaccctgtgtgtgcttggctatcatactgaacaatgcaggtctgatcatacctagaaatctgttagcttcattggaatctagagaactgctgcattggtaataaattctatatgccaggccctgtgctggatgaccagggacacaaagaggattggatgacacagttgttttccctcaaggagctcagtctggtgagtggaagcggttaatttcaatgtaatatcatgagcattacactagggatattaatagaggaatatccaaagacattcttcctaaaatgagatttagaaagattcctgtagagtgacactgcagttgggcagaaagatattccaggcacaatatgtggttaggtattcctttagttcctggttccagctcttgtgctgctgattgctgctttgtctaaactttcttgttattatccagaatcatctcaggattttttaaggttgagaatatttgttgatcggataagtgaatggtgcgaataaataaatgaataaatgagtgcctgagtaaagggcaagccttccagacttctacaagaagcaagtttagttggaatattgaacttgttagatcaggtaagatttttgttggttgttgacagttcatttaccagggattgacaatgcccagtgaatctggaaagacagtagcttggagggaacagtgataagtactgaaggattgttcagttaaggtgtctgcagtcatcagtgccgccttctgtgacttgtcagaaagcatccctagacagaccagcagcc

SEQ ID NO: 457692 - DNA, 530 bp, Homo Sapiens
gattatagtaaagagaagaaattgttgaaataatgagaaaaagaataatgtgaaagaatcacagattttaaaaaggcaataattgcctgttctgctaagggttatgttagctataaccaagtttcccagctgggcagccttgactctcttctcgcccagtatcttctctgatatcagttttctttctacacagtggtgctgaggatgaggcaggcctgactatagttgatattaggactgtgttttcaccaccgtgtctacagggagcacctcccctatgtgctaccctatgctagactctgtggataagacctgaaccgcagcattctaagacaatacatgttgcatcagtttctcacaggtaaacgccatgacgaatatgtgtgagatattattagaattgaaagtgtaatagctataatagtcaatcttcctctaattactggcaagctattttgagaaacgtctcatgacacctttatggaaggattggagagaagtggattgggtaatcaggcaggaagatgcct

SEQ ID NO: 457693 - DNA, 600 bp, Homo Sapiens
tctaaaacaatacaaacaaacaagacaaaaaaccgttccaaggctctgtaagctttaggcgcccaagcccggctctgccctgctgtgcggaagttttcgtttgggctacgatgttggtgccacatctgctgcatgtcctcagggggctctcatcccacagcagagatctgtcataggttagagccgtccctacagaagcaacacctgaaaggcatccaggggagccagttctggggcaggctgaacctgcagcttcacttgccatgtaaattagagactggaaaggcttctctgacttcaatcttcctcttctgcaaaatggagataagaccttcctggaaaggttaaaataatgaaccataggtgaaactgcctggtctagccccaggcttgtcctgggagctcaggaaatgctgatgaaagctggatggagatggctcaggggagcccatgcctttcattgggatagtctgtcctgctgtctgtcaaattaacctgctgtgtgccaggcctggtattaggctctgggatacaagctgctggggtgaggtcggtcagacgaatcaagaggtgaaagtggttataaactgagcacgctac

SEQ ID NO: 457694 - DNA, 1020 bp, Homo Sapiens
ctgctcgcgtccatgtgcagttttgtgtggatatacacttttgactaatttgagtcaatacccaaatgattaaatggtaagagtatgtttagttttttaagaaactgacaaactatcctccaaagtgaccataccattccgcatccccaccagcagtgaatgagaatttccgttgcttcacatcctcacaagaacttggcgttgtcagtattttggactttggccactctaacaggtgtgtagtggtatctcattgttgttttaatttgcaattacctaatgacatttatatggagcatctttttagatgattattttccatctgtatttattttttagtgaggtgtctgtccttttgcccatttttaaattgcattgttcattttcttattgttctttgtatattttggataatagtcccttatggaatatgtcttttgcaaatattttctcccagtctgtggtttgtcttctcattcccttgacaacatctttctgaaaggagaaattctgaattttaatgaagtctagctgatcaatgattatgtccatggatcatgcctttgatgttgcatctaaaaagttatctccataccccaaatcatttagactttctcctgtgttatattctaggagttttagagttttgtctttaacatttaggcatttgattcatttttaggttaatttttgtgaagggcataaagcctgtgtctagattcattttattgcatgtagatgtccagttgttccaaaatcatttgttgaaaagattatcgttttctccattgcattgcctttgctcctttgtcaaggatcggttgaccatatttatgtggatctatgtctgggctgtatatatatattctattccacgtgaatctagtttgtctatttgtccctttgtccaactaccacactatctggatatttatcgctttatagtaagtcttgaagttaggtagtgtcagtcctctcatttatttttctccctcaatattgttgcatagattgttacag

SEQ ID NO: 457695 - DNA, 248 bp, Homo Sapiens
gatttttaaaggaaccgcatttacaagattgctattttagaattatcactctggctgtagcaaggaaaatgaaaggaacagaggcaaccctacagaagctactgtaatgatccagttgagataaaatgatggcctgcaccaagcagggtgaccagaaacagagagatgcaggtatttagacagctgaatcaaaagaacataagcgactaagggtggaaagaatggggccagctgggcgcggtggctca

SEQ ID NO: 457696 - DNA, 875 bp, Homo Sapiens
gagcatcactggggcaccacacgaggcatccttcacctgttgaccaagagatgggtcaatcctcggttgcaactcacaaggtgtatcttgaaaaggtggaagtgtagtgtttggattctcaggaagtgctgtgagcccaggctgagtgcttattcttttgtttaggagagctgcatcttcctgcattctcacctgaaagttctgaaacagacaagccatggggttattgttagctgggcaaggaattgtggactgtccttggaacgcctggagattctggtacccctggagaagttgctgctgttgctgatttggaggaaacatctgattgttgtttaacagcgactgtagatgagtcagttgatggttactcaaagtattgtttattgatgacatatcaccttctcctgctgaaggctggaggatatttaatagattctggtttaggagatgctgttgattcactggcaaagagataggtagagaactgaggaggctggggttcaaggggtgtggaagatggttgtttgaagtgctgttggatggaaaatgaagtgcgtgctcctggccaacaaaaggaaaatcactcccaatgggtagctgactctgcagtgggtttccagctgcagtggtgactatgacgccatcttgaagaacagatgttgtctttgtgatggcagggtggttggtgcccgctatggctatggaggatgatggtcctgaaccgcctgcttcagaacttgtttgattatagctgctaacaatgctgtttggtatcactggagtggaggacgttgaaattcttgactgaggtggattgggatgtaaggaatttcctaaagccatgcccgactgactgagctcccaccgtcagc

SEQ ID NO: 457697 - DNA, 527 bp, Homo Sapiens
gagtgctgatgtaaaggcagcggaagaattttgggaaactctagataagctgagtctggaggaaaatcacttgccagaacaaattttcaatatggatgaaacctttctattctggaaacagatgcctgaaaggactttgatccatgaggtagaccaaagcaatgccaggcttcaagtcttttagggactggatgacagtcttgcttgggggcaatgttgcaggccacaaattgaacccctttgtgatttggcatgttgagaaccctaggggcttcaagcatatcaatacacacacacttggccagtgcactgcaggagatataagaagtcgtgggtgaccctgctcctctttcaagatgccctcctgaatagatatgcctgcgaagtggagaagtagtattgagagaataacatacccttcaagcttttgcttattgtcgctgataagcaaatgcctcctttaagtggtgtttttcatccagtatcaaacaccacgtctttgatccatagatgttatagggtaccga

SEQ ID NO: 457698 - DNA, 586 bp, Homo Sapiens
  misc_feature (68)..(330): n is a, c, g, or t
ctggcaaagtgtgtgtgtattgatatgctggaagcccatagggttctcaacatgccaaatcacaaagnnnnnnnnnnnnnnnnnnnnnnnnnnnnnnnnnnnnnnnnnnnnnnnnnnnnnnnnnnnnnnnnnnnnnnnnnnnnnnnnnnnnnnnnnnnnnnnnnnnnnnnnnnnnnnnnnnnnnnnnnnnnnnnnnnnnnnnnnnnnnnnnnnnnnnnnnnnnnnnnnnnnnnnnnnnnnnnnnnnnnnnnnnnnnnnnnnnnnnnnnnnnnnnnnnnnnnnnnnnnnnnnnnnnnnnnnnnnnnnnnnnnnnnnnnnnnnnnnnnnnnntaatgaataacgattcttgaattgtttacaccacccagaactagcagtcaatccaacatcacagccaggtccagccttttctttcaacacctcaaacacactttttgctttgggatcatcatggtgctgagaggtacacagcaccgtgtgcacctgtgtctgctcttcaatccaggtcatcagaagcttgtgtgtgtctgataaaggcccttcttgttttgttagtctcactgccttcaactgcatagatgtaaca

SEQ ID NO: 457699 - DNA, 605 bp, Homo Sapiens
  misc_feature (247)..(523): n is a, c, g, or t
  misc_feature (528)..(557): n is a, c, g, or t
gcagtcactcagagatcccccgaacatctaggagaaagactatattggggcaagagtggaggaagtaagaatggtcaggacacgaatgcagtaatccagattagaagtctggtgtggctggtggcaagtaaagcaacttaatgttttcagattcatgatatattagtattttggagggaaagccaatgagactgtttgatggaatacatgtagggagtgaggtatagaaaggaatttaggatgatgnnnnnnnnnnnnnnnnnnnnnnnnnnnnnnnnnnnnnnnnnnnnnnnnnnnnnnnnnnnnnnnnnnnnnnnnnnnnnnnnnnnnnnnnnnnnnnnnnnnnnnnnnnnnnnnnnnnnnnnnnnnnnnnnnnnnnnnnnnnnnnnnnnnnnnnnnnnnnnnnnnnnnnnnnnnnnnnnnnnnnnnnnnnnnnnnnnnnnnnnnnnnnnnnnnnnnnnnnnnnnnnnnnnnnnnnnnnnnnnnnnnnnnnnnnnnnnnnnnnnnnnnnnnnnnnnnnnnncagtnnnnnnnnnnnnnnnnnnnnnnnnnnnnnncaggttattgcttattgaagaaaatattgactacaagatggttagcag

SEQ ID NO: 457700 - DNA, 275 bp, Homo Sapiens
gtcacgtgtagcatctatgctaagtgataataaggcacacagcgtaaacagctacataccatgagttcatctgtgtaactttttgaaatgacgaaaccacagatggagacagatgaagggttatcaggtggccaagatgggggaagagattaactatggctctaagtcagtagcacattgggacccttgtgctaatcaatctgttcaataccttgattacaatggtacatacacgtgacagaattacacaaaactcgctaggtgtggtggctcat

SEQ ID NO: 457701 - DNA, 521 bp, Homo Sapiens
gaggcacttctactctctttacctagcagatccttctagctccccctgggggctgagcctatcagggcacaaagccagaatgtggtttgtagaatcccagccccagcatctccaagcataggatggattttgaagccaagagggaattagctctcggccgggttctgagtgatcccatccagctgctcctggacctggtattgagaggtttttcccttggagggcaaacaaagtggcagtggggaccagggtgtcccctgctgagaaatggagagctcttttcccctgtacttctctggggtttgccttgtggagccaagtgcttgggggaggagctcctggcaggactccagctgttatttgtcagaggacagctaggattggttcacccttgctctgagttggccccaaagcgagctatgctgaactcttctccatctccaagcagacaacctttgtctttacatgcaagagggatccaattatgacaggctgacccagctggtttcatgtctggggtt

SEQ ID NO: 457702 - DNA, 611 bp, Homo Sapiens
atatgcttttattaaattctccagtagtagttgaaataaaaatctaccctaatttctatgaaatgatctatttatatcactgacttttctctttctctgattctatatttcatttaacaatctgcagactttcaccccatttcccagatgggaaaaccctagccccctcgtatctctgagaagttgcctcagagtaggacacagagatatatggcccccacgctgggaagtactgctgtcactgtttaagtgtatttcagttctgttactccaattcatacacacagtcttccatgaggatggtaggatgaacctggttagctggctttggataagtagatcagcatgactacctggaataaaagtgactgactctaggataaaaattaaaacaagattctttcacagcaacgagtctttgcaaaacctctctcctaataatcacaaaccaggggaagaaaagtgggagcagggaacacaggaacacagccaaagggaatattgccaaatgcttcccgagcttcatcagacagacttcttgcaatgccacgactggatgcatctgcacacaattccgggaaatgcccaccttgctgttctcctatccccaa

SEQ ID NO: 457703 - DNA, 528 bp, Homo Sapiens
  misc_feature (252)..(281): n is a, c, g, or t
  misc_feature (314)..(351): n is a, c, g, or t
  misc_feature (383)..(420): n is a, c, g, or t
  misc_feature (463)..(488): n is a, c, g, or t
cttttgtgatcttctaaaccctgcaaatcaaaaggtaaggaacattctgccaagcaacgcaggccccataacagcctttcttctaactttacgacgacgatttcagccacacagaaacacaactgaggagagagccacggagcccgaacttggtcggggttgggcccacatgcacagggggaggcccacatgcacagcgggagtgtgcacacggcaccctcgttacctccagccctggctcccgggcaggcnnnnnnnnnnnnnnnnnnnnnnnnnnnnnngctcaggaccctgggaccagccctggctccccnnnnnnnnnnnnnnnnnnnnnnnnnnnnnnnnnnnnnnctcaggaccctgggaccagccctggctccccnnnnnnnnnnnnnnnnnnnnnnnnnnnnnnnnnnnnnnctcaggaccctgggaccagccctggctccccggcaggcaaggnnnnnnnnnnnnnnnnnnnnnnnnnngctcaggaccctgggaccactggggctagggtagacacag

SEQ ID NO: 457704 - DNA, 532 bp, Homo Sapiens
ggccaggttggtgttgcactcttggccttaagctatcttcctgtcttggcctcccaaacgtgctaggattacaggtgtgagccagcaggcccggccaggtatatgtatttctatgtttctcccttcctctcaattcatcctatatactaccaactgagttcacctattttgaaaccccattgtttaaattcttccatgacttctaggttaagttcaaactctaagaacagcatgctaaccctctgtaatagctgtgtgtgtagtcatctctctccatccttccatataacatctcatatcctactctcattgaatgtcctctcatccccctgaaaaaactctaccctctcaagctttctagggctttgtggatactgtaactctgcttagagagtcattgctcatctcttaattcttattcacattttgacagtcatcatagttatcaaaaagttacccaattcagcaagactggattaagtatctttgccatgtactcacacaacatactgggctttcacttccataacaa

SEQ ID NO: 457705 - DNA, 455 bp, Homo Sapiens
aaacgctccctgtccactggggaaacttgcgtgtcactgagacacaaaagcttcagtcaattgggacaaaactctactggtggtactccaggcggaggagaatgcgagggacggaaccaggagacactccctggggacccctcaaccaaacgctccccatgcgtctctagtgtggcataaggtgcatcctaccagggagctagctcagacaagacaggggacaaaaaaccagagggatatgaaggggtgagtaaggagggggcaattcttctgctgggggagcaggcagcagttgtcatcgtggacacggcacgggtgactgctcttgtttctactaagtgagggtgcctggtcggggatagaaagcatcaaatatgaccagggcaagataaccatactccccacccctctcgcactgcagggcgggagaggggaaatggcagccctatgccgtc

SEQ ID NO: 457706 - DNA, 925 bp, Homo Sapiens
gtgttggtagcgacgagagagagaagtggataggggttatggactatgggatgaatagggaggacagcttgactgatggctcggaggttgtgaacgagtcggtatgagccatcagactttttaacagggaggataggggtgttatatggagagtgtgttggtctaagaagactgcatgagcagagcttgtttacgatgggctgtaggcccttttggtgggttagagagatggggtattgaggaacgttgggaaatttggaagagtcttttaactggattctgatggggtcatggtgagcagctacggaagggttaatgagagaggcaggaagtgggtactggggaaaggggtcaggggccggactagcggagaggagcaggaggggactctggttgaagggggcaagaaaaggtgatagaagctttgactttggctaaaaggtctcagcctagaatgggggtggggccatgaggcatgataaggaaagagtgtgagaaaatggcatcaaacagggaacaagtaagaggtctggcggcaagcggacaagagatgagtccgtcaacccccacaactgagacttgagagggatgtgtgggtcctgagaactcaggcaaagctgagtaggtggccccactatcaattaaaaaaaagagatcagcttacctgctactagtagagttaccctgggctccgatgcagtgatggcagtgggggccgggagccggggcccaggggccctggcctcatcagtcttcagtggctaggccaaggagctatgggagtgcaagtgattcttcactttttgtcttgttgaagggatggtggctctgaggagcatgcttgtctgcccatctgttgagaggacagtcagacttccagtgcccatctgctgcagactaggcaagggctctgcactcatcggcc

SEQ ID NO: 457707 - DNA, 350 bp, Homo Sapiens
atcggagaactgttgtgaagggacagcttagggactagcgtcctgggactagggggaagttcgcgactttctgaagactggcaggaatgtgcctcctggcacctcgatgcttcccccctgaggggaggcatcgtgagggactgtggcaggcttcactgtacgctgagccggggaggtcctactccacgtatggatccggggaatgagtattcagccacagaggctgccgcgatcatagacactagatcccgacttcagaaccaccagagccgtccccgctcctgcacactggccccttccccgaccagagttcgctaaccaccgtccgatcctcccgaggtgatagatct

SEQ ID NO: 457708 - DNA, 470 bp, Homo Sapiens
tcgatcgagctcggacccagttctgcttcttgaaaccagttcctgcttcttgccagtcctcggggtctactccacgggtacaaggtgagagtggctctccagagtgcatttgccttttggtgccgcactgcatcctcactttgaccctgagcgctgcagtaagccctgcagggtgctccaccttgaagcacgggaagatctgatgctggccgccttcttccttcggttgcctgaaagggcccgtgtttatccttcgcttcacagagaacgcaacacacaacattaaacacacatagagagtgaaagagaacaaggcatcttcatcaaggagggcgcaccatttaaccacccgcgaccttgcagtgcgcctctgcaaagtggggactccgctctgtagcaggagatgggggtgttgacgattttgaaagtagttctcagttttccgaggcaaaggtgtctggggctgacga

SEQ ID NO: 457709 - DNA, 492 bp, Homo Sapiens
agttcctgcttcttgaatacgttcctggttgtctttaagtgactttttttcagttcatttgaatcaagattcaaataaggcccattccttgccaactgtctgtttttattggagtagtgggggatgaagaagcttcagggagacttgaaacacggctgcagccactaccatctacaatctcaatgtgagttccatttgatttaaaatttaaaatagcaattaaaaagatgtaattgggaatattaactgaacagaacccctacacaggcattttaaaattggagtttccattttacgctgaagaatgtcattcctggaaactgtctgaagcctacacagtcacatcttggataactccacatttcgaaagtttcaatcttggacaatttccagtatgagtgatttcgtatattacttcatctatattgtattgccaaattctgtaaaactataatcatatctttcagaagcaggaactgggtccgagcgctg

SEQ ID NO: 457710 - DNA, 438 bp, Homo Sapiens
  misc_feature (47)..(185): n is a, c, g, or t
tcctgcttcttgaaaagtagctgatttgtccagatgtggtggctcannnnnnnnnnnnnnnnnnnnnnnnnnnnnnnnnnnnnnnnnnnnnnnnnnnnnnnnnnnnnnnnnnnnnnnnnnnnnnnnnnnnnnnnnnnnnnnnnnnnnnnnnnnnnnnnnnnnnnnnnnnnnnnnnnnnnnnnnnnggatacataatatttaaagatttattattatctttgtctgaaaccagagctattgcctgtatgtgtcagcagttgccatgtccagtttcataaagggcaagattgaacaataaacagtattgtggccatgcaattactctgaattttttctacactgcttggattggatagagtaattttcctcgggctatacagctaatttactgcctcaagagaaataggtgatgtgaccagctctgcaacgtaataatgc

SEQ ID NO: 457711 - DNA, 465 bp, Homo Sapiens
cgatcgagctcggccccagtttctgcttcttgaaaaactcagagctctgcatatcactttttcattgctgggaaagaaaaaccaagctattccacaggtgtgtggcagctaattggtgtggccattttgttaaccctctagagaacgtttgctttcctctcttgacctagaattggagggtcttgaggaggagaatggcatagatcaaaaattgaaaaccttgagtcagattaatgactggatgttgcttgtggttggctgaatcctgcaggtatttcttgaagtttgtgaaaaaataagcccaatgcagtgtctgcatttggtctgcatttgtctgcatttttgacaatacttggaaatgaggttaagatgcttggattggtgggtggtggaaaatgaatgaatcataaccgatgaagttatattccaacaatatgatgtttcaagaagcaggaactgggggga

SEQ ID NO: 457712 - DNA, 378 bp, Homo Sapiens
agaccctgtctcaaaaatataaggaacgcaatttttaaaaattaatttcaggcctagggacaattgcaagcacagcaaaggaactaccatgtggccttgaagtatggctttcagctgaacttgatttgttttaaattatttaatgatttaatttctcttaatttttgtgaacttgatttttgagtggaggaagttgtttattttccccatccagaagggttgacccgaaggggaccccaggggactctcattgtagactaggcctcgttcttgccttaatccagagtatacattatattgagcactctgtctgtgctaccagatgctttacacgcatcatttcatcaactctcacaatgagcccgtgagatgtgtcat

SEQ ID NO: 457713 - DNA, 489 bp, Homo Sapiens
  misc_feature (68)..(124): n is a, c, g, or t
atgcatttcttttaaaggaatttataattagtctgaaccacacaatttaacactgaattatatactgnnnnnnnnnnnnnnnnnnnnnnnnnnnnnnnnnnnnnnnnnnnnnnnnnnnnnnnnncccgaccctatccaccacataggtttacaaggtgactacactgttctagtccatcttgaagaatacaaaatgaatcaaagagcatcgcttctgccctcaaggagcttcctatgtggaaaggaagatgtggtacataaaggtacacatgactatattatatggatgaaaacaattaattacattaaagagtttgagataaaaatctaagtgctgtgagaatttgcaataaaagaacaattacttccaaactgagagagaactgcggattgggaataaagaaggacactttctgagatacagaatagggaaaaggtattacaagcttaggaatgagcatgcacagatttcagaagcgaaactggggc

SEQ ID NO: 457714 - DNA, 388 bp, Homo Sapiens
atcatcggctcggcccccatttctgcttcttgaaatgggataatgtgacctaatctcatcaggttaccaggataactcagtgaattaatagagataagtcccataacatgtgtaagagctctgtgtgtttggtaggtgctgggcatcagtgctgtcagtgaacagagcagaatctgctgccttcatcctcccgggatggctttcttctctgctgaggctttttcaagtagagcaaaggccttgggaggctgaaatgagatggtggctggaactggtgggttttcacaccccaaaggtgggtgtgtcaaggggcagaagaacaggggcagtttctgtccgatgtccctcctggaacttggcatgtctggtttcaagaagcaggaactgg

SEQ ID NO: 457715 - DNA, 596 bp, Homo Sapiens
accctagctccggctactgaaattgctggtacagagctctacccttcacatcccccctttaaagggtgaaacgcacctaaaaaaatatgtctgaagtgtgaagactaggtggaaaatggtagataacttttccacaaaggaggaatgctctcttgtaaagtagagaaaacctcttcaagttacttgtttttttaaaacaagagtacatggttaactttggctttctaactgacagatgtcatggaactcaatctgtcagcatctcagtcttacccaactatctgggcttcgtcagagatctcctataagaaagagaaatatggagaaaccaaggtgatgttcctatggaatgagaagaatgcagactatatttagtctggagttagacctgaaatttgagacaggataggcatgagcttctgagtaaagcattcagactgaaatccagagacccgtcttctcctgccctagcacttacttagtgaggtaacttggacaagttacgtaatccatgtgggcctgttttgacatctataaaatattctaacagctcctgtatatttttcagaagcagaactggggtaccgagcctgact

SEQ ID NO: 457716 - DNA, 559 bp, Homo Sapiens
gatcggctcggtacccagttctgcttcttgaaatccaagtgctgtcatgaaagctgcaggcaggtctgtttagttccaacagcagaatttttggaagacttccttaattctgtaggaaggagtgtggtgactaccacttgctgacgagaagccgcggaggattctgcagcgtgacaatatgtatatccgtattataagatgtcagcccccaccgcgcacgcccccgcccccgtcagctctgctgggctgcagaggaggggggacgaggtggcacagggtggctctgcggcagtgtagccgcttcgtgctgtcggtatctccacaagtccagaagctggcttcaccggggtgggcaagagttcgacagctgttactacaggaaagagctatgacttagacaatgtaattgtgcctcagtatgggcagttagtgaagagttttgtagtatgtggcattaatgcagtggctccttcagcggtgtgtagaagctgtaggttcatgtcacacaacacacacgcgcgcacgtaagcagttggaagcaacaatgtccctgtccact

SEQ ID NO: 457717 - DNA, 604 bp, Homo Sapiens
tccaccagctcccagagggattacatcttttttagaaagataaatctctttattgtacctgtgtaggatttcacgaggaagagaagtaagatgtgtatccaatctactaccttagaattcaggaaatcagaaatgtggttttaagctctccagcttctgcaatacaggaagatcctctataaggagtttggaatcaatgctaaaggatgacccaccaacactaacatattccactcctttggccagttaacatctctacatatccttctgtccatactttaatttctaaacaacagtagcaatccaaacatgctctcacctaacaaaatgccatgatcctttgtgcaaatgaaaacatgctcagtatctctattattggttattatctataattatgtgtgtgttgagtggtttctgcaactgatcatgaggccacaatttgtattcataacttccttcctttgtaccagcaatactgctgtttggggttcattttgtctgttaattcaattagtggttggactagacattttgaactgccaagaagaaaatttcaaataagtcttccctatccttcattattttcagaagcagaactggggcg

SEQ ID NO: 457718 - DNA, 385 bp, Homo Sapiens
agtaggctcggccccagtttctgcttcttgaaagatatcaaaccccaactttggttttgcagatattcatatgtattcttgggcaagatttctttccctgggctagatgtcccaaggaccacactcctctgtccctttcaaagaaaagacagacctcactgggaagtcctggattgtgtccactgctgctgtcaccggagtctgaccccagccctgcccatctccagggatcgcagaacctgccagccaacttcctttgagtcaggcggtcagggctgcatcttagaagccaagctgctttggtgtgatttctgaagtctgtgcatttgccttaactgtcaggccactggcttccctgagactggtttcaagaagcaggaactgg

SEQ ID NO: 457719 - DNA, 478 bp, Homo Sapiens
ctcggtccccagttctgcttcttgaaacctttcctaccctgtccccaggtaaaccgaggtgctccttccagtaggcacctgttccacctgaggctgagcctaatgatcgcctctgtatgctaatttttataagaagtgctcttgccctgtctgtctccccacaggaatatgtttcctttctttcttataccaaatcgactcagtgctgactcaagctaggaaaacattagagatgtgttgactagattaatccagctgtggcctctaacccagtgctgggatccccctagagtagccactcaccctccagaccctgtttcagcctatcaaggggcgcttagtttattcccaccagctggttcccactagctttagatagcaacaattgttacagagaagccagcttccctttcaagaagcaggaactggccagttcctgcttcttgaaactggtctttttgcgccagccggcccaacc

SEQ ID NO: 457720 - DNA, 538 bp, Homo Sapiens
tacgtcaggctcggacccagttctgctctgaaaggtgaccttaaatgtagttatttgacattatttatgcttcaaaatgaatgatccgaaagaaggctttgatgtgcataacctgagactggaagagagatcgcgtcttggggaggaaatatgatgaagaactgagatgctggaatcttataaacataagccccttccttcacaattttcattagaaaattgtaaacactttattctgctattaaccacatgggcctggagactgagaagtggaaggcactaggcaggcttcctctttaactaagctctaccttggcagggttagatctgcatagttgaatcagccccttcaaggaagcagacacctgtgaccagatctgcttctttcccttgagcctgacacctgttctttcatcgggatacttctgtagtttgggaggatgtggttgaaagaatgtatttgtgaattgcaagcaggtaattaaggtagctacagtatccttgaacatttctgatgttcagaagcacggaactagtt

SEQ ID NO: 457721 - DNA, 600 bp, Homo Sapiens
actgctcttgaacagtccttgcattggtgactgtatctatgagtgaatctgagagatgaaataggcaagtagtatactcagtcccttcttgtggggagccagcgtgcctgcagggagcatgcgtcctttccactctctcccaggaaggacagggaggggccacctcctgcagagcccagcactgcctgtacctgagtgggcaactcagcccatcctggccttcagcatttgcgagcccacacgctccactgtcactatgattagtaataaccatgacattttgttctccagctgccttgtcttgccttttgtcttcattctcgattggtacagagctcaggctgggcagaggagtgctatttatcggcccttcccaccgccccctacaggagagaccagtgggagaaaactccatcttgagttcctggcttgttaatggaggttttcaaggcttggtgaaacccgctgctgtgagaatccactcaataaacaactgaaaaatatttattgagctcctgatacaacagggaaaataacttatcctgccacagtgtttcttaccactttcaagaagcagaactgggggaccgagctcgatga

SEQ ID NO: 457722 - DNA, 662 bp, Homo Sapiens
  misc_feature (39)..(39): n is a, c, g, or t
agctcctcgcagctaaaagcggtccctccctattacccnccttcctcccggcccccttccttaaaggatgaaaagtacccctcccctcctacatctgctgtaccctaaggacaggactctgaggagtactcttgctcccacagattaaactctcagcagcaacttcaagaatcatttttctataggggtctgggaggaattctggaggagagtaaagtcgaagttcttagaagctctgagaaatcatgggccgtgcggtaggggttgaaatgctcaaaggtccacacttcttgaaataaacagaatggtcttgagtggattgcaactgttttggaaatagctttgtgaaaagagggtggagagctactcaaaattctacgttagagagaactgaccagacatctaatttcattgctcggcagactgctctccagaatgttgagattgcccgagaagtgaccccagcaaaagaaaaatattgctgtacctaaattcaaacgacatcctttgtggtgccacagcacatggatttcagaaccgcctgtgaggagacaaagaacaggaatttgttcgctgcaggatggtaaccaggagcctttcaaagtagcgctgcacctagccaaagacatttcaagagcagaactgggtccgagcctgaacta

SEQ ID NO: 457723 - DNA, 433 bp, Homo Sapiens
gttggaaccgtgcgacctttatacaggaaacagtatacggtatgattgggtagaacgagtcaggacttatgtgtgtgaaacacaaacttaaggctgggtgtgaaacactttctgtggacaaggatttgtaaacttctctcctccccctagctgcggccccagcctaactgatagttacttgattcagtgtgctagacacttaaatagcatctatgtctctttcaagggaatttgtcaaataatgctgtttagctaattgttgcaagcaattgcatattaacagctgtgattttgttggacagcaagtattatggccaaagccagtttcttggcatttcaaaaataatgcaataaaaactagttgaggttagctgaggctggaaatgcctttttcatggtaaatgattcacttctatatttttctttctttttc

SEQ ID NO: 457724 - DNA, 134 bp, Homo Sapiens
cagattgctcgactcacaaaatcttttgcactgtataaatgtgagttcttattgtgttgaattcccaagaatatttagcatcttttgaaaaatatttgtattgcatttagaccaggaagggccgagctcgatga

SEQ ID NO: 457725 - DNA, 307 bp, Homo Sapiens
cttatgttctgacccaccatgaggaaaagactgtgtcattttgtcaaatgctgttctattcctaccgccatggtggaagggttacgtgccacattgcccagaaactgtattcattctatgcagttgtgatattgttttctttgttctccaaagaactttccaaaaattgctatccttgtgacctagtcagccttctctaactgggactaactcatgaaacctgagaatttcagtgcaggaagaaatgttgggataatatagtcctacccaagttcttactgtacaggtggtcagacaaaggtgccga

SEQ ID NO: 457726 - DNA, 378 bp, Homo Sapiens
aatcggacatctctgtacgctattcttacagagaatacccctgggagtaggattgtctcaaacaattccacatgtctgcttctcagggacctgtacccaccaccctgtccttccacaaagaatgtaactaaccaaaaaccctagttctgtagcaatgaccgcatttgagaacgaccccacaccccgcacttagttcaccatcatttctcttggcactgcaagaaggaggtcagaatgcagttatgttgcggggaggtcactgccacattgcagatcttttgctcataatgaagcttggcaagttaggctgggagacggcagggctctctcatcggtgttggtttagtcgctatgggtgggtcagaacataaggggtac

SEQ ID NO: 457727 - DNA, 625 bp, Homo Sapiens
aggccggtcctcggttgaagtgtcccacgctacactgctccagattcaagtgttttctgttatatcagtagcctaaaacctggtctttgcaaatctaccatggctccattctaacccattctcaatattgctatctcaatgacctgtttcaaaaacagaaatatgtctacattgttgtctggttaaaaaccctcaatgcttccctattgtctttttaagaaagtcaaaactccttatataaggcccttcctttattccctgttctgtctacatgtccagagccatctctctatggttctcagcttagatataatttcccctgtgagcctgttgagtgtatctgttattagcttctagcatccattttatccttccttgatgagaccagaatgtttcgctcactcggtacttgtgctattaggaaggagcatgtgattcggccctaggtcacccagaataacccacttctctgagccatgtgattatttatgtatgatggacacatgacccaagccaatccattcagaggatatctcagtgctttgcttgagctgtctgcaaagactcagagagttgggtttggcctgatgtgatgatgcaaacctgaagacacttgcatccagag

SEQ ID NO: 457728 - DNA, 578 bp, Homo Sapiens
gttactcatgtaacaagataccaccggttccccaggaacgtatggaaataagaaaaaaaattcaagattatcaatattttctaatagaatcaatttgtatgacataaatttgatagattgcttaattacacaaattctagactttctggatgacgttttaatgtgccattgctttggtttgttagtatcggttttaggacttttacatctatattggtgaaatcagtcttcagactttacttttcaagctatctggataggctttggtatcagaattatacctaataaataggaggtcctctcaagattttctgtatcgggaatatttacgtcttgatgctttttacagaatttaccagtgatatagacttggatcttcttttggaagcaatttctgtccaagttgtcatttatttgtgctttaaattcctctttgactcaatacgtattttctgttaaagttggtccattttagtatcgactttcaagtctattatagagaagtaatacatagatttttaataactgtcaagcttctatcacgtctcctttcctcctgtggacacttgcatccagag

SEQ ID NO: 457729 - DNA, 762 bp, Homo Sapiens
cttatgttctgacccaccaataacagtctggatttcctttattattgcgtcttcaacattagggtgcttgatgcaatgatgaaatagcatgagagaacaaagagacagacatggtgtcaggagctgcgatcagcatttccaatatgcactggttcacattctctcttgtcaggtcaccacgtttctctgctaaaatcaactcagtggcaaagtccatacattcttccagtttctcttctgtggaaatcctgcgtcttttttctgctatcagaacttctatggcatctttcaaatccttgacagacttctcatactttttgtatagccaagaaatcttaaagaagatgtctggtttgatgaggagagcttgccatgcatcaaaataaccttggattttaaccacgatagcactttcgtccaaagggatcctcaagaagagcgtgttagaggtgtccagcatgacacgacgcagaagggtcaacacgtccacatagcccgattcattggtcacctcctccaacctgtccagatgtgttttgagggattcagcacagactgtgaccatacgaacaaggtccggggcctgacagagctttcataaagaagggtcgagttgttttccagagctctggattgttgttaaatatgatgcctttctcatgcataccgatgcactgcagcccaagtttgctgccgaatcgagagctgtaatgattgtgcttcattatgtggaacatacttgaggacttgtcgcagggtttt

SEQ ID NO: 457730 - DNA, 749 bp, Homo Sapiens
ttcagctcggcacctcttgatgcaagtgtcatcattaacttgagagaccaaaggctagaggaaggaaagagggataggttggaatatcaagtcaaataattcatcttagactgtgtggataattcaaggttgagatgccctttacatatccatgttagtttcacataagtagaacaaatgagaattctgttgtattgaggtgaaatactgagttaaatttccgcagccatctgagctctctcaggacctgagactctgttctagtacctttcatgaggttgtcaccaagaatttcctcattcacagtgacggaagctgaattcagacaagagtgtcccccaccccccacgtacacactctcagctcctagaagaaccaccttctgagttcatgcctgtgaggtgagatgtgtaggaggaagttaatgcaacagatgctttgtctgtttcctgcctgtttggagctgttttcctcagtcagcctctaatggcttatccacacacaaagaatacagtttgcatactagctgaaactaatcttctctgaaaagactaattttcctctgaaaggtaaacagatccttgttctttaaacagctcattttggattagcaactctgcgtctggtacacttcttgaagcacatttctcccagtttcctttcttggagttaaagacattaacacagtgtccatacacgtgtcaccaccactctgcctctgttgagtgatgcagaaccatttgtttcta

SEQ ID NO: 457731 - DNA, 388 bp, Homo Sapiens
gaagcagtattggattctttattgggagtacatttttttaggtctcttaaactttaatttcacacagtaaattttgaatctcataaggaagcatatttgaacctagtcaatttaatcttagtgttcccttgaaaactttttttccctacaaaattttaagtgaaaaatacaatagtaaattaagattacactggggaaaaaaatgcaggtatcactttactccattgttatctgacctaggaggcttaattaaggttttaggaaatatgtaataccttccatcattccatcatccttaaattctggttacccaaataatgggcctaatggttacaaaaggttatactccagagacccaaagcttgacatttacctaatgtatgagacc

SEQ ID NO: 457732 - DNA, 520 bp, Homo Sapiens
gagctcggtaccattatgttttgacccaccaggatagggcactgtggatttggttttgaagcttgtccagagtcactcaagagagacaaagcggccattctactgtgtgctacccaacacccaccaggtaagctgctgtgtgccaggatgaagcccctggaagactgcttggctttggtattccagaatttgcttaaatatgttgtacacacacccctgagtttaaaacagcaaggctgagaataagatcttcagcaggcacaagggtaaaggaaagagatacctgtttccagtatatcatgatgttagtttgcttaactaagtcccatttaacatttaggggatcaagatttgggatgttttcatttttattgaagaaatacttgacaaatattttgaaggcctaatgtttgtatgggctatgacatctgctatgcgtcaatgcaaagtatgggacccagatactgtataatctgtcagcaggacagcagatatgaggcatgcttacgattgaacctca

SEQ ID NO: 457733 - DNA, 355 bp, Homo Sapiens
gggaaagaagaaacagtaaaaaaatagaaatcttatgtagaacctttatgcataaaaaagattcaagctgcttcacttgaaaacaggaagcagcaccaaatccccccatactcaactccaacccttgcttgtctcaagggacctacatagaaacccagagtgtctcagaagaacagctggagcgctacagcctgctctcttctgctgtccccactgcccccggctaggatcacctcctacaagattcctgcacagcctactgacttttctccctggctcaccctcttccatccctctaacccagctcctaggcatctagtgcttcttggactttagtggtgggtcagaacataag

SEQ ID NO: 457734 - DNA, 656 bp, Homo Sapiens
ttgtctgacccacccctaatcctgatcctttctgtgacgatcctttcacacagccagaccaatcgacaccttcttcgtttgattctctcaaatctccagatcagaagaaagagaattcgagtagctcgtctactccgctgagtaatgggcccctgaatggtgatgttgactactttggtcagcaatttgaccagatctctaaccggactggcaaacaggaagctcaggcaggcccatggcccttttcaagttcgcaaacccagccagcagtgagaactcaaaatggggtatctgaaagagaacagaacggcttctctgtcaaatcctccccgaacccttttgtgggaagccctcccaaaggactgtccatacagaatggcgtaaagcaggacttggaaagctctgtccagtcctcaccacatgactccatagccattatcccacctccacaaagtaccaaaccaggaagaggcagaaggactgctaagtcttcagccaatgacttgcttgcatcagacatctttgctcctcccgtctcagaaccttcaggccaggcgtcacccacaggacaacctacagccctgcagcccaaccctctggatctcttcaaaacaagtgctcctgccccagtgggcccctggtgggtcagaacataa

SEQ ID NO: 457735 - DNA, 563 bp, Homo Sapiens
ccagaccaatgtgagtgtgtaaaggaatatagtagatttcactttgcaagtcctaggtagtgtcagacactaagactcagtagtccgtccgttgtaggaatctgtgtctttttttggaggactctttttctgtagtagtagttgttgttgttcatctgtcaagaaaaaagttttcctttttgtggctctcaaattggggtatagggtaggagacaaaatgagtctgtatttcactgttagtgagtaactaaggcttctccctccctccctgtcctgtcagtcttcagccaatgacttgcttgcatcagacatctttgctcctcccgtctcagaaccttcaggccaggcgtcacccacaggacaacctacagccctgcagcccaaccctctggatctcttcaaaacaagtgctcctgccccagtggggcccctggtgggtctaggtaggtgcctagagataaaattaagtatgactcttttgcttttgctcataaaatgatgatgcatcggaagagatttcatacgcccggtgtgttcccactccagaacgattgtgagcacga

SEQ ID NO: 457736 - DNA, 444 bp, Homo Sapiens
tcgaattcgatatatcatggtcgtaacatgacaaaagtctgttagtccgccatattactacaaagcatagcgggctctatgtttgctctgttcgtaactcagccactggcaaggaaagctccaaatccatgacagtcgaagtctctgactggacagttccctgaattctactagtacctccaattccattttctcccatggaatcactaagagcaagacccactctgttccagaagccctataagctggaggtggacaactcaatgtaaatttcatgggaaaacccttgtacgtgaagcatgagccactcagaactcaccaaaatattcgacaccataacaacagatgctcaaactgtaaaccaggacaacaagtggatgacttcacactgtggacagtttttcccaagaatgtcagaacataagggtgggtcagaacataagg

SEQ ID NO: 457737 - DNA, 375 bp, Homo Sapiens
cttatgttctgacccacccttatgttctgagtggctcatgcttcacgtacaagggttttcccatgaaatttacattgagttgtccacctccagcttatagggcttctggaacagagtgggtcttgctcttagtgattccatgggagaaaatggaattggaggtactagtagaattcagggaactgtccagtcagagacttcgactgtcatggatttggagctttccttgccagtggctgagttacgaacagagcaaacatagagcccgctatgctttgtagtaatatggcggataaagagcttttgtcctggtagctgaaacttttcattaattgtccaagaatactgtgccggtgggtcagcacataacgggtg

SEQ ID NO: 457738 - DNA, 387 bp, Homo Sapiens
cttatgttctgacccacctccacagaaaactaaattaaagtactttaattcacactagcaggtgggtttggccccaggtaccctgacattggcctggtctttctaatcaacttgagtgtttctgccccagacataaaaatccccttgggttgaggcagtagagctctactggggaaccagacatacattttgttaatgaaggcctatccttctcaaagcacatttggtggaatcgggtctttatggatacggtttcttcaccgactatttctccctcatactcttggcctctgctttttctcttgtagcctggttctctggtgtgaacatgagcagatgaccagtagcacctagcttggtgacaaccataggagtatgcctagtggg

SEQ ID NO: 457739 - DNA, 958 bp, Homo Sapiens
gtggcagctgaataccctgcattttcaaagccctaccatctatgacaatctttcccttccttaaacaccccaaattcaccatcaaaaactcatttccccaaggaactgtaattcccttaaaaaggttgttggcacagaatctgggggtaatgcaaatcctttgggtaggtagttaagattgtggcttggaaaagcttccctaaatagggcttagaggactgtcccacctcatctttcatattttgctgctaacaatctaatacttcagatgcagaaccttcagtgttttagggcctttgagctgctgacacacaatagtgcatcagagctgcctctcagtgctccggtcacctacacagaagatgactgaaggaatgaaatgacgagttaattcccaggaagaaaatgaaactgggaacaaatgcattgcccaaattgagctgaccctcctccactaaggtttgaaaagaccctattaaagataccttccatgtgggcacgaggttggccaccaatcaagtagcctcttttgcctaatatccttggcaaatataaatttgttagcaacaggtctgaatgaaagagactgggtgggtcttgattcagaagagctgaattcactctgtgagtctgaagatacaagtcagcctccaggaatctttgcttagctggatagtgtgaaaatagatgatgatgggagtgaagatagaaagaggataaggactgatttgagggaagctggtaaggttcttctgtggctcctgaaatcacatcattagtaatgtcatctttgggtcttcagagctttttgtattacctatgggtataattaagcaactgggagggttgatactgttacatttcttagcttgtaccttctaaggtagttaacaccacacaggctgataactcagggcaagagagaggcctggagagttggtggtcagacataagggcc

SEQ ID NO: 457740 - DNA, 488 bp, Homo Sapiens
cttttcacgttataaaatgtttatatttaccagtacagcactgggctttataaagactgcactcagaaccacactgcacagtccagttttttaaaaagctgctacatgacagacaggtaatcccactgagtgagttttgagaaacaaatcaaacgaagtaaacaagaaacataaaaaccaaatagcaaatgaataaaagcctgttcttgtaacttattcaacttttgccaaattcccaccaatcacttgctttttaaaagaaatgtataacagccaaaagagaaattatgtccctgttgtacagaagttagaatttttgactccaggcagcagtttgctcagtgatcttgaacaagttatccaattgcctctacatttgcatcagtttctctagctgcaaatggggataatactatatacctacctcacagtgggagggcaggagatttgagccctgagttttaggtgggtcagacataacggtaccg

SEQ ID NO: 457741 - DNA, 293 bp, Homo Sapiens
gcctgggtgaacatgagcctcatgacacaaacattattggatacctcctgcatagtaatgatagcaagcacgatattaggcccctaccgtgtgctggcccttgatgtacacaatctccagttttcccagcaaccctattcccattgtgcaggtaggaaaaccagtcctcagataaggtgtcaatttgcatgaggtcacatagctgggacattcagagtgtggtggtttgaacccagggcagggctcttccagctgctttctgcttgcccttgggggtgtgtcgagaacataag

SEQ ID NO: 457742 - DNA, 212 bp, Homo Sapiens
  misc_feature (44)..(44): n is a, c, g, or t
ctctgcttggtgcggatgttgctagtggcccacaagtgtctttncagatgctgttgcttttaggatccccactcatgctgtgtggttagggccagggcatgggagggggtgctgcctggcactgtgccctgaagagggctgcttgcttcctttggtcgggagctcgggcagagccaatattctggtggtcagaacataagggtaccagccga

SEQ ID NO: 457743 - DNA, 462 bp, Homo Sapiens
ttattctgacccacctttaacattcccctattacaatttcacatgagtgttggtagggacacagaatcgaatcatattattctggctcttgctccccaaatcttgtatccttgtcacactgcaaaatacactgatgacttctctactgtcccccaatgacttatctcattccagcatttactaaaatgtccaaggacttacagaccccatacaagtcataaacccagcatgccagtctttgaatcctacagctccaaatcatcttttctgaatctacatctcacatctggagcacaggtgtgtgatgcctgggctcccaaggcattgggcagctctgcacctgtggctgtgcagggtctatcccccacagctgccctcatgggctgggctggtgttgagtgcctgtagcttttcacactcagtgtgccagctgttggtgggtcagaacaggggatcctctag

SEQ ID NO: 457744 - DNA, 637 bp, Homo Sapiens
cactcgttatgcaagtgtcaatattaaagacaagtgtatgtaccaagaggtctggaatgatgaatttttatcctggaactccagcatgtttgatgagattagagagatctccctacctctaagtgccatctgggcccccgatatcatcatcaatgagtttgtggacattgaaagataccctgaccttccctatgtttatgtgaactcatctgggaccattgagaactataagcccatccaggtggtctctgcgtgcagtttagagacatatgcttttccatttgatgtccagaattgcagcctgaccttcaagagcattctgcatacagtggaagacgtagacctggcctttctgaggagcccagaagacattcagcatgacaaaaaggcgtttttgaatgacagtgagtgggaacttctatctgtgtcctccacatacagcatcctgcagagcagcgctggaggatttgcacagattcagtttaatggcacttcttcaccatctgcatggccttcttggttctcagcttagctaagtccatcgtgttggtcaaattcctccatgatgagcagcgtggtggacacggagcagcccttctttgtgccttcgaggggacacttgactaccatgaggggt

SEQ ID NO: 457745 - DNA, 491 bp, Homo Sapiens
  misc_feature (16)..(16): n is a, c, g, or t
  misc_feature (327)..(411): n is a, c, g, or t
ggtacctctggtgatnagtgtcgatgttgcagtgagtgcatgtgtgagacattcagacaggtacgcagcagtgacgtggtctacaactaaaacgtggctgcactgggtgaggctggcagtttccactcaattccacaaaatgccatcactgcccaccccctgctgactgtgtgcggggtgctgggatggacggacagatgacacaggagtgctgttcttgaggagcctggacttggggtgctgctagctgaggctgtggtgctgagcgcaacagctcccagtcagcccccgctccgggctgaggctcttccacattaactgggtggnnnnnnnnnnnnnnnnnnnnnnnnnnnnnnnnnnnnnnnnnnnnnnnnnnnnnnnnnnnnnnnnnnnnnnnnnnnnnnnnnnnnnaccggtttagagagagctcagcagggtgccctgtgcatagttggtgctgcacacacaaacagagatttcatttcagactc

SEQ ID NO: 457746 - DNA, 534 bp, Homo Sapiens
  misc_feature (126)..(210): n is a, c, g, or t
aggactgttcgctccgttcctagtggccaccgggcttggctcttggagtctgaaacgaaatctctgtttgtgtgtgcagcaccaactatgcacagggcaccctgctgagctctctctaaaccggtnnnnnnnnnnnnnnnnnnnnnnnnnnnnnnnnnnnnnnnnnnnnnnnnnnnnnnnnnnnnnnnnnnnnnnnnnnnnnnnnnnnnnccacccagttaatgtggaagagcctcagcccggagcgggggctgactgggagctgttgcgctcagcaccacagcctcggctagcagcaccccaagtccaggctcctcaagaacagcactcctgtgtcatctgtccgtccatcccagcaccccgcacacagtcagcagggggtgggcagtgatggcattttgtggaattgagtggaaactgccagccatcacccagtgcagccacgttattagttgtagaccacgtcactcgctgcgtacctgtctgaatgtctcacacatgcactcagtgcaacatcgacacttgcatcacgag

SEQ ID NO: 457747 - DNA, 755 bp, Homo Sapiens
tctgtgatgcaagtctcgctcttgcagtgagtggatgtgtgagacattcagacaggtacgcagacagtgacgtggtctacaactaaaacgtggctagcactgggtgaggctggcagttaccactcaattccacacaatgccatcactgcccaccccctgctgactgtgtgcggggttgctgggatggacggacagatgacacaggagtgctgttcttgaggagcctggacttggggtgctgctagctgaggctgtggtgctgagcgcaacagctcccagtcagcccccgctccgggctgaggctcttccacattaactgggtggcctctgctgagtcccagtttccccatctgtcaaatgaggaggataacagtgcccacctcacaaggctgcagaaggacacaatgagaccggtttagagagagctcagcagggtgccctgtgcatagttggtgctgcacacacaaccagagatttcatttcagactccaagagccaagcccggtggccactaggaacggagcgaacagtcctggacaaggaagcaggagcaatttcaactctctgccctggcctagcccagctgaggtctctgcacagagtccgctgtatctgctactcatttcccaggtgactttggtctccagagcctcagttttcttacaagtaaaatggggctgtcaaaatgtgaggaccgactgacctagcgggatgcctgagggttctgaggacacttgcatccagagggccgaccc

SEQ ID NO: 457748 - DNA, 602 bp, Homo Sapiens
  misc_feature (245)..(315): n is a, c, g, or t
agggtaagcacaggagctctgtttctcttgctgcttttggaacccagcttttgtgcaaagaagccctggctagcctgctggagacctgtggccaagatgatagccagcatcaacataagggagtgaggccttcctaggccatcctgccccacctgaaaagcggaaggactgcagctgcacgagtgactgaatcagcagaactgactggctgaatccgccccaaattgccaacccactgaattctnnnnnnnnnnnnnnnnnnnnnnnnnnnnnnnnnnnnnnnnnnnnnnnnnnnnnnnnnnnnnnnnnnnnnnnttgtatgccattcttttatatgtaatcttgcctataatgtgtgaacatttgtacatatatcagaatttgggccagatgtgatgattcagatgcttttagtggaatgcatgtttaataactcaagatatcatgaaaaagagagtttcaagaatcataaacatactacactgtagttaaaacacttaacattggaaaataatgatccgataaatatttactcattgtttcctatctcacctatttatagaatagatttgaagcatccagtaggacacttcataacagag

SEQ ID NO: 457749 - DNA, 738 bp, Homo Sapiens
ctctggatgcaagtgtctgtagaggtttcgctttctgggtcatagacagtgcattcttgctgtatccttacatggtggaaaatactagctagctctctggggtctctttcataaggacactaatcccaatcacctctgttttcatgacctaatcacctctcaaaggccccatctcctaataccatctccttggggttaggacttcaacataagaatttggagggaacacaaaattcagaacatagtctggggctacttatatcggttttaccaggttaaatactcctaaagatttaatttcccatcttggtaactgctgcagccattgagaagcaagacagaacagcaccacagaattaaacatttctgaatattctcttattcatctcatttgtaaggtatttgattccacaaatctgttatgctaatttctatttctcttcactttgattgttactgttactattccttggaattcttatccatatacttacctggaattcaaaccatatcaatattttaaggctctatttgggtccaatattcatctttaacactacaaagaatacagcacagtaataagcatatgctccagagtcagaatcatgcaccactagctgcatgaccggtggcacattactaaatcatctgtgccttgtcttcaccttttataaaataggaatgttacagtagtattgctgtcagggacacttgcatacaagaggggaccgagctcga

SEQ ID NO: 457750 - DNA, 605 bp, Homo Sapiens
tgcacctctgatgcaagtgtctggaggttgcttggcattgcatttgatcaggaataaaaaggaagtttagggagtctgtctcagtaccctgtggctttcactgcaatcaaaatacgatcttgcacaggtcatagccgtgttcaattttggcaagaaataaggctaattttttataggtataccgtactttccaaattgtgggttatgaaccattaatgcatcatgaaataaatgtagtgggtcacaatcagcattctttttaaaaatgagaagtatatgccatgtagtaacttacatgtaaattttgtttatacacagacaaaatgtgggtgtgtactgggtcctgacatgagacactgttcccattgtcgcggatcagggatagttctttgtggttttagttgttgagttctgtttctttgttattcctttcgtggcagcactacattgtagcgtgctcactaagtgtcagaggtttacctcacgccagttgtgttcatttggctgcaggtaactgaagacccaacctaaggcaaagcagacttctttatttttgtaagacttcattaagagcagtttcagattctcagcaaaattgagaggca

SEQ ID NO: 457751 - DNA, 372 bp, Homo Sapiens
  misc_feature (235)..(256): n is a, c, g, or t
gtgaaaattatactagaacctattttatagggtttttgagaaagggaaatgcacggacatgtgcctagtgaatgttagctattaacatcatcatcctcctccttagattttagctgagaagacaaatgttcagaaagatgttacttaaccgaattctcacagtagtaaatgtctgacctagaattttaatgaagatttatgtaagttttttgcactgtaccactggttaatggtnnnnnnnnnnnnnnnnnnnnnngtgcttatgtaataaaattgaatagaaaactgaaccagggacaggggattggggaatgaggaactattgtttactgggcacagagtttttgttcttggacacttgcatgacacgag

SEQ ID NO: 457752 - DNA, 839 bp, Homo Sapiens
  misc_feature (129)..(146): n is a, c, g, or t
ctaggctcggccctctttatgcaaagtgtcaaaagaaaaactctgtgccagtaaacaatagttcctcattccctaatcccctgtccctggttcagtatcatattcaattttattacataagcacgtgcnnnnnnnnnnnnnnnnnnaccattaaccagtggtacagtgcaaaaaacttacataaatcttcattaaaattctaggtcagacatttactactgtgagaattacggttaagtaacatctttctgaacatttgtcttctcagctaaaatctaaggaggaggatgatgatgttaatagctaacattcactaggcacatgtccgtgcatttccctttctcaaaaaccctataaaataggttctagtataattttcactggtacatgaggaatcggaagcacagagatgtatcccaaggccacatttaacatctaccttagagagaaggtcactgtgaagaaagtgccaggtacagagcccatgctcaaaaatgagggttcccgttgcctttttcaggagtccttaccaggtgcggtttatatagtctgtgtacggagcatcctttgtgcagcaatgagtctagagtcattgcattttagtcttcaccacaacactagaaggtagatattttaaatgtagtttcaaaatgtgttaatttgtaattccacgatagttgaaatcaaagaaatcaaaccttacagggagaactcaaaattcacatgactaccgccctctcaactcagtccctgctccagagtaactactcttattgcactagtgtactgtatgtcttcccagacctcttctatgaatagacacttgcatccagaggtag

SEQ ID NO: 457753 - DNA, 498 bp, Homo Sapiens
  misc_feature (357)..(378): n is a, c, g, or t
aaccctcatttttgagcatgggctctgtacctggcactttcttcacagtgaccttctctctaaggtagatgttaaatgtggccttgggatacatctctgtgcttccgattcctcatgtaccagtgaaaattatactagaacctattttatagggtttttgagaaagggaaatgcacggacatgtgcctagtgaatgttagctattaacatcatcatcctcctccttagattttagctgagaagacaaatgttcagaaagatgttacttaaccgaattctcacagtagtaaatgtctgacctagaattttaatgaagatttatgtaagttttttgcactgtaccactggttaatggtnnnnnnnnnnnnnnnnnnnnnngtgcttatgtaatgaaattgaatagaaaactgaaccagggacaggggattggggaatgaggaactattgtactggcacagagtttttgttttgacactttgcaaccagagggtaccgagc

SEQ ID NO: 457754 - DNA, 564 bp, Homo Sapiens
  misc_feature (452)..(471): n is a, c, g, or t
atgcaatgactctagactcattgctgcacaaaggatgctccgtacacagactatataaaccgcacctggtaaggactcctgaaaaaggcaacgggaaccctcatttttgagcatgggctctgtacctggcactttcttcacagtgaccttctctctaaggtagatgttaaatgtggccttgggatacatctctgtgcttccgattcctcatgtaccagtgaaaattatactagaacctattttatagggtttttgagaaagggaaatgcacggacatgtgcctagtgaatgttagctattaacatcatcatcctcctccttagattttagctgagaagacaaatgttcagaaagatgttacttaaccgaattctcacagtagtaaatgtctgacctagaattttaatgaagatttatgtaagttttttgcactgtaccactggttaatggtnnnnnnnnnnnnnnnnnnnngtgcttatgtaataaaattgaatagaaaactgaaccagggacaggggattggggaatgaggactattgtttactggcacagagtttttgtttt

SEQ ID NO: 457755 - DNA, 722 bp, Homo Sapiens
tcggctcggtaccggatgcaagtgtctgagattccaacaagaaagcaggcagaagtccctttgcttccaacatcccctcaacctatttagccaccctatccctgagattctggcctgtaaggcagatgccatgatgtacacatgtggccactctgttattcttccccttcccatactcaactgagacaaaaggagtagcctttccacttcctcttcctgtttgccagaactctcatatcatcgcctccttttcctatatgctgtatgccaaataagaaaataacctgtgtgtccatttaaagaataacctgtgtgtcaatttaaaggctcttattcatcctcaaaacaatgacactgataacattattctccatcagatctagaatgggatttttgatgttagggagctctggctcacacgaaaccaggtacgcatgctccaaggttagataggtttttcccttaaccatcttccatttgggcctcctttattaggacgcaggaaagattatcattgggtaatttatccatagtttccttgagctatagaaataaaaatcaacagctgttcctcatagttggttcagctgaaagttttggtaattagcttagctgaaaattagaaacaatttacttttcttttgttgtctaatatcttattgaaccatttgatgatacagcagctatgcaagaggccagaagacacttgcataccgggtgcc

SEQ ID NO: 457756 - DNA, 671 bp, Homo Sapiens
cggcccctcttgatgcaagtgtcaagaggtccctctcaggagacatctaagtatgtctcattggccagagctatgtcacagggccaccctagctgcaaggaagtctgggaaagaggatatcttgccaaagactatgcacatgtcttccatgaacaaatctgtgcttcttcagtgaaggagaagggccggataatattggtgggacctggaagagtctaccctcacacagcctggtggagatggtcaggggttacagaagagcaagctggctggagcagcagccaccccccacacacgtgccgcatttgccttcagcttagatcacaccctgatgcttccatgaggatgctgagtcaagaaagcagtcttagggtgtggacaagaggagcttcttcatgcagcactgctaactctgcatgtttattccagctactgacatggtttccaattctgtgagattcataagggggaagggaataaaatttcagctacccttaggtagcatatttgcatcctctgtgtctttctcgagtttgtgcccttctgtgcctttgtgtgtggcttaaatattgaagaatcaaaggctgccacgccagcagacagctgtgccacatcacaggcattccacaggcaattcctcactcccactttgttgacacttgcatccagag

SEQ ID NO: 457757 - DNA, 629 bp, Homo Sapiens
tgactgagcaaccatagtgacagttatactgcatgtttctctagtgtgtaatattttttcattttatggaataactttgtcatttgagtgattactaaagcaatatctattaatccctctctgtctgtctccttgccatctctcatacacaaccagatataacagacaagcaaaaaaacacaggatgaacccccacaagtccatcacctgtgtgaacatccttccaaatcttatattgaaaaagtaccctcacattctctttctcatcctcacttattagaatattactcacattttgcagatgagaaaactagggcacagagaggttcaatcccttgtccaaagccacctggccagtagttggcagagccaggatgagaattccatcccctaactcaaatccagaggtcggtccactaaccagccagctgggagtgaaggacactcttggaccatgtttagcttctgctactccaaaccctggacttgttctgatctcctttcagcctacgtctaacgtattgatggccacttaatatcgcctgggcattacccaaggatgagtgggctttcaaatactctcctcctccctgggtgtctcaaagcacaagacactttgcatccagagg

SEQ ID NO: 457758 - DNA, 712 bp, Homo Sapiens
gatcgagctcggtccctctgttatgcaagtgtctcctaaacccaaacatactcaggtctctgtacattgaaatattgcagccctttatttctcctgggacacattcttttctctccactccctccactccttccatgctgttctcacctatggccaacactcaactcacttttatggagtttatcaaactaccaattcttccaagtgtttcccattttatgaaatatttcccaaaagacagcctctcctagcaccattgcctgacataccaagctctccactacaacttttttcacactagtgacacacacacacaaaatctgtattttattggcctcaccagccaaactcatgtgccatatttataaaataaacaaaatatcaaaattctgatgcctgctgctccttttctccttttaatatcttggagttttgtcctaaggatctcctacttgagaccacggaaagcagcactgttagtaatagaattctgatgttgatgccaagacattaaccatgtttccaacaggacactgacaaggccaacagaaacaaagtgtatttctaacaggatgtggccaagatcacactgaagctacttctgagttactgctgctttcttgcctagctgatctggcctcctgaacaaagattactgaaatgtccggtaactaaactgccccctcttctgacacttgcatccagagggtcc

SEQ ID NO: 457759 - DNA, 577 bp, Homo Sapiens
ccctctggatgcaagtgtcactggaaatagaattgaaaataacaccaacagaagagtcagccttggccttcaggatctctaaacctggcaacgcagccactctatgccaataattattcatcagtggccgtcaggaagcccagactgtatttcttctttgttctcgctgggcatgaggcgagcttttatagcgtgggcagggaccttgtgctcacttctttacaaatctgctaatgcaacagtgtgagtcaggtcaaaatcacactggctcgccatttatgagggaatgactgtcacagcgactgataagtgggagatgaagcatcaggatgaaatacggtgacagtgatgagcaggtggcacagatgacaacacggaaccacggcagagcagtattgctccttttgccgggaaaactgagaatcagctcctcacgctgctctgctcgtgggctgactgcagcaggttttggcaggcactcgggcttcatttataagctcaaaaagtgaacgcagtcatgtttattcaatttgaaagctggctttcttaagaccattttctgcccttgcaatagcaa

SEQ ID NO: 457760 - DNA, 545 bp, Homo Sapiens
ggtacctctggatgcaagtgtcaaaagcatgccttgagtcagtatagatgtttactgactttcctttggctaagagcaatgctctagtgagagctattagctcagctctttgggccaaagttccgactggcagagggcgggcttcggctactgaattcagtgttaccactgcacatccagcccgtctgacaccttcagatatgaagctgcttccatcagtaaagtatttaacatctgggtctcttaagggctagtccgttaagtttttttggcttgataaaacctcatccactgtttccacacaacagtgataccctgggccacacaatggggctttccgtgctccacccattctgttggcagcagtgtggctggatttagagtgttcacagtctccagggttatgtaggggttttcacacaaaagcccttgatatcttaacatcttagggttagatagccagtgatgccccctctgctccatcagggtgacacgagcatgtggggcacccgaattattaacctttgtccaaatgtgagcttgtt

SEQ ID NO: 457761 - DNA, 667 bp, Homo Sapiens
cggatgaagtgtccaggctcttctttcgtctacactccctgggagatcttatacaacctccaggtttaaacccatctatctatcgatgacgcccagatttatatctctagtctggacctctgccctaaactccaatttatatatccctctaaacaggcaacagctcttctcaaacctaacatgcacaaagcctgttccctgattttttcccacctgcttgccaacctgctcttcctgtgttagttctattccttgcttcactcaagcaaaacaccttagagtttctttgtctcccctttctctcacatcccacatccaacccatcagcagatatcttcagttctgccgttcaaaaggtatgtgaagtatatgatcggactacttcctttcaccttcacaccctcaccttggccatctctctcctgggttattccaggagcctcctacctgttcttcctgcttcctctttgctcttcttcaatctgttcacatcactcctctgcctaaaaccttctaaaggttccccatctcagaggaaaagctaaaattgctgtcatgtcccatggggctctacacatctgtcacagcagggcccacactgatgctgtgctcccatctcctccctcagtccttgggtcacctttgtctagacactttgcatccagag

SEQ ID NO: 457762 - DNA, 245 bp, Homo Sapiens
atcagctcggtaccttatgtttagaccacctgttcagctagtaaataatccaatgctagtctgttatcaacaactacattttccagagtctggggaactcttgaattctctttaatgcctgatctccgttggtggctaaggattctaggatttgagccaagttctttagcgttaactcatggtaggcaaagccaccccagggtgctgctagtcctattgccaccctgattcctgccagaattagt

SEQ ID NO: 457763 - DNA, 605 bp, Homo Sapiens
gcttcaacagtaccatcgcctctgaagtcagatggtcatctcagttttttaaagcctgatatgtcgtccagttcaactcctgaagaagtcattagtgctcattttagtgaagatgccttacttgaggaagaggatgcatctgagcaagatattcatttagctctggagtctgataattcaagcagtaaatcaagttgttcttcttcctggacaagccgatctgttgctccaggctttcagtaccaccctaatctacctatgcatgccgtcataatggaaaagtccaatgatcatttcattgtgaaaatacgacgtgcgacgccgtctacctcttctggccttaaacagagtatgatgcctgatgaattattgacatctttgcccagacatggaaaggaagctgatgaaggaccagagaaagaatatatttcatgtcagaacacagtttttaaatctgtggaggaattggaaaaccccaacaaaaatgttgatggcagcaagtcaactcatgaagaacagagctctatgatacaaacacaggttcctgatatatatgaatttcttaaagatgcttcagataaggtggtcagacataacggtaccga

SEQ ID NO: 457764 - DNA, 824 bp, Homo Sapiens
  misc_feature (502)..(502): n is a, c, g, or t
  misc_feature (770)..(770): n is a, c, g, or t
gctgtacgctgccgtgtacccctccacccagttcggcagcctcacgggactgcagtctctgatcagcgcgctcttcgcccttctgcagcagccgctgtttcttggccatgatgggtcctctccagggagaccctctgtgggtgaacgtggggctgctccttctcagcctgctgggcttctgcctcccgctctacctgatctgctaccggcgccagctgggagcgggcagttgcagcaggaggcaggaggatgacaaactcttcctcaaaatcaacggctcgtccaaccagggaggccttcgtgtagtggctgccgccttcggaactgcggtctcctgcctgtgcttcagtgactgacccctgtcctgcccctccagagtaccccacgcacccccaggaccttcgccgtctccgtgccagcgttcacgctccctcccggggccctgcctcggaagctctgtggtggaaggacgggagagggccccggacacgcgcgttttctncctgccgaacgcaggggctgccctgactttgctctgccgccccccggggacccggggcctggggtctctgtggtgcctgcagcaggagccaggaacgcccggcaggcaggcgctctcccgccagtgtctggattctgcctcttgccaaagcagagggggctgccatcccctgcctgccacctgcccctcggctgcatgcccacagccgtacctgcctgaggacaaaggcttgcactgtctcgcctgcgcctggcccccaccccctccnccggccagcctgaggctgcctgaggaaggaaggacccgcttcctgttaatacaa

SEQ ID NO: 457765 - DNA, 493 bp, Homo Sapiens
gtccaggaagcagactttttcatgaaatctaagctgtgttaatgagctatcaacctgtattgaggtaagtatctgcagtgtatcagaatcacttgtttccagtgtaaagaatctttgccagtctccccttgcctatgggagtactagtggtgatgtgagggttgacataaaagagagaatgatattttctgtagcatatttgcaaattctaggattatttgcatgtgtctatagctgggatttcactgtctaggctgaaggctttgtgaggccaaaaatagtacctgtgttataacagggaaaaatgccccttttgaaaagcactcagtgggatctgagactctggttaggccaagtctatacaaggccatttgacgtggaataaggatcagcatctatcattgtcttttcttctatcagttactggaatgctgtgcaattataagcattccataacttaagtaccgacacttgcatcaagaggggccgagcc

SEQ ID NO: 457766 - DNA, 683 bp, Homo Sapiens
ccctctggatgcaagtgtctactgtatatgggaaaggatcgagtcctcctccaggtatggaaccaaatgtgataaagatgaactcacttactgactgggatgtacacatattaaattcataggaaggtggagggggagcaacagaggccctttcacacgtgggcacctgcttttgcgtagctaacatatccagtcctctcagaagccctcaaaggtgaagttcttggagctaggacatggagaaccctagccactgggctcgttggtttcttccttgctcccgctggcaggatgctaaaggtgctcttcaatcccaaagttgtatttgctatcagttacccaagacttaggtgagtgtgatagagacaaacagcctagcagatgacagcactgtaggtgggttgcagctatatccacaccaaaacaacctccattcagggaccagacattcccagatgactgcttgtcacctttcctgtgcacctgtttttcctactgggtttgaatctcagggagaggcatgtgccccaaatctgagtgtccaccttctccttctctcctggccttatacccaccaagctatagagtcctgtctctctcttcctggcctctcttatacccatgccacttttcccagtgcttcctgacactgccttagttcaaagccgcatcagttcctcctg

SEQ ID NO: 457767 - DNA, 689 bp, Homo Sapiens
  misc_feature (73)..(138): n is a, c, g, or t
  misc_feature (161)..(230): n is a, c, g, or t
aagtgtcaggccagcgcctaactaacatgagtacgcactcaataaatggttttatgtgtgtttcgagacaggnnnnnnnnnnnnnnnnnnnnnnnnnnnnnnnnnnnnnnnnnnnnnnnnnnnnnnnnnnnnnnnnnnggggtctcaagatgatcctaccnnnnnnnnnnnnnnnnnnnnnnnnnnnnnnnnnnnnnnnnnnnnnnnnnnnnnnnnnnnnnnnnnnnnnncacagcacttgagtgcccaggcactcagtaaatttttgacaaaggaatgaagatataactttcttcacccattgcagcctaaaatgcaagagaagctctgggatattaaaatgagaaacagtcttggaaaaaaattaatttgagcacacagaatattttccagtgtgcactacaaaaaacatgtagtcaaaaatatccatagaagtgttgcttagaatggggcaaaagcccaagggaaaacccaccctcacagggttaatgagaattacaagccaggctttaggcttgtattgtagtcaggcatcaaccagcatgcactggtgtgctctgactcatttccctgcagctgctaactaatcgagggtcatgcagcacactgaccacctgctcccccattgctcccatagatagaatctgacactttgcatccagaggacacttgcatcaagatgggccgaa

SEQ ID NO: 457768 - DNA, 609 bp, Homo Sapiens
  misc_feature (212)..(375): n is a, c, g, or t
taagcttctctgaagtctggaagatccgcccagggcaatctgcttccatacatggtccatacaaaagtccactggatcagagtagagaccactagctttcgagagcccatgatttatccttcaccataagtcccacctccactactctgacaccttgccaaccatccatctcacttctttatttgcctttctaaccttctgagacaaggacnnnnnnnnnnnnnnnnnnnnnnnnnnnnnnnnnnnnnnnnnnnnnnnnnnnnnnnnnnnnnnnnnnnnnnnnnnnnnnnnnnnnnnnnnnnnnnnnnnnnnnnnnnnnnnnnnnnnnnnnnnnnnnnnnnnnnnnnnnnnnnnnnnnnnnnnnnnnnnnnnnnnattctgctttaaatcaatttagtgacactagcaagattctcacacaccatcctcagacattctgattctgaagctcaggatctcaccacttcctaatatttgcaggatctgagacaaaagaaagctctcaatctatagcctttcaccttgtctttctacttcccacccactcctatactttcttgcaccatgaaggatcttctgtatatagaattagacacttgcatccagagg

SEQ ID NO: 457769 - DNA, 913 bp, Homo Sapiens
  misc_feature (170)..(178): n is a, c, g, or t
  misc_feature (598)..(753): n is a, c, g, or t
  misc_feature (777)..(789): n is a, c, g, or t
gtccctctggatgcaaagtgtcacactagtcaagggagtgactggagttatttctggtagcagtagccactggcatcctagaaacacatggacatttgtagcatgaattgacctattggtagtgcaatagctatacatgatttttattcttggcaaaagaaaatgcttcnnnnnnnnngtgatcagacctgcacattgatcctgtaatagcaaatggaaggctatttctctgtactagcatttcagctttatgtgggacgagttacccgttctcctgcaagtacaatcaacccttgatgacttatgtattaattattctgggtgtagctcacccaagttttcttcctacatcttttggctaattccaccacacctcagcatcacagtcagatgggaaaaggggcaggtggattctcatgtcatgccttcttgtaccttattttcaagttttgtggtggaggaggtttaattatctgctcaagaatctggtatatataacccggtgcggtggctcatgcctgttatccccggactttgggcaaggcgagaggatcacctgaggtcaaggagttcaagacccgcctggcccacatggccnnnnnnnnnnnnnnnnnnnnnnnnnnnnnnnnnnnnnnnnnnnnnnnnnnnnnnnnnnnnnnnnnnnnnnnnnnnnnnnnnnnnnnnnnnnnnnnnnnnnnnnnnnnnnnnnnnnnnnnnnnnnnnnnnnnnnnnnnnnnnnnnnnnnnnnnnnnntgaccgagccagactccgtttccnnnnnnnnnnnnntcggctatatgtaaaaactattaattatgtaacctcactccaatactgtactgatcaagatctgcccactcctagaggactgacccaatggcagatccccaagtatattcctgtctgacgaacg

SEQ ID NO: 457770 - DNA, 586 bp, Homo Sapiens
  misc_feature (196)..(212): n is a, c, g, or t
  misc_feature (236)..(391): n is a, c, g, or t
tcgatcgagctcggtcctctgatgcaagtgtctagatattttaggaatattagagtgattttacctgtcactgagttgtcagaaagattatagtaggggatctgccattgggtcagtcctctaggagtgggcagatcttgatcagtacagtattggagtgaggttacataattaatagtttttacatatagccgannnnnnnnnnnnnnnnnggagagggagtctggctcggtcannnnnnnnnnnnnnnnnnnnnnnnnnnnnnnnnnnnnnnnnnnnnnnnnnnnnnnnnnnnnnnnnnnnnnnnnnnnnnnnnnnnnnnnnnnnnnnnnnnnnnnnnnnnnnnnnnnnnnnnnnnnnnnnnnnnnnnnnnnnnnnnnnnnnnnnnnnnggccatgtgggccaggcgggtctggaactcctgacctcaggtgatcctctcgcctggcccaaagtccggggattacaggcatgagccaccgcaccgggctatatttaccagattctggagcagataataaaacctcctccaccacaaacctggaaaataaggtacaagaaggcttgacatgagaatccacctgcc

SEQ ID NO: 457771 - DNA, 534 bp, Homo Sapiens
cgaatttcacccataaagacactgagattttgagtgttcctctacttgtctcaggtcacatagcatgtcaatgcgaatctaataaggagaacctgtactccagttctgggctctctttgttgtgctgttgtaatatctgtgacctaggatcgatggggcccagttctctaccacattgaaatatcctcgagtgctattgccaggaatgatacatcatggtgagaccaggcagcagcagcagtagcaccataaccataatagctgctgccatttattatcacatatcttgtgtggtctaggttctgtaccaggcactctgcatgtattgtcttattcagtccttaccataggtccatgaggtgagaaaatggacactcatagaagttaagtaacaggtcttacagttggtaagtgtggtaaggctgggatctgaatccacacagtccaacttcagagcccaacaagcttttatttactttaaactactgcttagggaaggcagaatcacatctgacacttgcatccagaggatcc

SEQ ID NO: 457772 - DNA, 673 bp, Homo Sapiens
  misc_feature (318)..(349): n is a, c, g, or t
atgcaagtgtctgtgtttggtgaatgtgccttctagtcattggtcatgaaatgctcaaccttacagcagttgttttactctaatctcatgatttgaggataaaggtctttgactagaaacactggaatatagtccacgcgcgtgaaaccagtagcaaataagcaaatctgacagattctatgaaaccagtagactttcctgtttataaactgttgcttcaaaatgaaaggaagtagttaccctcagtgcctgtttcatgtcaacggattgcattttggagtaaactagctagctagaacacctgcctctttcatagtnnnnnnnnnnnnnnnnnnnnnnnnnnnnnnnngttgccacgaacgaaacctttaagctaagattccctgctctcatggataggactatatactttaatatatttggagacagtgttttgtgttcaactcttgggtcataccccatcgttattaggatatatgtactaggagcacagaggagaatctttgaattggggactgtgccagaaagcctggttctatggtctcctaccctcagaggtcgacatcatgacttgttcattctgttcgatgcgatctcagacctgcccatattgttttacctcctccttcttatttgccttgacttctttaagactatgtcgatcaccatgcca

SEQ ID NO: 457773 - DNA, 993 bp, Homo Sapiens
  misc_feature (936)..(953): n is a, c, g, or t
tctggatgcaagtgtctctacccgctagggtcttggggtttttataggcacaggatggtagggggcctggtaggctaggttggtcgttgggtaagtgcagcatttgtggcccgaaggctggagtgcctgtcctcacctaggtccgtggtgcacaggcctgggggtggagccctcgccagggactcacccttctttatccagcacttcccagcatcccttacatatcggctactgggttccccagtcggcttccttgttcagttgggggacagtaacccaccagctctgaaaagtggtaagggaagggacccactcccctagaaatctagccctcggttcagtcggcccctaagggagggggatgtagccggctaaagcccctcttgggtcaaaggttgggtcaaaggaaacaggagcactgcgctagccactgaagggggcgccaccaaagccagggaatggttgtcgagaaggggtcatcgctcacctctctcatccctcttcagtgtactgttgcggactcgaaggtggctctccccagcggaaccgagagagtgtgggctgaaagagaccacttttggggcttctccagcaattccactcccactgaaggcaaacgcgctgaaggagggcactttgcagacttttccattgcttctgcccttgcccctaccttctggcgctcactcttaagtgccacctactgggctgcagcctgaattacactacaaaacaaaattacatcactacaagaagcaacgtctcagccaccgcacaaacttatctgcaaccaaggaacccatacagagccttggcgccctgaaagcactcagaaatgaagctgatccacccatacacattttacaccacagtcatacccacaagggaaaaaagaatttaaaatcaacaagctccatccaaacaatagcaaattcnnnnnnnnnnnnnnnnnngcatcagctctctcagatgagaagggacacttgcatcaac

SEQ ID NO: 457774 - DNA, 643 bp, Homo Sapiens
ggtacttgttacaaagtgcacctagacttactctattaaaatctgcattttaatagaacctcaagttgattagcatgcatattaaagtttgaggatccctgagtagtagtttgtgccagtgttgtgctaccgaaacccaaaccataggtgatatggtttggatttgtgtcctccctcaaatctcatgttgaatagtaatccccagtgttggaggaggggcctgctgggaggtgattttatcatgcgggcagatttctcccttgctgttctcataatagtgagtgacttctcatgagatctggttgtttaaaagtatgtggcacctccccctttattctcttcttcctgctccagccatgtaagaagtgcctgcttccccttcaccttctgccatgattgtaggcttccccagccatgctacttgtacaggctgcagagccaattaaacctcttttctttattaattacgcactctcaggtagttctttatagatgtgtgagaatggactaatacaatagttgcaattccttcgtgtgataccagttttactgggtttcctgattatggaattatatagcgcctgctgtgtgtccacaatcaacacctccctacagacacttgcaaccagaggtaccgagccga

SEQ ID NO: 457775 - DNA, 560 bp, Homo Sapiens
atagctggaggccccagaagccaaaagaggccaggaaggatcacccctagaaagtccagagggagcatcagcctctcttggcctccaaaactgggagagaatccagttttactgttcaaagccaccacctttgtggcaatttcttacaacaaccctaggaaactgatacaggtgacacccaagtggagacactgtcatcaatggctgtcccacatcttctgggggcccagcatgtgcccagcccacctacactctatctgaactccccatgttccctcttcttgaccctgagactttatccactcaatccccagtccagaaagtctctgtctgttctccctacatccagatttccaaaagaacccccatctttccagaaagagcctcctttttgtcttcctcccccaacactaatgagatgacctcgtcctctgctgaacaacaagaaaacactcattacccacatgcacactcatgggcactcagtatgtgctaactgtcatgcacatgtgttataatgctgagcatatgatgacactttgcatcaagagggaccgagc

SEQ ID NO: 457776 - DNA, 532 bp, Homo Sapiens
gtatgcaagtgtctacgtaggacagtttggttgaagttttagtagagttgaaagagctgtggttagaggggcaggaagaaagcagatcgtggggtgtcacatttcaaaccgagaactgtgagcagccagtatcttttaggcagtggagaaaccattgtaagtgtttgagctgagagaacaaggtccagagctgagacagggcctcatcgtctggtctctgctcctcagagctggctgtcgctggtccctcctgtcagccccagacacatgccgcagaactggccgctaaggcacctgagcagcctttggcgccttggtgtcactgtttctgaaaagtgctttttagaaaagccttgtgacctgattgtgtttgagctgagcgctgcatttgaagacggcgtccttgggagtagaggcaacacaggtgtggggcgggctcaccagtgacgagaccgagcggagtccctggcagtagagtagtgaactgacgtcataaggagcggtggctctgatgcacacgtgcaaacagacg

SEQ ID NO: 457777 - DNA, 679 bp, Homo Sapiens
tcgagccggtaccctctggatgcaagtgtcaggagattcctaagttacaccagacctgactctcccaagtctttgtgtataggatatattctttttctggttttcctcctacctttttgtttcctttgaaggatctatcagtctatatttcctactaaaactatagatttggcttctaaaggtttacccttaatctcctgttttcttcacatttaaagaccctagcgagggcttgccaacctttttcatgtcatgacacaaaaaaatgatagtatttgtcatatacactacagaaaatgaaggaagctgtttgaggtcagaggtgacctgcatagggactatgaatgccctgagggttgaggcagttatttctgccctaagcaatttttacttacttccatgagctcagactgttggtattcagatacctgagcttctccttcacccttgacatttctctcctggttcactcttattcttttacttttttggcaagactgtcattatagacatcaatcagtaacattttagacgtcataactggatctcacatcggatttatgcttatgaaacctctctacttgtaattgtttcatttttgtctacctaacatcttgacattgacagaccatgccagatgatgtccaagacacttgcatcaagaggtgccgagctcgat

SEQ ID NO: 457778 - DNA, 586 bp, Homo Sapiens
tgctgagaagtcaataaggtgaaggacaaaagagagagccttggattggtccagacagagatgacttcactagaccatctcactacaatggtggtggaacaaagggtgggcgcagaagcagagactatgacacctgtggaccaaaagtgcttgctcttagggctcaggttatttaggcttccagttcacctgggagctgtgtaaccaccaaagcagaaagggactacaggtctgtgaatatttattattgatgatagtgtttctatcctgcagtagggaagacttttcaccttgaactcagacctttccctgcccaggttacctggacaaccaaacttccggggtcagagatggcatttgctatgtatatgctgcaataggatgtttgtttagagctattggtagtcgactgcatggtctttaatcagtggtcttactgattatagaaagtgaataccaaattacagccacagatgctttaggctcttattttgcataccaagagttaccttttctgttgtcaagttggagcttagaaggcacaaggctcttagtcaagacactttgcataccagaggtaccgact

SEQ ID NO: 457779 - DNA, 915 bp, Homo Sapiens
tacgacgtgtcaccaagcattatgttcaactataccagtagttgcatgtcgagtactatctcgctctgtatggcgttccatactggtgcatcatgtcatctagtctgagttgtattctcgacaatgatactatacccctttagttctgtttctacattgtcctctgccctggttgccccatcatacacaaaagtcacctcgcaatgctacaacttctgcaatgactcgtcctataaaattatcgaagacatgtggatatctttggcgggctgaagccttgtaaaaggctcagccactaccaagtagcagcctgagtcagagcataagtgggaataaatatcctggttcctcccttcctttcacttgcagatctttttcaagttcccagctggaagctccttaatacaggagcgtgggacacagtccacgtcactcagccctctaatgttttgggtcagagcagggaaagggtgacacgtggttctaagtgaaacagaacgatgaggacagcctgaagaaggtatgttactaacgacaaattgcctctatgagctgctttttctttgcttatagaagaggatgcaggcagaatccaagtacttactgagtgattcctcattccctttcagttttgaaattgcatgcttccctttcaacccataaagaaaatagatcaatattttgatactgaggaaattgagatttaagataagtttccccctaaatttatgttaactagtgccacatgtataaaatgttacatttagcgctcttctgtcctggtaatatttatgagtaggcaaagctagcaagaacagtctttcaatgtcctgaaagaagggaatccatgaaaaatgctgaaccattggtttagggtcatttttgccacataatcgacactttgcatccagaggg

SEQ ID NO: 457780 - DNA, 423 bp, Homo Sapiens
gacgtctccccactttttgtctgatctcatcgccttatcagccagagcttctgcggcggtggcattgggtcaatggtttgagtgtctgcagccagctggaaatgaatgaccatttcctgtttaatctcactgggtctgggcttgcttgataattgagcagtaaatcaatgcccctgaaatgtcagcagagatgatcaggtccccctccctctgaattgcagcctgttcagtgcccagccgtacccatgggatactgctttgtgctacaactgaaatatcaaacaattgctaattgttaatggaacattaagtgcattttcccagaccacttatttaaagtgcatttcccttctgtgggttgataatgaggctgtgtttgaggtctgtgttgaggaagaaatgaggggaggtgggcttgggccc

SEQ ID NO: 457781 - DNA, 518 bp, Homo Sapiens
  misc_feature (431)..(448): n is a, c, g, or t
aatgtgatatcctgaaaaacgaatgaatgattttacaggtattccttttgtgttgtatgtcctcacattacaccacctattctctggaactgatttttatttttccaggaaggcagtatatctacatgtgtctggtacggggatgtgagttagtcctttactgttagcttgattcaacgatcaaagcattttttccttatctttttccagtctgcacagtgttcttttctgcagagaatgagtaaattcttaaatgacctttgtaaatgcccacaaataataactgtagctttggttgcagagtgctgatgaactagcaagttccatagatccatttcattgtgctgtatcgcatgatgctttatctgtaggatgatgtgttcagcaaagagcagatttgtttataagcctctgatttttatgtagcgcgnnnnnnnnnnnnnnnnnnttttaatccctacttgggtaagtggttatgaaagcgaaaatatgtgaatgtcctgacacttgcaaccaga

SEQ ID NO: 457782 - DNA, 577 bp, Homo Sapiens
cccgattttctaacatctctgaaaacagaatgaatcttaaatcgataatatatacctttttgggggaggttggcagtagtgagagttgtcactgccctaaccaatttatttcgcttccattttctgtttaggtatacctgtcagtgacatgataaaactgtttatcctaaaattctctaagtataaaataaacactgtcaaaacttagcggcatttaaaatcttattggttcataaaataatgatgtatcttaaaatggatgatgttttcaatcctatgaaataaggttaaatcattaagttttcctctatgatgcaatattcaaaatccatcagcacaagtcaaagggacaaagtataataaaaatataagcgttaagtcagattgtcttgaacttaaacctcagctctgtttatcccttgattattgagacctaaatattgcatctatctgaacctcagtttgcatgtttactaaatgggcatttttggaaactaggtgagctaatttaataatataacgattatatatattatcctagctacactggacactctgcatccagagggtaccgacc

SEQ ID NO: 457783 - DNA, 331 bp, Homo Sapiens
tcgagtcggtaccctctggttgcaacgtgtcctttacaatcagtcataagaatgttatcatcatctcctaggtagtacatagttccaaaaactggtttcagaaaattttttgattggataaaatattcatcttttgccaagaattatcccaaggtgactttcttaagtctcataatcttaatatatgagtgtaatgcagaaatgaagggtagaagaagttgtttgttatgtattgaaaggcagtggtcaagaccaggaagcctaaagtcagatctctgcttagttaagtgactttgaattcccacaggtagcagagccctgtgggaattca

SEQ ID NO: 457784 - DNA, 666 bp, Homo Sapiens
gacagatcactgaataataatgagtttaaaagcgatgttttccagatttaaaaaaatttcttggagttatgccaatctgtcaacagctattatttccaggtagtgggataatagatgttacctactacatttaaacattttcaacaataaatatgttttgtgtcatgaaagaataatagttagacaaagtaatgtggtaagtgctttgaccctggtaagatcagcacaaattacataaacacttggaggggggcacctgactcaactggaggctggggagaggactggttgggtgggggctgtttcctcaccgtgaagcagggtggggcttgttgagggcacagcagccactcggctgtttgcctccagatagggacactccccaccacaagcactgtgtcagcaaccatgatcagatagtcattgcctgtctcactgggcagagctgtgagtggctgagtttccatacaggacaatcagctctgtcatacttgagcaatggcccaggggaaatgggtctttgtgtaatggcagcggatggtgacctcacacctcacactggaaacacacagtggagccagctgatcaggtcgagtaacccaagagacatgcagccctgacgcccgagaaatcctgttgtctgtcagttgacacttgcaaccgagg

SEQ ID NO: 457785 - DNA, 578 bp, Homo Sapiens
  misc_feature (509)..(517): n is a, c, g, or t
tgtctatgtaacagcagttataatcaattcaaaagcagatgacagcatactgggtgctagagattcaaagataactataagatgttttccttcctccttgagccttaaacccaattaccaaaactgaaataagcctgcatactctttagaagagtcacatgttaaatttggaaagattaacaaaaatacaatcctagtaccttcacattaatttttacataaaaattttaatacagattatatcacctcaaaatttgaacattataaaaggcagatgacgctgtttttcgtcttggggcaagattggcaagagggtaatcatgtgggaagagaagatcctgggcagataagcagaacctcagaaaggtatgtccttgttcatataggctgccgaaatatgtaagacatgatgcacaagttgaaaagtaaaatgaatagacaatccataattaagaaatcctaaagctttccaatttgaaaatatggctgatgctaaaacaaagaaaccnnnnnnnnngacgtaattattcatttacacttgccaatgtctagctctaggtcctcagagcagtgacacg

SEQ ID NO: 457786 - DNA, 588 bp, Homo Sapiens
  misc_feature (59)..(162): n is a, c, g, or t
ccatcatattggagtaggagcccaccctattccaatatgatctcatcttaacaaatatnnnnnnnnnnnnnnnnnnnnnnnnnnnnnnnnnnnnnnnnnnnnnnnnnnnnnnnnnnnnnnnnnnnnnnnnnnnnnnnnnnnnnnnnnnnnnnnnnnnnnnnnggatttggtgggagcaccattcaacatacagcatgttggttctcattcatagtatcctgttgccttagatgcctggttattactgactatatgcttgtcatgatactgaaaatatattttctgtgataatttgaagtctaaatagaaggcaccttcctttagtgaatgttatttgcttctgcaaagtacctgggtttgcatccagtctagaagcaatattaatcaagttcaagggttgaggttctctgaattacccaaatgatgcaaactcaagctacaaatctacaaaagggttggtttacccctagttcacacctactcagatttggtagctccttggctcccctttattgtagagagtgtcttctattagacagcctacattacaggcctgtcgtttgatattgacacttgcatccagaggta

SEQ ID NO: 457787 - DNA, 563 bp, Homo Sapiens
ccaggctcaagtggaagaaatgaggttgatgatgaatcagttggaagaggatcttgtctcagcaagaagacggagtgatctctacgaatctgagctgagagagtctcggcttgctgctgaagaattcaagcggaaagcgacagaatgtcagcataaactgttgaaggctaatgatcaagggaagcctgaagtgggagaatatgcgaaactggagaagatcaatgctgagcagcagctcaaaattcaggagctccaagagaaactggagaaggctgtaaaagccagcacggaggccaccgagctgctgcagaatatccgccaggcaaatggagcgagccgagagggagctggagaagctgcagaaccgagaggattcttctgaaggcatcagaaagaagctggtggaagctgaggagctcgaagagaaacatcgggaggcccaagtctcagcccagcacctagaagtgcacctgaaacagaaagagcagcactatgaggaaaagattaaagtgttggacatcagataaagaaagacctggctgacaggagacacttgcatccac

SEQ ID NO: 457788 - DNA, 533 bp, Homo Sapiens
tcctggaaaggtcaccagaatttaccctgcctctctataataagacagcttatgtaggtgaaaatgtccggtttggagtaactataactgtccacccagagcctcatgtaacatggtataaatcaggtcagaaaatcaaaccaggtgacaatgacaagaagtacacatttgagtcagacaagggtctttaccaattaacaatcaacagtgtcactacagatgatgacgctgaatatactgttgtggcaaggaacaaatatggtgaagacagctgtaaagcaaagctgacagtaaccctacacccacctccaacagatagtaccttaagacccatgttcaaaaggttactggcgaatgcagaatgccaagaaggccaaagtgtctgctttgagatcagagtgtctggcatccccccaccaacattaaaatgggagaaagatggtcagccactgtccctcgggcctaacattgaaattatccatgaaggctgattattatgctctgcacatcagggacactttgcatccagaggg

SEQ ID NO: 457789 - DNA, 586 bp, Homo Sapiens
agtatttggtggccaaaatacacatacctttcccagtaacgctaacccagagagtcttcagagtcttgaattttcacccagccgtaaggttcttggcttgaagcaacaatctagttagtaaccattgtttagcctctgccccagggggtcactctgctttctttttccccatgattgctctgggaagttggggatggcatagtcgcttgccatgcccctcaacctttctccaatggagacatttagagtacaagcagatctacctctgagataatacttcatcttcattatttgtttttgtattcagagcaaatgctgtcctttttcaagatggggagcacaattgtagataatccaaaaaagggtaaaatctgtaaataagttctgtccaacttcagaatatatcaggatatatgagttgctttttctgattctttccagcacaaactattattaaaaggagctcagtttcagaagctttctccacgtgctgacaggagaaagacatcccaatgtccgttaggggaccatgggggctggatgagctagacatttgccatagaaaatctagacacttgcaaccaga

SEQ ID NO: 457790 - DNA, 336 bp, Homo Sapiens
tcatgcaacgtgtcatgtgcggagaatgagtagattttagatgaatgaggtggatccacattcctgaccttgaaaggttcctgagtcatattatttagtgaaaaagataaagtcacagaatcaacatagccagtatgatcctattttcttttaaatgtaaatatgcatgaacatggatagttagggaagtggggaattacagggacctagatagtatgtatgtatgagaacatattcctgggggaagaagaagaaaataaatctccgccagcttcccatgcattaaaaatgagcaaagtgggctggccaccttgtctcacgtctgcgatcccagca

SEQ ID NO: 457791 - DNA, 546 bp, Homo Sapiens
  misc_feature (101)..(110): n is a, c, g, or t
  misc_feature (480)..(500): n is a, c, g, or t
tgatgcaagtgtcacaggactagagagaaagagaaagtgaaccatcctaaggacgcttggatacttttttagaaggataaatattatgcttactgaggagnnnnnnnnnngcgatcacagaaaaatttcacagctaatatttttacaaaagttgtgccagacattacagagtgaaaacgtctctcaaggtggaatgctttagagagcaaaggcttagcatagacctagacccttgtgtgggtatgacatgacatgacatgtccatgtcaaaattcactttagtcagaaccagagtattgataaacaaaatgtcagttacctggagcagtcctggagaggttaagacattctatactgttctacgtcaaccatttctacaaagttgtccagacacctaaaagcagctttcttggttatccagatgccagaatcaaccttgtatctgacaatgcacatctgttgattctaaagtatatttannnnnnnnnnnnnnnnnnnnnatacagcacatatttacatctatgaagacatagacacttacagaga

SEQ ID NO: 457792 - DNA, 544 bp, Homo Sapiens
  misc_feature (324)..(344): n is a, c, g, or t
tctggatgcaaagtgtcttttagagtgcttttgaacactagccttagctactaagcattcatgggtttgatctttcttgcgacatgactttaagtaagttaacaaaaaatgtagctgtagacagtaatgtttgataaatatgaacagttttaaaatggcactgaatttacatctttaatcattttaataggccatccacagcctctcttgtgtctctaattctcaacctccgagtcttaaaggctgtaaaggctcagaaagtgccagctcatgtgggtctctgtaagtgtctatgtcttcatagatgtaaatatgtgctgtatnnnnnnnnnnnnnnnnnnnnntaaatatactttagaatcaacagatgtgcattgtcagatacaaggttgattctggcatctggataaccaagaaagctgcttttaggtgtctggacaactttgtagaaatggttgacgtagaacagtatagaatgtcttaacctctccaggactgctccaggtaactgacattttgtttatcaatactctggttctgacta

SEQ ID NO: 457793 - DNA, 396 bp, Homo Sapiens
  misc_feature (320)..(340): n is a, c, g, or t
ctcggtcccacttttagagtgcttttgaacactagccttagctactaagcattcatgggtttgatctttcttggcgacatgactttaagtaagttaacaaaaaatgtagctgtagacagtaattgtttgataaatatgaacagttttaaaatggcactgaatttacatctttaatcattttaataggccatccacagcctctcttgtgtctctaattctcaacctccgagtcttaaaggctgtaaaggctcagaaagtgccagctcatgtgggtctctgtaagtgtctatgtcttcatagatgtaaatatgtgctgtatnnnnnnnnnnnnnnnnnnnnntaaatatactttagaatcaacagatgtgcattgtcagatacaaggttgattctggc

SEQ ID NO: 457794 - DNA, 765 bp, Homo Sapiens
  misc_feature (712)..(712): n is a, c, g, or t
ttttttttcaaatggaaaagtcatttaattcaaaaatcatacgtccactcatttcatagggattgtcacataaaccaaccacatgtaaggaaagccaagtttcagaggcctctggaacagaaattttgttttctttataggatatatttgggtgacacaaaaggcattttttaaaagcctggaacatgggcaacaggggctactaacaggggacaaagggtctattctaggtcacaggattactttctaattacagcattggattctatgcacgagtcaatagtcaatactgaagtttagaacagtgcgttattttaaaagaaaacattaaagtgccatttaataagtactttattgatattatatcacacagcactttacagtatactcaaagatagcctaaattatgaattaaacatgcaaatattttcttttccaaaatgtggacaaaatgtcttttagagtgcttttgaacactagccttagctactaagcattcatgggtttgatctttcttgcgacatgactttaagtaagttaacaaaaaatgtagctgtagacagtaattgtttgataaatatgaacagttttaaaatgggcactgaatttacatctttaatcattttaatagggccatccacagcctctcttgtgtctctaattctcaacctccggggtctttaaagggctggtaaagggctccggaaagtgnccagctccatgtggggtctctggtaagtgtctatggtcttcctaggtgtaaat

SEQ ID NO: 457795 - DNA, 653 bp, Homo Sapiens
aagtgtccaattacttcaaagagtctatgactattaatagacaatgcattttaaattacaatggggaaaaggaaatcaatgcaggtagaatggtaaaggtgcatctgaggaagatgaattggatgagtggagatgaacttgagtgcaaggcagataatgaatgcatcaaagtttccaaattgttgccatacatgcattagcagagctcagatcattacatacctcagccacactgatgaccttgaagggcccttgtaagaagggcttctgagtcttggtgcctgaaatacagaggaatggaacccctggaagcaattgttttagtcctttctctgttctcatggattgtccacaagccaagcagagcatagtttttctctttccatcaggtgagagataacagtatcctggttgatcaatgttttcttctttaatcacagatgatgtacagacaccagcataatttgctgatgtaatttccttatccaaggcagtgctatgaaaggccacaagtgcttttatatttttcatgtaatgccacttttgattggcagctccattgttgtacggcttatgtttctgaacagtaactggatagccacaaacttcatttctagtcttggtcatagacacttgcatccagagggtaccga

SEQ ID NO: 457796 - DNA, 671 bp, Homo Sapiens
  misc_feature (199)..(236): n is a, c, g, or t
tcggatgcaagtgtcagatagatggtaactgaggacacaagagtgtctgcgatcaccgagaagagcaggcagaatcaaagacagacaaggacagatcctaaagaatgtaacacatttaagggtttacccaggaaggggatccagcagagaaggagcaagtagagcagagagaagcaagaggcaatctggaaggcaaagnnnnnnnnnnnnnnnnnnnnnnnnnnnnnnnnnnnnnntagtagagaagattttttaggaagcagagattgtcatcatcttatcagtcagcagcagtgggtgagcctcctctcaagagacaaggctgctaacaaggagttaattcactgtcaccaccctttcacaatctctagtagaagtgctagcagaaagaaaatagtcccatgatagagacggcagaagagagaaagaaggaacaagacgtttagataactcataaatgagtcatcagtccataaacaagaaaaagtcagcaatgtgaccattccttctgacataaaggagcaagaagacctctcaattaaaaagaagtcttcctaagaattgaggcaacatggtaatttaagcaacattgaatctctgcaggcaaattgcttggtataactcaaaaattattgatgaatgaacttgggtaagacacttgcaatccagag

SEQ ID NO: 457797 - DNA, 929 bp, Homo Sapiens
tgggacccctggctgcagaggagctgccccctgtgggagactgagctgttctattgctcgataaacccctcttcatcttgctcatcctccacttgtctccatacctcattcttcctggtcgcagaacaagaactcaggacctgtcgaatggtggggctagaagagctgtagcacaaacagggctgagacatgccccctgctcgccacactgtgggtgaagagaaggagaggacagctgtagcccttcagggagcccagacctgggagctcccggagctaggcctgtgactccatctttgggaccctgtggttcctggtatctccaaacttccaggagctaccatgttcctcagtgtcaaccatggaagctgcttgcagtgtgtctggtctggccgcagcctcacagagagcccgcacccatgctggcacctggagctgcccaccctgctgcagcacccagcgtgcctgactggtgtggccagaccccgtgctcctcacacacccctcgccactccatgcctgactcgcccttggcaggcatgggacccaggctggtagtgtgagccaaacgtggcctgccaggcccagcctgagcaaaacttgggcaaaggcgccaccggccacagagatttctggccagaaaaacaccaccccaaagatcctgtaacacaaagcgcaccttgcagagagaaggaagcggctacacaccagggagttgggaggtgcaggaggggctcttgcggcttccactcctctgtgagctctgcttgtcgaagtttctaaaaacagagcaaagaggagggcggccacagcaagcaggatgggggttatcccagaaccaaagccaagacagctctcatatcacacacgtcacaagtgcctactgtccccccactgcgcccggcttcagcagccgtcagtttactctt

SEQ ID NO: 457798 - DNA, 569 bp, Homo Sapiens
cgtgtgatgcaagtgtctaaccacacctgtatcttacaggatatctgtgcatctattgctataaaaataaaatctctactccaaaagtcatttgatgaagaataactcaatttgtaactgataatgatacctcaagccattaaagtgccagaaaagaaatcttacaaactgaaacaaaccttttaaattattttctaaaattacatatttttaaaaatttaagactgatttgaatacttaacatgcacattttgaagaacacaaaataatgtttcctaagatgatttaatatcatggaaagatgctcacaacatattcttttgtgaagaatccagatggaaaaagtatatatgagctgtaatagcatgtttaggtagaattcacataaaaatcactatttcaaccattctaaagtgtctaattcaatagcatttagtgcactcacagtgtcgtgctaccttcatcactatctaggtccggaacattttcaccatcccaggaggaaaccccatcctgattagcagtcgctcctcagtcccacctccccacagctgctgaaagccaccaat

SEQ ID NO: 457799 - DNA, 587 bp, Homo Sapiens
tcttctgccagatatcctaaatctctctctgaagtttaaggttccacagatctctagggcaggtgcaaaaatgctgccagtctcttggctaaagtatagcgagagtgacatttgttccagttcccaataagttcttcatctccatctgagaccacctcagcctggactacattgtccatatccgtatcagcattttggtcaaaagcattcaacaagtctcttggaagttccaaacttttcctcatcttcctgccttctgagccctccaaactgttccaacctctgcctgttactcatttccaaagtggcttccacattttcagattatctttgcagcagtaccccactctgctggtaccagttctctgtattagtccatgttcacactgctataaagatactacctgagactgggtaatttatacagaaaggagttttaattgactcacagttctacatggctggggaagcctcaggaaacttagaattatggcagaaggggaagcaggcatcttcctcacaaaggtggtaggagagagagagctcatgcgaaactgtcacttttaaactatcagatctcctaagaa

SEQ ID NO: 457800 - DNA, 526 bp, Homo Sapiens
acggacgacgagtctgaacggtaataggtgaatgaagggtaaatgctggggaggtctggaccatagaggacattcagggtgactgggtcactgcggatgccaccatatcggtcccgtatttcacattgatagggtcctgtttcatttctcgtgacattgggtagaatgaggatcctgttttcagtgggtcgctttaccctgggactgaccgggaggctctgaccatttagccaccaaatgtaggtgtagttctcactcttaggttcacaggtgaagtttaagacatccttattctctctggggtttaagttgttgattgtgatgtagggcttgggcagcttcgctgtgtggataacagagagaagattgtcctgtgtggcacctttgattcctccacaggtatccttcgatcagagttggcatctcccacctctcattccagccgagtccttgaaagccaatagctggtgcttttgtcacaagatagatgcatgatgatctaagggctcatagactgtgaggccgg

SEQ ID NO: 457801 - DNA, 626 bp, Homo Sapiens
gccgcccactgggtaccccagggtttttggcactgctgtgcacagctgctttggcgagggcatccttgttggctgaaacgcaggcattttgggttctcagcatcggtattataggccaccctccagatgctctggggtttttagcactgacatttcctctaggattgtgggttatacccctttcgctaggcgaatattggtcttgtctttttccaccctgaagttaggagtattattttcctaatagccaattgcaagctccttcctgtgtactgtcttataactcccttgcctaagctgctcttggtcaaaggaattgggagctcccaggctcctggcctggcagtcagccacctacagtggtagacaagtggccagcccaatatttttttcagtatctccactactgggtaggttcttcagcaagtcagagcctctgaggtctccccttgggcaacgctgtttacccctttcccttcctccatttgtttagccccctctcaacccaactctagatctctatggaatttaggctccacattcgactgcccattcgtagctcataatccatttttataacaccttgctatctatattacacctttaaagaacacggatacaccccg

SEQ ID NO: 457802 - DNA, 639 bp, Homo Sapiens
  misc_feature (63)..(367): n is a, c, g, or t
gcgacatggcaactccttaaacgtgcattattagataataatagattatgataacgtgttttnnnnnnnnnnnnnnnnnnnnnnnnnnnnnnnnnnnnnnnnnnnnnnnnnnnnnnnnnnnnnnnnnnnnnnnnnnnnnnnnnnnnnnnnnnnnnnnnnnnnnnnnnnnnnnnnnnnnnnnnnnnnnnnnnnnnnnnnnnnnnnnnnnnnnnnnnnnnnnnnnnnnnnnnnnnnnnnnnnnnnnnnnnnnnnnnnnnnnnnnnnnnnnnnnnnnnnnnnnnnnnnnnnnnnnnnnnnnnnnnnnnnnnnnnnnnnnnnnnnnnnnnnnnnnnnnnnnnnnnnnnnnnnnnnnnnnnnnnnnnnnnnncaaaagagaaactacactgttggtggtttggacaaatcctgcccctgcaccccacctgcatgtcccctccatgacttcctgttgtgtaccagggtccctgaggtgggctgaaagagggccgggagctggctgttcagagtcccccagaagcaaaagcagtgggcctctggccctgtgggcagggctggctgaagcagagccaggagggagggctgaggaaggctgtcgtgcacctgcctggccagccgtgggcagtagacacttgatccaga

SEQ ID NO: 457803 - DNA, 563 bp, Homo Sapiens
ggtacctctggatgcaaagtgtcgatacgtataacacaaaataaaacagtttacacttatggagtgcctcctgtgttccacgtacaatgctaagtattaactcatttgacttctcagggtcaataacctactttatagaaagcaagtgaggcagcacagagaggctgtgtgccttatgtcacaaagtcagtaagcagaggagctgggatgtgaaggtaggctactccaaagtacatgctctttaccatcttattagatgagctcctccactactcagtgcccttcttgaattactctccacctctcccaggaaatccctgctcttctgtctcatttcatgaaaagtcaatcaagctgttcctatctgccagcagactcctgcgggtacctctgtactgtctgctctcaccgctgctcataggtttcctgagatgctaggactctcggctccattgttggatatatttctaagaaaccagagagaagaggaaggctggtctccacgtaacaggttttactacagtcagttccaaatttatttcaacaggacacttgcatccaga

SEQ ID NO: 457804 - DNA, 652 bp, Homo Sapiens
tacctctggatgcaagtgtccaagacaacatcttttctttcttttactgttacagtactataattgcttttgatttgaattatttggggagaaaaatcttgtaccgttcttgaaaatattgcatacatttggcatgattttagttccttcatttaatacaaaccaaaggtgattgagaagcttgtagagattccccgccccactctattccattaaatgcaaccgcgagaaggccagagttcaggaacctagcttctgttagggaaggctgtctaactgctctcttcttgacagctgagacaggaggtggtggcctgcatgcgcagggacacgaccctggagacggctctcaactccaaagcatacaaacggagcaagcgccagactctgagagaagctcgcatgaccgagaagctggagaagcagcagaagattgagcaggagaggaaacgccgtcagaaacaccaggttcttagaccctgggtctttgctcaccctcactttggcagagctgtccaatgaattcatcaaatggggtcagaatgactgaaaaatggacccttgtgggtggtggggacatcacagaacagaacggttccttgacatgtacataatctaccacatcattttatagacaagacacttgcatcca

SEQ ID NO: 457805 - DNA, 395 bp, Homo Sapiens
aaattgccctggggccctatgtgacggatatctagccgtcctcgagacttccctgtgttgcagcgctcatttccagctgagccacgcttgccgggccacctgcccgacccacatgggagagaaaagctgccacctttttaggagccagcgccaccttgggacaaaaagggaaacctagtaatgccatcacatggaggaacggacgagctcagctggccagagcccagaagtgccacctcatcataattcaagtgttcttccacacagcgttgcccccacaaccacgccggacgtgccccctcgccaccttttccagacgacttcttagaagagatttcatttatttgtacatcttttgcactttcctattgaagacttgaacacgtttgtcttga

SEQ ID NO: 457806 - DNA, 409 bp, Homo Sapiens
attgcgtgtatccaagttcgtcaccgttccgcatgagatggttatcgtcacggggaaactgctttttgtgacattctctggatccatagtgtctagccatcatctctttgatctccagctctttcatgatcttctctttttccaaatcagaatattgttcttcagcaattgaacgagccagttgctcagaatctgctttggtcaaggtgatctccagttgggcagccaaagagtcccgttcatcctgtaattcctgtttcttctgctgcaattctttaccaagtttggtcttttcttcacattcttctttaagctccctaacttgtgttttataaagggttgagaaatactgttctgcttcgagctgatcctggagctctttcatttgaccatctgcatcctgacgtgc

SEQ ID NO: 457807 - DNA, 543 bp, Homo Sapiens
ccaccctctggatgcaaagtgtctctggatgcagtgtccatctccctcctgccccttctgaaactcccgataaagcaggtgtgagtcgctgtaagtttgcattatcacatcaaaattttttttccaacatattttattgtagtaaaatatacatagcataacatttaccatcttagccatatgtaggtgtgtggttcaggggcactaagtacattcacgatgttgtacggccatcacccccacacatctccagaactcttttcatcttgtacaactaagactctgagcttcaagttggggtaagcgggacggggggggactaaaactgtccccataaacaccaactctccattccctttttccccaaccctggcagccactattctactttctgtctctatgactttgactacgctgctttcttcacagaagtggaatcacagaatatttgtctttctgtgactggcttatttcacctagcacagtattctcaaggttcatgtcgtagaacgtgtctgaatgtcctttaaggcggcgtacaat

SEQ ID NO: 457808 - DNA, 477 bp, Homo Sapiens
gtggaacagcagctcgatgatctccttgagctcgtagctgtagcccttccgcttgcagacgatgaccaccttgtcaaacaggaacaagtacctgtcctgcttggtgtggttgactatggaccggactttcagttccccgtcaatctttggtcttccaaattcctccagtttcacttgcaaattttctatagaactctgaaattcgctgattttcctcaaggtctccttgtcccgtttaacttcattgatgtacatcgccaagtcctgcatggcttaccagtgcttctttgagctgctgcctctcaggccgttccgcagaatggctcagaagctccttcaagagcaggtggtatttgagcaccctctgcatggggaccaccagcaggtcttgcagcttaaattttccatcctggaccttcagtgtgcactcctcgactttctgcctgaagtcctcccggctggccaggagctggttcc

SEQ ID NO: 457809 - DNA, 377 bp, Homo Sapiens
ccaaacatggatcctcatgattttattttctagattggctgataggctgaataatctcctgtagggtaagaagtgtcaactgtatcaagcacatggaggtggactggctacaggagaaagtgtgacgtgggtgaaggagttcttattgagccatgggaggaagaaatagtacagaagagcaaagaataataatgagtcagctagacagaagacaggagtcatcagatttgtaccctagttactcgacccatcaactgactgtggtttttgggaacaggcccggcaccacctctgcgcacaaccccgcgggcctggctcaggcgggagtgcggggccagcaccatgagcgccccgggcagccccgaccaggcctattt

SEQ ID NO: 457810 - DNA, 323 bp, Homo Sapiens
tgactctcaccagcacgccccctcgcaagttccaccacacagtctgtattatgtcctttccagaagcaggcgtctcttccctggccacagccgcttttgtggcttcggtctctccatcagtttcatcccctctgcagagtatgccccccacccaagctaatccagcgttgccctctcttccgactctcctctctcccttggccacacctcctctgtcagccatgtctcctctacaaggccctgtttctccggcaacatctctggggaattcggcttttcccctggccactccctcagccaggcctttctgcaaggaacccacg

SEQ ID NO: 457811 - DNA, 424 bp, Homo Sapiens
cagaagaggacatattatgactttggctacatttagaataacagcaaattgtagtgcttctcctcttatatacagccttacatatcacactgtactgctaaacattagatccttttgaatctcctattacttctcacaatataatttttccttttgtcattgctttttcctttgtgtgttatctagcacattctgttagagttttaaataagaaaatagattaaattctaaaagaatccatcaaaatgaggggctcttggtctgggttagtgatgttggaaatggaacctgaacttgaactcttttgccatgagagacttgtcgtgtttccctttgtggtccttgattataagcgtttgttgtaaccttgtctgaatattaaggataaccgcatagtttggaaccagaaggcctgggtttgtgt

SEQ ID NO: 457812 - DNA, 709 bp, Homo Sapiens
  misc_feature (73)..(99): n is a, c, g, or t
ttaccagccgtgggtgacagagatgagactccatctcaaaataaaatagtacacataaacattgtacgcgcgnnnnnnnnnnnnnnnnnnnnnnnnnnnggatcatctgtgtgacatcacattttgtcaactttttagattcacctactaactgtcctgtaagaaagaaatattttcaaatacctccacttccaaacattaaaactatggctggtgtggtatgtagagccatatgagtttctgtgactgcaagagggtgaatcacagtatatttcttaaaggccgaaccatagaggatggatagtggttcacagtatggtacacaaaagatagattgtggatgccagcatggtatgtggaggactaatcgtggctcacagagtagatttctttttattccacataatcaactctgttcttctcttcctagagcaacaggaactgtggtagaaagcaatcctagattctatatctagaaaccgcctttctctatgtacagatgtgttcttggtaactaacctaacctcactgtgttcttgggaactaacctaaccttggcctagtttatttgaagttggcaatttcagtaatgtttcttagatctaacatagccctcaatgaatattagttaaatggacctgaaaacactttggaaatcacaaaatattaaatcctatattttcatacgtatgaatactatgggttgctc

SEQ ID NO: 457813 - DNA, 437 bp, Homo Sapiens
gccctattactttagctatatcacctttaagatgggattttaggaccttcctcatcttaaacatctcacaatactttgtggcccccagcattggacacagtattccaagtgtagtctggtagtagagagaagattggaaataacgtctttccttgaagttgagacccactattcatgaaatctggtaacatactggctttcctaatagctacattgcagttgtatacagggcagagaaatggaaaacatactattaatggtcaaagccctagctgttatttacatgaaacagtggttaggtcgtgtttttttattctaacattcattttgaaaaatttttttaagactaactaaatgtagagaataacatgtatccatttttgtcatatttactttatcctatttttaaatgtaatacttacagataaattgatgct

SEQ ID NO: 457814 - DNA, 433 bp, Homo Sapiens
tcatcattgctacaagaggtggacacaagcttctgagaccattaggcagtagactaggctcagacatatcctcctggagcataaactatgagagaaactcgataaaggaagaggaaacgactgttttcagatgctggacgagaggcaggctcgtggctggcgcagctccagcactgagggcatggagggagctcacagaggctgaggcagctggaagcctcgggcgagggctctggagaggagggaatgatacagggagctcccggagcctgcatcagggtctccctaagcctttgctgaataccccgctgcccagtcatagggcgaaaccgcatcaaaccaaagaacgactgggaagctgtaagcaaaacaactctccaagctcacagggcagagagccagtcacgctcccaacagccaaggcggagggccc

SEQ ID NO: 457815 - DNA, 576 bp, Homo Sapiens
ttatacggtctttgatctacctgtgaatcctaaaagactgctgttaattcattgtttgtaaagggagtggctctaactgaaagcaccacaggaggtccttttccaggattctttcatcccagggccctcccaaatgcctgtgtgggttttcggtgctttgacaagttcattggaccacacccttcccaaagcaccagagctaggcttcagtttcagctctgccagtgttttcccgtgtgacccctgcaaaagtctgtgtcctctttgcacttcagttctctcatctacacaagttctgtgaaagtttctgcctcaacgaatttgccaggtcattgtaagaacaaaccctggagccagtttgcaaattgtaaaattgtttctcactcttaatctagtgcaccttccaggcaatgtcagaaaagaaaacaagacctagactatatagaaagaagtgagctttgttaggattttattagtttggtgaatgcaatacattttgtgcatttatttgtttgctgaaataaaaacatttgcacattgttctgcttataaatgttatatgctcatggggtgctc

SEQ ID NO: 457816 - DNA, 458 bp, Homo Sapiens
gggcaaatgaaagacaacaaataaatattgtggatcttggtatttaatggtttataatcagataattgttcactgtacagtactcactgttcctaatgccccctaatccttcaggcatcacagatatgaagtggatttggtatctgatgcctttcttttttttgtttgtcaaatgaatgaatgaatgaacctagtccaatcatctgtttccaaaaaggatgccgcaaagtacactggaataagattctaacttcaggcctctgaattatctgaaagcctactctagtgtttaatcacctgaatcatcagggagtttcttcttcaatttcatgtaattataatattttcaaaccatttgctctagattggccttcaggagagggccagatatcagcctccatgcagcctgcaaagttggtgccaggcatgctccaattgctcattgggttccgatgggg

SEQ ID NO: 457817 - DNA, 782 bp, Homo Sapiens
ggaaaccgtgcgacccttttcacaagcgcaaactaagctttgtagcactttcatggcgccgtaccaccactaagccgacttcattctccaaatataaattatgtagagactagggttgtcacacatggtcggccaggctggctctcaaactcctgagctcaagtgatctgcccacttcctcctcccaaagtgctgagattacggcgtgagccaccgcgcctggccggccggttcttactagtttggctggagcttcttgcccatgatatcctcaagcataaggtccccctgcaatgagtggtgatttttgcctgttcatggggaagaactttcagaagaccttcttagtcttgaaaacacctgcgtacttaagcatccacagcacacggccctgatgcagaatgaattaggaggacagaaagatttggggaagcatcattggccgttaaacccgctcctgaatctttctgagctctgtaggtggagcttgagatgttcctgtggaccaatgcaaactggaagtcttgatgtgctctgaaagttcctggcttctgatgtgtcccgcagacgaggttagctcactacagtgaggttggataccacatggcggggactttaaagttgtctgtttcatccagggtggggcttatgcctagtctgtgacctcagtggggagcaggacggattccccaggagcacccacatttaccttctcgtcttttcccgcttgcttctgccatttgcttgtgcaacccagacacttgggtgtgaggatctcagct

SEQ ID NO: 457818 - DNA, 515 bp, Homo Sapiens
ccaagtaatgcacagatgtggattgttacagattgggaacggatgtgggttacagattgggaatggatgtggattacagattgggaatggctggaaattttttaccataactaggggcaaggaggcaaggaagataggctttgaaaatagaggacaatggatctttgaagaggaactcaatgtttcctactacttccccctcttgattttcataattcttcctcttcaaactctttaacatgtcttgactctgctgttctgcttggttttctaaaagtaggagtttatctgagtaaggtgggggagaattaaaggttttggtgagagctgtttctataagtctctgcaccaatccatgaatacagggtatgatgcagcatcctacaagaatgagtacacctataacaattgcaagaggtaaggccttgtaatgcctttgtagttgttccactgggggctatgttatcagggatggaataaggaacagacagacgctcgttggactacaaagcgtc

SEQ ID NO: 457819 - DNA, 611 bp, Homo Sapiens
  misc_feature (494)..(494): n is a, c, g, or t
  misc_feature (505)..(505): n is a, c, g, or t
  misc_feature (518)..(518): n is a, c, g, or t
  misc_feature (525)..(525): n is a, c, g, or t
  misc_feature (546)..(546): n is a, c, g, or t
  misc_feature (556)..(556): n is a, c, g, or t
  misc_feature (562)..(562): n is a, c, g, or t
  misc_feature (572)..(572): n is a, c, g, or t
  misc_feature (591)..(591): n is a, c, g, or t
aaaatgcatagccaatcttttcatttttattgctttaacacacattttaattttcagttgaacaaattcttaatgagctacagagtgacatgagttgaaattagaataaagtaaaataatactatataaccaaaacaaacccagtgttacatatgtgaaataatgcaattaagagcacaactaaaaaaaatcattgattcagttaaacacaaaagacatgcagggtctcaaacaaggagtatttgggcttctatgtcaatgtcataggaaagagctttttctatttctggataaatatttcatttttattgatttggcaaaaatactttaaggataaatatgggaccagaaaggcctacagtatttttgccaaattttatctatagccaaagcacaaaactggctttgaactgggtcattaatataatggggcagttcattccatcatattcctgtctctgcagagccggggtgaaatggaaccagccaagatnggtccggaacnccctcaacggccnctaaccntaagttccccaggatattgcnggccataacntggccnattatggatngggacctttattccccccngaagtcctaggttaaccggc

SEQ ID NO: 457820 - DNA, 361 bp, Homo Sapiens
gccagggagtggaggaagctgaagaagggtgcagcctgaagcaggagtgaggagcctgacaactcaaggggtggcagaaagggagagaactgtggacagagaagagcctgagaagcagggaacagtgtgtaggttccgtgagcaacacaaacaaaagtcactgctttcagttttgcaaacttaattctcatctaagccctctcagacacgtgttagaattcccatctttcaaatgaggaaactgaggctgggcgagggctgtagagatggagagagttggatgggttcaaagagcgctcattagggatggattgcaggggaagggtgggtgaggaagtgagcaggatcatggcacgacatg

SEQ ID NO: 457821 - DNA, 427 bp, Homo Sapiens
agcaataaataagtaaatgaagcacataaagaataaaacaaaacgtgaaagtgacatacaattcgtacaataagaggtgatatagaaaaaactggatcagagtccaagaatactcaggaaaggttaatacaagtagtgagctttcaaacagtaacaagaggtttcattaattaaatattcacggcgcccataggagcaaagtaccagtaggtgctgtgggaaatacaagctggttcctgtcctcaaggggctttctatctctcttcttcagctaaaataaacttaagttctcaagcttagacgctggaaggaccacctagaggtactgcagttcaagcctccttacatcgcagaggaggaaaccaaagctaaggatggtaagcccaagtgcgcgtctatgctgacagcaaatgctaagaactataac

SEQ ID NO: 457822 - DNA, 510 bp, Homo Sapiens
  misc_feature (16)..(16): n is a, c, g, or t
aacaccccacggactngtttgtccacgacccaggctggacgaatgcctggtcagagggtgacctgaaccagagctggagtgaggatcaaacaggcccaggagcctgaggaaatacccagtcagtcctcccagccgcgatggagaggggcctttgcaggcgttcggaatctcggctgaattcaggacctgggagatacagggttcagagaggagaggaggaagatggtgacatgatttggttagaagcacaagcaaactgatcgaggctcccagacctgccagcagatgctgtgtgagggtgatggagcacggggtcacacccctggccccaagggccactggtctccctggggctttgcagtgcagaggcctcagggtgtctgggattgctggggaggcctgtgctgccccctggtggcgcttcctggcgctgcgccctgtccacagtcaccttaggtccctttggaaacattccatttgacttttccctgttgtttgaaatcccatgtt

SEQ ID NO: 457823 - DNA, 492 bp, Homo Sapiens
aaggatttccaatcataataacagtgtatgttaaaataacagcacaatcattaccaaaatgactcacagccttccaatgcctacaagcaacaaaagattcacaggatgtggacaaaggatgggctatttcggtttaccagttcaagggtgagcagagtttatagttcagccatctggctttgaaatcttgtaatttgtaagaataaataatgggaggatcaaattgtttccaaatttgcgcactccaagtgacaattaaaactttcacattacacttttcaaatctgctaattcaatttcacatagattgcattgttgctgtgaagagtctttcagaagggaagaactaggaagtgccatggactggccgggtggtgggaaaagcctcttcggtggcatttaaaggtaggggatttgccagggtggtggcaggtagaggtagcttgccacttgacatccactacagacacagtaagactcagtccacgttta

SEQ ID NO: 457824 - DNA, 473 bp, Homo Sapiens
  misc_feature (27)..(27): n is a, c, g, or t
  misc_feature (70)..(70): n is a, c, g, or t
  misc_feature (295)..(378): n is a, c, g, or t
ccctggctttaatcactgtttttgggnaattttggttatattaaggccaatgctgaagttgttgatttangggatcaaaaaaattccccattgaggcagaatactagattaagtcatgctcttactcacacttcggtgatgaaggacggttatcagcttcgataagtgccttttactggggaatgagtcacagtccttgcacagcagctgtgcccgtgctgtgaatgtaccacggggcacctgccaggctcgctcacagtcattgcctcgtttaatcactagcgagtccataagnnnnnnnnnnnnnnnnnnnnnnnnnnnnnnnnnnnnnnnnnnnnnnnnnnnnnnnnnnnnnnnnnnnnnnnnnnnnnnnnnnnnaaaccaggaacttgtgcttcaagttcgagttcccacgaataaaaggcttcctaagagatcatctgggttctctacttcttacagatgcctgccat

SEQ ID NO: 457825 - DNA, 453 bp, Homo Sapiens
  misc_feature (43)..(43): n is a, c, g, or t
  misc_feature (63)..(63): n is a, c, g, or t
aaacatctgtgaaacaccccaggaggaaacactgggagaggantcccacaccccaaggctccnaaacctgctgagctttcaagaactgccccactggcctcccacctcccccagagtatcagggaggaacagagtgaacaaggttgtcacaggagtctgtccttttatgggaggctggctgtgctttttctacacactctctcctggttctcgtccaagcactgaagtcagtgctatcatccccagcttcatagatgcctgcctaacacctgtgactgacctctgatggccattatttgcactcagagaaggggctgtgctttgagggagggtctcttttggaagctccataggggtgaggggtaaccatgtagtatatcccagctacatggagcctgaactcagtcaactgtagcagctggagctcacaaagtccagtcggccctcgtgcca

SEQ ID NO: 457826 - DNA, 362 bp, Homo Sapiens
cttcgactagccgacagtctcccgactagcccgacagcaggctgcggccctgtgatggggtctcaccacgcagctgtcaggtcgtcatcctccatgagcacgcgggtatggtgagcaccttttggtcgggggacaggagcattctcgagtcattgaggaggggcattgccatccttcagccaggtgtagctgggcttggtgccattctcatgtgagcagttcaaggtgaaggcctcgttgagctccagcacagtggtgtgaagccaaccaacacctcgtggcctcgaaaatgggcactgagcacgcaggaatgggggagcctgtaagtcatcggctaagaagtgtctccctgtcaccctttt

SEQ ID NO: 457827 - DNA, 661 bp, Homo Sapiens
gcaagtccagagcagttttaatgggggtggaggctgtcatatcatctaggcctgacatgtagtcttgtgctccatcaagcaattctccctgaaatccttgtttccgctggtactttctcctttgctgcatatcagcaaaagtagctgctccagttgggtaggtgtaggccatatgtggtaggaagctcatctgatccagtcctgggtatggtcgtagcccaggaatactggtctggactggtggcatgaaagtagcagggggaaatgcgctttgaggtggaagagctgtgtataaaggtttgggcactaaatgggttcatgctgaagactgggttagtgcttttgttgtccagattatttgaatttgaaaattccttcttggataaaagtcaagttcagagggctcatctgaggttttcagatgaggaagaaacactgttatgatctaaactgatgctactagcttttgttttgttctttgtggctataatacttttgtgttcaacaggcaacaccaaagtctatctgtgagtgtcaagccaactcctaccaacaccacgccatcactaacaggatctttcaggagctgcttttccatttctcaagataaaaattacagaacacttatcattgtaccaattttctcgttcacctgccattc

SEQ ID NO: 457828 - DNA, 518 bp, Homo Sapiens
gtcttcacaagtgttttgtgcgagtagaaaacgttaaagggacagtatggacagtggatgaagtagaattccaaaaacgaaggccacaaaagatcggtggtaacccttcccttattaaaaacatgcagagcagccacgcttactgcacacctctcaatgcagctttacaggcttcaatggctgagaatactatacctctatacactaccgcttccatgggaaatcccactctgggcaacttagccagcgcaatacgggaagagctgaacggggcaatggagcataccaacagcaacgagagtgacagcagtccaggcagatctcctatgcaagccgtgcatcctgtacacgtcaaagaagagcccctcgatccagaggaagctgaagggcccctgtccttagtgacaacagccaaccacagtccagattttgaccatgacagagattacgaagatgaaccagtaaacgaggacatggagtgactatcggggcgggccaaccccgagaatgaagattgg

SEQ ID NO: 457829 - DNA, 741 bp, Homo Sapiens
tacgccatgtcacaatgctgaggcatcactggaatgacacactgccccagaggacaaaggttctctgggacagaagccaccaaccagatgatgcaacaagactgagggtgcccagggaaaagcaccagctcatgtcatcactctcactgagtcctgggtatgtataaccattgagggccaggaaattgacttcctcctggacactggcgtggctttctcagtgttaatttcctgtcttggagctgtcctcaaggtctgttaccatccgaggaatcctgggacaggctgtaaccaggtatttctcccacctcctcagttgtaattgggagactttgctcctttcacatgcctttcttgttatgcctgaaagtcccacacccttattagggagggatatattagccaaagctggagctattatctacatgaatatggggaacaagttacccatttgttgtcccctgcttggggagggaatcaaccctgaagtctgggcactggaaggaacaaactcaagctccagccctaagccttcccataggacaaaacttctctttacacgtcacagagagggcaggaatagctcttggggtccttactcagactcgtgggacaacctcacaaccagtggcatacactaagtaaggatactgactatagtagcaaacgctggcctcactgctaatggtagatgcggcgtcgcccgtcaaaagtgtaagaggttatctgtagtaaaaacac

SEQ ID NO: 457830 - DNA, 506 bp, Homo Sapiens
tggaaacctgcgacttcttacaggaaagactcatgactgttcaccacgtccaagccacgtctgcgacaccctacgccatggagctggtatggggtggcagatgaagctcactgtcaggccgtcgactgcctgcgcgtcggccgcgcaccgagtaaaggccccgaaacgctgtttgcggggcacaagctcaatgacaatgagtggcacacggtgagggtggtccggcgtggcaagagcctgcagctgtctgtggacaacgtgactgtggagggacagatggcaggagcccatatgcggctggagttccacaacattgagacgggcatcatgacggagcggcggtttatctccgtggtgccctccaacttcatcgggcatctgagtgggctcgtgttcaatggccagccctacatggaccagtgcaaggatggtgacatcacctactgtgagctccatgctcgctttggcctgcgtgccattgtggccgatcccgtccccttcaagag

SEQ ID NO: 457831 - DNA, 277 bp, Homo Sapiens
acctctgtcatcatccagcacattttggtggtggttctttacatggcccagttgcctattgttctcctggccaaaagcacgaccaagctgccagaaatattagactgtcctagatattctattcaccagccaagacttctagtttacctgagaacacatgagtaaagaccagcacgagatcagtctgagctcggcccatgtccagtaattgccccgaagagggatccgtctagtagctcgcaccgtgcaggacactgcaaggcttggtcatcgtggc

SEQ ID NO: 457832 - DNA, 396 bp, Homo Sapiens
  misc_feature (125)..(242): n is a, c, g, or t
ctccacccgacggggtgcaggggggctatctcagctcactgcagaactccgcctcccaggtccaagcgattctcctgacctcagcctcccaagtagctgagactacacggcacgtgccaccacannnnnnnnnnnnnnnnnnnnnnnnnnnnnnnnnnnnnnnnnnnnnnnnnnnnnnnnnnnnnnnnnnnnnnnnnnnnnnnnnnnnnnnnnnnnnnnnnnnnnnnnnnnnnnnnnnnnnnggattacgggcatgagccaccgctcctggccaagagattatatctgaagtgtaaagtgaacttgcactagatgacttggtgtcctttcctgagagaggaagagggccttttatgttctgtactcttctcccgagtcccaccccgtcgggtggag

SEQ ID NO: 457833 - DNA, 476 bp, Homo Sapiens
ctccacccgacggggtggggactaagtctctgactgttagctgccctggcatctgtgtctttaaggagttgactgttgtaatgtggcaagtttgggaaaccctgtcttaggcgacacagagagctgtgggcaatttctctgagctaaagggctgtgacaccctcgctgggacacccagggacggctgggtctgtaccccactcagccatagctattgcagaaggagtcacgggggctcagagtggtgggctggtgcgcctttggtaccatgagtagggtgggcttaaggagacaggactagggacactggctactgacactggctactgagactccagcatggcgtttgtgcctctctggacttgaggttagccccacagcgctccttgcaggctgcacaataccagctgttgttttggagcaacaaaaattcacaatttgcagctgataactaacaggcaccccgtcgggtagag

SEQ ID NO: 457834 - DNA, 392 bp, Homo Sapiens
  misc_feature (251)..(302): n is a, c, g, or t
gctggggttgcaggtgtgagccaccacacctggtcacaggtgcagttttgttacatggatatattgtgtagtggggaaatctgggcttttagtgtaaccatcaccaaaatactgtacattgtacccaaaaggtaattgctcatctctcaccccctcccacctttccaagcctccagtgtctattattccacactccatgaccctgtatacaccctgtttaactcccacttataagtggaaacatgtggtannnnnnnnnnnnnnnnnnnnnnnnnnnnnnnnnnnnnnnnnnnnnnnnnnnnctgagttgtttcacttaagataatagcctccagttccaccccgtcgggtggagcgctccacccgacggggtgggggaaagactgaggcag

SEQ ID NO: 457835 - DNA, 161 bp, Homo Sapiens
aaaactggctacacatattttaattctaactacatccctgcatgtagttaagaacatccctaaactgttctatttagtctctgcttaaatgttacttcctcagagagacttgcctctatcatcataattaaagtaacctcaccccaccccgtcgggtgagc

SEQ ID NO: 457836 - DNA, 433 bp, Homo Sapiens
gccttaaccaagatcagtcacctccatgttggttgatcttggttaaggctacaacaggcttgaaggggtctggagggtggctttactggctaggggcagcaccagccagatcagacctataggggatctaggcctcttgtactccataccctgtcttctcttccccatttgccatgttgacttggggactccagacgcctttgaggagaggcagacatggagggtaaaagaggggaggaggtcccaggccaaaggagatgccatttctcccctccaaacccacccacagccctctggagagaaatgagagaattacttgttaacatttacatggccatcttaacatttgcagggaaatactgaggtccagggggacagtaatcgtgcccgaaagtcactcagtcgtccgtaagttcagtaccaggggggatcc

SEQ ID NO: 457837 - DNA, 587 bp, Homo Sapiens
cctggtctgaacttaggtgaaggactaccagctggtccagaagggaggaggacaagagtgtggtgactctcgggcccagtctgagccagtactcccagcactttgcctttatcgccagtcaccttctgcaaagcagcatggacagccattgtcccgaggcagtagaagcaacttgggtcctgtccctggctctgaaaggattgtattaaacactaaaggtaatggggagcttctccagttggcagtggatctggctataatttgacatctgcatggggattaactaggaggaaatgccatctgatttcgatggatggtagaccataggatcttgattatttttagaaacgcgtgggccttacacacagatgacttcaaagaggaaatacaattttcctgatggcttctctgtctttccattgtttcaaggaatctgatactactacttcatgggaacacaactttgtcagacgagaagaaaaattgaaaagtttcttactttcctctctaaatgacaattcctgtgcttcatcatagaagatgaagggaagaatagagggagctagcctcctaagttcagagccacg

SEQ ID NO: 457838 - DNA, 280 bp, Homo Sapiens
tccagctgctacgggaggactgagtgtgggaggaatcactttgagcactgggaggcttgaggctagcagctgagtccatgacctgcacctactgcattgccagacctgggcgactagagagaccctgtctcaataagtaaaaaatgtaagcacgctagcctgtgctcaggtgggtgggagatgcccatgagagtgttaaagttcattactgccagagagacccgtatgacaagcgtgagtcagcatggatcctatgatgtggcgaccctaagttcagata

SEQ ID NO: 457839 - DNA, 515 bp, Homo Sapiens
  misc_feature (27)..(27): n is a, c, g, or t
  misc_feature (159)..(168): n is a, c, g, or t
acctaaacactgaactccttacctcanactttcagaagaactcattttcttttgcagaagacatgcatttctaataaacctctgcaagcgttgtaagatcaactcagatcttttagcaccatattgggcaggcccagggaaaacagttccccaaaattnnnnnnnnnngtaactttcagggaaatcatctaggggtcccccttatttggggcaccttcaagttcctgctcattgcaggaccttaggcaagtaaaaggagacttagactgattttctaatgacccgaaataggtatatagaagctttccaaaatttaactcaggtatttgacctcatatggggggatgttatgttgctgctaagtcaagccctcactgctgctaaaacaggcagctctgcaagcagaagagaattttggagataagcatatgtctcctatagtgggccagaagggaaaagagaaaaatagggaagcaaagaaataggggaacaccattccccctaagttcagagcc

SEQ ID NO: 457840 - DNA, 257 bp, Homo Sapiens
accaatgcgattcattatctgccctttgccttctttgagtcaagatatggaataaaacatccaataaagtaaatgtgaccttgtcctgactcctataacactcaaccaggcatcttcacacaacagactcattctttgtctatggctaagaaatattgcccaaatcagttgaagtcagattttaaatgatacacatcatcccatatcaaaaaatgccgcagggctaggtgcagtggctcatgcctataatcccagca

SEQ ID NO: 457841 - DNA, 617 bp, Homo Sapiens
  misc_feature (72)..(117): n is a, c, g, or t
agtgagtgagtgtgtaatcacaaacacaaagatactggaacctatagtagaaaaggaaactagtagggcccnnnnnnnnnnnnnnnnnnnnnnnnnnnnnnnnnnnnnnnnnnnnnnttgtccctaagttcagagccaggcctggctctgcactaaggcctaaactgttcttcctcatcacttcatatcttcatgtggaacttcttaccaagcctcatgtagtataaagtcgcttctcatgaagttttccctcatctttgggctctgggttctcttttacttaggcactgttatactttcgctgccttaaaaaataaaatcctgaaatctcaggggctcaacctagtacttatcactaacatcagagtctggtgtgagccaagaagctctccttggtaggtcttttccagtggtgactcagggaactcagctgcttccctcaatgaactcatccattccaggattatccaattccatgggtgaggaggagagagggaagtcctggaagaatgcatgcctgcttttaatggcctcaagccaggagctatctatcacttatactcacaatcccattggtgagagcacaatcatagggtccccctagttcagaacccagg

SEQ ID NO: 457842 - DNA, 332 bp, Homo Sapiens
cctggctctgaacttaggggaggcaatgggggaagatgacctgggggacaaactgaactgagagtgcttgagatgaactaacggagatgtctagttggcacctgatatatcagttaggacttaggttcatttgtggtcacagaaacccaaatcaccaacatgtgtttccttctgtcacatgcagttgtctgggcacgagcagctgctggttggtgtggtggctcctcggggtccagcgtccagtcctcccgctgtcatgctgcatcggctgttcctagggtgtttctctcatctctgcctaagttcagagccaggcctaagttcagagccag

SEQ ID NO: 457843 - DNA, 390 bp, Homo Sapiens
cgcggaatactgtctggctgtgcacgtggaggtggcgaaatgtggaagcttaacgaagttggcgccatgaagctaaagactgctaccccggggctctagctcgctccgcctaatggcgggccgcaccccgccggcgaagcccacgtttgtaggtccgccctcacgctgatctcttgcccaatcagcgagttcggcttcgcgaggttggtgcccattggctttcgcataaaagctccgaggttacagacgtttccacctcttgccggcctcttaggtaattggcgtccgtggtaaccaatcaggaagaggatctgcgggaacgccggccttttactttcttgagtggccaatccggttgtaggctcacctccccctaagttcagagccagg

SEQ ID NO: 457844 - DNA, 390 bp, Homo Sapiens
ggaccctccccagagtccgctgcattaatgcagcggactcggcatgcaaaaaaagaataggtaaagcaaccttatgccacattgagagtagtttccataggtcctaggagttaatagtccttttgtgctctgtgttgattagatggatcacactttgattagtatcttcaattggggccccatattttaacagaaatgttgactaaacagaccaactctaaaggaagttgacccattcttcaacactagctcactctggtgtcaccttggttatgataccctcctctacttctatgcctttgttagtgttgtcattctctgcttcaaatgtgtctcttatctccttctcctgccgagtccgactgggggatcctgtagaacgactgcaag

SEQ ID NO: 457845 - DNA, 423 bp, Homo Sapiens
ggatcccaactgcagcggactcgcgcaggactgatgctcagttctctgaccagggatatccagtctcttatgtggggaaactcacgcccaggtctaacctcacacttttaagacagatgagaaggaagggggaaatgttgctacattaggaggaattaattacaaagagaggaagtaactagcttgatagtctcatggagtcaggattaaacgccatgtctgtcctggcgtacgctaagggatggggaaacgtctgggtcccaggctgggtaaatggcaggcccaagccgaattagttcggctcttggtttgactccctcttccctcctgttccaagcgctcgcatgaacctgggtgccagggggattatcagcgtctgcgcaaggccgatggtggcagcgcggcgttaggaatcaggccccc

SEQ ID NO: 457846 - DNA, 425 bp, Homo Sapiens
  misc_feature (166)..(181): n is a, c, g, or t
ccaccgaaaagcatcccaatgatatgaatagacatgtctcaaaagaagatattccagtggccaagaaacatatgaaaaaaatggtcagcatcactaatcattaaagaaacgcaaatgaaagccacaatgagataccatcttactcccacaagaatggccattgatnnnnnnnnnnnnnnnnccatagacgttggtgtggatgcggtgcaaatggaacactcacacactgctggtgggaatgtaaattagtacaacctctatggaaaacagtatggagagtcctcagagaactgaaagtagatctaccgttcgatccaagcaatcaccactactgggtatctacccaaaggaaaggcagccactatatgaaaaagacaacttgtgggctgggtgcagtggctacgcactgccgagtccgctgcatt

SEQ ID NO: 457847 - DNA, 230 bp, Homo Sapiens
  misc_feature (144)..(179): n is a, c, g, or t
taactcacacatctgacagagatgttatggagcttgctcaaggctgctgttgtttttgtatgtgtcagaagccctacaggtccttggagggtgggtttctcagtaccaacagtggatgaactgttggagactactgcaggacannnnnnnnnnnnnnnnnnnnnnnnnnnnnnnnnnnnattgactgctgagtgagtcggatggattagcgaccgagcctaaatcatcat

SEQ ID NO: 457848 - DNA, 350 bp, Homo Sapiens
  misc_feature (71)..(71): n is a, c, g, or t
cttacactttcaagttttcttagacaattattttgggagatggcatggagttgatacatttctctaataancacttggttaagatcaaataccaaaatgagccttcagaagaaaattttgactttaaaagtaacagccccatggcagctcttttgaacacgagatgaaactaccttctgaattattattccagaccctcatcaggtagcttgtgtcatcgaactgttaagatattttgtttactaacttggttgtcacaattgtatcctagagaacactagcatctgcagaaactataattttggtacacaatgtatctctgcgcgagtccgctgcattgggttccggag

SEQ ID NO: 457849 - DNA, 444 bp, Homo Sapiens
tcgcccagactcggaaatctactaggactctcaaaatcaccaaaactcttaatttctcctttaaaaccattcctcttcctgttatccccatctcagtatacacttataccatccatctagttattcagtgtgaaaagccttaatactcctttttcatttcttatttccaatctactgacaagtcctttttacttttttcccaaaatacaggctagaatgaatctaatctgtcctccacattgattatcaccaccagatataaatcaccattgcctcttgcccgtggcaaaagcctcctaactgatctccaggattccattcttgtcccctacattccagtcttcagataacacagataagtctatcaaccacgtcactcttctgcttaatctgttgtttgcttgcttttccttatggtctccccatgcttcagctacgacgccc

SEQ ID NO: 457850 - DNA, 438 bp, Homo Sapiens
ctcgttttcgccccatactcgatgccgttctcaaccaccatgcctgtcgtgttaagggcggggatcggactatgactggtagcgattcggtgcccataggcttgaatatatgtcatcgtcataactttctgatcaacagtgagacagtcggtgtggcagctgttgtgcgcatagtcccaggtgtggtgaaccggacactctcagtaggattttctgtttgttgggttgatggagcctcgggtgcagtagttgtggctgtgaagtctaccagctcttgctcctcaagagctgtagtggaaacggcatggctgagttcaatcgaagagcgggtggagcggctgctcgagggtgtggtaacgtcacacttaaactcttcgtcgagtagggaaccaagtgggcggagaagtagagggtacggattacgacatatcacatcct

SEQ ID NO: 457851 - DNA, 483 bp, Homo Sapiens
tgatgagctcgggcctcttttgcccaaactcaccaagctcactatctacataaacctctgctgtcactgcctgataagttgatgggccaaatgcccaggatgaaggaattctacctgtatgacaccaacctcagcaccgtgccctggagcctgtttgccaacatgagcgggatggagaggctctccctgcacctcaacaacaagctgagggagctgccccctgaccttttttgctgcctgcccaacctccagaagctttctctcaagtccaatgacatccaggatctacatccagatatcttctccaagctggccaatatgaacactctgctcctgaatgataacaagcttcgctccctttctgaggacatatttaagggcaaccccagtttggccagcgtcgagctgaagaacaaccagctgcggacccttccgggggaggtcttctctactgcagggggtttaagggttgtcactctgagt

SEQ ID NO: 457852 - DNA, 572 bp, Homo Sapiens
  misc_feature (24)..(24): n is a, c, g, or t
atggatgctgagtggtacagccantcatgcaagacggtaacacgatgcgcagcagttatgggtgtgaccatgtatgcgctgggcacaggtgcacgcattggcatgatgcgaactgccaagggcgacctgcactacttcatcaacggccaggaccaaggcgctgcctgctcgggcctgcctccgggtaaagaggtgtatgcggtagtcgatctctatggccagtgtgtccaagtgtccatcaccaatgccacccgggccccatgggcaacagccctggcgaccaagcaacactgccaccgagaagtcctacccactgcactccccagtggctggcgtggctcaccgattccacagtacttgcggcaagaacgtcactctagaggaggatggcacgagggcagcgcgtgccgctggctatgctcatggccttgtcttcagtaccaaggagctgagggctgaggaagtctttgaggggaaagtggaagagctagatgagaagtggcaggttccctgcgactgtggctgaccacactagcaccgggggagatgggaccccgggtcaggcggggtgg

SEQ ID NO: 457853 - DNA, 274 bp, Homo Sapiens
gaagaaagtaattaagatacatagagaaaagggactggaagaaatcccccaatgtgagaacaggagttgtgttgattgtttaacaatgtgagttaatttctccatcttccaaattgctttctcttatattcccaaagtcatatcttgacttttgtttgagtgtgatttgcaatggtgctatccgtcgtaaatctctggtttagcattcatgctgtctgccaattttcaaatattgaatccagacttcatgagtgttcccggttgcgttggccca

SEQ ID NO: 457854 - DNA, 419 bp, Homo Sapiens
caccgtgcacaggatgtttctatctacaggcagacaagggaggaagggcatcctattcaaagagctccaaaggagaaaagcacatggcacgttctggaaccaaaaagccctgcagagggcgtgggacagagatggatgtatgtacattgcaaggctggaaataaagttgaaaaaaatgcatggcagccacatacagaagggtcttgaatgacactctaaggagtttcagatccactcttgggtgatgggaagttcatggagggatttaagctgtagaataatgtaatctaatttatgcttcagaaagatggctctgtaaaactaggtacacgaagtcagcagtattcctcagataagagctctttggcagggcagagtgggaatatctgtcgggcgtggccacggggatctctagagcg

SEQ ID NO: 457855 - DNA, 412 bp, Homo Sapiens
catgctcatagctgactctagaggataaaaggagggccaacgcaaccggagtaatgagatgcgctcctccagggctgtaaacatggggcagggctgcctgctgtagctggccttcaaggtgcggggggagagctcaaggtgagcgtgtgcttgtgacctcggtgccccttggcatggccctgctcctcagaggcagaggacaggggcagccttgggatcctttcagtgaggcactgtcctttgcaagctcaactctcaggcaccagggtgggaaggagttgccagctgtgaattcaggttatgagggaccaacaaaaagacactaatgcccagtgctctcgtgggtgtctcgaggcagaaatagtgtctgcctgctcaagcctcatggttggcattcaaaatggtccgttga

SEQ ID NO: 457856 - DNA, 429 bp, Homo Sapiens
ggcagaaagatgctttagactctgaagagccagaaaatgataaacatttgtccaatacagctggagacagtcaggaagaaggtgtgaaggatctaaaaagagcatgatccttggaaagacaatagacatttcagacaaagtaaaaattgtagattacttggtagacagctccattatgaagcagccagtgaaagttcttgatattgtgaattaatcatttgagcatttcctaattttattgcattgattgctaatattaagtgaggcattaatgtatcattccctccaaaacagttgtttaaagttgagataagtttagaaaacatggcatgtgtctctttaccttgggggttctcaatgtgcgttcctctaagaagttttcagccagcaacctgatagtttatattaagcattatccgcccgtctttt

SEQ ID NO: 457857 - DNA, 929 bp, Homo Sapiens
atacacagaaattttggtctattctttaagttaggaaattcaactacagactttaaattattacgtatctgtgatctttctcattaagtttttttgttcatctttataacaggcagataaaaatgtaaaacatatttatgaactgaacacagttgaccaagccattccaagtaatataatgctttataaagaggggcttcccaatgagacagggcccccagccttgaagactgcaaaaacaagaggcaaaagattccagggtcatgggtaccccgtttctgaactccacaggcacagcacaaaggtgacctaggggacttaaacaatagacatttacattagggcaactttatacagcaggcagtgagggtttgcttttaatatctattggccattggtcctatcggtgtgtctacgacagagagtgagaagaagccggtgagtgcagcagcactcagctccaatttcaacgtggtcaaatttgatttctcattgaagaacacagagaccctcaacaaatggagttgccctttttcttattatcgtttaaacaaggacatcagagaacagtttacaaatgggtgacattctcaatgtgccctttagaaaaaagggatggctttgagttatctgcagctggcattttaaagtgggattttcttttctaaccgaaattcttttgcccaagatttgactgcttctgctcaggggtgacatggcattcatgggaatagtggggatgacgcctgctcctgtttggttttgtgtggatgccggtggaggtgagacaagccttctgagggtgccagtgcacgttggtggtttccattccgatcctctgtccctcaggtcccaactgtcttccagtggctgagccccaggcccaaacacctccctgcaaaacgtgacacctgcaagtgtggaagact

SEQ ID NO: 457858 - DNA, 234 bp, Homo Sapiens
acaacctgaattactcaacaaacgaaggttctgcatcatccgtagcaggttgagaagctgaactttctgttgatgagcttgatgtggatttacccgcaccgccagtaataaatttactgattaaatgttctaaatccattgtgccttgagtgtttgaaacgacgtcaccacgtttcaagtagttgacaccaccacctggtacgactttcaaatatttttcacccaataagccat

SEQ ID NO: 457859 - DNA, 462 bp, Homo Sapiens
accgtactgatgtcattcttgttatcaggctgtgcccctaccaggagttcatattgggttgacagggttatctatatttttgttcttgatttttgagtttcatcatcttgcattaaattgttccacctggatttggggttcatctctgtgccctaaggatctgctatgaccaatcctctttttgtaggtgggtctctggcttaagtattgataggcttcagcggtttgtgtctctgtcttagcttgtatcaagccagtagtagctcacttcctttgtaaattcctgcttcagtctgggatccgtaggagtatgtgagaacttctgaaacgtctccacctcttaacagtcaagatatctatatcatttggatagagttctggttttccatctgctagacttaaagaaaatcaggcacggttgcgttggccctccgtgtatcctctagagtcagctatgaaatg

SEQ ID NO: 457860 - DNA, 603 bp, Homo Sapiens
tctagaggatacactcgctattcatcggcacctacctattcatcggcaccactgcggccaaaagctacaaagtccattttgagctctaactttgcatggggatttccatgctcctgccttccccatcctgacaagtgcacatgcacacacacattgccagacacccagcagacacagaatcaatgcttttgcgtgagtgaaacagcccctctggcagccctcttcacctgcccagtccccagtgcccagcacccagtgctgagctggtgaagatcccgtggccagaggcacacttaccatatacatcatgactcagatcccatttgctgacttggaactgaagcctcttggcccaccaagcaattactggagaacaggaagtctcaacggaaaatgaggtcagcctggtggctgagaggaaaagggtcagcgagcacagccttctgcccccgttggtcccctcagcagccagcccagggccctgcatgcagcagatgcccaccacagcttctctgctcggtcagctgctctgagcgactctgttcagcccagccacaggagggggttctcaggcagggacttaatatgaggctctggtgccca

SEQ ID NO: 457861 - DNA, 194 bp, Homo Sapiens
aactcaggggcgagctgcagctctgcctgtaaggtctcggaagtacgaggcggaggggacgaaaaacggggggccagactgttgtggctgtggtggagacgagaaaccaggaagaagaggctcgcttcccactcggcgaccgtaagcgaagcagccgaaggcgagcgccgacatcagcagctcgcccctgagtt

SEQ ID NO: 457862 - DNA, 381 bp, Homo Sapiens
gggcgggctgcagcatctgcccagggcctcagtggcaggaggcgcagaggccacaggctgagagggcggaggctaggcctcgtcggcggggatgtggaggccacaggctgagaggacagaggctaggcctcgacggcgggggcgctgcggctcagctccttgatgccacgcaggatcctcttcatgtggcccaccttggtcacgcccaggtccttgaggtccctccgctccaggtgcaggagctcagagccccggatgtcgtgccgtgtgaagatgtccttatactcacagagactgaggtgctccagccaggcagcaacctcctctgccccccagaggtgaaccggggctcccaggctactgtgagcttctttgttcttg

SEQ ID NO: 457863 - DNA, 497 bp, Homo Sapiens
tataacctatgcacattctcccatatagtttaatcatctttagatacttataatgcctaatacaatgtaaatgctatgtaaatagttgttgttatactgtattgtttagggaataacaataagaaaaacagtctgtacatgttcactacagatgcaaccattgttaagcctgactacatctttttatctgcagttgattgaatctatggatgtggaacctgtgcatatggagggtcaactgtactataaataatacgaatatgccaacattatataatcattgctttctgcaactgtttactataatttcaaaattaatatcctattaactgttcctattaaattatccaaatttgggcaagtgtattactagcaggagatggaccttaaattatgacaactttatattttttgatagcatctcttgaaaaagaattttaatgattctaataagaggttctttttcttttttccatttccttgacaaatagtactct

SEQ ID NO: 457864 - DNA, 693 bp, Homo Sapiens
atgatctagcggatctttgtcatcccccttcgtgatcatcagatgtgctaaagccaagaaaaagaggaaccagaaatctcacggaaaaagaagactctgcacgtttggatgatcacgaagaggaggaggaagaggatgaagagccatcccacaacgaggaccatgatgccgatgacgaggatgacagccacatggagtctgccgaagtggagaaggaagagctgcccagagaatgcttcaaagaagtactgtgaaaccaggagacttttttagaccttaatgtgcagcctggtcactcgaacccagaggtcttaatggactgtggcgtcgacctgacagcttcttgtaacagtgagcccaaggagcttgctggggaccctgaagctgtacccgaatctgacgaggagccacccccaggagaacaggcacagaagcaggaccaaaagaacagcaaggaagtcgatacagagttcaaagagggaaacccagcaaccatggaaatcgactctgagactgtccaggccgttcagtctttgacccaggagagcagcgaacaggacgacacctttcaggattgtgccgagactcaagaggcctgtagaagcctacagaactacacccgtgcagaccaaagtccacagattgccaccacgctcgacgattgccaacagtcggaccacagtagcctcagtt

SEQ ID NO: 457865 - DNA, 658 bp, Homo Sapiens
  misc_feature (22)..(22): n is a, c, g, or t
  misc_feature (637)..(637): n is a, c, g, or t
tcagcatccactccctcctctnccactttctaagtcaatgactgcactctgcagtcatttccttgatgtcagctcccttcctgccctgcccttgctgctgccaacattgccatcctttttatccacaatatgcagcattggatccatctgctatcttaaggcacccttaaccgtcctacatttttggttctactatgctggagacaattgtttcctgtctcaaagtcaatccacctgacatttcatcagttcccatgcccttcattgacactgtggtgcccagcttttccaaggtgccagcatcttctacatcctccttgtctattgccatcctccctcctgtccttcattccttgcttatcttacccacactatgctttgtcatccatgaactgcgtcacacactttgccccatctggggtaaagtccctggattctctgcatctgctccctccctcttggcgcctggcatgcctcctttactgcagcgcatccctcctgctctcaacaagctctcctctcttagctgctgggctccattgcctgctccgactcattcttcttgcccattagggaacacctctcctctgtcctcctctcccatgtgttgcaactcatcccctgatgtcccgcagcntaagagagtctccgtcgaact

SEQ ID NO: 457866 - DNA, 334 bp, Homo Sapiens
  misc_feature (89)..(89): n is a, c, g, or t
tgttttccccccaaatcatttggcgcaaagcggctgggagcttcattgcgtatgttttcagttttaatattgctgctgaaagccctgtnatccaacactcgtccatgttattcatctacatctccagtctgggctgtgatttgtttttcctttgagtgacacaaccttattttccattaagactcaatgcaaatagacactcatgcaccatcaccatcactccccctgcttggctgagggaagtcaatggagtgattctagtttggtgttcatattggagggttttatttgtttatttattttgagatggaatctgtctctgtcaccaggctgg

SEQ ID NO: 457867 - DNA, 155 bp, Homo Sapiens
cttcagtgcctggcactgaagcctggtcaggctacagatgccacctttctaccagccaggtgacataatccagtaagagctggatagcagacgagctgagacacgctcacctcacatcctgtcaatttccaaaggcccacatcattaccctggcc

SEQ ID NO: 457868 - DNA, 204 bp, Homo Sapiens
gtcctccctggactgtctgtctccagaattcttttatatataagagaaataaccttctgtcttgtttaagccgaacacaattcttgatggatccacgctcaaccttatgaatggctcacggataggtcaccccaacattgcaggtttcaagctaggagtataggtggagtcctagcctgtggtcaccttttctttaccctttgg

SEQ ID NO: 457869 - DNA, 637 bp, Homo Sapiens
  misc_feature (484)..(492): n is a, c, g, or t
gttcttattgaaactgactgcgggaacccatgtgctttactgtgactatatactgcatctctcacacactatctgaaaatgtgtcactatttgtttagcacttatccacaggaaatactgttaggtattatgtaggacacaggcattttttaaaacaccaaaccccacagtctctgtcttctgagagcttacagtacagtcagcgagatgaggcaggtatgaagattccagtgcatgcaatgcagtgtgttataaaagtcccatgactaccagagggaatacagatgtaaaacttaggaggaaaagaaatcactctggatgagccagtcaggtaagtttacatggaataagtagaaatgggtcttgaaagatgggtacgagtttgataggtgaatttgaagatacagatagcaccttctgtgtagaggaaacaagaaaagacaaaagcagtaaagcaagaagaaatgtgggaggttagtcaagnnnnnnnnnctagaattctcaagttgtagagccagaattaagagtagcttaagtgttaagctaaaaaaaattgaattttattttggtaggcaactaaaactagaaatagtttatcatgcgccactgggtgagggtatgccactggatgaggcat

SEQ ID NO: 457870 - DNA, 554 bp, Homo Sapiens
  misc_feature (45)..(45): n is a, c, g, or t
tatgttgcacacgctgctatttgtgtttagtgacaaggtatgccngctggctaggctggtctgaactcctgaccttgtggtctgcccaccttgactctcaagtgctgggattacaggcgtgaccaccacactgggtccaggttttgtttttaaaggaggcaggtattagcacagagcatcagggccagaaggagccccagaggtcacagagcatccatcatctgtacagtcatggagtctgagacccagagagggacactggcttgcccaagatgacacagcagaggcagaaccaggtccttctgggctgtgttccctcctacctgatacgagaatgggttccaggtagagtcccaacctgggcatttgtttcacaggtccagtgctcataaagtcagcaattttcaaacctggtttactgatcccagggtgtgtccggttattgcaaaggtcattgcaacattctcaatagtctttcaaaatgaagctaatttcaatttgccatacttagaaaaatactatcttttacatttgggggctgcgacgacggcaga

SEQ ID NO: 457871 - DNA, 1063 bp, Homo Sapiens
tgtaagcaagtaacttttcctcactctcaagatgcatggctatcaggtcctatgaagcaaaacactgcttgcttctgaagctgtaaatgtgttattgaagcaacaaatactcatttaaaattgccctaacctggttgaaacccgaggtaagtaacagtctttgcaaaacagcaaactaagaaaaaaattataattgagggtgctttgagagcatctgaaatgaaatgcccccagaatttcttgaagcgcaatatcctccaccctcccgctgcactgctagtcatcagcccacacttgagttatgttcatatcaggggtcaaaaaatcttacttatgactgaaaaatatcagccagccaaaggctattttgagtggcttttggcctgaagatgccaaagtagttctgttcagctctacacattttgagacagagcgcaagcaggaaacacagcaaggttgtgtaatataagtgtgtaaaagtaaaggtatagttcggttttccacgattgctaaattcttttgataattaagggagatctactgactctctcattaaattgaaatgatgtcatctttgattctacaatgtcatgggaaaataactcttaatgcacatcagagaatcaaaacattgtgagtttggagggataccagaagccacttagctcaggcactttgttttacagataaggacctagaagtccagaaagggacggtaatatttccttgcccagttcttttgtgacatgcttggaactagaacccacaactcttaactttctgatgtagagctgcctttcaagtgtcacattcacttgtttatgttcattcagcaagcgtctgtgaagtgccactgcaagcttggtgctttggtaacctgttctagttgccacattattctgtacagagccctccttagcaaaaactcaaagaattactgcttcccgggtgcaggctctgcattgcaggggttcactttcatgcagatgaagacatatttggtgtgttttcatttatcaaaatcatctctgtcatctagtttgattctacacagacagttttg

SEQ ID NO: 457872 - DNA, 927 bp, Homo Sapiens
ccagtgcccaaattggctatataaaatttaatgctgtcctcctgtgctgtgattgctagtatgaagtgcatgcttatacattacaactggatgttttgcatcctacagagaagataatggaacagatttagaatcaatttagtatttctcttgcaatccatttggagggattccaactgacaacgcatatgcctcatcctctccacagccgtatctgataagacctgagaggaaaaataagtagtaacattgggtagcctgtttggactcttgcatatgctacttgaaaatgaaagcacgcttatggcaggctgggggcataccggctatggcccatggaagtgctgagctgatcaatattgaatgcatgggcaaaagcaataaataaatgaagcaaatgccatggggatgcaaatcaatgatcgggtgagtataccctcaaaataaggatgtgtccctttgtatgggaggagacacaccgcagtactgtatgctccaatagttcatcgtgcagtcccaggatgccagtcttgcatagagaaatgatttcttcacactcatcatggcaggtgcccctgatgttggttcagaaactgatggataagccagataacaggctgagaacaggagcaagaaacaggacggtcgtgagcggacccactggcatacttgcagctttcactgtgttcaaatttaatttctttttctttttcaacaaagtaagcgcaaatgtctttagtatgattcagtaacatagcagcaaaacttcaagaaccaataaataaggacgctgacatgccgatgcccctttgtcttttggactcaacacttcacgtgtgttcataagttacaaacatcagccttgagcagaaggagtaaaagtttcttgagtcagcattcatgctccacatacttgtacagatcaca

SEQ ID NO: 457873 - DNA, 603 bp, Homo Sapiens
  misc_feature (104)..(128): n is a, c, g, or t
tgagccactactcccagcctctgaccagtgttcttaacctggtccgtggacctccagagagtccatgtacctcctagagttgcttctaaaagctctgtgagcannnnnnnnnnnnnnnnnnnnnnnnnatttttttcctggagagagggttcccagaaccctcagacacagacacagacaaaggggtcaataacccactaaggattaagaatcattattctagtccaagcattcatgtgtcaggctgcaaaaaacaatacccagggtcacacagagccaagactcaattcaggaccgtggattcccctggtctagaaattttctgctgtgccagcccacaccaccccactgtccttacctcgagtgaatattacatttgagtcatttgctgggcccaaacctagtttccttggtataattttaggataattgtttaagtggcaactattcattcagtaagtagtaagtacttattgtttgcttgtttcattatgaaagagtggcacatgctcattaaagatttggaaaaatgaaagtcaaaacaactaaaatcaccccgagtcccaaccttctgtaacattaccactcggggcacttcggcgg

SEQ ID NO: 457874 - DNA, 527 bp, Homo Sapiens
  misc_feature (307)..(316): n is a, c, g, or t
  misc_feature (407)..(471): n is a, c, g, or t
ccagtgctgcatacattatgaccaccatgccagccttaagttttaaacatcaagttttatcattatagcagcatttatatagttggttattaatatatttacttttaactattttcaaattcatactgttatttcatagtccaattcatcatgattcttgacatccatcccccaactgacgtcttaaatattaaagagttagaaattttttatattaggctaagcaaaatatagaaaagaaaatccactcttccttccctgcaatatgaataaatacttccgaagtcaaagtcaaataggaacttcnnnnnnnnnnaaagacaggctctcactctatctcccaggactggaatgtagctggtgcagcctcaacctccagaattcaggtgatccttccacctcccacnnnnnnnnnnnnnnnnnnnnnnnnnnnnnnnnnnnnnnnnnnnnnnnnnnnnnnnnnnnnnnnnnttgtttgctttgcagagatgggatctcactttgttccctggctggtcttaatctcc

SEQ ID NO: 457875 - DNA, 185 bp, Homo Sapiens
  misc_feature (23)..(23): n is a, c, g, or t
  misc_feature (40)..(40): n is a, c, g, or t
gagtaaatcttggcatatttccnttttttctttaagacanccactgtaggaaatatgccaagtacagatagtgaggaaagaaaggaagaaaaatgataattgtctgccagtgggtttatttttaaccctgctgaatttcatttgtaattttactttccagaatatactctggtagactgaggcgg

SEQ ID NO: 457876 - DNA, 461 bp, Homo Sapiens
atgttcttaggtgtgagtgttcattattattattgtagatcgctaaggtagatgataagattgtattggttgtgaacacttagcatatcctagtcattcagtgtattggttatgttattgaatactgctgtttatctttagattacgtgatttggatccagaatctcatttatatttttctgtttgttacttgggttatcgaaatccctgactttcaattactaccccaattatgggctagcagcttcttactacatagttccatagagtgttttacttacttttgtcatatttattatattagcttatcatggtccagttttgcttgttttaaacaagttgagaatggggactgtatcttctatgtctactagctttagctcaaccacagtatgtggtacatatgtatatgaatatacgaccttaaggcctatgaatacgcagattgagcggcgtgaaac

SEQ ID NO: 457877 - DNA, 476 bp, Homo Sapiens
tttaatatagggatttactacctccttcaccaagtaattgaggggaaagctcttagcatagtgcctcattccatagaagacatcagttctccctcttgcccctgctttcctggtaattggcaggtgcgcttgatcttttgggccagcttgtgctgggaggcaaggtgctgtggggaggcacaacctgggagagcctttcctgagtccagctggagccagagataaaggagacctccctgcttccccagctgtcttgcttcgctttgctttttgttacacggaggaatctgaaggcattgtgattagtcggctccgggaagatatacttgaagggtgacttgaatgagcatttgtaaacctattgaaggttatcattcagggcagagtgaccggctgacacgcggatatggttgtagtatgctagcaaaggtatgtgagtagacatgagaaacctgtctcagcaggagaagcataca

SEQ ID NO: 457878 - DNA, 892 bp, Homo Sapiens
  misc_feature (535)..(535): n is a, c, g, or t
  misc_feature (688)..(807): n is a, c, g, or t
ggaagagggcgagtgttttgtcatgatccattgatttgagggcttggggttttgctttgtcttcctctgaaccaaagcctagcacaaagtgaacccaagtgcggcaaggagctttaaattttttaaattttaagtgtgtttctggcagaatgagaggccttgaaaacctttctggttctcatcccgaagccatttgtttcagttgctcaggccttgggctcaggagaggcttaaaataactcgccttttctggagggtcctaagacatcaggaagcagtgctttagggtctgcttagcaaatggatgttccaccgtctcccagtgctccccagtcagggcagagatgtttggggccaaggagagacgagccaggctctcccgtctcatttgtccagggggaattcagttgagttgcagggagtttggtggcctcccctgggaactgatgaaggagagcagtgtttccagggatgtgagtgtggtggggagccctgtctgcctagaaacaggcctctctttgcttcaactgtgttncaccctcatctaggttggcagagctgtattgcccagaaggattcgaacataaacttgatttttccccaagtgccactcagggatgagaaagcagtgtctcttatttcagactatctgttttctttctgaaatcccttgctaaggctagccagnnnnnnnnnnnnnnnnnnnnnnnnnnnnnnnnnnnnnnnnnnnnnnnnnnnnnnnnnnnnnnnnnnnnnnnnnnnnnnnnnnnnnnnnnnnnnnnnnnnnnnnnnnnnnnnnnnnnnnnnagttccttccccgtctcgctcttccttcttttacttcttcagctgctcctccctctccttttttcgttcatcaccctaagtacgg

SEQ ID NO: 457879 - DNA, 198 bp, Homo Sapiens
cccccggtagatttccacctgaaaatcatatagagaaagacagatggaagtctttaaggtgggtctcattcttctcattgctgcacaagtctgaaggaaattggctttccttgtagatagccacatgcgttctataggaagctgctgtctatctgttccagtcctctgcactttatctcttgtacaccaaatctaact

SEQ ID NO: 457880 - DNA, 779 bp, Homo Sapiens
aaatcaaaagttatgattttatttttaattttaatacaccaggaaaaaatattttttttaatgtcgtgaaataagcacttgaaaataacaacttcaacattgctgtgatttgctctgtgaggcttatatgggtgggcttccatatgaatatgggctctgaggtccccaagaagctgaatcttccagtggttttcaagatagcagcaagcaacctcctgcctgaatatgtctagacaggcagacctgtttgaaacgagtatgaccagggaggactgttagggctacttctgtgggccttcttaggtttttgtcgatgggaaataaagtctcaagtgctactaagcattgggaaagtaacagcatttaaataccaatgtcgagtcagaacccttcatggccggcccgaatgggttataaatgtggcttgaccctgacttatgggaccagttattaatttaaccagttacttcagaagaggttactacaatgcagtgttggtttggacgtctagtgaaatatattttactgtgagacttctgcctgcccagcctaaaatcaaagtgccacttttgagctctcccaagccccactcacgaatgtgctcccactgtccatctaacttctagaacaacttccacatcacttcctttaaaaagtgtcatcaggaggaagggaagcctgagaattccacctgccatctgtgagctctgaattgtcaagtctctgaggatgaggaaagtaacttgattcaacaggtttgtgtatgtgagacagcatac

SEQ ID NO: 457881 - DNA, 259 bp, Homo Sapiens
ccacccagcttgacggtttaaagcatcatgaatgcgaatttgaactccagaaaagcagagcttcctaacaatgggacttccacagcaatgggatctgcttcctctttcagtttgtgccttttctatgagcgagagactcctaggaaagcagcagcccatcaggaaaacgtgtgggaactcactcgcaggttctttattttttttgagatggagttttgctcttgttgcccaggctggactgtttctcaacaacaacaac

SEQ ID NO: 457882 - DNA, 612 bp, Homo Sapiens
aggaacagcggttcgggttgaagcagagtatctcagtccgcttgatagaagtcaagtgcgaacagaacctcccaaggaaaagaattggaaggaaaatgaatttagctgtgaggtatgtgggcagacatttagagtcgcttttgatgttgagatccacatgagaacacacaaagattctttcacttacgggtgtaacatgtgcggaagaagattcaaggagccttggtttccttaaaaatcacatgcggacacataatggcaaatcgggggccagaagcaaactgcagcaaggcttggagagtagtccagcaaacgatcaacgaggtcgtccaggtgcacgcggccgagagcatctcctctccttacaaaatctgcatggtttgtggcttcctatttccaaataaagaaagtctaattgagcaccgcaaggtgcacaccaaaaaaactgctttcggtaccagcagcgcgcagacagactctccacaaggaggaatgccgtcctcgagggaggacttcctgcagttgttcaacttgagaccaaaatctcaccctgaaacggggaagaagcctgtcagatgcatccctcagctcgatccgttcaccaccttcaac

SEQ ID NO: 457883 - DNA, 511 bp, Homo Sapiens
gcggtggggcacagtggctcacgcctgtaatcccaacactttgtttttttcgaagctctatgttttaaaacccatccgtgtttctccaccgctgatggaacttgtgcctgctttccatgggggcagcacccaccattatacttgtcccctctctgtgtgcgaagggctcaccagccttcaggactggccacctctgtagcctctccttcagtccttccctgcatctagcctgggctctagaagtgctgacttcccagtacatcctagaatgtgcaccagtatgtcacgcctctgtgcctttgttcttcaaggccagtggaatatcccggatcacctagttccaatctcctcattttacagaatcatcctacattttacagaggaggagaataagcttagaaacatgacctgcttgagaccgtacaaccagaaccccaccctttatctctggccagcctcttctccctcttctctttatcctcctctgctgctcactggccgaacccgggcg

SEQ ID NO: 457884 - DNA, 142 bp, Homo Sapiens
catgtcacagaatactcttaaatttttttcaaccattaaaaaatgtaaaaaacgatccttttatatagttcatgatcatgattaggtgttcatgcacgtatgtgaaagatgccacccttgaaccttgtttacatattacggt

SEQ ID NO: 457885 - DNA, 164 bp, Homo Sapiens
tacttttatgtcgaagccgctcttggggtccttctcgccccgcaaggctgggtcattgaagggctcatgccccgtctcccagtcacacacggtcttcctgatggcctgcagaacacgtctggatgacgttcttcttcttcttgatggcctaccgcagcgctccc

SEQ ID NO: 457886 - DNA, 389 bp, Homo Sapiens
tatgcatgcttcctttctgttgaaagctgaacaatgcccattaaagttcctgagactctggctgctactgccttcctctgaggagagttctgtatcctcttttagataaatggagccaacagatcactttaatccaaacatggactgagatgttcaaagaatgagctgccatctctgtaaagctcaggctacatctgtttcacccctactcttagtatatagcaagctagagatcccaactgagatggcagggtgcttcccacactcctgctgcatgaaaatccctctcctgtgctcaccctggcagccttgccttttatatcctagggaggaagttgcgatacaggaggtttagacaggaggcagtgattaggggcgatcctctagag

SEQ ID NO: 457887 - DNA, 174 bp, Homo Sapiens
cggatcctaacgtaatatgtaacctggctcactgtatatgtgcacagactccaagcacagctcctgtctttcgggcttgagtattagagacaaaggtttgccatgcttacaggctgaatgtatttccctactgaacaaactagccagcctttatttcaagccgaatcactttgt

SEQ ID NO: 457888 - DNA, 261 bp, Homo Sapiens
tatgaaaaaccaagaagattccaaccttgagatccagtgtcaggagttctctattcctccctactctgatcaagatcttaatgaatccctgccacctccacctgcagaactgattataaatattacaacttgctttttagctgatcttccatcctcaaatgactcttttttctttatatgttaacatatataaaatggcaactgatagtctattttgatttttattcaggaactatctgaaatctaccgtggcgggtcctc

SEQ ID NO: 457889 - DNA, 448 bp, Homo Sapiens
  misc_feature (17)..(17): n is a, c, g, or t
  misc_feature (41)..(73): n is a, c, g, or t
  misc_feature (136)..(136): n is a, c, g, or t
aaaccaagctgagtggncgcagcatgcacatgtggtctggnnnnnnnnnnnnnnnnnnnnnnnnnnnnnnnnncaaggactgctttactgacagatactcttccaaaatggacaggataaaaggagttttatattngtcaggaagaaatgattcttcttatagcaatgagtttgtatacatacaatgttcatttcccaaaacatactgaaattaagggaacattagtatttgttgggtttggggtttattttaaaaattctaaaactaaacaactgtaggaaaggagaatatcacttccttctgattcttattctggatgtttcagcagagaatatgaaatgatgacagatttatacctaaacagacaagatgacttcaaaaaagacttttgtgcctctcttgtgtatgcttatatctgaattgacatttttttcctttaaagccagg

SEQ ID NO: 457890 - DNA, 301 bp, Homo Sapiens
tctagaggatctccgtctagcctcgccagggtacacacaaggacaaaagcggccgcaagttcccctggggcacggtggtaggcacttcatattccggtgtggatttggctcttcatttcaactctgtggtgtgtgtgtggggggggttatgatcaccacccccatttacactgaggaaacagaggcttgaggagtacatgacccatccaaagaccacacagtgaggaactgtcaagggaagatctgaaccctcggtctgcgattctccagcttgcagccttaagcaggcacctggcctggc

SEQ ID NO: 457891 - DNA, 626 bp, Homo Sapiens
gactctagcaggatctgaacagcggctcggtgtccagtcagatgaaattgatttatcagatgtcctttcaggaaatggaaaggtcagtagttgcacagctggtgagggtagtttcacatcttttcactggacttttgggagttggaacctctggcctttaacttgtggtggtcaactaagtgatggaaccagaatagaaagggatgatgcaagtacgtttactgtgagttccttcggggttactcctgcagtaggtggactatcatctgggacagttggggaagcctcgacaggcctgagttcagcagcccaggtagctttgcagtctctctctcatgcaatggcttcagccgagcaacagctacaggtgctgcaagagaaacagcagcagcttttgaagcttcagcaacagaaagcaaagctggaagccaagttacatcagacaacagctgcagcagctgcagcagcatcagcagtaggtcctgttcacaactctgtgccttccaacccagtggctgcccctggattcttcattcatccatctgatgttattccacccactccaaaaacaacagctctttttatgactccaccactcacttccaccaacgaaaccgctgtccctt

SEQ ID NO: 457892 - DNA, 381 bp, Homo Sapiens
tcctagccgcgccagaggcacttcttgggaatggattctggaggtgtcagacacttccctaacttttcacagcccggaggtgcccagttcatgaccgcccagttgcacacgttgagctggggctgcgcggggaccaaggcctcctggtgctgctggacgaccgaggtgatcctgctgagggcctcctggtactcggcgctggcaaagctgagggggaacctctcccctgggtcccgtcccaggtggaagatcaggggcagcttcgtgtggtcttccagattgtgagttgtgacccctgaaacgttctgcccagggcagaaatcaatgccctgtctgaagttctcccaggagttggtccaggtccagaagtgcgcctgggtg

SEQ ID NO: 457893 - DNA, 250 bp, Homo Sapiens
gcttgtctcatcaaacaaagtattcggcagaatcccaataaactaaactgacaaaaagcaccatctgggctgcaacaggcctaggctgtctagggacagcaaacaatttggtcccctttgtcccacagcaggggctgaggctcttctgcacgaccacaaaagactgccaccacgctgaccaaagaacatgaggagaagctaaattagactcttaaccagcactggtttataagcacttctgagacagcat

SEQ ID NO: 457894 - DNA, 347 bp, Homo Sapiens
  misc_feature (103)..(111): n is a, c, g, or t
ttttctgccacgactcgggacagtggggaatctatttctggtgactggctcctgcagtttccaggccaacagttccctgtggcagcatcaaccatccagggcnnnnnnnnntgccggccaggatatccacgattcagctgtgcagcagtcttctcaccaggtagtcccattggtgtgattatggttgtggctctcacttccttggttccatttgttcctagtcattttcttgaccttgattctctaaggcctcccagtgagtcagtgagctacctgatatctctttggttctcttttccctgtttatatcagcaagaatcactttctgatgttgtagctacgaaatc

SEQ ID NO: 457895 - DNA, 188 bp, Homo Sapiens
gggctgctccactgtggaggttcctattatggggtggaggggctctagcagttctcagggtagatggtaggagggggctgtggtgttggggtgtgtggaattggggctccctggaacagcagaggtgaagcagctgcctgcacttatcctccatcccttccttcctcccttagtatcaactgtaatgt

SEQ ID NO: 457896 - DNA, 711 bp, Homo Sapiens
  misc_feature (527)..(527): n is a, c, g, or t
gagagcccatgagtcttccagaaacatctgatcctggtaatttcctctttaaaattggaccaatcttttcatcaaagtactcctttgccatagaggatatatcccttaattcttgaagtacttcatgagctcgttgaggggctctggtagaattgacatatctcaacacacgataaatctcatcaatcacctttcctgggatgaagcaacagagattggaatccacatatttcatgaaagtcatatttaatagtgacagccttgtttcaacagcagcaagaatgtctgcatgacgagctaatgaatggtttctcctttctgactctctccttgggagttgtgctttaacttgtttctgacatagattatggtacctctccactttcagaaatccctgattcaacattctctggcagaccaagtccattcttttacaaaccaggcggagctggctaatttcgtcgtaggacataaagctgaggatgttctcgatggctacgatgggcagcgccacaagcgtgttgttntgaggcagctggtccggagccagcgcgggggctgggagcgcctgggaccccggctgcgggtgctgtggcgcgggcggtggaggctgtcgctgggtagagccggaggccaaagaggaaccgccgtcgccttggccgccgcctccttcctctgccatccgctcctccgccgctgccgccatcttgg

SEQ ID NO: 457897 - DNA, 307 bp, Homo Sapiens
tttctgcccacgatcgacagcaggcccgtgcccaccgctcagctcagccccacggagatcagcgccggtgcggcagctcatcggcgggctaccggggagtctggtggccttcctggctgcgctctgcagatgaactggaaaacctcatcctacagcagaactgaccccaccggcacctggagcgcactgccctagggaaggaggctgtcccagcctggacctggcttcctgcctcaccagttggtacattttgtttttgaaagaggtgggatccaaaagagctgtttctagccacactccaagcacc

SEQ ID NO: 457898 - DNA, 347 bp, Homo Sapiens
  misc_feature (322)..(322): n is a, c, g, or t
ggtgagtggcattggctaaaatttaattgtagcctttttaaaaattacaatttcacattttaacagttactttccagcatttaagcaaatacagcaatatatagtggactaaaacaggcaggagtcagaaagagaaagccaatgttcagtgaacgtcgatgggactgagtgctgtggagggtgagtgagacatgcatagtgccagatgaggaagtgggaacaggggaggggggcgggaaagtatttttccgcttggcctgcgtcaaggctcagatctggggctggatgagtggggagacgtctgccatctgtgtgtgtacanccctaaatgtgaactcatcagccat

SEQ ID NO: 457899 - DNA, 517 bp, Homo Sapiens
gcaggagttttctttgtgacatcactttcgaatgccaatgtagagtgtgaggcagctggcacggtaccgaacctgtcttcgagggtttcgtgttggccaagtaaagtgtgtaggagatatcagtgacaggccacagtgctaatgcacatccggagtctgttatttacacttgtagtgacatgtggaccaagctatctgagctcattctaggactgttcattactttacattaactggagtaggaagagtaggagctgtcttctctccacgccggagctgagacagatgtgtttgtggaataagcctttgggaccggaagaccgtgctgctgagtcctgggcccagagtcaggcactcacacagcgtaacacagggctgaaggaggaccagcacttagcatttcctgtgagtcctgttgactgtggtgacgatgtccaccctaagaattcttcacctttctgaccctgtggcacactgccatcatgtctattttaattagtttatgtggtctgacgag

SEQ ID NO: 457900 - DNA, 180 bp, Homo Sapiens
tgatatgctgtctccaaaaaaaactttctatgacccatagcattttcaggcttaaaaggaatcgggcccttttctgtggcatgaagtattacctaccatgaccaccttcatatatccatgaagtaaatgtcttttttcccctactcatacttactctttatgatttttccctttctattt

SEQ ID NO: 457901 - DNA, 585 bp, Homo Sapiens
tcctgaaatagacagctttatgactagtatgacactgttctcataatctaactactactagtctgccagtaaatgtaacacattgacatgtgtttagagaatataatttaatgtggaatatgtgaaagaaacgtttttccttctgacctgttcttccagttttcttgtacagtgactagggggctttcttgtatgactcttctgtgtgcagagaaatatctgaattaaataacctagagataaaagtgttaatggtctttacattaaacatacacacagtccagagttatttttccaagcaggcaccctcagagataaattacctatggttatgtctcccaacccagtaattccattagtaaatgcatccaaaatccaaatgtacaacgtgaccacgcaggaagttttacttccctaaacaagcacttgcaggtggtgtgtcgaggataaacagtagattaagaggcaggattccatttccttttatactgaggtttgaggacagacagacccttattcactcatacctgcccctgacttacagagcacaagactttatgactgcgagtcgtggcaagaagagat

SEQ ID NO: 457902 - DNA, 270 bp, Homo Sapiens
tgcccagtatactaagtggaaatagatggggtatggtacttaacaacaagggcacaggctggaaggattggctatctggataaaaagaatccagactctaggacagcttataccctgatgtacacctgcatacatttctttcccttcaccccaggaggtggtacgtccagaaaggtctgcatttcacagcatgagctcacctggctcacatacacgatcagctgagatgcagcaaacaagttttacagtgcagtttttgggaaccttggg

SEQ ID NO: 457903 - DNA, 198 bp, Homo Sapiens
ccaggcaccgcggcttcgattagttttggattttggaacggttccaattttggatttttggattagagatgttccaccctgtacatacatacctacgatgaattttaatttataaattaggcaccagtaagaaattacccaccaccatcattaaatagaatatcaagtactgtatgtaatgtgatgaggatcctctag

SEQ ID NO: 457904 - DNA, 274 bp, Homo Sapiens
tagatttagataggcagagcctgggcgtttacttggttgagtggctggaccagaaaaaggctcagctcaagtccagcacctgcggacactacccggaaatgatagatggtcggctgatacctatgttcggccacttatcgctgggtgagctatcgcgaaagcatgtgcgtgaccggctttcccatacaaggtcgcacaagacgatgcgaccgtcagagctccttagatcatgctgacatcgtagagataggtttgaatcaccatgaattctgca

SEQ ID NO: 457905 - DNA, 224 bp, Homo Sapiens
tgagtgggcaccatcccatccacggagggcctggatagagcaaacaggtggaggaagaccagaatccacctgttctggagctgggacactcatcttctcctgcgcatcagagctccaggttctcccggcttttggcctcagactgagagttacaccttcagctgccctggttctcagccttgggactcaaggctgaatcacacaactgcgagctagacagatcc

SEQ ID NO: 457906 - DNA, 438 bp, Homo Sapiens
tccttttccttatccagatttcaactttttgctaaatgtttaggtgctagacatgctgtatttttaattagcaggcaccagttagtggcttcggtgccatcttaagtggaaagggcccgttttttgtttgaagatgatcaatcaaggtggagtcatttttttatcaagcgagggttgtctcaatgtgttctttcctgggggaacaaggcagccagagatataacagagcaccatctttagatccaaatctatcagttttaaaatgttttccttgcatcaaggtggttctcatggagtcctgtgtccactccccaagtccacctagagggctaagaaccagctgtattgaaactgctctgttggcactgtgctcatttgattataactgctaatactggcacacacagcctgcttctatattccgagtcgtgggcagaa

SEQ ID NO: 457907 - DNA, 532 bp, Homo Sapiens
aagccccatgcttggatgctgttggtttccagcactttgggttcgaattcatgttcgacctcataccagctgccttacctctctcaactccatgttacctgccctgagcctccctgatgtttcttctctatgaaaactgatacaaaggtaggtgaaagttttcccatggatgacacctactttagagattttcagcaagaaccatagagagcatgtagaagcatctaggaccgtgtcggctgcacggagctatctccttcaagttctcttagtcccctccttacacacagtggacagcatggactcagagggcctccctgatgcatgcatgtgctggtctcagccctgtgttccccttgaactctggcctgctcactgtcctcttgtagctttggatgtccgcatccaagcccatctcactgcacccttgagactcagctctgggatctcttcagctccagtcctctaactcagctctacatgagccagtgacctcagggccacactaaggagtttattgcctgctcctgtc

SEQ ID NO: 457908 - DNA, 239 bp, Homo Sapiens
tttcttgcccacgactcgaaccttcccccatgacctcatcatctacccaggaagacagacctttctccacagctatgtcataagggctgtggtggagatgccgggtgagtgctatagaagctgaaagatgtgatttattccatattctacagagtcgggagggtagccgacttcaggtagaatgtgccttttcgtcccgagcctttttgaaggaatgagtggggagtgggatttccctc

SEQ ID NO: 457909 - DNA, 313 bp, Homo Sapiens
aaacatctattagctgtgcctctagtgtaacaaaatttaggcctctctaaagtacaaagtaagtggaatgcttgagtgtgggaggccattagggtcgcagattttaagaagtattttattagatttagggtttgggattagattagatgaggggtaataaatgattgctagggagaatgactggatccgggaaccagaaattaacttgtaggtagttctctttggaatttaaatgatccttggagagagtccagtccttatcttgaaaaaggtctgtttaggtgtgtacatattacgaaggtccgctagcagc

SEQ ID NO: 457910 - DNA, 364 bp, Homo Sapiens
cccgtaatatgtaaccaccaccaccaaaagactgtttagtattttttgtattatgactctctgaagaaaaaagttatctccactgcccagactcactactattttcagaagaggaaagaaaagttaatgcactcttcttctgtggacttcctctgagtgacaggtggatatgttccttgtcttgtgaatctaagcttgaagtagcagaaatttgttttactatgctggtaatttcttctctgctagaattttacatgatgacagctattcctcttcacattcagtactcctgtagatgtgttttaagtaactttaccacataatttttgaaaaaggaagatatctgctcgataaatgtgtacta

SEQ ID NO: 457911 - DNA, 515 bp, Homo Sapiens
tcctgattctcagcccccagcttctgaagatttagaggtcgatcctccagttgctgcaaaggataaaaagccaaacaaaagcaagcgttcaaagacccctgttcaggcagctgcagtgagtatcgtggagaagcccgtcacaaggaagagtgagaggatagaccgggaaaaactcaagcggtccaattctcctcggggagaagcacagaagcttttggaattgaagatggaggcagagaagattacaaggactgcttctaaaaactctgctgcagaccttgaacatcccgaaccaagtttgcctctcagccgaacaaggcgccggaatgtaaggagcgtctatgcaaccatgggtgaccatgaaaacagctctcctgtaaagagcccgttgagcaaccaagagtgaccagaaagagattggagcgagagcttcaggaggctgcagcggttcccaccacccctcggaggggaaggcctccaaagacacgccggcgagccgatgaagaggaggagaa

SEQ ID NO: 457912 - DNA, 210 bp, Homo Sapiens
caccgcctcgctgactttatctctcttccctgccgcctgcattcatcttcccctcctgggcctgggcttccccatctctcttgctcctgcctgctgtgacagctaattgcaggatgcatttttctgcctcccatctccctatttgcatgtctccctacttcctttcagggtcattttttgattaaacctttatacttttattgagacaaa

SEQ ID NO: 457913 - DNA, 565 bp, Homo Sapiens
  misc_feature (173)..(173): n is a, c, g, or t
  misc_feature (392)..(392): n is a, c, g, or t
  misc_feature (395)..(395): n is a, c, g, or t
  misc_feature (476)..(476): n is a, c, g, or t
  misc_feature (511)..(511): n is a, c, g, or t
  misc_feature (531)..(531): n is a, c, g, or t
  misc_feature (542)..(542): n is a, c, g, or t
cacacacacacactttccaataccagtcggcattacccgccctttggtttcttttgctttggatttcagcccccatatcatttctggtaacagagcacagcaatagaatttctgggaagcagaccttgtgaatcgtgcctgtgtcttaattcacaaagggtaagtgaatgccngttgaaaggtgtttcatacacttaccccagaaatgagagcctgtctcatgcaggagtcgggaggcagcgatgtcagggaactgggactatgtctttatgactgtgatggtggtaaccaagtggggtggtcccctctgggaggcttgagtaagaacgcaaaggtttgggtcagtgattaggaagactataatatgactttgtgcatgcccgggacgtgcnctntgttagagaggatgtgagcagcttagtcgctcatctggccctgtgattcaggcttatgggagcgttaagaataacagctgntccaaatggcctagacatggttaatgccaatttgnttgctagtgggaaatcctgnatttgcttccntttctgttgatccactgctactt

SEQ ID NO: 457914 - DNA, 394 bp, Homo Sapiens
aataagaattccggctgatttttgtgaggcctgtttaaagttgactttactttgccttttgtttttctcaattttgtctagaaatctttctgactttttccatctcttgcttcaaagtaagaggggaactctccttgccgactccaccttgtaggtacatttggtgttttgcactgggaagaaataggatccatccttagctgaggcttgaggactgatccagcctctcatggcttccctccgaagtaacttaggtttgagggatctatatgtgaatgtcataacttactttaaacctctagtttcgtgctttcatttattaaggctgggtcaccaaaatctttgttttcaatttatcagaagccaagtgcatactagcgtctgtgtgttcccg

SEQ ID NO: 457915 - DNA, 624 bp, Homo Sapiens
  misc_feature (472)..(532): n is a, c, g, or t
agtagatggagtaacctctaacctgaggtcagtcaagtgtccttgccttttattaagaggggcctctaactcactctgtcttaggagaaactccaactcccctaagttgggcctctaacccaatcccatttgttactcgggtaccccatcacttacccaaagtcgtccaatcagtgctgcagtctatttctttggggttggggggatttcttcagtatcatcctttctgtggtttgccagaaatatgttacaggaccccaacacttacgcaaaggtagccgttgggtcaacgtttctgcactatagtcccttctgtggtcaccagaaatatgttacaggaaaggggtcccaattcaatcctagagggtaggaatggccaactttctgagaatgcaggccagtaagtctcagcctcattttcccaggcctcactcaaaatgggagtcgctctggttcaaatacctctgacacnnnnnnnnnnnnnnnnnnnnnnnnnnnnnnnnnnnnnnnnnnnnnnnnnnnnnnnnnnnnntacagactccccaggtttctataaaaattggcaaaattatgcaatttggagagtactgtatctcctcagtcacattttgcacttcacttttt

SEQ ID NO: 457916 - DNA, 398 bp, Homo Sapiens
agagagagagagaatgaggatattgaagtatagagatggagatgagagattcaatttaagagatacttgtagaaataagaggagatggtcactgaatgtctagtgtgtgaggaagtgaagaattaatacaagttactgatggtgatgtcctggacctagagaagaagtcaggaaaagagttgttggaggaaggagctaatgcatattgtttgggacatatggtaggtacaattgaaccgtagttatatactgtcttgtgttgaaactttgagataattcaggtgctattctttgcttttcttggatcgtacagagattcctttcatgagaaccttcatgagagccctctggacaggcacggcctgagtagagacttgacagtcacactgtgacgtgac

SEQ ID NO: 457917 - DNA, 551 bp, Homo Sapiens
agccactgtttgccagcagtttgtcaaatagcagtaaataactaaagcaggtatcttaggctatactcacagtaagttaaagaatttagtggttatttccagtaaactgatatgataatttttcggcaattatcctccttgtaaattagctgaaccacagcttataatgcctttgactttgggttgctctgctaaagatttaagcattctgagctacttcattccccttttagagtcgaactacacaccttgttgaaatttaaagattagcgttaacatcttttcgagggtgagttctaagcaaggatgccaagaaactcccttctaaaagacaaagtcatggcatccatgttttggtttatactataaaagacacttgtggtaagatgtgcagttaccagtgttcccccagaatatagtttccacgacatattttaacagagaatgcagagtaaatgtgggggactactccacagatttgagtgaagaaagaaccacaatggtatcactctgcactcctaatgcagacatctgtatctctgcagattcgt

SEQ ID NO: 457918 - DNA, 521 bp, Homo Sapiens
aagctgtgaggactgatacagggaagggactaacatgtgctagctccctccgagaattgtgtcattgatatcacagcatacaggccgtgttttctgttgctgttctctactgcagccacagggactagagctacaaatggtctgttgtttggattttcgcgggttttctcttactccattcttctgcattctcagcctcccagagtactgtgattacatttgtgagccactgcgcctggcctgctggctttttttgaacctgcatcagcttcagtggcgtaagttccaacttcgtcacatgcggaattctgtgctgttgagcttgtcttagggcaggtggccctgagactctcccatgactctgcgcctcttccttggctgctgtacgcacagcacgtcagggtgaggaggggcctcagagatcactttggtcctgggagactccctctgtgtcctgtgcctcatggtggggcctgagagagcagttgctgttttgtgttttcttcacagtgggtgtattc

SEQ ID NO: 457919 - DNA, 467 bp, Homo Sapiens
aaacgataaacgggctgtcagttttcatctgagaggtaagacagatggcaggcgtaaatgcagaaggcagtcatgaactttacaaacaattgaaagagtctggttccctgggttaccacatggaagtctacctgccagatccctgcaatgaactgtgaaacaagcaagaaatacattttgttacattattcagatgcatcggttctttattatctcgttagcctactttgtcaaaacattccataatctcttctccaatcttcttttctcccaactccagcataaagagagagtttatggcccccagacataaattatggtttccatcttcgttaaatatacctctttccaatctctcacaaccccacccccatcattaacccctatcaaaatcctgcttcattcaaggtcaatttcaagccccttctcacctgtgaagtcttctagagccttcacagggggatcct

SEQ ID NO: 457920 - DNA, 449 bp, Homo Sapiens
ggtactgcttcagcactggcctgaaggggagggtgaaaggtagattaagtgactctaccttcacctgggcccatggggaagagtggaacagttgctggcagctcggcttggggatgtcgggccactgggttcgggtggttcaacggtagcttagccttagtgatggagtgtcatagctatgcactcccagagcaagagacactccagccaaagctccatttccaagacggcatagcgcagtagctgcgcaggccacagagggcaggtcacactggttgctctttttcttggggaagcacggctatgtggacttcaggcaggtccctcagctgggacttggctcctgtgaggactacatgagactccatgggtgaggtctgtagctgttcaaggtgttgatggggcttgctgggcatccttttgtgtaccacttctacccatagacgaga

SEQ ID NO: 457921 - DNA, 729 bp, Homo Sapiens
  misc_feature (704)..(704): n is a, c, g, or t
aaggatccccctgggtctagccagtggtaaaaagatgtttgaataacaggaagtactgtgcggctgaagcacactcgaagagaaaacacactggaacattgccctttgtaggcaacctcagggaggtttgcctccacagtagctggctgggctctcactaaatgacaaagaaaccacaagaattcctcaagtaattcttcactttcaaagttgaaagatcagttggagcttgcaggtaattttcaaagttgcatttagcacttaaagaaatctattaatgccacacatatctaaaccgctccaggtctgcaagcagcgacacagcacacgcagtgcgccctggctagaccaagccctagccaaacacagctcattcacgcagacaaatacacaccaacagggtttcgggaaacctgctcttgagatatttttgtggtgacatttacataggcaggatgctttaaaagaaacaaaaaagaagcagaagaaaattcagattttgcagactttagaggatcttgtcacatgtatttttaaagaacacatcgtcccgtattccagggatatgccctggatctggctttgactggctgtcctttacattttctttctccaccatcaagcaaactacctgtttatctccagatgcctagcttgcctaatggaacactcctttaaccgccccaaaatgattgtcacagtcncgtcttccgtcaccggagtaattca

SEQ ID NO: 457922 - DNA, 507 bp, Homo Sapiens
ggtgctatcattatggggtgtgtgtgggagtctcatttagtcactaggatttgaactgggcttggttggtgggaaggctgaccttgatataggtcagtgcttgctaactgggtgaggcacctgcctgcaggggcagatgggctctgggtctgaggtctgcagttggggtctaggtgtgtgaatctgcagaatgtctgctacgattctgataagtgaaagggagggcattccaggaaggcagtatggacaaaggcagattcaggcattcagcccagggggtcaggatctaactgaggaggacagtatgtcagggctagaccgtgagacttcgtgcagtaggaaggactgtggtgtttagctaagagtcagggtaacaagtagttctaggaggatgacctgagcaaccttagatgaggtttggactggataattccttagcatttcattctaaataaagcttgtctgagtgacctaaacggggaatggagagagtgacacgggtcaaag

SEQ ID NO: 457923 - DNA, 401 bp, Homo Sapiens
cttaattcttatttctacttaattagcatagactataagctccatagaacaaggacaatgcttaaagctggtgcacagttatctatcttcccccacattgaacagcccagaaaaggcctctgccagtgtgcagttagctcaagcggattggtggctccaccccgacttgcgctttcctttctagctgtcttttcttcatggcagcaccatgctgctgactcacagtccaataccatctccaggtgaatttgagagaacaccccggactcactcatcttgtgctcctagttggtttttcatccagacgggatttctgcactaaatagtcccctctgacctcaatatgatgctactccctaagtagcctaatagcacaggggaggagttgatctgaactgccg

SEQ ID NO: 457924 - DNA, 522 bp, Homo Sapiens
acagcctcttgtttagtgccccgtaagtgccaggaactgtgccagatgcttgagatgtcttttgcttaatcttcacagccaccctctggggtaagtatcattagccccatttgtgggagaggatactgagcctgggggaggtgacttacacatggcagtggtgttggggttcacaccccgtgctgcctgaggtcaaagcccttcctcctgagccccactggggcagcgttcagtgcagcagcacggagcctgttctctggaagcagactgcccgggtgccaggtctgcacccatcatgtatgggctgggtgaccttgcagcatggaatcacctctgtatgcctcagctttcccccatctgaaaaatgaggccaatgatggtacttactgcatgggttatttaagggattatgttattgaatatgtgtaaatcgcttagcacattgcccagcatgtaacgaagggtgtgtaactattagctcaatacaacgactatgaccatcgtgagctatacctgcctcac

SEQ ID NO: 457925 - DNA, 749 bp, Homo Sapiens
tacccatctgtcttgacaccacctgggaaatccagacctgctcactgtgccagatcccagctcctcagacctcctgagagacctggctctatccacctgccttcacttcatatcctcagaggtcatctaccacatccaggtctttctagatgagcctaatccggactccttgggcctcacctgatagatccgttctacctgtgcctgacctcaactgcaggacagtttaattggtttgaccatggctgttccggtcaacctatctttgcatgctcctggtttcatagatgtcacctgacaaactctacccaccatgcttaacacagcttctcggtcttgggatacaaaccagagcctgacctcagtggctcagaccttaacctgtgagacccaaaaatacatacctgtgtctcaccttaacccctgaaacctcgcctgctagatctgctctacgtacctcgaccagacccaggcttcatccacctttctgatggatgcggttcgtcactccctttgtctgaccccatccctttgtctggtctcttcccaggggacccaggctcacctcaccagagctgctctagacatcgccctaaggacacagctccaacctggacccaatcacagattttcagccctcacttgtcagactcagctcgacctgtctgcctatctttagctccaacgtccttacctagactggtccagttctgtctatacctgagtacattcgtggactcactcagcct

SEQ ID NO: 457926 - DNA, 502 bp, Homo Sapiens
cacaggcaacactttgtccccaacaaagaagcctcacattctacgtctgcagaaaccccaatcctgactagtactgtatggctgccaagaggaacatctgtgtgctcaacagtacacaaaactggctcttttcttttttgtgctttctgttgcctttgctgttcttgcttgcttgctgtttttatttcctagacaataaactgtgtgattgcttggtaaggaaatggtctttcattgctgcttcctcttcccttttatttgtttgtttgtttaacacaacagtcaaacaactacatctgccatccaccgttactttaaggccaaaccctgaaaacacagtaaagtttattttcagatttcatgtaagcttagatctgtgattagctgaagagtgttgactttaaagatgaagactcttaaaggcatattaataaaaaggagctatccaattctgagtatacgtttagaatgtcatttatgttgttgagagataatcctacac

SEQ ID NO: 457927 - DNA, 560 bp, Homo Sapiens
ctcactgggcagtggctgaaaacaccagaaaagttgcattaataaaactgcatatagtctaacactgcacagagtgctttgatacaagtatcctcttgctacttcatcttttcaatacatgctttgcaaggtttgttttcaaaaagacattacaagttggcaggcttctgcttatgaaaaatcaatgaaatactttcccttcaactctgatgaaacctgccatatacctgagatttattcttctcaaataaatcaaacataggcaacgtaacactctggagtcaacacagaacatgccagggtgagttcaggcaatgaaagaaccacttttctgcaaatacatggtagaattgaagactgtttgtagctgtcgataatttgtaaaaacatttccaatgttctttgaacaaaagattttgattcagccaagattacagaaaggaatcatgacaaagtcctaagtgtacctttgtgtgtatttcatctgctcagcttttgcaggtgactgtggtggtggttgcctggatatggaattcctttgccctcaaatcttcacatgc

SEQ ID NO: 457928 - DNA, 671 bp, Homo Sapiens
  misc_feature (48)..(48): n is a, c, g, or t
  misc_feature (54)..(54): n is a, c, g, or t
  misc_feature (63)..(63): n is a, c, g, or t
  misc_feature (85)..(85): n is a, c, g, or t
  misc_feature (111)..(136): n is a, c, g, or t
  misc_feature (140)..(140): n is a, c, g, or t
  misc_feature (144)..(197): n is a, c, g, or t
agaagaaaacagctttattgaagaggcagggttacagctccgtgactncccctncagagcagngctcccccataggcagagaggngcagctcagggcagttttgcagtttnnnnnnnnnnnnnnnnnnnnnnnnnntatncacnnnnnnnnnnnnnnnnnnnnnnnnnnnnnnnnnnnnnnnnnnnnnnnnnnnnnnttttaattgcatacagattaaggggcggtttatgcagaaatttctagggaaggggtggtaattattgggttactgccacggaaaggggcggtaactccctggtattgacatggcaacggtaaactgacgtggcaccctggtggtcctatctgttggaaagctgctttggccctgaccttgctttagtttgtcctcaatctggtctggtgtctgagccccgcctcctacctcaatcccactcaaggtgagcttgatatcctcttccatccaccaccaagtttgtggagaacggaaaatagctcctcatgatatgataaggagtattacaaagggcagcgaggcagggacaggttgcctgggtcagcattctggtcccccgtggccttgatcccatctcgtcacgtctctgggggtatcgtggtctcggtaatctcaagtctcttgagatgccaaaagtctgaaacccccacctcc

SEQ ID NO: 457929 - DNA, 419 bp, Homo Sapiens
caacgcaggtatcacaacgaaaggtgcatgcacagtcatgccaggtgtttactgtataagtgagggcattggattggaaaagaatgtgaccctgccacttggaatagagaggtgtgggaagactctgatgacgttggggcactgagtttatatactctgataagtatttttgccagaggaaacagcttacccatccccagtagtggcaatatcgcctccccagtccatgctgccatcagcctttccacctttgtctgaggagataaaccctgcactgcctgaggcaacaatgatggcctcccctgaggtagtttccaggcaagataatgttgatcctcctcaggagctacccccaacacccctgtttgcttctagacctgtaactagactaaagtcctgatgggctcctagaggtgaga

SEQ ID NO: 457930 - DNA, 464 bp, Homo Sapiens
gaggtctcccagcatcttaaacatatgtcccaacccaaactcgtgattctgcctgtaatcacctccccgtggtcttctcacgtcgccttcccttcccttcagccttctcgattcttccagatgcccaagccaaaatcctcagggttgcccttgactcctctctttctctctcacctcccatcctatatatcaacaaaatttcttggcatcatctaaaaggaattccagaagttgtccatttctcaccaccttggagaggtaatggtccaagtaacattatttcatatctgggttactgtctcctaataggtcacctagtttccattccttaggccctattgtacaggttactcttttggaatatttaatccaattatatcattcctttgtttgaaatccctcataggctcccccttttgttcagcataaaagccagactccttcaatagccataaatggcttac

SEQ ID NO: 457931 - DNA, 367 bp, Homo Sapiens
aaggtgaggggccaggcactcgcaggctgaatctcaggagaggaaatccatttttgaaaggcaagtgtgcagtttctgcggctttgctccccctctgtctcagctcatgagtgctctgtccctttgaggtctctgccgcacccactctgtgaacagggactgaggagggcccgacacccccgcttgttccctcacctcaccttcctgtctaccccaggaccccaggaaaggcatgtgccagaggtgtggggagatctggaagataactgcctgcccttctcctcccaacccaagaacacatgtgccccgtatgtgcgtgtgcacgtatgtgcatatgaggaatgcagattcagctgggactctgctc

SEQ ID NO: 457932 - DNA, 760 bp, Homo Sapiens
actccctcagctcattgtgagttttgacaagttctgcatccatgaacgccagatgtaatacaatagggaatttcaaaggaaggattacacacctaggctctgccctctaggattttaccgtcttacaagggagttgagacaaaagtgagaaaatactctggcaacttctcccaacatcacaactttgcaattctcataaattttgcttgatcctagggcatgaccaaggcagaggcaggcaggtcctacttcatgtgggagagaaggaaggaagggtaggcagttagagtgataggtttggaatcctgtagaaaggagagtgggcagagccagagtgaggtgtctgaagcttgtcgcacaggcagtgggaagggtgggttggaggtttctgagcaccagaaaactttgagcattgttccggaagaggcaagcggcaggcatctgcaccagagacactgccgggtccgagtgagggcaggaggctgcacgagggagcctccctgggagtgagcgatagcttcgctatgggaggtgggttcgaaaggtgcctgagattttcatttgaaactctgttgaagaggaattggcaatagaggaggaaatacaaatagaggcaagattggtttcgtcttaagcactgaggctgttgcgcagctagtggaaactccctgctggagtgtacctgcagatcaactcaagctgcccgatgtatctctgcacatcaagtagagccgtctctcctcagtatagctcttccctc

SEQ ID NO: 457933 - DNA, 413 bp, Homo Sapiens
tgctgtgggtagtctactcctaatgtgacacgcagcatgcttggtaatgttaatataagtacaagcaatattcctagtgctgctggtgtgagtgttgggcctggagttaccagtggtgttaatgtgaatatcttgagtggcatgggcaatggtactatttcttcctctgctgctgttagcagtgttcctaagtgcagctgcagggatgactgggggatcggtttcaagtcagcagcaacaacctacatttaactcttcgaggttcagagttgtgaagttagattctagttctgagccctttaataaaggtagatggacttgcgctgagctctatgaaaaaggtccatgctgtacctggctacagcagttgtgctgattcactcagtgtatggacgactgctacagtattatcc

SEQ ID NO: 457934 - DNA, 517 bp, Homo Sapiens
gatctttacaaattataccaatgtatgaaattatcacacatagctccccaatatatatatctatatgtatcaattaaaattaataaggtcgtttcattttcagtatgacagagacaatgctatgtgttcatgtcatcccgtttctctttctttctgagaacagagttagattacgtttctcagcctcctttccaagttaggtgtgggcagaagtaatggatgcgacttctaggcctgatccttaaggaactatctactgagttctctgtatggattactaccttccactgtaggctggctgcatgcagaccatcccgtagaggactccaaggcctaaggcattgaggaatcactagatggaagaaggctggttccttgaatcactgcttggagcagagattcttccactcccccggcacccacattaaattgctgatgtacagtatgaaatcaggttatctatttttcatctacgctattcagatactatccgggtaccgtatcccgtcactccggg

SEQ ID NO: 457935 - DNA, 542 bp, Homo Sapiens
  misc_feature (12)..(12): n is a, c, g, or t
  misc_feature (64)..(64): n is a, c, g, or t
  misc_feature (74)..(74): n is a, c, g, or t
  misc_feature (81)..(81): n is a, c, g, or t
  misc_feature (134)..(134): n is a, c, g, or t
  misc_feature (460)..(460): n is a, c, g, or t
  misc_feature (525)..(525): n is a, c, g, or t
cccaaacccggnctttgggaaactctgcctccttcccaactgggcctggcaaccctgcctgtgnccccgggcangaacctncaagtggctggcccaatccctggtgggaactcaaaagctttgcccacaatcangaacaggcaaaaggtctgggcgtcctatgtggttgtggctgtggctctttgtggtccacaggatttaagaactccttggagcatggcaggctatagtgtcggtctgtcttgtttgtgttgtggttcaagaggctgcctgactggcagtaagtcttgccacactggctgcaagaggagtggctccctggctgcagctgagagctgttgtctctgttgtcccagctatccatgtgactcagagtaggtccattgagctggcagtcaccagcgtggcaaggactcctgtggacactgtcctctggctcctctgacctagttaggaactnaggaacccagcctccactatgattccccagtcccccactaccggccacccacctgccttccctgnaccccaggacagtggct

SEQ ID NO: 457936 - DNA, 301 bp, Homo Sapiens
ccaaggcgtcccagggtctcgtgggcgctgttctctcctttggtctttgtgcagaacagcctggcagcctgtgccccccacacagactctgccatctcctctctggtcatttcccatctcctttgagactcatctcggacaccacagagactgtccttcccaagccctgctctcaggcggtttgggtccctgctgtgcctctgctgtgcgctagcacctcctctcccgcagtgtgtttgaattgctggtctgccccctgccatctccactgctctgacccagcaccaggcctcggggatct

SEQ ID NO: 457937 - DNA, 413 bp, Homo Sapiens
aaggcgtgggctgggtcggggtctcccggcccatagcacctcccacttccccacacgatggggtctccatttcggttggtgtctgccctgagactgcaagcctctatgggcagagcctgcatcacccccacccctgcccacacctcacattgggctgagatgctcagccaacttccagggaagggcctgacagccaatgtctgcagagtagagcactgctaggccctgctctcaccaccaagccttgaccagccttccttccatggggaggcccttccccccatgcagccagccctaggcatccatctccctctggtggggtgtccagtagcatggggctccaagggtctcccgtgaaggtattgagtgactaggagactttgagtgaaggtctcccaggacttcactcaagg

SEQ ID NO: 457938 - DNA, 277 bp, Homo Sapiens
aacctagtagctgctctttgcaaaggggctcccagccagggtaaggatctttcttggagggtctggggtttgctgtgggatctgatgactgcttacaggtaaggtgctcagggtcacaggggcagttatgcagcaaaatcaggggttacaatcagcagagacagaaactttcccaggaagctccctttctacccctcccagggcaaaaactcctggggggctgagcatggattcaagtcactggtgggaccatctctgaggcagcccaggccgtcgt

SEQ ID NO: 457939 - DNA, 364 bp, Homo Sapiens
cggctgttgttgctttctcctggtccagttatccccaggaagtgatccttcatttccttgctcatgactgcaggcttcaaggaagaagccagaccaggccagggtcagaggccccagtttcaacttcctctggctgcaaacaaagccatcaatcagagcacaggcattatttacacattccctaggagttgccttcttgcgtctcagagcaatgccccagcacgtagttagggaagtaaaaaacaggactggccctctgcggaataattatggacttcacccctatgagttgggataaaagggggacaatcaagggatgccgctggtttatgtccctttcctgacccagcccacgccttcgttg

SEQ ID NO: 457940 - DNA, 230 bp, Homo Sapiens
gaggcccaaggtaaatgggggcacgcaggtcaagtctaccctggaggtggcattgagattggccccaaagccagtcggggggctgagggcctgacctctgaggcatggtcaaaccagccacagctccgagcaaaacctagaggggatgagaagaactcggcctttcctccccacgtccttctacttcaacgttcttgggaattttcgcccccagctctgctcattctcct

SEQ ID NO: 457941 - DNA, 444 bp, Homo Sapiens
atatcagagggggcaccctccagcttgggcatgcttgctggcatgcgggtgccccagggactcgagatcctgttgctgaatgatcagatggtggcatctggggtggacactgaaggacgaggctggctgtgtgtgtgacagcagacctttctccctgctgcctgtgctgtgctttcatactgcagacacccagcaagtgagcgctgagttagattccagagagagagttcaagaaaatgcatagcagcagacaaacccctctatcgttaatagcaaagatttcttatttgttcatttgcaagatcctttgtcaaattcttctggccttgggccctttgatcacttctgtgtcctgtgcacttaagtctggtggattccttcttgcccctcagcactcagctctggcagccgtgcctcccccgtgccccgtctgatctctgggga

SEQ ID NO: 457942 - DNA, 420 bp, Homo Sapiens
ggaggtagtcatgatctatgacgccgagaagcagaggccccgaggtaagggcagatctagtttgacctcggccgtctccctgctcctccctcagatggcaaactatctcacccgccaggcacacacaggtggcggctgtagcaaacagcctcaggaagggacgatttggagacaaatgactaaaacgtgggctcctcatgtgcaccccattcagcctgtctgtgcttcccgaggtcagacgtcacacattgttttttggcttgttcttttgaagtttttacgacttgtcatgagtctcggcctggcttctgtttttcactgtccggaagagtgtggtccttctgcatttgaccttccttcaccctcatccagtcctcccagtgtggccggtctcatttcgtgtcgtcagctgggtcagct

SEQ ID NO: 457943 - DNA, 626 bp, Homo Sapiens
acccttattattagttcaccttatgaatgccaattagaaatctgcatatttcggcctttattttaccagtctaataggtagtttctataagtaaaaagtttccaacaaacaaaagacatgaagctttacaatgagaaacaagttttactgcagtgcctcttgctatttctaagcagtaaactggtccatcacctcttattcattttagataaggtaatcatatacaagtacaattccacgtggcaaaatcagggagatcttgcgctgaaagtgctggaacagcggctggtggctaagagccccagccctgcaggaagtcaagagtcataactcctcgggaacagatgctgtgggtgcagcagagaggagttctgggaaaaggagcatgcacgggaccacaggacagagtattaatagaaaagaaaacttaaacaacaaggttacaggttacatgttattttaaaaatgcttcaagaaatgtggcaacaggacacaagcctctccttaaacagttctgtggtataattctgacctgcaattactttatacaatcctttaaacagaaaacatgtacaatgaaatgtatttgttcatgaaacaaagggcacctgagtgcatgcacacag

SEQ ID NO: 457944 - DNA, 406 bp, Homo Sapiens
agagatcagaggggcaccactgtgtcctaggctgtcaaggaaagggtggggtaagggccgtctctaggagagctctaatgacacatcctgccaggaaattctgtatgctgttgtggcctcaaacccctctgctgctgtctgtccctgttcgcctcctgtcctcaaggtggccagggaccgctgggaagccaagccccgccagggcctgggcagctttctcctggtggctagaattcccccacagcaagactatctggggaattctcttgaaatgtttgtgcaaagcaaatgttgttgcagttgctggctagtgtattttttaaagcgtgttatggttttgagttatttccctgatgcccaggctggaagtgtgtgctaggcctagagagaggaagagccccaggac

SEQ ID NO: 457945 - DNA, 376 bp, Homo Sapiens
agaaaacaaacacgagcaggccagggacggatcctggagtttatgtcccaggggaaacagcatagtatattaagaagggaatgcaaaaaaaggaagggatgcaagagttcagggttactaatcggcagattaatgaatgagacaaccaacagagaacacaagtaaggcaataatgaatcttgcagggcacatgtttaattaaagtagcattctcaaggaggaatattagctttaaagagatgccagttcatttgaggccaattcgctgctctctttccccttttcactgttgctgccttaaagatatttatgtgactgcttaacagaggaaccagactatgtggatacagggactgatgggagatcaagttttaac

SEQ ID NO: 457946 - DNA, 172 bp, Homo Sapiens
gatttaattgcaaatatagttgaatgtctttctacctgtcagctaattcttaatattctggtctatctactttcctttgtggttcttctttttctcattactttgttagaatgctttatagaggaaagaatatcaaactttcactttttgtgggtatacatattttttcagt

SEQ ID NO: 457947 - DNA, 373 bp, Homo Sapiens
tgcagttgtagtgaggccactgtgaactaaaatacccctgaatgcagtcttggcttgctttctgcagaatgtccctgtaaagggtacctgagacagctgcagatcaacatgacaggatgttctcagctcactgcttttatttcacacacatctgaagctccagagccagagaagaggctgtggagagatgcatacctaataagcaccgagggacagctgcctggcccttctagatggaagggagtcatgttggtcctcagagaaatcaaggcacccatctttagcgccttcactcctcccccaactgcatctgcccctcctctcaatcccccatactcactcccctcaagctgccctcttgctgccttcatcc

SEQ ID NO: 457948 - DNA, 335 bp, Homo Sapiens
cgcacatgaacatgcacttgcctgggccagggctccctcatcatttaaggatgtcttctgattgctctgggatgcaggaagccacccagaccctagttgctggactcgctcagaggcaagaatgcaaggccaaaggcagcatgaggaaaagctggtaggggctgaaaccagcccagcctgcttcatgcttactccgctcaggttggcaggccctactgagacttgccaatctctaagtctccagcgtgtctgaagaggtaccccctgaggactcagtgcctgagcgctgctggaagacgtggggacacccccaaaggaggaaagtgtccttctgg

SEQ ID NO: 457949 - DNA, 369 bp, Homo Sapiens
gcccaaaacctctctgtcctggtgcctccccttccagggatgaaatctccttctgcatgtaggaatgagccccatttagctctatagctaacatgatggattattaggattgatcattggtattaactgctggtatcaaaggtactgatattgttgatagtaccattaatgctatgaattctgagacttagcactccattagcacctgcacaaggagcagcccgagtttggatggggaagaggtggtgcaacagcatgctcgagtttgggagtatggaagtgagatgaggcccgggcagccacctcaggagggtgcagtgccctctgggtggcccatgtgaatgatgtccttgaggctgttcatgtaaa

SEQ ID NO: 457950 - DNA, 443 bp, Homo Sapiens
  misc_feature (36)..(36): n is a, c, g, or t
  misc_feature (68)..(68): n is a, c, g, or t
  misc_feature (88)..(88): n is a, c, g, or t
gtctctcggtctaaaaactgatgccctagactgatnccctcactgaactgatgaggaattgagtcacnagaggggctcgatgacttcnccagggacacatcattagtaagcagtagggaaagattcaaactcaggtctgcctagccagcatgctgccctcctggactcattgagcctgttctgagcctgacacctgaaggaagcaggtaggataatgttgccaccaagtcattagagctcttcccagctgaagtcagcatgagaagtcggacactcttcagaggagatgccctcgcatctccatggagactgggtgggctttggcatcacagagtcctgtggtttcaggtccccccacttcctcgctctgcaacctcagtcagatcttttaccctttctgatccatttcctcacctgtaacattaaggggtgcccctctatct

SEQ ID NO: 457951 - DNA, 281 bp, Homo Sapiens
gaagacgcacgtccagatctaaatcaacccggtccctgtggggtggggcctgtcttccctggggcagtgagttcgccttttggtcaaggttctctgggtaccggtatggcgttcgagctcactgcacaggaagccagctacagggaggaagctcgtaggtttcccgtccatggcctgtatccctggggcccctgggttcttccctgggatggtgggacagggggacggtcactctgttggtactgaaaaggagaggccctcattcctagacagagacccct

SEQ ID NO: 457952 - DNA, 507 bp, Homo Sapiens
gggagctgtgactgcaggtgctttcctgagcacatgggacagctcgggggtacgtcaaaagggactgaatgcactatacgcttgcaggaggggttccagaaggtacatgctgggctggggcatgagcgagtttgtggccgccttggggacctgggaccccaactgtcctctcccctctcatgcatgtttcaaaatcttctgaaagaagctgaccccttggggtggggacctgaggggtccttaccaggaagaagcgtgcctgctcggctgtgagcctcacgctggcctccgagtccaggtggaagacagccaggtggtcctgggtatcctgggcagtgccccggcacagggtgctgtacaggcaggggtgcagggagagcagcccctgctggggggcccgctgtggggtgtgcacagccacgcccacctcctggcgggcatcctcattggcgtactccaccactagggcatagcggcctggctgtggcactgccacttgaagctgga

SEQ ID NO: 457953 - DNA, 369 bp, Homo Sapiens
gaccatgatttcactttcactggccgtttctcttatactgtaaaaacgcgcataattagcagtagttgatgtgcctttatgttagagtagagtcccgcttccttgctccatttgcattactgcaggagcttctaactagcctgaattcactctcttggactgttaatgtgcatacttatatttgctgctgtacttttttaccatgtaaggaccccacccactgtatttacatcccagctggaagtacctactacttaagacccttagactagtaaagttagcgtgcataatcttaggggttatatacacattttcagatgcatacagttgcgccttttatcagcactcctgtacttatcaaagcagaga

SEQ ID NO: 457954 - DNA, 461 bp, Homo Sapiens
agccagtcacaagtacttcgctactcggttttgtgagacatctgagatttgttgcaggactactcttccttgcttatcatatttaataaatccagcttagtaagataaccagtgttccctggtggtggttgcttcaacaggaggcaaccacaggagccaggagagcaggaagtagggtgaggcattgctttccatgcctcactctgtttcagtactgactctggctgtagctgtacctgcccaacccccaacagtagcttctgcttgggggccccttctttatgagctccaacaacatatcttcctcctcttgtcccttcaacttgggggcagtaatagagtttgaaattgctagcttctgccgcttcaatattcctcatttgttcccttatccttgcccattttctacacacttcccctcattaaagagtttttggggggaagttgtgtacatgggctga

SEQ ID NO: 457955 - DNA, 665 bp, Homo Sapiens
  misc_feature (335)..(345): n is a, c, g, or t
gcgttcagaggatcacgcacgccaggtcacaactagatgagagtatgtagaaaataggtgcacaggtgggcctgaactccggggtcatccacccacctcagcctcctaaagtgcggggattacaggcctgagccacctcgcctgggtcatattttttaaatacatttatctagttgatgggcattggggtggtttttacctttcggctattatgactaatgtagctataaacattggtgtatatgttttactattacagaggaataggtcagtggggaaattattctaagatacgggacacattttaggttgccataatttaaatgctggttgannnnnnnnnnncttttaacatagaacagtaaatttactagtagggagtggagaaaaaatgatttcacttcagttgtgtggagctggaaattttctactggttccattctagggaattattaaattagtttcctcatacacagttctcacattcttaatagctttccatgcctaagggataggacttctcccatcaagctgtagggctctatggcagtgtttcttaagggtcacgggaggagcagtagtagaggaaacatacatatggatatacttcagtgtgttaggtgccgttataaggtaccaagatgtgactggctgaggatctcaga

SEQ ID NO: 457956 - DNA, 529 bp, Homo Sapiens
gttaccatttcttgtctcggtgcagtacccaataatcaggaaattctctctcctctttacaagagataacgcctgataatgtggccactaccaccgccccgttatttggctaggcctgggtcctccagatgagacattagttctcaggttttacatagcccccagacctccagggcaaggatccctctcttcccctaaccttgtttctgcactaagagcaaagatccatagtctcaatgccctgcagtagcttcagctcccagtttccaaacatggcggcccacaaggcctgacctccaccacctctgggacctgacaggccttgcagcccagggctccttggtggatgagcctggttccctcgctttcacaccaactctgaaggcacccactcaggtgcccatgtccacctccagaattctctgagtgttccatacctaccctgttacctaacatacctaccctgttacctaacagaagtatgaatatacagagattctgttgtgacatgggcgtggggtcctctaga

SEQ ID NO: 457957 - DNA, 453 bp, Homo Sapiens
ctctaagctttagtccctgccttgaatgaaggtgctggggaagagcccaccaaactggtggataactcacccagtcttgcacttttattcaaggcagggactaaagcttagaggagtaaagggacagggacttgctcaaggtcacatagcttggaacagcagaatccagagaaggactggggcttgctggccctcatccatgggactgtccagccactgtgttactgaaaacgtccccataatggtttcaataaagtcctaaccaggaacttggcacagggcaaattctagcctgctgccaatcagcaggaaaacagctcttatgccagtgggcaggaagctgccaaggtgtcacttctgctcagagaaagtggtttgtgtatttgctgaactaatatgttcaccctgaaggtacagagatcaactctatctctttctggagggtccctccag

SEQ ID NO: 457958 - DNA, 502 bp, Homo Sapiens
attccccgggcctcgatcagttcctggcttaatacatattgttgaattgaataattgtatctggtattgacttgccatccttcttcactaccagagaaataaatcattagtttggtaaggccaagagaaagtctgttcattcatttaacttttgtttttcatttagtgctgaccatgatgactggcaccgtgccacactggtccagatgtcatcttttcatactgccagttcctgccatatgatctgcttctgtttttcctgcttgtccttgtgttgaaatgattgattgcttacttccgggcttttaatatccatagccaagacatttccatctctttctgactgacattattcccgttcagattttaagcagaagtatcatctagtatatttctaaaaatctatcaagctgtattcctccgagttttacaatcaccgaatgctagaagtgtctgtgtgtattttgccaactgctgctcctccgagttgttgtgacatcgc

SEQ ID NO: 457959 - DNA, 524 bp, Homo Sapiens
ttgttttaacttccgaactaaaacccctgatgatttcagaacactgtaacactggacagtttctcacagcatggttgtgaggatgaagtaaaaagagaatgtaaagaataagtgttttctttgtaagtgtggtcccggtatcacttatgcatatgcatgtccctctgtataaagaagggtttaaactctcgaagtcacctataattgcagttaccctttcgtctgcccactcttgcattttctctgcctcttggccaaggcagtgacttggaggaaattcacttggtggaagagatatggaggtgagaaatcggactgagtagaaggcatcttacattacacgcagaaattaaaaagcacttacttagtatcggggaccatacgctggcatagttctgtgttagctcattcccacttatgtaagtcgcccccagcagagcgtaaaacattaagtaaccttctcctccctctttgtctttccgattcctttgtgacatggcgtcgagggatcctcgagaacgacc

SEQ ID NO: 457960 - DNA, 581 bp, Homo Sapiens
cattgaatgccagctgtggagatggggtgcatatcagatatataaataaagctcaggtttgctagggaaccaggtatagagaaaaataagtctgatatgaggaaaattgcaccatttagagtagttatgccgtagagaaaatttccacaaactaggaaatgtagagagttattctatagaatactcaaaagaggaaagtatgtgatttttggaaacaggaaaatcttcaaacttctttcttcacttccctttgtgtttagctgaccctccaatgtgatcattgcctttggagtttgggagaggtacgggaagtggcctgatccctgcttccatacttcactcctccatccatccttccctccctcttcccctccagctaaatggacaattctagccaacattgagtcactcaataagtctcaacagtgggtgtgtttgctgagattgtccagcggttgagcagtttggtctcacctccctcgctagttgagacccaaaagagacaataactttttcatggtctttgaaacataatgcttattttgtgacatggcgtgagggatcctctagaacaccaccac

SEQ ID NO: 457961 - DNA, 442 bp, Homo Sapiens
  misc_feature (423)..(423): n is a, c, g, or t
gatgtccctttaattttacttttgtcaaaacattttcaagattactttaatttttacaatatcatttaagggaaaactagtgagtttgttgaagaaaacaagaaacagatttttttaaagccattgaccacgaaataagcattatgtttcaaagaccatgaaaaagttatttgtctctttttggtctcaactagcgagggaggtgagaccaaactgctcaaccgctgggacaatctcagcaaacacacccactgttgagacttattgagtgactcaatgttgggctaggatttgtccatttaggctgggaggggaagaggggaggggaaggatgggatgggagggagtgaagtatgggaagtcaggggatccagggccactttccccgttacctcttccccaaactcccaaagggcattgttncactttgggagggttcagt

SEQ ID NO: 457962 - DNA, 488 bp, Homo Sapiens
ggctctgggaaaagccaaaccctggccaaagtccaaacttcctgaaaagaaagccagcccaagaggagaaagccgtacaatcccaaagtcccccccatctgcatgaacggtttgatcagcaaccaattaatctctcactgcagcaagaaaagaattgcccaaagataactgaatcgcatgcacacaaaaccttaccaaaggctcagggtcaactctgataaggccctttcttctagagttggtgggaagaaactctgctggatctactcacctgcagatcttccagaacatctatctgtaactgatcagagtgatgtctccttggaagggcctctgaccaccactgcactgagaacacggcgggagtgagaacacctgcgcacccaggatttcacacttagccactagattcttcacagctaatcagggaaatgccagtgttccccaggtgaaaatgtttgggtgcctaatgactggtggagcacttc

SEQ ID NO: 457963 - DNA, 887 bp, Homo Sapiens
  misc_feature (14)..(14): n is a, c, g, or t
tgaggacccgggancaccagatggtgtttgatccatacactcaaatctatatcaccagggaccagacgatccagaccacgtgcttccctccaaaaagagttcgcccagcacaatcagtatagtcgctccgtccaccctaccatttctgacagtagcttgaaagcagtagagccacgaacaaaggatgccatgggaagtgtgtcggcaaagacccttgcagctggctcagcagcccacctgggattcaaacccagactcctgcctgcccatggcatcctttgttcgtggctctactgctttcaagctactgtcagaaatggtagggtggacggagcgactaaactgattgtgctgggcgaactctttttggagggaagcacgtggtctggatcgtctggtccctggtggatataggatttgagtgtatggaatcaaacagccatctgggtgcttcccttgggctgggctggctgcatccagctcaggtggggtcatatggagaaggaagatcacaccgggactgctgctagcttctctgggtgtcctgggccagtgccagtttccttagaggtccaggatatctgaaaattggagcacacagtctgagcagacccaggcctggctctcctccctcgcatgttggctccctgtgtggactaggtgaccctgtttaccaacacacacaccggtgcgaggctctgcagggaaggagagccacgggtatggaaggggctgtgtgttccccaggcaggctagctgccgtaacacgcagcctggcatctgggtggcttcatgcagcccagttcttgcagtcctgcagggtctcccgagggttctgccccctctttttcttgtgacatggcgtgagggacctctagaacaccacc

SEQ ID NO: 457964 - DNA, 384 bp, Homo Sapiens
atgctgtctagaggatccctcacgccatgtcacaaccttgagcaccctgcacctcctgcaaggaggggatgagaaaaaggtgaacctggtgctgggggacggccggtccctgggcctcacgatccgtgggggagctgagtacggccttggcatttacatcactggcgtggacccaggctctgaagcagaaggcagcgggctcaaggttggggaccagattctagaagtgaatgggcggagctttctcaacatcctacacgacgaggctgtcaggctgcttaagtcatctcggcacctcatcctgacagtgaaggacgtcgggaggctgccccatgcccgcaccattgtgacatggcgtgagggatcctctagatcaccacacat

SEQ ID NO: 457965 - DNA, 524 bp, Homo Sapiens
tgaggcgatctagaggatccctcagcccatgtcacaacctgtactgaattttaaaagtgcactgtaactgtcaaatgaaaaccagaaccacaacgaagagtccacagttgttatctgcctctcatcgtctgcttttaaaggctggagtgggaatcatgttatacaggtgaaatgggaaaagtcaagcccacatttgtagactttgagacacttggttttacataaatgagattgatcaaacagttgaatctgctcttgccattttgatctatccactttgagctgcaatacaccaacctttcttgttttcctcattcttaatgttgcttcatggtgaaccacattaggtaagaatttattaagtgcttctgatacgcctggtagcattcagggagccggagaactccagcagagttcagggctgggcacatcctatcagcctggagctctgctccctgggctatttgcacgctctatctcctccctccttgaccctttcctctgacatttgcctctgggaccta

SEQ ID NO: 457966 - DNA, 432 bp, Homo Sapiens
tcacgccagtcacatattaagtaagaaaattactgactctcgacttctcactacctgttctctttgtttcgtcttctccaatgtctgtccgctatgccattatctctaccctcatgagagtagtacaagtgcttcagaataagaactaaacttcccaggctgtcaatgtataccaacataaagaggtcatgagggatcccaaagcactccaacacccactttctctgacactgctttctcccaccaagaagtgtcaaaggagaaccctatgttttcagtagtaaaatgccatctcctccatgaggggataaaagtgatgccaaggtactaagtccatagccatgtctctctgggcctatgatgctccattgagggagttcaagtgggtgaattgtccacaaagcaagactcagctttgtgaacatggcgtga

SEQ ID NO: 457967 - DNA, 352 bp, Homo Sapiens
tgatctagaggatccctcacgcccattgtcacaaggaaaacttcactgattgtcaaccataacgggtaccagagaaaagggattcttcaccatcacgccaacttctgagaaaatcctaactttagagaattagccaaattcagttagattggatttagggctcgttaatatctactgtaatgggaacggtttcccaacacaaggaggctgttggtttgttgtggaagtttcagctcagtaatggagggtgagcaggtgaagaatatttcagatggggggcaactcacagtacacacgtgcagtgttcctgagctgggtgcccaccaggaacggaacacttaactggaaatgg

SEQ ID NO: 457968 - DNA, 232 bp, Homo Sapiens
ttctagaggatccctcacgccatgtcacaaggcactgttgtatgcaatgcattgacttgtctcttctgcatccagaatgattttggttctatgccatcctcaggagagttgagaagtcactcccatcagcttctgtgttctgcagagtagcactgcactgggaaaggctgcaaggttatttgtgcctgtctttccccctgatggactgtgagcctccctagggcagagacca

SEQ ID NO: 457969 - DNA, 293 bp, Homo Sapiens
accgccccttccccctagccaacatcactcttggctgatgtctccttcatttacctggtcctgcagacagtatggtccagggtcaagggtcatgagggggatgggacggtttgtggcgcaagttgctacgttaagatttcagtgtgatgagatgaaatacttataggttatttagttgaaaatgttgaataggcatcttcatattttggccttagtgtccatcagtgctaatccagaccaaaattttgaagacgtattttaaacttactttcgaaattgtggacatggcgtga

SEQ ID NO: 457970 - DNA, 316 bp, Homo Sapiens
tcacgccatgtacacaataccgtagcaaaccccaccatctcagagagtgaaacagatttcaaatctaccatattctgcccagcttcactgctgctgctgggtctgagtcaacaccaccagttgcagtagcctgctaataggtcttggcttttgtatccatcatatgatagctagtgtgagccctgtaaaatatgtctgtacatgtcatcctctgctcaccatccctccaaatacctcaatcactctcagggtaaaagccaagacctcaccttggcccacaagaccccacacagtctggtcttgtgacatggcgtga

SEQ ID NO: 457971 - DNA, 394 bp, Homo Sapiens
aatcactgattaacttttgctcagcctcactgctgcctcaaccattactgagatactgagcttcccaatttttcccaggaggcttaattgccaccccatccacccaccctaaccccaaagtcagtgagtaagtgatgtaagctggatgtatggataatgacggccagtggagttgataagcatgtccacagtcaataacttctattccagaaatgttacatgagtctcaccttacgacacaaactttgctaattcaggcccaacccattcccatgtcacctaactatccctgttgacctcacaggctgcccctgctctttaaggaagaacctcactgcagctccctcagggatagtttgtgacatggcgtgaggggtcctctatgatcactctc

SEQ ID NO: 457972 - DNA, 360 bp, Homo Sapiens
cactgaaagctcatgacgcattcagtgatgtggacggctttgtgctctctgcagaccactctgagggcagtgtggaggtggaggcagagagattaggtaagaggtttttgtgaaagttcaagtgagataaggaatgaactagggcagtggtagtaagaatgaggagaagggagaaaacctgccaaatacttaaaaaaattagcagccatatgccggttaagtgtatgagtggtgagacagagggaacattgaagataacccacagatttctggcacgtggttccgtgatctgaaattaggaatataataatagacactgagggtggacaggatctattcccttgtgtacatggcgtgagg

SEQ ID NO: 457973 - DNA, 478 bp, Homo Sapiens
actctgtactgcgtacatactcaatgctcagcaaatacttaaggctgattcactgaggttggacctgagcttttctgtctttgtgccttgaacacggtctgaacttggcaaatgcttctccaatgactgaacgaatcaagccagggaaaagggagcagtaaaaagatagtgaggaattaagcagactagagggtactcatctttccatgggcctttctttgcactttgcaatgaatgctactcattaaatcgtggttctaaaatgcctcccagtcatgactgctggtatcgctccattattcactgcattcaacaccatcatctttctcatatgaaacactggcagtctcttaaggagcaatgacaaagccaaccactaaactaaactgatcaaggaattagaacaggcatgttttaatgctaattgtaaagggagactgaccttgtgacatgggcgtgagggatcctctagaaccgc

SEQ ID NO: 457974 - DNA, 423 bp, Homo Sapiens
tcacgccatgtccacaagactcatgcaaatgggtttctgtttcttacaatcattgttcccagatatggatggtgactgatgctctactaaatgctgaaaaaaagcagagtggaagcacagaaaagtgggcttctctgaggaggtgacgttagagcccagttggaaggcaggaataaatgtgcaccatgactttttaggattaaaaccaagtacctcacagcttgggcacatgtagatagaggtgatttaacagtaaagtgtcccagttgtacccattgtcagttacctcaccacagggtttatgtagccctgagtttgcttagtgcttatttattttaggttgttgtttatccaaacctcttaaatgatatgtgtttggaacaagtaacagcatcgttcattgatgttgtgatatgggcgtga

SEQ ID NO: 457975 - DNA, 333 bp, Homo Sapiens
tgcgaggtgatctagaggatccctcacgccatgtcacaaggcaaatgggcaggcaaggtcacaatgccaggcgaaattagaattactgatgaggttcactgtcccgctatgcacagattgtcattgataaacatcttaacaggaaacagggttcacgagcatagaaccagtctgcctacaatttcgccaggctggaatttcccaatcctaacaagcctgggggcgctgctggagaccagggcatatttcatcccctatccacaactgcgtaagacagacactcccagagtggccattttagaggcctccccctgggaatgcattcttacgcag

SEQ ID NO: 457976 - DNA, 495 bp, Homo Sapiens
actgtcaggcctgccctcacccatccacgtccacacctgtcagccctgcccccctcatccacccacgtccacacctgtcggccctgactcctcacccatccatgtccacagacccatgtccatccccacacctgtcattttgattcaccatcctcatgctaactatgcctaaagccacctttcctctgaccctgaagatcctctatgtcaccccctggaggtctcaagggcacttcaaactcaatgtatcctgaagtggcctcttcatcacgcctccccagaaaccattccctgcagtgagtcccggaggagaggaggagagtctgtgtgaggagctagagacagcaccaggctctggggtgtccacttctaagtctcacggcagtcccccgcctcttggctcatcccagctgaaggtcttcacggggaggaaaaagaaaactattccatatggattagaacttgtgacatgggggtatcctctagaacagctat

SEQ ID NO: 457977 - DNA, 421 bp, Homo Sapiens
gacgtgcgacagccttcatacaaagtcaggccagagcctcgcaggcaccctgtagtaccgactgtgtattgcggagcagccctgtgctttctgttgctccagtctacccgccccctgagctgtcagcaatgcctctgagagacggtgggcagaagggcagtcatccatggatccccgagccagggcccttgcacatgacctcagatgagaggccgatggtgccaaggccttctgagtcaggcttgggttcaaattcctgctccaccactgggtgatgacgtacaggacctccttcccgcgtggttcgagggcactccccagcctgtccatcctggtaagtcacttactttggccaatggagtcaagtgaatgccatgtgaccaaaggccttaagagtgcccttgaggtttgcactccggtg

SEQ ID NO: 457978 - DNA, 484 bp, Homo Sapiens
ggcaatgccacagccatctgctcagacaagacaggcacgctgaccaccaatcgcatgacagtggtacaggcctatgtcggcgacgtccactataaagagatccccgaccccagctccatcaacaccaagaccatggagctgctgatcaatgccatcgccatcaacagcgcctacaccaccaagattctgcccccagagaaggagggcgccctgcctcggcaggtgggcaacaagacggagtgcggcctgctgggcttcgtgctggacctgaagcaggactacgagcccgtgcgcagccagatgccagaggagaagttgtacaaagtgtacaccttcaactccgtgcgcaagtccatgagcactgtcatcaagctgcccgacgagagcttccgcatgtacagcaagggggcttctgagatcgtgctcaagaagtgctgcaaaatcctcaatggggcgggagagcctcgtgtcttccggccccgcg

SEQ ID NO: 457979 - DNA, 228 bp, Homo Sapiens
tgtgcgttgaaccatccagccttgtgctgttgacgagagatgtccacgagacagcttcctgcagaaaggctgaaaagaaaggggcagaaaaggtgaaccaggcgtttacccaaagcaaggaggtgaggttctttctccctgtatcaggtaagcacggtgctcaaagcagagtgacagcatgtttccccacagggaggggatggcttcctgctgcacaccatcgctccg

SEQ ID NO: 457980 - DNA, 306 bp, Homo Sapiens
tcagggtcctgcatctggggacgatgcacatctgcagaggagcggcagccacctgcagagaccttctgcagggcagtgagaggcagaacctccctgggtgagataaggaagggacatgggcagagaaaggggaactaaggaggacaggttctcccagaaacgtcccgggaagacactttctcccccagcggaactgaccatgccaggattgcttcaggggaccgctttgactcttcccgagccgggaaggcaggaagggtaggtgaacttccttggcatgtaagactccccagcccatcgtcccga

SEQ ID NO: 457981 - DNA, 421 bp, Homo Sapiens
gtgcaccatgtgacttgagagtgtgtccggggtgactgcatgtgtgaccctgcgtgagtgaggaggcggtgagttcggcacatcagtgtgcagcccaccctgtgagggcacacaagggctgatcatgctgggagactgggtgtagccctgaaggaggcagagcgtcgcgaggggcgtgcatttgtgactttgaggttatgagatccatcttgtgcctggggagcaactgcagctaccggtataagtgatgctgccctcctgcagctcgtccctgtgaaagtggacgccctggccatctctgcacagctcaggggcttgggaaggccctgaaaggggttagggtgtgagcaggagagggcaatgttgaacagggtaggacccaagggtgcaggatggtgagagggagttcggatggagaagt

SEQ ID NO: 457982 - DNA, 232 bp, Homo Sapiens
tgtaccttgccttttcacttcactaagtatctctgagatcttcctataacagcggtctcagagtttccgcattcttcgtttgggatggcatcgtggtgcttcattgtgtggctttaccattgtttatttggctagttccctactgatggcatctagggaggtcatagtctttgcctggttcaagcaatgctactagtaactagcctgtaccaataactttcacacatatgtg

SEQ ID NO: 457983 - DNA, 204 bp, Homo Sapiens
atctcattatttgcataatggagaaaggaatacctccccagagggctgttgtgggaaccaggtgcaattttatggataagacagttctatgtaaatgtcaaggctggacccagctggggagttatgaagccctgcaggatggcaaagctgtttcaaaaggctgccacgtgttatcccacttaattctcagcacagcccatatcc

SEQ ID NO: 457984 - DNA, 372 bp, Homo Sapiens
gtgtgagccaccacacccagcttcattttaactttcaagaacaacttacaaacttatattaacaaatcagtaactattagtaaacttaactggaagaataaactgccaagtatataattatttagaaataaagtaacatttctcaaaagctgttaccaaataaatgtcactttcactgaactctgcattaggaatcaggctataagaagtcctttatataaagaggacaaatgctaggctaatccttttctctctgactcgtcttcattatgaaataatttcaactttttctcaaagaaattcataaaactatccaccatttggaaaatgaattgaaattactttagctaaggagcaggacgtatgcacgtc

SEQ ID NO: 457985 - DNA, 679 bp, Homo Sapiens
  misc_feature (545)..(632): n is a, c, g, or t
aacaccagatgctcccaccacttcaacattttatgaagtggtgggagatgacttgggaaaagaggttgaatcagcctttggagttctctatcagttagaatgctgtggtttataggtcaaagaggagataaaggaatttggctggttcacaaaatttaaaaggagtttttgggggcatgtgttcagggtgtaatttgaacgtggctccagcttcatttcactgcagctgtttaggcgcaacctttatgcactgttgacttctcttcaggtggcttccctcagagttattaagtggcagcagaagttaagagtttgtattcgcacatcacaccttccttagaagagatttaaccttcctcctctagccttcactcctgtcaggaaacaaaaatatcggtgtttgctgtggcctgtcctttaacaaatcagtgtggcaagtcaaatgggattaaactgattactgagactaatttgggatgaaaactatatagctagttcacagtagaagagggagggaagtggctgctgggaaacattcccaatannnnnnnnnnnnnnnnnnnnnnnnnnnnnnnnnnnnnnnnnnnnnnnnnnnnnnnnnnnnnnnnnnnnnnnnnnnnnnnnnnnnnnnnaatgagattcttaaggtggggcctctgtgtagccgatctgcgatttc

SEQ ID NO: 457986 - DNA, 634 bp, Homo Sapiens
tagaagtgtggagatgacttgggaaagaggttgatcagccttggagtttctctatcagttagaatgctgtggtttataggtcaaagaggagataaaggaatttggctggttcacaaaatttaaaaggagtttttgggggcatgtgttcagggtgtaatttgaacgtggctccagcttcatttcactgcagctgtttaggcgcaacctttatgcactgttgacttctcttcaggtggcttccctcagagttattaagtggcagcagaagttaagagtttgtattcgcacatcacaccttccttagaagagatttaaccttcctcctctagccttcactcctgtcaggaaacaaaaatatcggtgtttgctgtggcctgtcctttaacaaatcagtgtggcaagtaaaatgggattaaactgattactgagactaatttgggatgaaaactatatagctagttcacagtagaagagggagggaagtggctgctgggaaacattcccaatacaggttgagtatcccttatccaaaatatttgagaccaaaagtatttaggattttgtgttttttcagattttggaatatttgcatatacataatgagatttcttaagggtgggagcatctggtgtaa

SEQ ID NO: 457987 - DNA, 553 bp, Homo Sapiens
cactcaacagcttgccccagacactcacagtgattccccatcactgctggttcttcagtagccccgagaggagtcaagcccccgattccaggacttctggcctcctcctgcctccatccagccaggcccaatctgcagacatcacagaatcctcgaaaggccaaggtgtaagaggaaatccacactgacctcaagagccctcggctcaggccaagcctcaaatgcaagatgccaacagcgtgatcctgaggtctcttccttcctaggcagcccagacagggcacctggcactcaagctcgtccccgcgtaccccctgctttccccaagcacagtcagtatcagcccacgttcaccctacctgagcctgtctcagagcagcaggtggcttagctaaattctcaagagcatgggctctggaactggagcatctgggtttaaatcctggttttcccactttctctgctgtgtgaccttggggaaataacataacctctctgtgccagtttcctcctctgtaatatggcttaatttgaagggtgggagcatctggtg

SEQ ID NO: 457988 - DNA, 549 bp, Homo Sapiens
caccagatgctcccaccgacagaatggggtgggggagtcgggatggagctccagtgaagcagatggatcgccggagggctgctgtcacattgcattggaaggtgacagatggaagcacacagtagtctgcagccaggctgtcatgcgcagccaccatggggcaccgggcgtgctgtctcttcctggaaggtggaacttgatcaccgctctgcctggcctcagcagtcccttctgcggggctctgctctgggctggtgaagtggacagaaagcaaagtggagtgattgaaggacacagtccagtaactcagcagcctgccgtgccagagacagaacagacacacggacaagggcaagccttccttgctttcctccccgacacccaggtgaccacccagtttgggaggaaaacagaatattgcatttcaggtagagcagctgattaaagttctcgggccagatgtcttagtgattcatggtgctctcagcatagaccttgagcaataacccatgtggcccactttttcgtccttggtgggagcatctggtg

SEQ ID NO: 457989 - DNA, 602 bp, Homo Sapiens
caccagatgctcccaccttaaggcaccagagaacttccaataatttatttcaaagctaggtaggaatgcagtttgccattggtgcacatgccgaagacaaatctacttttgtttgcttacccaactggcagatatatctatcacagaatatctctttctgcatattctggagtttaggatgcaaacaactgcacccaaagagattcatttagtgtgtcatttaccacccaattatattatctgaactttcatggaattgtgcagtgaccagtcaccaagagctcagctccaggctctgccacagcggagctcaaagcagtaacacatcatgcatttcatttctttaagaaccaccagctgtttaaaaggccctcttgagggtagagttacaaagccaactcatggtcaaaaattctccagagacgagaagtttcctcctgtagactttgaggacacatttctttcctagctaggagcataaatcaatatgagtctagcacagaagaaacccacaatagcattttagaacttaaatagcacagggaatgggggagtggcacgagactatgtgactgttttcccatgggtgggagcatctggtg

SEQ ID NO: 457990 - DNA, 597 bp, Homo Sapiens
gaatcggctacaccagatgctcccacattggtgccatgaggtaacctggtaccctttggacattcagctttcctttgaggttatagctaattctctgatgaacatttaagtgggtgggtctgtgtgttagccctactgtgtagcttttgtgatccagggaggtgtgaccccattgtggtattcctatagctgagatcataaaagcatcccaagtgtcatttggaagccaaacagtaggttacaaactcattttgggttaatctccctctccctaagctacttcatctccttgaatgctgctaacttataagcttttatttcctttcctgtgttatcactcattaaagccttctctgacctgtataaatgagactggctttttcctcttagtattgtcttcgagcacttggcaggtggcatttggagccagagcctcatgaaagttgcccttgtgtattgtttttataagctaaatgagaggcacagaaagaataccaaaagatagactttttccctagggtaggaggaaaaaggaggatcataaatttgcagttactgtatgaattgtggtgggagcatctggtgtaagccatatcc

SEQ ID NO: 457991 - DNA, 379 bp, Homo Sapiens
cagttacagaacatactaaatatatatttctaattaatacatggttttaaattatgcttttctattttatgcagcaggtttagatctaaaagtatttgattgttcacagaaattctttctcaaatgttaaggtttgttgtttcttattttgtttctcaaaatgttaaggtttgacactatgaaaagtctttaaaatgctgcagagtaagaattacaaaagagaatttccagcaaagctttgaatactgccatattctagaataaaggcgtgcacactctgccaccctaacagtgatgaattaaaaggcaacatcttttatatgaatgtctaacttgtaggatattctttataaaatagatcacacatcatttctgttaa

SEQ ID NO: 457992 - DNA, 344 bp, Homo Sapiens
gggaagccaggcacttagaatggggtttggaagtaagatgtatagagttggggaatcatggagaaggaaagcctatagtcgagtgcctgcttaggtgctgaggtcacaggggagatggtggaatcttccctgtttttatcccctcagggtcagttacatagaagctgcttcttgactagtatagctcggtgaccctttgttcaaccgctgaggtttgatttcttaccctttcttctccccattttcatactcttcccagggattagtgatggaggtgaggtctccctaatcatggtaaagtgttaaccttccacctcctcccttccctcctccttcctcatcct

SEQ ID NO: 457993 - DNA, 360 bp, Homo Sapiens
cttcaagcgatacattttctgtccacactacagcctttaatgccttgttcacaaatcaaggtcttgtgcatattcatttagcactttctattatattttctttttccattttgtaacttcatgtcaaaatgacccacaatagaatagtcatttctagtcaatattgctaatcatttcatgttacactttcctgtctccccttatgatgcattttttagggttaacttttagcatttgattagtcaaatacttgcaaatgaaatactgtattttcatagcattttactgtttcgaaaggtctttcatacatcttctttccctaataaccataccaaacccaaataactattgtttacttta

SEQ ID NO: 457994 - DNA, 267 bp, Homo Sapiens
  misc_feature (179)..(210): n is a, c, g, or t
ttcaatcttcaggcataattttttctcaataagattttttattatcatttatgcagttagatagtttttttaaaattattaatgcagttagttgagtttaagactggagtctcagaatgttttgttattttttggacttgcagatatgagcaaattagtcagcttcattaagccttagnnnnnnnnnnnnnnnnnnnnnnnnnnnnnnnngaaaatggtgtccggatcttaaaaccaggggagaaagtgaaggggtaaaaacaaagc

SEQ ID NO: 457995 - DNA, 382 bp, Homo Sapiens
agtcgtaatgaagttttattggacacagctatacccattcattccaatattgtctatggctgctttaacactgccacagcaaagctgaatagatatgacagaaactctatggcctgtgaagtctaaaatactagctggaccattacagaaatagtttgtctacttctgatctgtatactgataactccaaaaatctatatcttcatcactgacctatcttctgagctctttatttacttatcaaccggacatccctagcctagaagtacttcagtcttatcacactcaaaactggattctaaggtaccagctgctgccattctctacctcataccctatgccctagggatgcccagggatgtggcatgcatgctgccattct

SEQ ID NO: 457996 - DNA, 315 bp, Homo Sapiens
tcagtgtgtgacctagacatctgagaagcaactcaccaggtttcccccaaaactgaaatgggaaattcccttcacaggttatatccttgagtgatacactgtgagaggtgttcacaaatgaatgcatcttagcagagaaccttcctccctattggcacgtgtcttccaagttctataaggaggaaccactgttaagtagcacagggcatccacagcgccatcgtgcaaagcttttaccagaactaacttccagagcatgagggctaggctctatgccatgctcctgtagggaggctcaacatcgccaaagacacc

SEQ ID NO: 457997 - DNA, 225 bp, Homo Sapiens
  misc_feature (42)..(42): n is a, c, g, or t
  misc_feature (202)..(202): n is a, c, g, or t
gggagtgaagtgccaggcaaggatgttcgaacagtaagattnagaggttctcaacttttctgtgtaatgcagctatataccacaggaagggcgggatgggagcccttgtttttaggatattcaacaagtgtttgaggagaattattctggaggctctatctcccataaggaggctgacactacaacacttctgtaggagatngaggaggctgatagtagttatgg

SEQ ID NO: 457998 - DNA, 349 bp, Homo Sapiens
  misc_feature (320)..(320): n is a, c, g, or t
gctgaaggcagagagatgtgaaaatacagtgttttcaggagtagtaaggaggctggtaagcatgtgggatgtctagaagggtggatggagtgtggggtggcttgtaagctgagaggttacgggagtgaagtgccaggcaaggatgttcgaacagtaagattagaggttctcaacttttctgtgtatgcagcatatacacaggaaggggggatgggagcccttgtttttaggatattcaacaagtgtttgaggagaattattctggaggctctatctcccataaggaggctgacactcacacttctggtaggatgaggagnggcttgaactagtagttatgggagtgaca

SEQ ID NO: 457999 - DNA, 281 bp, Homo Sapiens
tgcatttattgctgtatacttccctcttagaactgcttttgctgcatgttttgcttttggtatgttgtgttcccactgtcatttgtctgaagatatttttaagtttctgttttcatttcttctttgactctacccattactgaaagtaagttattgaagtccctaagtattattgtagaactgtctttctcactccaattctgtcagtatattttcttatattctggggctctatattttggtgtgtatacatttccattgcgagtctgagttttccattt

SEQ ID NO: 458000 - DNA, 372 bp, Homo Sapiens
aagaggtcacagtggtaaactaaagagcttctgcatagcaaaagaaattatcaacagagtaaacagacaacatatagaatgggagaaaaaatatttgcaaactattcatctggcaaaggtcctatgtccagaatccataaggaacttaaaccaatcaacaagcaaaaaacgaataatccaattgaattagcaaaggacaggaacatacatttcttaaaagaaaatacagaagtagccaaacaaaaaaacattctcatgatcactaataatcagaaatgcaaataatgaggccaggcacggtggctcatgcctgtagtcctagcactttggagctgaggtgctgatcaatctggggtcaggtattcgagactc

SEQ ID NO: 458001 - DNA, 342 bp, Homo Sapiens
tataacactatcatgatcattatccaccagcccccaacctttttggccctcaagggctggtttcgtggaagacaatttttccatgggcatggttgggggtagtttcatcaggcattagattctcataaggagcataaaacctagatccctggcatgcgcagttcacaatacacttgactcttctatgatactagtgccaccactgatctgacagaaggcagagctcaagcagtaatgctgtcttgcccgccactcacctcctgcattatacctatatctatcttttcataggttggtctgtctaccccatgagattaagagctttttaaaagcaggccacgt

SEQ ID NO: 458002 - DNA, 406 bp, Homo Sapiens
aatgtgactagtatatctgaactaaagaattttatttaaatagtcgcatgcaactagtagttgctgcattgaacagaacagttctagagtttttcaacacaccttgctggaacttcctgggaggcccttgggaatccaggctatgcaaggccagttagaagagatgactctgtgagaagctgacgccaacatgagcagggcgattcccctctcccccaggccctggtttctgctgaacaagaagggaacttgcaaagccaggggctaggaaaatgcttttcaactttaacatgtagtataatttggatatttgtcccctccaaatctcatgttgaaatgcaagtccgccaatgttggaggtggggcctggtgatatggatgactgggtggatagatgtcgtgatat

SEQ ID NO: 458003 - DNA, 424 bp, Homo Sapiens
cctatttcggggcactccttgccatgcttctcttctttttccgcacaaacagcacttggatggccttgccctgcagagggcttgtggactgatggcccgttgtgcccctcctcggtgctcactgccaacacgggacccggttctttgcctcccctgactggcccaggacaccgacagttattctcagcaattaggctgggcatggggaccttgtgcttgctcacttctgtggctgacaggtcaccgttcccttctgggttgtctgcagtcagctgattctcttcatgtctgtcaatgctggcggaaattggcatacattctgctgtgctggtggagatgatggcagcatcgctcaagtcttctactcttgtgatggtgagccgatcttcatcctggagacagcaccaataatgactgcttcaca

SEQ ID NO: 458004 - DNA, 489 bp, Homo Sapiens
agctcggtactcacgtcatgtcacaagctcagaaaatagaacacacagtggatgcgcttgctgctcggtgaccctggagaaagacacgactcccctctgagtcgggaaatgtgtgtcccatctgcagctcgggcagagcgggcctgtacctcttccctctcctaagccggcacaccctgttctccactctacggaattttataagcaaagagctctcctctctcttcatgatggcagcatccaccctatacctgttacaataaggcacagcaagagttgcgctttacactgtgaagcaggacgtgcagcacaggcaggggcaacagaagaaccccaatgcgatagtctcttctatgaaaagcagcgcgctttgccattttccattctattacatttttaaagataatggtggctcgtgcctgtaatcccagcacttatgggaggccaacgtgggaggatgtagcccagagagtttgagacgctgcaacg

SEQ ID NO: 458005 - DNA, 375 bp, Homo Sapiens
cctgccactaactgactgaatctttctatagtttccattcattttcttcaactagtaagtatctagcatgcccgctgcatgccgttagtggagatacagtggcacccaaacaaagttcccatttgtgggaagtttacaccacagcgcggggaccagctgttagcacagcggccagtaatcctgcagcataacttcagtgagaagtgctgcacaaagacagggaagtcagatgaagaaagttccctgggtggcctttctgaggaggtgacatcgagcttgacctcagagggaaccaacccttagagggtctcagggaggagaatgtgacccatatagcttgtaactgaccaacttgtgacatggcatgagggccgg

SEQ ID NO: 458006 - DNA, 592 bp, Homo Sapiens
  misc_feature (172)..(192): n is a, c, g, or t
  misc_feature (201)..(452): n is a, c, g, or t
ccgggacacggatgctttttcttgagagtgcagcttccactgagtgacagtgcctgtctctggggtgactagctgtttcaggatccctggcattacttaaaaatctcaggctctgctttcctcttgcctacctttctgctggtccaagggctcagtgtccccactggagtgnnnnnnnnnnnnnnnnnnnnnaagctggannnnnnnnnnnnnnnnnnnnnnnnnnnnnnnnnnnnnnnnnnnnnnnnnnnnnnnnnnnnnnnnnnnnnnnnnnnnnnnnnnnnnnnnnnnnnnnnnnnnnnnnnnnnnnnnnnnnnnnnnnnnnnnnnnnnnnnnnnnnnnnnnnnnnnnnnnnnnnnnnnnnnnnnnnnnnnnnnnnnnnnnnnnnnnnnnnnnnnnnnnnnnnnnnnnnnnnnnnnnnnnnnnnnnnnnnnnnnnnnnnnnnnnnnnnngtgtgagccaccgcacctggcccactgaagtgttaaaatgaccctttgctctcagtttaacactcctacccatctttctgctctctggttttagcctacagctatattggtttgtccttttaaagatttccccgacttcc

SEQ ID NO: 458007 - DNA, 765 bp, Homo Sapiens
aattgaggggtattactatttttagtctgtctatgattacctaagtaatcgatttcttgttctaccaaatatcaacagtatctcttaatcctgcactgtataagataaggatattaaaattattcctactctgcagttccccctccagcctatcgcttctgtcatccatgcgttgacttttaaaatgacaaggccgataacatttgtattctatttgtaaccataccaagccctttttgaagctttttctagagattaactctaaaatttgaagaataacaaatagtgttttccattattgggatgatgtagatattgttcactgaaggccagggaggcaccaggactccatcaactttcttgtacatgtttctttctttttctggagcttctagccatctttttccccttgtttcctctattatagctgtatctatttccctgcctctccatcggtcaggcattccctttagggtttctcttcatcatcttgctccagtctggctgccctcttgctgggtcatgtggctgttgttttggggcttcttttctctgccttctgaggttggattcacctttgcttagaacctatagcttcttttgtgtttacttcttccttttacttccacccattctcaagtaaataccaagaagtgacaggtgggaggtaaggttttgagtccttttgtgtctaaatgactggattcttcccttttacctattgttggtgtgacgggttgttggattattgttgtgtacatggga

SEQ ID NO: 458008 - DNA, 429 bp, Homo Sapiens
tcggacctcatgccatgtcacaaggcatctcccatgaactgtctgaaatatctttcttcttcaagatgccaatatgccttccactctcctcctcccaggagatgacctctccaaggcatgtaaccttgaacaagttgcttaacctgagactcagtgcctcatcccattaaatgtcctcatgtaatgttatgagaccaagttaagagaatggcagcaaaacacttcatcaattaaaagtaagtgataagtgaagacttaattagtattgctcatctctgagactaagactgacaagcccttccaacattgctccttccacctcagatttctctgcatttgcagctcagctcaactgttttcctttttactggttttggaggagatacataaaactctctcccatttcctctatagcccatcctaaatttc

SEQ ID NO: 458009 - DNA, 354 bp, Homo Sapiens
agctcggcccctcatgcccatgtcacaagcttgcttttctcatctaattatgttgttgatgagtactgctctatgtctattactgtgcatttatttgcctcctcccttcagataaattcccagaggggcattgctgggtcacagaaagaacatccctaagggcatcttgggatcatttttgcttttgcaggccgcagtgctttggagcaattcacagcatgagggacagctgtttggccctaactccaggactgaccgtgtgccagcagcctagacaccagaccaacatgccctcctagcaaaagcagaattcagacttcatcacaccctcatctgcagacacaccctttgtgc

SEQ ID NO: 458010 - DNA, 340 bp, Homo Sapiens
cacaatgctctcctaattcttcttctgctctgatttttcctaatctgtctcctttactgagacccgaaacaggaactcttgagctgaaaaaatttctccagttaagggcagggataacgtgcctggctcacagctcttgattctcatgttcctattttcccagtcatcaccacatgatgtgtttgggttatggtacaaaggtagcaagcactgcaattggaaagaattctgaaatgaattgggaaaagtgctttctctctttcttatataaggcttgttcaaagcagctttctggaatggttggtgatgcctgtttccctgtgacatggcgtgagtccgg

SEQ ID NO: 458011 - DNA, 453 bp, Homo Sapiens
gctcggcctcactccatgtcacaagggatttattgtacagattatttcatcacccaagtgctaagcctaatacccaatagttattttttctgctcctctccctcatcctacactttaccttcaagtaggttccagagtctgttgtttccttctttgtatcaatgtgttctcatcatttggctccctcttataaatgagaacatatggtatttggttttctcttcctgccttagtttgctaagaataatggcctctagctctatccatgttcctgcaaaggatatgatctcattcttttttatggctacatagtattctatggtgaatatttactacattctctttatccagtctaccactgatgggcatctaggttgattccatgtctttgctattgtgtacagtgctggaatgaacatttgtgtgcacatgcctctatggtagaaagattct

SEQ ID NO: 458012 - DNA, 621 bp, Homo Sapiens
  misc_feature (483)..(578): n is a, c, g, or t
aaatattagaactttctcttcagaaaggtttgcagtctgaaaactcccaattctgtttttatcctgcgagttgtgttattcgtctccattttcgagcaggaggagtgaaagcagcagcatcaggaaatgcagttcctaagggctgggaagtctggcaagcaccggcacttggcgtactgatcaaagagcagccggagaggggggaaaccacatagatccttttcgcacaacgacccaagaacaagaaggccgtcatgtaaggcacataaggcaaggggcggcggtacagaggatggagagcagacacaggacggagccgcgcttgttagggatcatgcactttagagaagtcttcaagaagagccatggattctaaaatggaagcttgccttttcatgtttgccacgacccacctaaagcgcattgcatcttatcaagtttcgtgctcaagaaaatggtaacatagctgggcgcaagtgtcannnnnnnnnnnnnnnnnnnnnnnnnnnnnnnnnnnnnnnnnnnnnnnnnnnnnnnnnnnnnnnnnnnnnnnnnnnnnnnnnnnnnnnnnnnnnnnngtatggaaaattaaaatattagccagggtgtgatggtgtgcac

SEQ ID NO: 458013 - DNA, 265 bp, Homo Sapiens
cgcagagcttggggacagtgctcagctttctccggcggtccttgatgaggcttaccttcttgttcatcatcatgtgggacagcttctcccccttctccgcaatcatgacgtaggcatcacgctccatgcccagcttcaggctctcgcgctgctcccgctcgcggatgatggcatccagccacttctgcttctcctctgccgtcttggcatgcagacaaaccactattcttgccgtgttgtgacatgggcgtgaggtaccgagcta

SEQ ID NO: 458014 - DNA, 432 bp, Homo Sapiens
agtggagagcgtaagagatttgtaaagcacagtcccttccatcaaaatcgtaccttccagttagggagatgaaattcacacataaatcccacgcagcgataccagtcagcataaattgaaagtagtgcggtgcttgttatgcatccgctagtgccgacagaagacgagtgctctttagagatgataaagcttcaagaagaggtggagtttgagcaaggcctaaaaaaatgtgaactggcaggaggagaggagcttggagagtaaaatagcttaaaagtgcacatcatagtacataaaacagatgtggaaatgtgcgtattgaagttggggatgacggcatttgggaataagtgaaatgataacagggtacattgacagactttcgaaaaacttagaaaccactgaatattgtggacatggcatgaggaccga

SEQ ID NO: 458015 - DNA, 209 bp, Homo Sapiens
gccggtccgtctgataagggattctgcatgatcgagggtccctgtgttctgatgaggggagatcatcctgcattgtggagggtccccgaggttctgatgagtgggagaccactccatattgtggagggtctctgcagttctgataaagggagatcatcctcgcatggctagaaaggtccagagtatgcctggggattcctctagacgtc

SEQ ID NO: 458016 - DNA, 447 bp, Homo Sapiens
  misc_feature (24)..(24): n is a, c, g, or t
  misc_feature (334)..(360): n is a, c, g, or t
gtatataaggtccagtctggcatngaatttctgaaagtaaccattaatggggatttctaaagaagttgtccagaaagaccaaaattggatattctctgcactttcagagaaggactatttatgtttgaatttcataacaggcttacatttcttttctattgattcccttgcatatctacataatttaatcctgtctattgtcccagatctcttgtggctactttacctgttaccttttttgggattttgttctttatgttttacagttacttcggaccagaagatatatggtatttttattcacttttttcagtgttttaaaataaggtttgtnnnnnnnnnnnnnnnnnnnnnnnnnnncctattgtcgtatagttctaaccatatatatagtactttaaatattttcttatgttattatttaacacaataataaattcttatcta

SEQ ID NO: 458017 - DNA, 198 bp, Homo Sapiens
  misc_feature (131)..(131): n is a, c, g, or t
aagtcgcattcactgaaccagaacttgatgggtggttttggtattctgtgacctaggtagtggggagctccttcctttggatgtttcctttatgcccacagtcgaacctatatcctagttgtacagccaangaaggatcttttcgtgtttaatctcatctaggagcgaatagtaaggtccagcgtatgccacgaaggt

SEQ ID NO: 458018 - DNA, 226 bp, Homo Sapiens
agccggcccggcatactggacttctggatgtggctctcagtttcctggttaccaacccataagtcaccactccgatcgtctttcttacatttattgtagagtaatcagaacagaatccagaaaagagatagaagagaatgggaaagaaaaacaatggtttggtaaatctgacactggaaggaaatggagatagcctagatatagataaggagaaggtccaggtatg

SEQ ID NO: 458019 - DNA, 130 bp, Homo Sapiens
  misc_feature (75)..(75): n is a, c, g, or t
gaaacttggcttgatctgatctgaagtaactgctctggaaaatatttttatttttgaagagtatttgactaaatngttattcttacctcgaaagtatagtctgagtcatcaccgtacataatactaagaa

SEQ ID NO: 458020 - DNA, 185 bp, Homo Sapiens
cttctgtgaaatagtcacctgactttgttacatacgactcgttgtcgatatcaaagatgacgcgctctgggttgtaatcatccgcagagatgttgatcccgccaagtaggttcagttcgttgtttgttgcttctgtgtgaccacgatgacttcgccatacttttgtggacctaccacatgtgggg

SEQ ID NO: 458021 - DNA, 288 bp, Homo Sapiens
ggccggcatactggacttctaggtcctctctaatacagtggggcctctcaaggcatcctctttccttcctttacctcaaagccacccttatcaggataaagggctcctcactgtcctctccattgcccccacggtaacaatgtttgcttccttactttctccaactgagcagcttcctattacactgtcttaccacatgtcttaacctccagtggatccatcctgtgagttatcctactacttgtgtaccttctacatctagatgtagaagtccagtatgccggtccg

SEQ ID NO: 458022 - DNA, 594 bp, Homo Sapiens
tcagagcatctttttgttctgttagacagacatacactctctaagtagagttaagacatcatcacttcatcacattacgatataagattgtctgcttgtaatttatcactacaggggaagctgccttataaatctaagtactttatctcacctattactaaaacaaggaaatctttttcagttaaattttcaggtcccaaactttgtttttacactatagcttaagacaaacaggtgtgggtatgttcaactgtggtttaaggttctcagtgcagacactcactgtcctctgctctgcacgggccatggacagctgggcggcacaaggtcgctagctggctccaggcctgtgggcatcacaacgttattgctttggttctgtctcagacaccagagagtgtgtctcagagcctagggtttccacatcacagaaggtcaggacaggaattcagatttttcacaaagaaaaagcattttttctctctctaggttaagtgcagaacaacaaatttctaagtgctccatttataagaggttccagatatatatcttgatttaatcctgatcatccacattaaaattatgaatgtaaac

SEQ ID NO: 458023 - DNA, 531 bp, Homo Sapiens
gactctctctaggggaacaggatcagatgaccctaagacccccagaaaaactggatctagaaccactgaagtctcttgacccggagatagctagacctcttgccaatgagaatcaagagttcttcaagtcactcaaagcagagagcgtagaggcagtcaaatctttagaaacagagatcctagaatccctgaagtctgcgggaccagagaacctggttacactgaaatctccagaaactgcaagcacccccctggactccagaagaaataaatcaggtggccatgaatccttttgaacaggaaattcacgaacccctggagtctgtggaagttaacccatgagacattcagactcctggaagaggagaatcaggaatcattgtgatctctgggagcttggtacctggagaatttgagatctccagaggaggtagacaaggaacgtcaaaggaatctggaagaggaagagaacctgggaaagggagagtaccaagagtcactgaggtctctggaggagaaggtccaggtatg

SEQ ID NO: 458024 - DNA, 763 bp, Homo Sapiens
  misc_feature (698)..(698): n is a, c, g, or t
cacctggaagagtttcctgctgtcctcagtatgataacatggcgacctcttggtatgtatttctttagcaaacttacccatcaggaaatatccagcacctctgaagcaaacctacaaatgagtgtgttatcaagcccagccgtcttcctttcccctaatcccaaaaggaaagaaagaaaaacttattttaagctgcagaaaaagtgtggagcacttttgagctagaataatgtagaaaattacatgtactgatttttttaaaaataggtgagaagcaccagagggacaggacttctagaagttagaataatatgaagtaatcaggaaatatctatgcctacagaagcagcaaccgtaagataaacatttgttacacttaagaaattgctgaggttaatactttgttataatggattataatatttgacattcatagtgtgaccctggatctttcacagaaagcttgggggtcaggaccaggaggtagaattttacaaggcaataaatgaaggtattttaagatcacctctattaaaaaatggtttaatttttaaaaactatcattgctttaaggtatgaattttaaaaatcacttatatggatcatgtttactcctaatgatataagataaaatgaggtatttttgttccaaaaagtattttaaaatagcatttaatcttgggaactatcttacttanggtttctataaatacaaattacaatgtttcgaactcaaccagtatcattttcgtgtgctaatgag

SEQ ID NO: 458025 - DNA, 186 bp, Homo Sapiens
acctcttggactctggaggagggcttttataccaaaaaatggattgttctggaaggcttttctttgtcactgcccggtcgccgtgactgtggaccatgggaccctttcagccccgaggcctttcggcaagccttcctgagtggcctctgcatcattgcttgctgagcggatggtactgcacggttg

SEQ ID NO: 458026 - DNA, 477 bp, Homo Sapiens
gtctattcatttgttaaaagaacagattggaccaaattatttctaaaatccgaatctctgtcattactatgtgaccttgggtgtaataccaatttttgtgtcacttttcctcatctgttaaattgttaagtgggataatagttgttgaccttatctatccattcctttcttcctccctccctttctcccttctttacttcctagaatcaaattagataatatacatgagagcactttaaaacttaaaaatttggtgtgtaaccacaggcgtagttacagtatctaagggggtgtaggtttgccgctattgcatgcatattatgtgccaagcccacttgctatgtctttatgatacattatccttcccagatttacataaggtggttgtcatacacctgctacagacaagaaacctggaatccatgggagtaaaggaacttgtttaaggtcaaaagacaaatagaaggtccaggtatg

SEQ ID NO: 458027 - DNA, 303 bp, Homo Sapiens
caaagcctaaaatgtttactctctggcttgggagtttgtctcccctgctctagactgtcagcaagtggtacagtggtacagtacagtggtactgcccaactgcacttctctgcaaggtgattctagtgtgcacttgtcagaatgaaaatatgttattcatttaagacatctcatgtctttgaatgttatcacatgatttgtatttaatatttacatgacctaattatttctttcacgtcagtttttctagattggcaatagcctgttgcaaagtgcctgaacctttgagaacaattactatga

SEQ ID NO: 458028 - DNA, 267 bp, Homo Sapiens
cagagctgtattgagggttaacggtggtaatgggtctccagggcttggtgcagtttgtactcaacaagtacgtaattctctcctttggttgcccctgaatacaagagtggtcttgtacttccactgcctgaacagtccacagccaatggcactccagtccttgtcacatggttccactcttaggatgtaaattaggaggtaccagcttgagaggcagaggcaaaggtaaggttaagatgcagctgtgaggctgggcacaggtgctca

SEQ ID NO: 458029 - DNA, 622 bp, Homo Sapiens
acacaagaatgcgtgtacataccagggagtggagtaaaggtattttctcactactaggagcagaaagttcgatagccactgatctaattcgaccactcccattttagaattttagaatggagaaaacagaggctcaaagaagccaaacaacttgtccaacttactttatagcaaagccgagaagagcatccaagtctttaatagttctctggtaatttcctcaccaaaccagaatctccaaatgtatatacctctgggttaaacagtgctgactttaatccacattagagtaaataacagtggagtagtaagtaagctgatctttgagatctgctgcctggagcaagttttggtaaaggaaacagtagctgaatgaattcagggggcagctgtggagctaaaacaaaataaatctgagggaaagcactgggttgcagggtgtggcccagcaggcccaggacagggcttggtgtggtagaatagaagggacttttatcttccttagagtctgtatatcatcaggacaactagttctagtcaaggaggctgcttccatgtctgagaagttggctcagtgtccatgcgtggattgccataagccgaatcccagacactgcgctcg

SEQ ID NO: 458030 - DNA, 489 bp, Homo Sapiens
ctggcaatccacgcatggtgctgtgtcaaggatggggagagatgaggtgtgagtcctaaacgtgatgccacgaggtgtgcatgtgttggggtgacagtcagggacacagacacttacatcatgggggatgctgcgatcgtgttaggggatcccaaacttgctcctctccccatattccccatctcagcgaagggcacccctcccctaactccatcccagccagaaacctcggagtgagagtcatccttgattcctaccgcctccaaaccaatccagtcactaggtttgctctggaatttgttctctcctctctatgcgtgctgcctctggttcggtttttatcacttcttttctgggctgtggccccaggctcctccctgcctctagctctcttgctgctccaagtgccctgcacagcagctgcagtgattgttctaaagggcagatgtataaatgcttccccctgactctcccccatgcgtggattgc

SEQ ID NO: 458031 - DNA, 401 bp, Homo Sapiens
ctgagatgacagtcggccaacgtacaacaatcaactggttttcaccaagtccaaccaccgcaatgagttctggagtgctctgctggagaaggcttatgctaagctccatggttcctacgaagctctgaaaggtgggaacaccacagaggccatggaggacttcacaggaggggtggcagagttttttgagatcagggatgctcctagtgacatgtacaagatcatgaagaaagccatcgagagaggctccctcatgggctgctccattgatgatggcacgaacatgacctatggaacctctccttctggtctgaacatgggggagttgattgcacggatggtaaggaatatggataactcactgctccaggactcagacctcgaccccagaggctcagatg

SEQ ID NO: 458032 - DNA, 460 bp, Homo Sapiens
tcgactctattaggatccccgctgagatgacagtcggctgcttccacaggggctgttcctgttctcggttcggtttcaggcaggtagggctgctggttcctgaatactgtgagtgagcatttccaggttctgtcataactgatctctcatttgctcttcctcaccttcactgctacagctccaccccatggaaccatcttaaagaatcgcctcattactattttgggacatcaaaaatactttaaacacacatgaagtgtcagacaaaatctgcacctaagaaagagggggataatttctttccaacattctcataggaagacactgaaaattctatctttctaaagaaagaggaaaaacaactgtcattttggacaccatcaatatggaagctttgatgatttagctccactcgctctcttgactgcacacactgagaagcattcccagatcatgtcca

SEQ ID NO: 458033 - DNA, 726 bp, Homo Sapiens
  misc_feature (59)..(59): n is a, c, g, or t
aaacaaacaaaaattgaagtacagaaagagggtggtgggggcaaaaataaaggtacgcncttgggcttcctcaagatttgtttgtccctattcagactagaatgaaactggtttaggaaatcactcctgtatgctagcaggaatgttgctggcaagacacttctgagcatcggggtgtggactttacgaaccaaccttttaacagtcaactctaggagagaggatatccaaaaattggcagtgaaaaaattcatagataggcaaaaagctccttctgaggtccaggccaggagatagtaggatttaagaaacaaacaaacaaaaacaaccacaaatgacctttggtgccactgtcacaactgttgctcatcagagtaggagagttgtagcaaaggcattaaagaaggacaagcagctgaagagcctgaatccttgtgttgtaagctattttggtttcctttcaagaaagggctgtggtctgtggaaggtgtcaggaacatattttcacggtctgctttctcctgataatgttcttcttctcggcccacctgagacataatccctgagctccgagccctttttgactgaagctcctgttgaacaagattctcaacgtttctacccatgatccaccttctgccgccgccgtcgcctctccagagcccggctccttgtccgactcccttgatgttcaaatttttccagctccagaagtgccctgggtgc

SEQ ID NO: 458034 - DNA, 436 bp, Homo Sapiens
ggctgaaatgtccactgaatctttattctttcatttcaccaaaggatcagtagtttgggccccaggccgtcgcacaggtacaatcagtgctgtcgctgtcacacttgccacagtgacactgggtggccactgggtatgtatacaagggaatctgcatggtgagcacagccgggcactctcactgtttcatataccagttccttgaaggtacatgttttctggatcttgggcctggctgggtccttatacaccagatccctggtgtagcagtagccagcacaccaagtggtgttgatgcttatgcagaaacgacattcttctttctctattgcaatggtgatgttggtcagctcacagctattgcagcagattgctttccagcaacagaaaaggaagaaaaactggagtgtcttcatcctggtcacttgaaaacggt

SEQ ID NO: 458035 - DNA, 428 bp, Homo Sapiens
cacccaggcgcacttctctccacctaaccttggagcaaaaattcctcaaggatgtcataaacaaagtttaccagaggaaatttcttcctgtctaaatacaaagtctgaagctctgagaacaaaaccagatgtctgcaaagcagggttgctctcaaagtcctctcagattggaactggagacttgaaaattctgactgagccaaaaggcagctgtactcagcctaagacaaacactgatcaggaaaacagattggagtctgttccacaagcattgactggccttcctaaggagtgcttacctacaaaggcttcttctaaggcagaattggaaattgccaatcctcctgaactgcagaagcacctagaacatgcaccttccccatcggatgtttcaaatgcaccagaagtgcgcctgaatgcggggggct

SEQ ID NO: 458036 - DNA, 216 bp, Homo Sapiens
atgctcaaagccaccctcaatcattgtggggtgggggatggaggacaaataccctagcttcctcacccctcaacaggacaattctcaggtatggttcatagagtttctcaaaggcttcccagaacaactcatcccacgtttcccatagcagtaacttgctggttaatgtacgtgttttactggctttctcccttcccgaagtgattgtcgccgctc

SEQ ID NO: 458037 - DNA, 610 bp, Homo Sapiens
  misc_feature (36)..(36): n is a, c, g, or t
  misc_feature (103)..(103): n is a, c, g, or t
tttggcaaataaataacaactttcaggaaataccangaactccaacttacctactcatcaggtgtcccttgcacccctaacctcaatcccccaaagggacaancccaatgggcttatcaccaaccccaaaactgaaacactatgaacagttccctgtaaaacccagaatgagtggagggccacagggtaattggctcctcgaagcaagaagaagccagtaaggcatgactggtgttcgattcctaactcccctgctccctggtttcatttggaaccaactgagacagacacatgaatccctcttcattgatcagggtcagttggaggatgtagctgtcggcctggtagccaggtgggcttgctaatcctgcacctctaccttaagcttacccagcgtgaggccaggttagaaagtcacaggccttggcagcaggcagagagcctttactgtcatagtgaagagcttgccaaggacaggactgattcttcctccagcctcacctatcggggcagtcattgttccgctgtcaggaggagaggggccagaagggtcacattgaagaaatgtgacatgagggtggaggttcctgtccagcactcttacactctc

SEQ ID NO: 458038 - DNA, 606 bp, Homo Sapiens
ttatgcctgatgacctgtaacagtattttgaattttgtaaagccacgtgccactttcttcaaacaaaacgttttgagcaagtccctgtataaaacagatgaagtaatgctgctttggttcagctctagctgaaccttctctagggacttctctagtcccttctctagggattctaaagtctaggcagtttcatcaccctgagctaggcgccagggagccacagtcctataaagaacccatctcagatccatgaggactgtcccacctgtgtctcttattcttgcttgcttcagtcaccactgttagcagtggaccttactggatatttgttttcacccagactcatctccaaattttccagttcatctcccattcagacccaatctttatgcctctcctcacttcctcaagctgctttctactgttcattgtgctcagaacatttcctttacttccttatcttagctgaaacctacttttcctctgagaacaaaatttttctataacctcaagcagtgattgtgttctctcttctatacctcattaccttaaggccagaaagtgaggctagtgagggtatagaagagagtctcctcgaactggtac

SEQ ID NO: 458039 - DNA, 598 bp, Homo Sapiens
  misc_feature (196)..(224): n is a, c, g, or t
tcgggactagctggagagatttgcttcgctttagcagagtgttgatttatgtgattttttcccaggcacctgtgtgggctgatctgccctctagtggcattgcaatactaactgtagccaagaagggtctaaaaatgtacgggcttggtccaaagcagatctcaatctcagtcctgctattaataatattcgggtnnnnnnnnnnnnnnnnnnnnnnnnnnnnntgagccaccgcgcctggctgtggcttctttatcctagaagtttctttgcctctcgttttgtcccaggcgaggagggtcttggatctttgatgactccatggcttattgagtgtagcccagaaagaatggttgtttaataggctttattaccgagtgtttccaagggcttacctggggaaggaaaacatttttactcggaggtctgataaggatgggctttaaagcgctggcagctagtcatgtcccacaacgcggtgtgcgaagcacggcgttgtttactgaccacctgcaaagcccgtcggctggtgaacaaggctcttgtcccaggctgcctcattggtggtgatgatgttgagagtctccgtcgaactggg

SEQ ID NO: 458040 - DNA, 517 bp, Homo Sapiens
agttcgacggagactctcgatagtcaaaggaaattagctgccgccctggcagccaagcaagccacaaaaacattggactctgaggctttcttagccccactaatacctcacaatgatctgaccaagttccaaccttgctataccaaaggagatttaaagtgagccaaggaatggggattcacatcccagccctggcccatccaggctggaaatgtaatctggaaggtatcgtattggttcccagtgccctccttaaagatatagtgagctagtttcatcaaagcatccattacagaaaagatgcaacccttcaatggcatgtgagttcttgattgaccccgacatgcaatggggtcattcaaaatgtgatctatcaatgcatgctttgtgcccaaactgccctaaaactgaccccacccctgttcaagggtacaacattgaggagactctccatgcaaggactggcaagttaatttcaccacaatgccacgggtgcctggagagtctccgtcgaact

SEQ ID NO: 458041 - DNA, 426 bp, Homo Sapiens
gggtcgacggagactctcactcttcggaatggaagcactttgagtatctgaagagtgagagcattcatgtttgacaggtcctgcttcccactatccttttcctgttattattcaaattttacacaaggactaatcctgggtgtctctgagacccatctcctgcctagacatccacctccagagcaacactggccccacagtaaaagaggaagtcttgtacctcaggcaggcccatctagagctattgctccttcccacagcaaaggtattgtggatgacccttagaatccattctctggtcttctgaaataccaagggcagatgtcacctccttcctcagcaggactgactctgggctctacaaccagctccttcacataaagggtttagagagtctccgtcgacgtggtaccgagctcgattcga

SEQ ID NO: 458042 - DNA, 461 bp, Homo Sapiens
cccaatggcagccggcaacgttcgttgcatcaaacccaatgacaagaaatctccacagatatttgatgatgaacgctgccggcaccaagtagaatatcttggactactggaaaatgtgagagtgcgtcgggcaggatttgccttccgccagacatacgagaagtttcttcacaggtataagatgatctctgaattcacctggcccaaccatgaccttccttcagacaaagaggctgtcaagaaactaattgaacggtgtggttttcaggatgatgtagcttatgggaagaccaaaattttcattcgaacaccccgaacattgtttaccttggaagaactccgtgcccagatgctcataaggattgtcctctttctacaaaaggtgtggcggggcaccctggcccgcatgcggtacaaaagaccaaggcagctctgacaataatcaggtactatcggttgca

SEQ ID NO: 458043 - DNA, 729 bp, Homo Sapiens
acagcttcagggacctgggtccccactttccccacagccaggcccatgtgggttagggcaagtttgtgcttttgtgatagacacaaagcctgaggccatggccccagaccacagggttggggaggaaggaagggccctttgcccaaccctcacccatgttgacttgtcctggccagtggatcacagcttccctggttctcatctctgtcacccacaggaatacaggtcaagtgcctgggatcggcaggtggggcctccaggagcctgggacgggccaggccatctacccagtgctccctgcaaggagcttctctgcctctgagctcagctcttccaccttctccacactccctgctctgtggaccctggagccttcgctcatagcccataccctttgcctatttatacctgcctcgaggtagtactgctagcagagtcacacggatcagggtaaaggggaggtaacacgtcagacctgcctaggacgtagtaccctgctacagtagctactagaacccatgtgacaacaggaaaggctgctcaagtggagtcgcaagatgacctgaggctagcttgactggtgtactgatcctgttaacttgaagcccaacctttccacatggtatatccccaggccacacagcccctcttctgggctccaatacacgtgtccctccagcaacacgcggactgcaaaaagtcaagtctgactgcttccctccaactgcg

SEQ ID NO: 458044 - DNA, 318 bp, Homo Sapiens
accctctgccgtcagtatccacaaattgcttcatagtaccaaaacgctgtattctaaatgtcactcccctttccctgcttaaaaaccttcagtagttccctacggactatagaatgaactttgaacttggtctggcattcagccttccacgtgtagagttaagcatctctaacctcacatcttctgacttttgaacaaatgagacctctgcttcatataaagtctccttgtcctctgaacatgtggattctctcttctttctttgctcacttcactttccctacctgatgttccctctccctgcctcttgtcttttaa

SEQ ID NO: 458045 - DNA, 476 bp, Homo Sapiens
gtagtataaataaattgaaatagaatctaccctgctgtttccctcgagtaccattcctgaatgctcctccagagttggtgtcgacagaggcctccttataggctccctgcagcatgtcgtgccgcacctccgcctccgcctccgtcccccgagtctccatgtgttcgcggcagggaccgccggctcctggtgaggccgcgtggcgatgcgctgggtggatgtgcctggctggtggatggggctttttgacgtgtacaggtgacgcagcctcaggcatcctgtgctcacgtgcccgagtgagcattgacaggggactggctcctgaagtggaattgttggccttcacacgggcatttagacttgttagtgttgaactcagtatgtgcatcttgtacatggaagcaaaattctagaaaaatatccattatgtatcgggagtaatcattttcgttttcatatttccaagcctttgaacc

SEQ ID NO: 458046 - DNA, 447 bp, Homo Sapiens
ctcctccgagctggtgaccctgggcaagtccctccatgcccctgactcacagcttggttcatccacatcataggggatatttcaagagggctcgacagaggacctaagctcagtgtatccgtgctccttctcagctccactagggcactctgagagttttcaccttccgggggttattaatgatgacgccagggcgacaggtgtcgcccgggactttggggcagactgggatgtttggcaggctctgattagatatagatgacgtacatcgataagattacatccttggctcaggcctcctagctagtgctccgcacacactagtgatcgccactcccaacttctcccaatccaggctacgtgcccgtggtcctgtcaccagctgctccaagcttcagtctctgtaggacagagctgatcacttggagctgagccttcctataccgc

SEQ ID NO: 458047 - DNA, 1027 bp, Homo Sapiens
agctcggtacattagccgcgtttgcgtgagagctgcatgtgagcctgtgacgtgagctggggtgagctgggccgcacctaccctggggccccagggagcaggacgctccggggcccagcgcgttgccctgggcctgtggccggagtcggagtcctctctcctcctcctggcttttggaaaggcttggctgtgttggggagtctctcttagccctttcaggaatttctgttcaggcttcctcctcctcatcagctattttacccatcttagaacgtcctgtgtctccatgtaggagagtggctctctcagatctctcagggcgtctggttatagggaaacaagtggagcagggacgtggctttaattggagcactcggctgggctgcttggggagactcttccgtgcgttcttcctctggatagaaccaccacctcctgggcgtcactgacaagctccatcttaacctccaaagccacagaactaggggctcagagccagagctggcagccgccagccaaaatgatgccattgcctgagctgacagccaagcccttctgtgtgtcacctttctcctcacccagccccttgctcttcccttttgaaaggcccgtgtgttttctttccttaccctgtgcttgctcatgtctactccggttttctctaccacatccttagagccatcacctggcacgcaggcgccttacattctacggtagaacgtggggtactgtgtgtgcacatagacacacttacgtggaattacagttgtgggtttatccaagatgaggaagatttcacctgctgtttaatagacttggggccatgtgcctccccacacattggcaaggacaggtggaatgtcgggaccacactgtgcggctttctcggcacataagcggagggaggctgtggtcgctgccggcctaggtgtcccaggtgccccgcctttctctgggacacagttgggggctggcttctgagggattcctttctcccctcttatatcgccccagccagggtaaggtc

SEQ ID NO: 458048 - DNA, 167 bp, Homo Sapiens
ccccgactagcccgacagtggggtattggcagaatagaatctaagggcacaagtccttgggatgacacaccatctagcctcagaaaaactgggcccaccatgggcctggagtgctgggcccagtggatgatcgcgttgagcccatgtagttctgggctgtcggctag

SEQ ID NO: 458049 - DNA, 439 bp, Homo Sapiens
  misc_feature (34)..(34): n is a, c, g, or t
aaaccgtctgcaacgttcaatttcaatccaacangcgaagaatggtaataacgcgcgctcccatgaaatccttcctctggctggaagacccgcagggccgccgggaaggctgcggctggacttctggtcccagtgctggccctggtggaactgcttgcccgggctggtctcctcggggtggtagaaccacttgacgcggaccaccatgttgttgccccacgactcccacatgctctggatgcggccgatgtagggcaggttggggcggccggcagagaggaacacggcacagtccccgatacggatcatctccttgccgcgcacgatggccttgtagaagagctttgcgggccttgcccttcatgccacgccgctgggtgggcttgccgaaccacttccagagctgccgggctggcaggaaggcggcgaattcttccag

SEQ ID NO: 458050 - DNA, 226 bp, Homo Sapiens
ttagcccgacgggcggcacatgagatagttgctcagtcactggcccagagcggaccttctggcttttcttctctgcctgattgctggctggccatgtgccgtaccccctggctgatgtctggggtggtgagcaccagaggcccctgaggaagaccaccccatccttcctctgccccttgctgtcgggctagtcggggctgtcgggctactgtcgggctagtcgggg

SEQ ID NO: 458051 - DNA, 296 bp, Homo Sapiens
gtgcgaggtagagtggcacccccggcgacggcacccactctgcgttggcaggaagcgcggccccagctggctgtcagggtggccctcaaggccacctaagggggatgctcgcgtgggtctttatgcttcggaggcagacacgcggttgtgttcaatgcgtgatgctctggtgacaggtcctcgaggacagcacgcctctcagccaactcctcacagcaggtctatctggagcctgcggagctgcccgacccgtcaggtggctgcatgccacggctgctgcagctggtcacctgcac

SEQ ID NO: 458052 - DNA, 524 bp, Homo Sapiens
  misc_feature (71)..(71): n is a, c, g, or t
  misc_feature (75)..(76): n is a, c, g, or t
  misc_feature (109)..(109): n is a, c, g, or t
  misc_feature (140)..(179): n is a, c, g, or t
accactggaagagggaatggctgggccacctgaggggagtgtgtgaaacaatacttgccccccgggaaatnaccnnagatggaggagatgggatggccaaaatgaactnaccccacatccacaggtttcccctaggcttnnnnnnnnnnnnnnnnnnnnnnnnnnnnnnnnnnnnnnnnctaacagtttgtatatattatacattctatgtatatacctgatatggagttcactggggcccatcatgaacataatacagtgaaactccatcaagtgaaagataacgaaagccctcaactgttttcatgtagaatgtaatcacatgtaaagtgaagcctggcatctctatagatctagatggtttgtatgtagacagtgtgtgcacatgtacgtgtacacgcactcacacacacatttactcatacccagcagtggagatcttgtagatgtgaagggtgagatgcctcttctcagccatctaggatttgaatgcacagtagctgctgcattgtggatccaaatcc

SEQ ID NO: 458053 - DNA, 235 bp, Homo Sapiens
actagccaaacagccccgactagcccgacagccccatccagggagtggggaatgagggatgcctgaggtattgaccttgctgttgtgggtctgaggtactctgctttcaagctcctgcccccaagtgtcaaggcatttgtggtctcagaggcccaggggctgccggccacattgggttttcgagaagaccactcatccctgcagagtaaagcgtccctcccatctagactaagcg

SEQ ID NO: 458054 - DNA, 143 bp, Homo Sapiens
ccccgactagcccgacagggcagccagataagcagtctgtagtcactttataggaggacttagactctttacacaggtgcagaaatgaacacgcctccctagacagggtagaggcatttgcagagcatggctgtcggcgggga

SEQ ID NO: 458055 - DNA, 270 bp, Homo Sapiens
ccccgactagcccgacagccccgactagcacagtttgatgtacaaaataattaggtcccaacacttgttatgaggtgcttagttcactcacaagagacttcaggtaaggcatttggcttctccagccattccacgcagctcttttgtcattgaccattgggaattgatggagaactccacaaggacagggaccaggccactgctttgccgctgatagcagcagctttctccctgtcgggctagtcgggggaggtcctctagagtcgccca

SEQ ID NO: 458056 - DNA, 716 bp, Homo Sapiens
  misc_feature (45)..(45): n is a, c, g, or t
  misc_feature (56)..(56): n is a, c, g, or t
  misc_feature (92)..(92): n is a, c, g, or t
  misc_feature (107)..(107): n is a, c, g, or t
  misc_feature (122)..(122): n is a, c, g, or t
  misc_feature (126)..(127): n is a, c, g, or t
  misc_feature (130)..(130): n is a, c, g, or t
  misc_feature (136)..(136): n is a, c, g, or t
  misc_feature (158)..(158): n is a, c, g, or t
  misc_feature (208)..(208): n is a, c, g, or t
  misc_feature (210)..(210): n is a, c, g, or t
  misc_feature (225)..(225): n is a, c, g, or t
catttggaaagtacccaaataaataaaaagcttctatccttgaanttggggaaganattcctaagcggaggctgtgcagcctcccgcccctncatggcccaggcggnacagctgggctcgcncttnnatntccgtntcctgctgtgttttgccctctntggcctgtaacgtgctcctggcgacttcttcctcagtgccctctcttttntntcctctctgtctcanaggctcgtctcctaaagcccctccctcctcctggctcctcttccctgtcctgtctgggccatgtgggggacaggaggctttcctctccctggaccccctggccagcctcgggtgcggggcccgacagcagctcgagggtctccttgctgccgcccttcctgagtgaccaggcacagcacgtgcacgccctggggaacttctacctcttctgccaggccacaggtcctgcagacattcgctttgtctgggagaagaatgggcgagctctggagacctgtgtccctgtgcagacccatgcactgcccgatggcagggcccatgcactcagctggctgcaggacgccatcagggaaagcgctgagtatcgttgctctgtcctctcctcagcagggaacaagacttcgaaggtgcaggttgctgtgatgagacctgaagtgacccaccaggagaggttggaccagagagctctctgcctgtcgggctagtcgggg

SEQ ID NO: 458057 - DNA, 185 bp, Homo Sapiens
ttcctgactagccgacaggagcatggtatttacagaggagaggtgatggtgtagatgggtggattgtgtagacagggtggtggtatagatagggcagtggggatggtctagacaggaggatggtgtagatggaggggaggttgtggtatagacagggtggtaaagctctgtcgggctagtcgggg

SEQ ID NO: 458058 - DNA, 567 bp, Homo Sapiens
gcggaaggaaggaaataagttattttccattgattacccatgctttttattttgaattaatagtgttcgatgcgttattaaaaaatagaatttaaaataaattgtagaaaatatggagagaaatatttatgtttcaaatttcccaagagtagggctttggtgcattataatcccctgatagctggcatgatccactttgttggttacttttaacagggtccttctactctcttccttagtctccaggcttttaataatcacacagaatattcttttcactacagaacatacctacctacattttggctgtttctcaagctgacttatttcccagacatattcatcctttaagtacgcaaaaatgactttcataatatttccattgataggcaatacacaaatatgtttaaatgaaggaataatttattgcattgtactttaaaatccacattccttgctatacataatctgaaaccactataaaagtacacttttttaatgcaacagcgggcatacattttttccagtttgatgtaggcaggacctcagattatgtcacagtacagc

SEQ ID NO: 458059 - DNA, 605 bp, Homo Sapiens
ccagctgggtcctaggataagagatatacgtacatgggttcaaattccgacttggccactaaacagccaatgcagccttgggcagcaagatgattcatctttcagagcctcagtttctgcagctacaataggggatggttttacccatttgccagtgttgtaagcctgggaataatctgtgtaaagtgcctagcagagcgcctggcacatagtggcacttgtcatagtcacactggtctggtccccctggggacctcctgggaatccatccatgtccaagctctttttctgattgggaggggctccacccgcctcccctcctaactgcccttctgctcccgagttaaccggaggcccagcctcagagggagaggggaggaactggtggcatttctcccacttccacccaccatacttgctgcagagcaagcaaggatgaggccccactctgggctgtctctgaaacagatgtggagtctttaataccttttaatcagactattagcgatggaaactcagcctctcatgtggcagctttcccccactgtaggagctgtattgttaagactttacacgaagggggatgatacggatgctctagagtg

SEQ ID NO: 458060 - DNA, 1125 bp, Homo Sapiens
cattgtacacagtcctaagaaaatgagattatcatcatccccctgttacaattgagaaaatgtaggcaacacgagggtaacttctaatgaataagccatgcctttgtttcatataaataagtcaactcaactcacattaacttttcaaaataccggataaaatttatttctaaccaatgcaagtttcaaagataagtacacaaattaaatttatgattaaataataagcttgttaatctgatgcctttcggaacgcatttcacttagcaaacctcaattaagctatttcttatatggtttgattacaaaactgcctttcagcatattaaatacaaggagaaaaaactgaaaagccacaaccatttcaacttctgtaaattaccctgactgtaatgaggggcgccaggcaggttggggaagtatggaaattgcacactgcacacaccacctgaccaccaagaaaaaagaggacaccactcttccccactgtggtcttcacaaactacaactcagcacctatttcaagtgcatttaaatattcaaacaactgaaactaagagaaaaaaactttcgaaagggaaaataacttgtctgtccccttcaatgttcaccttggagttgctctcatctctagaaaaaggcctcacgcggggaagggccaagctgagaaaagcaggtgctgaaaatttattccagaaaactccagggaatagggagtatggatgcctggactaactcgtgagcctggacagagaggagaagcggccactgctgaggattcagtcaatggggaatgatgcaaatgatgcactgggagcagtaacccgcatttctttccttcctcagcccatcctctgtggctttcatggcccctcagggcagtaaccacactctgggccaacactacaggcacaggattcttgattttaataaataaataacctaacacacagggtgtagcacggcaggcagctttgattggagaagcagcttgctgaattctttcttgtatagtagtggagaaaaggcttggagttctattccttaaaaattctggtttgagttacaggaacttaatacctgtagtaattaggcttgaagggcccattcttgttgagtcccaga

SEQ ID NO: 458061 - DNA, 752 bp, Homo Sapiens
  misc_feature (573)..(573): n is a, c, g, or t
  misc_feature (689)..(689): n is a, c, g, or t
  misc_feature (706)..(706): n is a, c, g, or t
  misc_feature (714)..(714): n is a, c, g, or t
  misc_feature (731)..(731): n is a, c, g, or t
tacattttgttgaagcatttcaagatgagctattagtaactgaagtatatgatcttccccaacgacctaatgatgttcagctcttttatggaagcatgtgtaaaattatactttcagtaattggagaattcagagattgcatttctagcagagaattccttcagccttcttccaaagctagcttggaatctacaagcgacttgggagcttctgggaaacatggtggcaacgtctctttggatgttttaccagtcaaaggtcctcagggttctcctcttctctcacgggcggctcgcccgcctctggatcagctggcctccgaagagccgtggactgtcctacccgagcacttgattctggtagctccttctccttgtgacatggcaaaaactggacgtttccagattgtgaataactctgtgaggttactgagatttgagctgtgctggccagcgcattgcctcacagtcacgccgcagcatggatgtgtcgcgccagagagtaaactacaaattcttgtgagtcctaattcctccttatccacaaaacagtcaatgttcccgtgggagtggntttgatctatataacacttgtggacgatgggacagaaggaaaattgtggaaagtttcaaattcgaggaaggatttaacttcaagtggggacttttttaacttcgttttggaccctnccaaaccatttgggganttcttttnccccagtatcttgaggnccttcagtttaggtccatttt

SEQ ID NO: 458062 - DNA, 476 bp, Homo Sapiens
  misc_feature (394)..(394): n is a, c, g, or t
  misc_feature (448)..(448): n is a, c, g, or t
atcttccatgctgtgtaatcttcttcttgaattttctccaagcaaagagccaattttggaatcaggagccgtagagctactttgtggattaactcagagtgaaaatcctgctttacgagtgaatggaatttgggctttaatgaatatggcatttcaggctgaacaaaaaataaaagcagatattttacgaagcttgagtactgaacagctattccggttattatcagattcagatttgaatgtgctgatgaagacattgggacttcttagaaatctcctctccactcgtcctcatatagataaaataatgagtactcatgggaaagcaaattatgcaagccgtcactctttattctaggagggggaacataacattgagggtcaaaggggcagncactgtggcatcttaggcccacataggccggtgggggccaccggccaaagttcnttatttttgggcccctggtggttttccc

SEQ ID NO: 458063 - DNA, 585 bp, Homo Sapiens
agaggtcgaagctatagaggttcttatggagggcgtggcaggggtggtaggggacacactcgagattatcctcagtatagagacaataagccaagagcagagcatataccctcagggcctctcagacagcgagaagaaagtgaaacacggagtgagagctctgattttgaagttgtccccaaaagaagacgacagcggggttcagagactgacacagacagtgaaattcatgaaagtgcaagtgacaaggacagtttaagtaaaggcaaacttcccaaaagagaggaacggcctgaaaacaaaaaacctgtaaagcctcattcttctttcaagcctgataatcatgttcgaatagataatagactgctagaaaagccttatgtaagggatgacgataaagctaaaccaggctttcttcctaaaggagagcctacaaggagaggcagagggggaacattcaggcgtggtggaagggatcctggaggccgtccatcacgcccttccactttacgaagaccagcttatcgggacaatcagtggaacccaaggcagtcagacgttcctaaaccagaagatggagagccg

SEQ ID NO: 458064 - DNA, 375 bp, Homo Sapiens
  misc_feature (75)..(75): n is a, c, g, or t
ctggtgacgccctggaccagaagggcttcctggccttgcttggcctgcagcccaccaaagacgtcaggcctgccnccgccgaggagcccctgccggatgacaaccaggcaattcagctccagacactcaagtgtcagctacctcaggaccccggctgcaccaacctgctgagcctgtcacctttcgaagctgcttccctaggcggttctctcacagttctccccgcaaccaaggacagcataaagcacctgtccctgcagcccttccagaagggcttcatcatccagcctgacagcagcattgtgtcaagcccatctctggcgagtcggccatcgagcttacagacagtccagcaaattctgaagatgcatagtc

SEQ ID NO: 458065 - DNA, 306 bp, Homo Sapiens
cagctagggatgtgaagtggcagactgaaagtatcggatgtgaaaatggtggatgtgaaaatggtggatgtgaaaggcgcatgtctcaggcaagaaggaaatcagagacctggtgcagtaagatggatgtatatccttccatgggaatactgccagcttccttccaggccttgcccctaaaagttaatctgggaagtgcaagactgtataagacccatgtctgttactcctacaagttcagaaaatacacgtgtacaagttactggcttcaggtgttacttgccaggtgattccacagaatcctag

SEQ ID NO: 458066 - DNA, 352 bp, Homo Sapiens
gttagagtcgggtatccatttccctggtgcatacatcgaggctgggcgctccaagaggtaatgggagagcgaggggcgcatgggagggcccagaggaggagaccgttttactactgatgatacaggggcgtgcaggagtcacagcacagcatggcgcgtgggatgcgcacaagcagtaggtgggtgggccggggcgctacttacatattctggcgtgtcatccgtctcccactgagcgcggggaggaggcgggaggggatagaggaggactggtgagcgggggaggccagagatggcgaaagagaagcagaggtggggggcgcgcaaaggggccgtccccgaccggagcccg

SEQ ID NO: 458067 - DNA, 185 bp, Homo Sapiens
atattgaattccctgaatttttctgttttcgacctgttaaaaaaatcttaacatccatccaactagtggtcaaaccaatgagaatgcagctgttctcagagtaatttttaagttgtcatttccctgtgttgcctccctattggaagaagttaaggttaccaagcatttctattcagggtaagggc

SEQ ID NO: 458068 - DNA, 251 bp, Homo Sapiens
gtggtgactctaaggatcccccggggccttaaccctattgtcagtaggtcatcagagtaaccgtgattggctcagcctgattcatattctacatgtagaagaaagagtaggaatagagctaaatcagttttcccaatgacatggatttctgtgatggatcactcagtgatttttctgtatttgtgctaaaccattgtgatgtaggaaggaagaaagtgaattggtagtgctgatttatggttaagggccgg

SEQ ID NO: 458069 - DNA, 587 bp, Homo Sapiens
ctccctttaaaaaaactctacctattttctcagtcatcacttaaacactatgataaaagaaaacttttaagtatttttcataatatacaccattttaaagggtaatgacctaattatttaacatatcatcagttcattagcagacgtgtttgtgtgtaatacaaaatcggtctcctactataataaagactataattgcatttgccttctatactgcaaggaacaatggaatgttttcaatataaataacaaatgcatatacatttttaaataaaatataaaaacaagaagtttttttggaaatatttacttaccacctgatgagttgcttgaattgtcccgctcatattatggagaagatgacaggaataatgcataacacatttaacatccttcagcatagggaatgagcctatcagcacaagaaccacggcaaaaatatgccatctcaagtaggcttgggtgcaagctaaaagtttttgttagcacaagaatgctaactcactgcaccagattttctaagtacatggtgagatgtatatataatgtaaatcttttcatattaacaagtatttaggctgtatgag

SEQ ID NO: 458070 - DNA, 524 bp, Homo Sapiens
aaccaccgccgtgaccctaagtaccgccgtgaccctaaccaccaccacgaccctaaccaccaccgtgaccctaactaccactgtgaccctaaccaccaccatgaccctaaattactgctgtgaccttaactaccaccatcaccactaactacagccatagccctaactactgatataaccctaactactgccatgaccttaggtaaccaccatgatcctaatctaccaccgtgaccctaactaactaccgccatgactctaacttactaccgccatgactcttactacctgtacaaaggcttcgtctccaaacaccatcacattggagggttagggcttcaacatatggatacaggggagacacacactcagtccatagcataccggaagtacacgccttgttcgcttatgctggcccacagccagggaggaacttggcctcaggatgaatgggcctccagtgtcccccatgccttgtacagacaagactgcccccgccacactgggagggttaacgggctcgg

SEQ ID NO: 458071 - DNA, 789 bp, Homo Sapiens
gggattttaagtgtgccactgcacctggcgatgaagcctgtggcctgccctgatggcacccctgggtccagcttcatcccagctctctgtgtcgattcacagcagggcagcctagtttcccttgggcctcacgcaatccttgcctctaaccagtctcaaaggtgagtttggcagagcagccattgaacaacagccttaatggctcctgcccacttgtccctccttccccaggagctcccaggtacagggtgaacatacatctgggttttagagcacaatctgagcttcccatctgattagcttccccttcattctcagggtccctgtttggacaatcaattataaggacaccctatccaggaaccactgaaatcctgacttgtgatctctgatgtcaaggaaaacagatggagtggtcctatcctttccttcccagggataacacaaatgcagacccttagagatctccactctgctgctagggactaatccagcagcagccccctcccttctgaaatctccagacaggtgggggcacccctctctgttcgatcctttaccactttccacctccacactacagggaacacattttaaggaacaaacattaagttcttccaatgaactccaggtgacagctgtgaagtgggcctgtggattagctggagatggagattgcaagatcccatgctttcagattccccaatatctcattccttggtggcccaagtaccccaacccctggtatgggcagggtaggggctacatcccaggagcatgaggcccaag

SEQ ID NO: 458072 - DNA, 181 bp, Homo Sapiens
  misc_feature (1)..(1): n is a, c, g, or t
ntgagccaccgcacccgcccctgcaaaaacccctttcagattgaaggctgcctcggaagacttctgcacttcccctccccactgtaccttccttctcaacattaacaagctgtccgggtcaggatccttgcactccttgtactgtgccttgacctggagctctctgtgccttccttcctct

SEQ ID NO: 458073 - DNA, 469 bp, Homo Sapiens
gagctgggaaggaagttgttgtcttctgtctgttccatctcctgttgctgttccttcacctgcttactagtcctgtaaggactaagctctgttttaatcatgatcacaccctgccatagaacctccaatggctccccattgtctcccccatcatgtcagataccctctggctatttcccaagtcttcaacccttcgacctccacaatcagcccaccccactttcactacagtcctctaatagaagggtgtcccctaggaagggacattgccatgctccttccttccttcctgtcatcgttcctgctgtgatttccccagtccattcttcagggttgaggccaagagctgctgcctcctccaggaaggtttccaagatttctccagtccacaatgacctcttcccttccctgaatccctgtaaccctcactggggtttgtttgttagtctgagacggtttcgctctgtct

SEQ ID NO: 458074 - DNA, 561 bp, Homo Sapiens
  misc_feature (527)..(527): n is a, c, g, or t
agccttaccctaaaccctaatcccgactctaacattcaccataacctggagcatcaataaccccaagccaactcccacactctatctccagatctaactccagtcctacacctgacctcaaacctcagtcccaactcccaactctgacaccatcactcatgaggagcttgaccacacggcagaagctgaagtgtgttcacatgaacctgtttcctctccttcctgggcaaagagctgaactacatttcccagcctcccttgttgctgggcgtggccacggcctgagttatggacactagaatgtgggcagaagtgatggtcagtccctccaggcttagcccccggaaaaaccttcccatgtgagccctcgaaaactctcttgccctgttcaccagcaagcaaacccaggcacaatggcaaagctcccctggcacagtggagtcacaagatggaatggccacatggcagaagaaatgcacccaccaactagggaacactctcgttaaactttgcctgagaggccaggnttacgggctcccggagggttacgggctcccggag

SEQ ID NO: 458075 - DNA, 603 bp, Homo Sapiens
tcagcatggaaatggatataactttctgtggctcctctgcactcctaaaatagtctaatatgttccagatgagtttgcagctgagaactccctgcatcattccactgatggatgcacagggcatgattatgtaacaatgtggacagctactgcaacatctagatcattgagggcagtgtagatgtggctgtgtgctaggacccttggtagctatccagaggactcagtctggtgtctttctgagtctctgtgagaggcctctaagccctgcttctccttgaaaatgattccctagacaccgaatgccttgtttgtatgagtgaataaatgctctgggctgctagagaaagcaatagggggagctgggaggaagagaatattcaggggcgcactttgctaccaaaccatttccatgtcagctgctaacattactggcctttttagcctatgaagtgtagggcaaggactttgacctgccaggtggggctggaaaggagcacatcagctccaggctaagaaatgggatagaaaagcagaagagaggcctggctggctttgcgggggtgagtctcagctcctgagggtaaggctcccgaaggatcc

SEQ ID NO: 458076 - DNA, 345 bp, Homo Sapiens
tgttttatgactatggaagggggaacagtgaaggcctcacaactgtggtgcagggaagagttgagggaactgaaatggaatagtgtggactgagttagagagaggactctgaattttacaggaaaattttggccctaggttttgcatttgacttttatgcaaagaagagaaactagataaaccaacaacaaagtaacaatagatctgattgatcagaacagtgaattccagccccgtatcaaccatgtttgggaaggaggcttagtggccatatcaggacagggaagtaggaggaaaaaagatacaaaatgcccacttggcaacagcctcaagggtaaagtaaga

SEQ ID NO: 458077 - DNA, 393 bp, Homo Sapiens
tgctagaggatcgctcccgggggcccttaaccctttaaggtgaaatacaccatctaaatgtaaatataaatgatacttcctcaacataagtttcttcttatactatttcaataaatctcagatctgctttattctttctcttccatgccaccaataccacttttcttcttaattttactgttagatatgttgtttttggaagaagtatagagggaatggtagtaaagagagagtgctttaggattcaatacattcttttgaacagtaacatttagtttaatctgtactccatagtggtatcactgcacatttttaagagcatcttgtatctagaacagataaggaattcatgtgacgtaagacaaggtgtcactgtagggttaaggctcccgg

SEQ ID NO: 458078 - DNA, 490 bp, Homo Sapiens
ttacgggggccttaaccctcatcccgggcttcagcctccagagcatgggaggcacatatctgtgtttttagatgcccccacctatagtgctttgtgacagaagtcccagccaactaacccactgagtctccaggttatcacccctgccaaatccacacccgtggcctggcactcaaggcctggctccctggtagctttccctatcaccgttaggcactctttcccctgctgccccaggagcccagttctcccgcctggagaaggagctgctccgccttacaggcccctcctctccatcatcctagcagcccagctgccataactctcctgcctggagttttccagacctctcgggacgttgccggcaccctgtagcccctgtggccctgcctccttcccattcccaacacccaagccagggctgccctggctgagcacccccggccctcagtacaaatcccaggccccagtgttatgggctcccgggggt

SEQ ID NO: 458079 - DNA, 157 bp, Homo Sapiens
cgggagcttaccctggtcaaggaccacacctatgcggaagtacaccttgaaatgtgccaatgtctggctagagatgaggttgggactctccggttttagagcgagtaagcccttttccctcttaaagaggcagtgtagtgctatgattacaagaagg

SEQ ID NO: 458080 - DNA, 442 bp, Homo Sapiens
  misc_feature (46)..(46): n is a, c, g, or t
tcattcccctgtgagttttatcttgttttaaaaagctgctcctgcnaaacatcttgttgaaacactgctgttttagggtccacagcctaagtacgggcaaagtgctctttttagtcatcaaaatacaagggtttccctgggacacttggtatccaagcaggttttaaagtgcactattgtgtccaaacactaggaccgttcagcagagctctgagaagggctgggttcagttccatcctccgtgctactgtctatgtcctgctccattgctgtctcctcatcatccagctgttgactaggtgaagttgtttaggctcaagaagcccactgggttcccaccaccacattgggagctgggagtgacaagggataggcatactgaggaatagcctggcttgcggtctgtttctctgaagaagctgggagcgacatttggctctgg

SEQ ID NO: 458081 - DNA, 357 bp, Homo Sapiens
  misc_feature (280)..(290): n is a, c, g, or t
gcggggtaagcctgcagtttcaggtgactctgaggatcccgcacccttcgcacttcttggagagacagtgcagacaggagatgagactgggcaggagagacggtgcagattgtggagattgagccggagaggcagtgcagacagggagatggatgacggggcagggagagacggtgcagattgtggagatggagcaggagaggcagtgcagacagggagatggagacggggcacgggaactacctctttgctctagatgcccttggctcattctataccnnnnnnnnnnnttgctaaaaatacaatacgaaaaataaatacacctggcatttctttatcctgccgggaaattggtcc

SEQ ID NO: 458082 - DNA, 276 bp, Homo Sapiens
gagacagactcgttgggggcgtgaggtgtatgtgcttcgggaagaaaggaggttctgtgtactagaagcttttcactgcgggtgtaatccagtatgctcaattcttcactctgggcccatttccttccagggcccacccacctggccgggagacacagagtccaggagtgatataggcctggggccatcctatttatgccacctcacccccactcacaccctactgcctccaacagagggactccagcgccaggtggctttactggaaaattctcg

SEQ ID NO: 458083 - DNA, 732 bp, Homo Sapiens
  misc_feature (705)..(705): n is a, c, g, or t
ttttttttgtcagggtatttgcagctgtccaggactgtggcccctgtccttttcgccgcagctttcatagccacattggcaaaggtccctggatcttatctgcaaaggtctgtcatcaccttgggatttgcagctcattttgaatggctaggtggttaggttttctcttatcttttcttctatttggggtttaatgtcctctaacccctgttttgctgaactcttcccagtctggaagtgcttttcctcgggggagaaagaggaaaatcagagttgagtattctgctttctctgaaaactgccaacctgacatcttcatccccagatggaaccctgtcttctcctttttcctcttgcttgaacataaccagcaatatcttttattgtctgcaccttttccaagtctcagtttatcacggacttcacctttccttccgtctcttgtaccccaccttttaaattttgaacttatcagagagctctctacagagccacactggtttctttggctctccttttctctgcacagggattttcagcaaatgcgatagcctaatttatcccagagcttcctatccctcttgtgccatattgccatcttgtctctaaacttagaatcataacttttttctaagttttcaaatcatttttctgggattatttatttatccaatcatccattcatcccatgcccacatgcccttnctttcaaatccaactttctcctttggt

SEQ ID NO: 458084 - DNA, 308 bp, Homo Sapiens
gaaaaacgccacctatgtccccagcttgtaaggacacagcagccccatttaatgagcagcagcaagagatggccgcttctgccgccttcatagaccggcattacgggcacctggtagacgccgtgctggtgaaggaggatctccagggtgcctacagccagctcaaagtggtcttagagaagctgagcaaggacactcactgggtacctgttagttgggtcaggtaactttatcccagaacatccaagctggacgggaccttgaagatcatctagtccagactccctcattttaccatcagatagagg

SEQ ID NO: 458085 - DNA, 413 bp, Homo Sapiens
ggcgaaccctggggacgggaggcagggagtggcctggggtcaggatgccaagtccagggctctgggtcctgctggactcagtcacctgggaggcatgtagttctcctccagtctcaggcatctttagggacctggtttccacactccgaacctcctccctttgtgtctggtccccaaattacccaaataagggcaagaacccagtcatccagggaccctgggttggtacacagtctgatcccctacctttgcatagctcccccagggtcaggatccaggggtggagttgggagggactggcttcctgcacccattacagtgaggaggaatggggaggggcacccggctccaacagcgttagtcctctcactgcccccaccagcctaggatactctagtgtctttacccggact

SEQ ID NO: 458086 - DNA, 326 bp, Homo Sapiens
taagcatcccgattatctctctgatgggactgggatggtgtggttgagactgccttactaggcagccaggtgcgctattcagcagccacaagccctacaagtaattaaccaggggcacctgtttgagctggaggtgcatgtggccacagacggttttggttgaggctttgtggctatgcacagagcgcctaagaatgccagtaggcttttggtcccaactatggaaaggagctgaactccggtattcattgatagagaaacagctagcagctgtatatgctggccttcgtgctcatgagagcatcagagagagctgcagaagtgct

SEQ ID NO: 458087 - DNA, 406 bp, Homo Sapiens
tcatctagaggatcccgtataggcgagtcgggtatcctgtatacttattgtccatgagagtgtgagactctgtagggacttgtgggcccacaaattcttttctacatagaacaagtactgaggatgccatcttatataagagccaacatgtgcacacactaggtcctgaagatttgtatcttacattgcagtctgtggccagttactttgggttagaacaccccagatttgaatgaagcggagcatccagatggcttcaagggtgggtttcaggtacctctgctccttggtcactgagggctcccaccagaacagtgtaggccagtctgtaaatagccatccccactttagaaagcacactgcgctgcactaaacacttaggtatctctgactcacgccctgctcg

SEQ ID NO: 458088 - DNA, 610 bp, Homo Sapiens
tccggctgcgcctgcgcattcctggggcaagtggtctgtggtgatcggtggagatccagtggtggggtttggccatgtgcctgtccatatccactgcatatcgctaggtgatctccgtgtaaatctagcagtacgggtaagagtgtttgcggaggaactcctcaggtctcttcctccgcatcagcaggagggtatcatgggtgtgactgtcgggcactaacacgaatctccatcccatgattctaggcgttaggactggagaagcagctccgggccaccgtcccagctctaatctcacttaggcaatgcagagctgtgggcctgactaccacgtgtgtctctggcttgttgaaatgggcactttgtacatctcacttgtgctgggtagagtgtcttttctttagaaccagtaccaatctcttaggcttttggcattctctgcagccaaattctaacatgcttctagttagctggaatgtaccctcggcttacctttggtaaatggtatctccccaggtgagcttagccacttccatggctacaaagacctcattttaggtctagctccaatttcttttctatgtactccagattcctacattcaggtgcc

SEQ ID NO: 458089 - DNA, 670 bp, Homo Sapiens
aaggcaagtccgggtacggctggtcttacaataccggtaactgcaggggagtgaaaaaacacaggttaggtgaggttcacagaaagcccaacaggcactttgcccctcaaggaacaacccaaacgagggacgggaaaagggtggggaatgcacgtccacttctaaaccgtttccattcggggaaataaactacaaagcaacagttggctgctgcaacacagacaacacccaagactagaaacaacagacaccatcttccgttacttgtcttacgcttcctataaacactttgcaacaaactttcctagttaaaaattctctcttcaagacactgcgtactacaaaatcgccgcattatcattgcacagctcaggtcacccaatttaagactttcgggcacgtggcactaaatccacctccaagccgagtggaaatgcgtctggcgccccctgtaggacacaggaggcggccgcacccgtttttcccggactggccttcacgtccgacaacgcacgcggcacgtcgcccggaaataagacagagaacgcacacaaaggccccaagagcgtatctagcgcccgaaaatgcggtgagcttgcaggacacaggcagagatacgagggaaccgtcgcttccacacctgtgtcctgcaagccaaccgtggactagt

SEQ ID NO: 458090 - DNA, 476 bp, Homo Sapiens
tgagcatctttgcgagtcgggtaggaagtgaatggtagttctggggttcatgaggccgctggagggttggcgggaggtgctgaggagctgctccggggccgctaggtgggagggtaccctgttccatgttgctcagggtggtggaagagttcatgttgagaggcggctgcttgttctgggagacccccgggctgtgcatggccgtcttaggtgaggcaacccagcctggagaaggcaccgccatggaaggagacttgagcctgctgggcgagccagtgggtgaacggacactgagggaggagccgaggacctggggcgacttgagaggttcctggcgggttggcagaatgcaagggcaccatctgtgagggagtctggggtgacttgaggttggcagagggcgaggtgaccaggggtgagtgcacctggctaagggtgggcgacttcaagtgccccatacccgactccctaaagga

SEQ ID NO: 458091 - DNA, 389 bp, Homo Sapiens
caggaccttcagcctcttctgatgggcgtctcattttccagtgggggatggggatgtttccttatcttccaggtggccaagagcatgcttctctgttttgtaactgctattagccatcccttactgtgtattttctacctagttattacacaccaaagctctctcataatgcaaagtaattctgataacccccaaaactcaaaaccgtcagataacacagtgcaaaacagaataaagcctttgattttgagagggatctatctccttttaattcctggggtctcatgaggaaaacaggctttttctgaaaacagggtttgcggtgcctcctctgtttttccccaggagtcccatactaccagaagttattttagggctttttatgcatg

SEQ ID NO: 458092 - DNA, 355 bp, Homo Sapiens
actaaccaaaaaaaacaaatgtaatgaatgtggcaaagtcttcagttacaattcacaccttgcacaacatcagagaatacatactggagagtaaccttacaaatgcagtgactgtgggaaggtatttagtcgacttccgtgccttacacgacatcaaagagttcacactggagagagaccttacaaatgtaatgaatgtggcaaagcatttagagactgttcaggccttactgcccatctactaattcacactggagagaaaccttacaaatgtaaagaatgtgccaaggtcttcaggcatagattatccctaagcaatcatcagagatttcatacccgactcgcctttaaacgt

SEQ ID NO: 458093 - DNA, 537 bp, Homo Sapiens
ggagacgacacagagagcacaggttggagcacaggtgggtcgctaggcatatccagggtcctgggctgatacagtatctaaaacagaaaacatccagtgcttacggggtactggctctttcctcagactccacatttgagatgcagaggaactaaaactccatctttgtgtatgtagcaagttttcccctttcagctttgaaaatgaaagtttgttttaggtcaggttcagcctggggaaatgagaaaatcacccactgggatgagcccttcccccttcaacactgtaaatagctttttccacttggcgcggtctcctcgccacggtaataaggagctcttgctggctgctccgacccgtgcgacagccaggccttcaggaggtctggtgtccctgcactttgtggtctctgagcagtccagctctgcctgccatcagtttgggcacttgacatttcaggaaatcctgagcccagattgcagaccctctattttccgtgatatacccggctcgcctttaaggatctgctagagtcgc

SEQ ID NO: 458094 - DNA, 338 bp, Homo Sapiens
  misc_feature (208)..(296): n is a, c, g, or t
cctcatcacattgtttgcaaggattgagttagtatacataaggcaaactagcacctagcacagtgcctggaacagagtagctgctcaattaaggttagctgttattatcattaatgaaaattaaacaagatagcttatgtctggcccatccatggccagacacggtatcacatgccatgtctcctctgtcagaatggctggtgggatnnnnnnnnnnnnnnnnnnnnnnnnnnnnnnnnnnnnnnnnnnnnnnnnnnnnnnnnnnnnnnnnnnnnnnnnnnnnnnnnnnnnnnnnnacataaatgagccaatcgtgcggcgtgcacagcagtcccagc

SEQ ID NO: 458095 - DNA, 358 bp, Homo Sapiens
cccaccgtctccgcctggacgtggaccgccaaggcaggcctgagcgcccggggccgagctcctccacatccgtgctcaaaggcgcgagtgcagcaccagctgggccttgccatcagtccccccatctgggggcgtctgtctgcctccaacgggggctgatccagcagagagagggtgtagggcttgccgcagggcagcagcctcctcctgctcagccacctgaccttgaggctccagtgaccggtggagggccagctgcagagcggcctcctcctccagccacctgggtgccacagtgctgggggccacagctcctcctcctcatacccgactcgcctttataagatctgtagagtac

SEQ ID NO: 458096 - DNA, 450 bp, Homo Sapiens
tggttcagaccccagttagtcgggtagagtcacttagagggcagctcttagcatacgtgcaactgtgctcatacagatgtctgtttgacttgaacaaggaagacattattagtaataatcgtgcaaacaggctgctattgcccagagcatttcctgagacagcttcgttggtgctctttggggcgcccctctggggcttgtgggtggggactatttttgtatgtcttttccaaagggaaatgccaggagggtaagcgacttcctttggatcaccttgcaggcgggccggagtgagagctgaattctagtcttccccaccctctgtccaagcagagcgaggatgaggggagcacagcgggaaggagacggcgcccctgcgcccctgtcgtccgcagcctcacatttccgcggtacccgactcgcctttaagcgatcctctagacaccttac

SEQ ID NO: 458097 - DNA, 436 bp, Homo Sapiens
tccctggctctggatctcggaggtgggggtttgagcccgggcagcgtggctgcgatgtctgttcctagcacacctgccctctctggcctggcccatgtggctgatggagttgtcggtgtggattcaagggggagagagggaggagaggaggtgaaggtggcactcattgacggctcttttgagtttccacaaatacttgtttcctggagagtctttcctttcagacatctgctagtccacctggcgcctgttcagtaagcaccagggaatggaagggcctctcccttcatttctgcattgcaggtgtgtctgctctccagccccccagcagcccctcaccccaggtgcacccgcactcggcctctgtacccctagatgtacccacactcggcctctgtaccccagatgtacccacactcgcctctgtaccctgtta

SEQ ID NO: 458098 - DNA, 211 bp, Homo Sapiens
ccccagcttcccaagccttcctcttttccagatataccatattcctggttgccacaggaggatggggtccagattgctttgctacaagtgttcctcctttgcacacactacactctagatatgcgtcattgaaaatttggtgcccagaattgaatataatactttatatatgatctggccaatctaatttaaggtcaatcacatcattaca

SEQ ID NO: 458099 - DNA, 469 bp, Homo Sapiens
gcatttatgcactcaatccatagctctatgaatatcctacaataggaaggagaatataatttttgctcatttcaagcctcatttctgcaggagcacaaaccttctctgcagccctcatggtcatagcaacacagttgtaaaagagtgacttggcccctttcctgggctggcccccacctctatcctcaattcacaatgtctccaccagtgcatgatccttgagaatcctcttgccactccaacatccttgctgaggtcactgcccagcaaacccgccccagctcttcagcagtactatccccctactcctagaagcttcataggtagttcagagttgcagcccccacagtgaccatcccaggggcaagtgagcaagtaggcctctatttggtcactgactcccacaacctcctcttgcaaacttccaacctacaacctgcagactgatgcaagcctcagatagattcgc

SEQ ID NO: 458100 - DNA, 400 bp, Homo Sapiens
ccgtgaaattcccaccattcttgaattccctgacgctggactccagcctgaggttccggtgtttaacgagaaactggccccctgccagcggtgagcatggactctgggccctgggctctgtaactagcagctggcagcatgaatgggaacggagtgagcagggtgcacgggaacggcctgcatgaggccagcgagttttactatgaggctgtggaaggggcccacaaccccgggggcctcctgctttcaccagctgctttcatcaaccctgctcagtatgccagcgtgctggaaggacgcttcaaacagctgcaaggtgaggcccgggggccccctgtggggacgactgtgccttggcgagagggaccggagtgggtggagagcgggggtaccgagctcg

SEQ ID NO: 458101 - DNA, 625 bp, Homo Sapiens
aaggcaacatgccaccctgtctgcggcccaacccgttgaaggcaccccgtggctgtggggcccatctgggctcagggctcctccccactgcggcccagggtgagcttgtcacacaggtactctgccgggccggtttcccgtggcccacatcttgcgcaggttgctcaggtagccactcagctctttgatggccttgacctgctggttcaggaagtggctctccaggaagtcgcacagctgggggtcacccttctccatggccaggtgagtgcagctccaggaggctgtagttgacactctccttcaggtggaaggcacactccatggcctggagcccactctcccagttattcacgctctggtttccagatgtcacgaaggcagatgcggccaccgcgcaggttctgcagcattatcagcttcttgggcgtgctccctcttctcttgcgattggtctcaggaagcagcggctgatacgctccagggtcacgtcgtcccggtctaagtagaaggccatggacaggtacacacaggaggcgtggagctccaggttgacagtggcatttgacgcagcgtcgcagtcggggtgggtggagagcgggaaatcctgtagagtcaccgcaga

SEQ ID NO: 458102 - DNA, 496 bp, Homo Sapiens
tccacccacccccttactctcccctctctgttggccgctgtctggctccatcccatttctgtgggtacgacttctggggtttcttgtcctgtctgctcctgtcgcaggtccgtaagtcacacccctgatggtgagaccctcctgctaaccttcatgatttccttgtgactcacttgcccattcagtggcttctgaacttggggctggccgtctcctctggaccttgtttgtgtggtgttggggaggccgttggaagagaagccaagaggaagggactgagggcaagtggggggtgcaattgctgagggctaggtctctcctgttctgagtgtcttgtgtgcggaggccttgaagggctacatgctggtcctcactgagctgtatccgtctcttacagagccagcggtgagcctggtgcagtgtgagcagctggtggagagctccgcgagagtgtgcgccaggcagtgcggattaccactcggtggctggatgcaga

SEQ ID NO: 458103 - DNA, 491 bp, Homo Sapiens
ttcctctcctcccacctccccaccacctgattatttgcatattcgtgtatttttctgcccctcacaccagactgtgagcctcatgaaggcagggctgtgtcttagtgacattctgttgctggtaccatccggggtctaggatgcaccccaaaaaagattggtgtcatgaagagagtctggtagtgtgtccctggctgtgtgtggtcctggggtgggggtcagttggggacacttggcctctttcttcatgtgctcattagataagacgctttgctggtctactgcattagcgttaataggtgttgggagggttgctccgagggtgcacatagagcacacagtgcagcctctgaggtggggaaggcttcctggaggaggcactggtttagctgagacctcaaggaagagagagaagatccctaactaccataagtttgctccatgtcactacctgccctagcctccaggccaatgtgaactagacaggctaa

SEQ ID NO: 458104 - DNA, 549 bp, Homo Sapiens
acccactactggcttaaattattaatggtacatcacacagccctaaccaaaattttggtcaagatgcatgtaaacccataaggatggagtattttaatgctcacaaagaacgttgataaattcacccttattacatcaaaacatcaacatctgcttcttggtcttcctcagtcactttcaaggacagcacctcttcgttaaggaagagcccactgagcctctccttccgggcctgcctctgctccttcagctgcctcttgcggaaggccttctgctgtaacttccgctgcttggatcgcttttttgaatcccgaatccgctctgctgcacttgcagacaggttgctgtcactgtgtgctcgactcatgttggcactggagtttgaagcagagtttccaacactggacccactgctgcttgcagaactgaccatgctggcactgctgctgctggcgctggcactggcaccgctcactccactggtgcttgcacaactaaagttgcttctcttccaggcctctcttgcaggccggggtgggtggagagcgg

SEQ ID NO: 458105 - DNA, 522 bp, Homo Sapiens
ggatctgtaaaacactcacttttcattttcaagtgaacgtgaagttagaaccgagagattatgtttttaagccattttcccccaaaataaattataatgggaaacttggtcaaattcactgaacctcttgcacatttcaccttggaattaatgttctttcacgtcgtcctgaattgagctttgactgaataaagcgagaggcacagccaatcaggtgcaaagagaaaagaagattctgagaatccttctagcccaagatttgaatcaggtctctactcccttacggctgtgtggccatggacaaattccttcacatcaccggttttcagtttcccaatctgtaaaatttcattgctattacccatctttatgaatcactgagacagccaagttcaatgagaacacctatttagaatagccacatagtaggtactctgattaagagagccataatgatttaggttttcattaagcaaatcttagttgaactcacttgataatgacagcgggggtgggtgagag

SEQ ID NO: 458106 - DNA, 509 bp, Homo Sapiens
actcaccatacacgcccggcagtacatttgctcaccctaccaagtcacctgtgaagtggcctaatactgagaaggcagaggctgctgcccggccctcacatcctcacagtcacaactgcctgctttgggagctagcgagtgttgagaagctgctgtaacccgcctgcaaaaggcccaacttgtgacagacactgcgatcctccccctgactctggaaaacactgtctgaaaccacagtgaccctaagactgtcttaaaaacaaaatgagaagggagtcaaagcaacgtactgcaaaaaagtcgactacacacaaaggtagcaagggagaacgtgagcgaccagaaacatggcagaagctccccctcagtaactgctttgaaagcgaatggactgatcgctccaacaaaaggcagattggcaaagtgggtgaaaagacgatttccatgttgtcaccacacgatctgccagacgttcaaagacacgaacaggctgcaagtgaaaggatgac

SEQ ID NO: 458107 - DNA, 436 bp, Homo Sapiens
gacagagtcagattgtccaaaagttttaccctgtcaaccttcaggagtgctatggggttctcccatgcactctgtcctgagaaaatgccactaacccactttagatttgcacctaattcttctggtggacacttggcctttcactgtgaattttgtcataaggaaaataacgacttgaatgtatttaacggacaatcagtgtgactacatagtatatgtttagagctggagagggatatcagagagatccggtataggctcccaaactaaagagctgagtttcactagggagagagagacctgtacatgaacagcacaaatcacagaatcccaagtttctcctatgtgccacttccataagactgagtccactggagtgggaatgattcctaatttatactgaattattcttttgattattttcatggctatcaca

SEQ ID NO: 458108 - DNA, 353 bp, Homo Sapiens
acttactgatccagaaattcattgcttgtctccctaatattaagttaatggggaggttagtgtgggcagaactgagaaatgaatacgttttgatacattccaacttcccagcagctggtaaaagcatggtatgcattttagacttttgatattgaaacatttgagggatggaactcgtgttaaaaatttcgtcagcacaaagtatgcataggtgaatgaattaagatcttatctttgccctactaggaatttacctatcaatgcattaaacatgtacttataccactatttaccccacacaagcaaggtgatgtttatggtttcagttgagctgtttaccacatcatcttcgg

SEQ ID NO: 458109 - DNA, 203 bp, Homo Sapiens
tccacccacccgcaaggattttcctgatgaggtgagcgtcaggttagctgtgacaaactgatattagtggtgtcttgagcaggccaaaggctggacccagtagggatgcagcagagacctggagtcctgcttagggatcctgtggggtattgctgcatcaccctccagatctgctggtcctttgaagatttgaagtccaccag

SEQ ID NO: 458110 - DNA, 489 bp, Homo Sapiens
tttaccttacctagattgataagtgtccagtgttttaatttttaataagacgtggctttcagaagttgttattttcgtcttgtagcttcaacactaagagctggtctccttcaggtgagttttatgcaggattcagggaccatgactgtaagccggcaacctggttctgggtaagtgatgtattcagacttctgctgaggaggctctgaggctggcgtgagacttgccaccctgcggtctgcaagggctgcagtctggctggcctttgtaaagaccctggagcaatagggcagattgcatcttggcaaatgactctaaattgcctgcaatttgctgggaattgccacttccaaatgtttgttgcagcatagataatctgagcttgtgaaaggtcattggctgttctttgcccccagtaacctcctgggggcttctgctccaggggtgaaggctggagtgagggagctagtgtctcctgcggtgggtgta

SEQ ID NO: 458111 - DNA, 475 bp, Homo Sapiens
tccttcatgcattaggtattctttagaaagtctgtttatataaagttctgcagagtactctctacataaggatattgaaggaaataaatggtggtatcacagagtcaatgaagaagtagcctcaggagtctacccagggggaaggcctctctgaggaggtgacacttgcatcgaaacttgaagaatgagaagccaggcatgtacccatccaaggaagagagacccagattgagggcgcaactgtgaagtccttaggcaggaatgtacagggcgtgttccagacccagaaagggggctcgtgtgtaagtgaaaatggtagaaggatgaaagcattaggtaacctcacttaggattttgccatgggaagcatggaggagtttgaatagggaggtggcactggtaataggcccaggtgggagaggattgcactagtgtaggtgagaagggtggctggggtgggtgcacagcgggggga

SEQ ID NO: 458112 - DNA, 422 bp, Homo Sapiens
ggtggaattccctccaggaaagagtgagctaaacatgacatcacctgaatgctcagaggcatcctcttgatgttatttcctggcaattgtctcccttgagtgttttgcctgaaactatgactcaggaattttttaaaagtccttttgttttttctctggtggtcactggttttctttttgtcactcaagacactccatgtggttccttaaacatctcatactttgttcttactctaaaccttacaatgaactgtttcatttgcctcttccgtgttctggagaactcttacctatgcttcaggactcactaaagaatcttaatcaaactcccctccttctcctaggccgcgttatgcctcactcctcttccttcccacaggtcctaaacaaaacaccatcaagcatttcatagggagaggtga

SEQ ID NO: 458113 - DNA, 145 bp, Homo Sapiens
ggcgtgaacccaggaggcagagcttgcagagagcagccatagccacctccactggtttcgacgccagctcccgggcttcaaggagtccccgcgcatgctcagggagctaggtcgcgcatgctcagcgcaacggcggggtgggtgc

SEQ ID NO: 458114 - DNA, 234 bp, Homo Sapiens
accgctctccacccacccctgacaaatggcctaatgggcctgattcacctcactgggcaggtggcggctatctactgagtggtctgagcaagagccttaggaaaaaggtccagatagactgatgtcattttaaaattgccaacatcaaaagagaaatcacagcaaggatcatgagaacggaacctcgggctcgcagaacgagtttgcatctggctcttccctcccactaagcag

SEQ ID NO: 458115 - DNA, 262 bp, Homo Sapiens
cccccgtcggcacccaccccagcttttcacttttcattctgaagcattaatacccatttaatgggtgggtactaggggtaatacttggatgcgattatgataacatggaactttttgtagccacattattaataatatataatttcataattagcctcagggatggtgaaagtaaatttggtttttcagaaaccttgcctttttgatgacatttatcactattctacaatacagtgaaatttttcctgtttaaacaatccac

SEQ ID NO: 458116 - DNA, 438 bp, Homo Sapiens
  misc_feature (44)..(58): n is a, c, g, or t
  misc_feature (60)..(195): n is a, c, g, or t
  misc_feature (211)..(223): n is a, c, g, or t
tcaagctcggtacccccgctctccacccacccctactaaatatnnnnnnnnnnnnnnnannnnnnnnnnnnnnnnnnnnnnnnnnnnnnnnnnnnnnnnnnnnnnnnnnnnnnnnnnnnnnnnnnnnnnnnnnnnnnnnnnnnnnnnnnnnnnnnnnnnnnnnnnnnnnnnnnnnnnnnnnnnnnnnnnnnnnnngagtgagactgtctcnnnnnnnnnnnnncgtgattcccagtgttccagcactagaggtggagctcagtgggaggcgtctgggtcacgggggcagaccttgcgtgagtggcttggcttcttccccgtagtaatgagttctccctctgagtttaggtaagagctccgtgtttaccccccagcacctccctccctctctcaatgtgagattccgcctccccggggtgggtgcagagcggggggatc

SEQ ID NO: 458117 - DNA, 212 bp, Homo Sapiens
acccacctgcgctgaccacctctcccttgtagccctgcaccacctcccagcgtgagagaccctcgtgaaaggtccggctcaaatgctgctccctgtgtggcacagctctgaggatacaggccctcccctctccactgggtgggcagcaagggcaccagtccaggccctgtcccttggccagatcctctgccggaggggtgggtggagagcgg

SEQ ID NO: 458118 - DNA, 618 bp, Homo Sapiens
accctccgctctccacccaccccaaacgacccggggctaggtgccagatggctagagaccgcctgtatagcctagagtctgagctgttattcagaccagccagtcttagctatttcccttgcctttcctttcagaacatacagtagagggtctgagccacgttcctcctcactcctgcttctgcctgtctcccatccttccccttcatggcccggtgtggtctgctgggcctctctttctttcatttctgtaggaattgtgagaacagtcaacgctgtcaatggcatccacctttctgcgtcctcaatcagttacttttatcagacctgggtacaaattcgagtttatgtccccaacttgggggagtgcaatggtggcacttcaatttcttcattatctgtgctcacctaaaagctgagtcactgctaaaaggctattttatagaattcagcagttgagaagtgaaagtcaaggtgaggctgaggtgaggagttgtaaagggcaaaagactttcccctgggagtcagagccagtgctctgaatgaagtgtctcaccccagtagagagggggtgaagctggccaagggggtcggggatctccctgtgtgggcgaagggt

SEQ ID NO: 458119 - DNA, 408 bp, Homo Sapiens
  misc_feature (16)..(16): n is a, c, g, or t
  misc_feature (25)..(25): n is a, c, g, or t
  misc_feature (321)..(321): n is a, c, g, or t
ttgctgggcccctggnaaatcaaangtgggccaaaagggaacaggtgtgcccagcaactgaagcgcatggcctgcaatgatgctggaggtgaacggcggcctgctgctccttgagcgcccacactcacctcacccttaacgatgcgctgtacctgtgctaaaatggactcctgcaggctgcccacagccacaatgagctggtgctgcacctcagcacgaacactgccggccacggtggctgccatctgctcagtggcactctgcagtgtgctgaccaggccccgcagctgggctagcacaggctccctggcctcctgttcnccggcttccggctcttcatgtggctttctagctgctgcaagtattcctgtgtccccagccggaagctatcattgatttgctggaaca

SEQ ID NO: 458120 - DNA, 230 bp, Homo Sapiens
acgctctccacccacccctcattttccacactgactctgacttcttaacacattgatttatgtcctgtcactgctcaagagccggctcatggaggaatgcagcctgatggtgccatttggaatccacagagctttatacccacgtcgggggatgagagagcctgttttgccgattcagccccggtgcttacgcaggccccggggtgggtgagaataaggatcctctagag

SEQ ID NO: 458121 - DNA, 455 bp, Homo Sapiens
cgggccagttacggattgggcctgagacactggagttctaacagatgctcctaggtgaaactaatgctgctggtccacaataacaaacttgggccagtgagattactagaggattctgatggtggtggttcgctaacacttacctagacttgaggatcagagagcatctggcaaggactgtttccaacatatagagctttatctccccagcgacgtgacttttcggatttgtttccttgctgcctcccattctcaaatatgttccagccctgttctttatgtcttggcagtgctgaactacacatactcctgcaaacatgacaggaaaacagctgcttccatgcccttcctctgagtatccagcaggttaagtcctattcatctgttaactgagccattgctggtgtttctcctatgaagccctctctgactcacccaggcagacttgggcattc

SEQ ID NO: 458122 - DNA, 302 bp, Homo Sapiens
ccggttcctctactccggttgcctctactctagatagaataagcactgtgttcagaatccagtcaggaccaggttgtacaagaaataggttctaagtttacaggacaagaaataggttctaggtttcaggcaaatgcaacatctaggaatttagagtagcaaagtaggatgcaggtggtaggacacaggtaaaactagccaggtaagacgggcaggcaaggcagataagtggaagtggaggctctaggttatgtactagtgaatgatcaaggacctagaaacggaggatgtgtcctaacact

SEQ ID NO: 458123 - DNA, 577 bp, Homo Sapiens
  misc_feature (509)..(509): n is a, c, g, or t
tgcaggctctttcaggagcgtcagcctggtttaccccaaaagtatgagtaacaaagccatttagaatagcagtaggccagcgggtgcagtttttcttacacatgtggctcgatgcatttttaatgatgcttcagtaattgccacttctaaagtaattttaaagtttcctaatgtattgactagaatccctgagagaacaatcagagatatcccatgcaggtctgtctgaaggcatcactaaatgaagagttggccatctcccctctgtgaggtttttgcatgcaggtttctggtttgagatgaggttacatcactgtccagttactttttccaacatgccagacattagtttgtaggatccctacgctagagtgcaggcatagttgtcaaagtgtaggaatcagttggaagcctctttgggtctacgcaggagcttcaagccatgaaagtcatttgttttcttgagttcttacgtagtctaaaattattttgtcagcccaattgtagangccctaactaaaataaaatagcagaggaacctgctcagtgtggcttgcacatcctactgcccggtact

SEQ ID NO: 458124 - DNA, 186 bp, Homo Sapiens
ctgagtctaggaagtgaccgcagtgggtgcaggaccgtctgagtcctaggaagtgaccgcagtgggagcaggaccgtctgagtcctaggaagtgaccgcactgggagcaggactgtctgagtcctaggaagttaccgcagtgggagcaggaccgtctgagtcctaggaagtgaccgcagtgagcag

SEQ ID NO: 458125 - DNA, 539 bp, Homo Sapiens
gtcacactggggtctgtaattttatttctgctgccttggtatggttctgggatttccctctagtttggaataatgtcttgccatgtatgtgtccttccacagtttctgctactcagctcggttttgttttccttcttccaatcttatgacctatggaacatggaaggcttctttctgctttataatttgtgaccaaactttatgatttattccagtgcaataaaggcaagaaaattgatttttctcataagagtgcatatttccctttcaagaaatgaaaaactcatttgtggtggggaagaacacttagcaaaagcaccaaaaggacaggacagctaaactattggactagcttggacaagtgatttaacttttcggagcttagtttcctatccctagcctttgataggattaaataatcctttcacaggattcactaaggaatgactgagattgtgcgcatagactatcactgtgcctggcacagagtaaataaattaccgagttaataaattaccattcatttctatatgaaattt

SEQ ID NO: 458126 - DNA, 528 bp, Homo Sapiens
  misc_feature (377)..(387): n is a, c, g, or t
ggaaggtgggaggagggagaagatcaggaaaaatgagtaatagggttattagacttaatacctgggtgatgaaataatctgtaccacagactccccttacataagtttacctatataacccacctgcacacatacttctgaacttaaaggttaaatacgaattaaattaaaccttaatcacctgaccaaaaggaatgaaatgatgtggagctctgtttatgagcctaagattgtgctaatatctagaaaaccggatggtttatcccgaaagatttggatagctatggatatgattattttactgaattatttctctaatataccgatctaaagatttgatttaattgccaatcccgtaacctgaccttctttcgttnnnnnnnnnnngtcactttgatttgcttacaagagtaaatattgtatgaaacaacaaaaagagtacatactggaagattatatttatatgaaattcaaaaacaggtaaaaactaatctttggtgttagatgtcagaatagcagttaccccgt

SEQ ID NO: 458127 - DNA, 620 bp, Homo Sapiens
caccgtccccatcagtccacccattctggggcctacacgaagtgggtcccatgcaatccattccctcagtggagctcaagctccagcccctgggatgagaagaatccagcaatgcttgggagagccagaggacttcatggaagaagtgtcctctgagatggaaggattgggagtccagggtggtgggaacagccggcccttgggtccttacttcaggcgggggagccatggagagatcccaccaagggaaggctgtgggagattctgcctttcctccctgcctctgcccagggtgctgggtgtgaactgagggtggggtgactgttgaaggttctaacaagccgtctctgagagatttgtagctaggctagtgttaggtctttcatttcaggaactgtgttcaaagtttggcttctgaagggcaccaggagagagatgttgctatttaaatctgagggtccagtctctgcggggtggtatgagggtttgcttgtgaatggtggccagctaccgctttaaaagagcacatgctagcacagctttaagcatgagtacgaatgcagaggtaacagatgtgtggcttgtcaggactatgcatgttgagacttggaaatgtatgg

SEQ ID NO: 458128 - DNA, 268 bp, Homo Sapiens
cttatacccaaacaagaattccatgagaacaaagatcgagatggtagatggggaaagaagaatcagttcagtaatatttcccgtatctgaagagcaagtttatacaaatgacaagattcagtgagtgaccagtataatgtattaaataaacccaagatacagttgtgagcgataagaacaatggtaaaattccaagtgatttcagcgttaagaaagattccatatgtaagaccaagatttaaaataaatttctgggtcaaagaacagt

SEQ ID NO: 458129 - DNA, 632 bp, Homo Sapiens
ggaggaagggaaggaagctgtgcagtgtgtactgcttgcttatcaggaatcacgtcatttcctgtgtaaaggggctgtgtggtctccaggggcactgtgaagccttggatggcatgatttcaccttcttcttgctcatcattgaggagctctcattagttaatgctagccctattcatttcatcatacatttattgtgttcatactgtgttctgagctccgtgtttaatcttcgcaggctcatgaagaggagttaaggatacttttgtcttgaaaatgctaacagtgcctcttgtgcttgggaccagggctgctggaaaacccactaagcagcacacgggaaactagaaaagcagaggaacaaagttttggggtttttgggagagggggtgacgaatgacatattttattccaaaagcataaaatatttaatagtggaaactatgaatgatactgtttaatttttaggaggccaaaatatttaacgatttataagttttaagctggccttggagtgagggcagaaaatatgtacacaaacaaactctaattacagactgactgtgatgtataccataacagagcaacaaagtaataatggatcgggagacagaggaacaccatccctgtgga

SEQ ID NO: 458130 - DNA, 536 bp, Homo Sapiens
aggggtttaatgggtttgtataatatttgtacaaagtaatattatcattatcataaatgttttctaattatttcttgggattaaaaaaagcatcttgtattattgatggattaagtacaatatttatgaaacagtgataggattaaagagaaataaatatgtatatctttctcatgtgtaaataataaatattaattcccatcatcaattttgggcaaagtggtttaggtatataatatttttgtacatacttataacttactaaatacttcagttatctgttgtgggtttaggggtatgaaaatagtgtttgtttatctgtaaactgaagtacttggtaaagtcttcagggactgcaggaaggacaaagatctgaaaaatagaccaaagaaataatttaaaatgtgttggatttttagaaaatatgcaaaatgtacacaataaactttcaaagggaagaaacataaacttgcatcaaagccagaaataaattaagccccataaggtgttgtaaatccccagagcactcccctgtg

SEQ ID NO: 458131 - DNA, 473 bp, Homo Sapiens
caaagacagtattttccatttctgagacttcttattagttctttttcatgtctgttcctgcatggtcattgggtgtgaaatctctttcttcttttgttttctcttcctgtttaggttgatgtctacttcaactcccaagttactcagttctaaataagcccttaaaattggtgattactgtgtttctttcaaacagaagtattaggatactgcacatctagtcacaaggataccatcttccttctggctttcagaaaccctaggtagctttcagaattaggtctctgcactcccgctcctttgatgagcaggaagagctccactccagttcaaggctcagtcccttgaaccattttcacgtaacactgaaagcaggtcatacttcgtcctcctgtggcctcctagtctcttaccctcattaagtcctcactgatgcgccatagtgacgtatctcctgaccctttccaactgtg

SEQ ID NO: 458132 - DNA, 354 bp, Homo Sapiens
ttctttaccaacatgatgtatttgccagacatgattgaaagatgcttttaatgccataggtacagattgtttttttgaagtatatctcttaaaagtgtcttcaaattttctagaggatagaattttagactgaattctctcatcttctaagtaatagtaatggattttaccacagattcattcccgattaataaaactttgcccccttcccgcttatgcatgtttttgacaaaattacattgtcttctactcatttaacctccattatctaagactagaatttaatcatttttatgcttgcaaagctcaattgttttggtttgtaacacatttctttgcatgttctattttcct

SEQ ID NO: 458133 - DNA, 491 bp, Homo Sapiens
tgtggtcggccggccgggttatttttcacccagagacggtccttgacttagacaaaactactgaagtgatgctgctggagtcaagatctctagttagatctgcagctattgaaggaaccagtctgacggctgtaaattaaaatgagctctcctgttgtttgtaagtggtggatgttttcagaacattagtttaggaaaatatgttacagttggtataagagtgagttgtatttatttcatttactagcaaccatgcaattacggaagtagaagagaccttacatatctgcagtccctttgttgaagacctgagaagactgaggtgtactgcggtccactaagggcacctgtgagtaggggaatgagctggtgttagatccagtcgcttcccgactttgacctagactttggtatcacaactttctcatggccgacttggacgccacagtgagtgacttcttgtgctggaaatgagagaggctctatttacc

SEQ ID NO: 458134 - DNA, 575 bp, Homo Sapiens
gttgacagtgggagctggttttgtagaacacacaatggcttatttggagagctccacacaatagattatcctctcctgtgggagccagaaagagatgagctcacagatactgggtttcttccttcctggtagttacgaataaataatagtgtgcaccagactcaccctctagtggttgttggtagtcactaaaacaggaagacttgtctcctggtttgctttttcttcactttcaattgctttctctgttcctagtggctgggcttcccaaatgtgatgttggtgcaataggcttcattttgaaagcagctggaggtcattgtcctttagaaattggaggatggaatcttcacctcttaacacatttgttgagtagcaggcatgaccttggaatgactgtgaaacttacttttcacgtttatacctcatcagtaccaaagccagatcctcctgtgatgtagcaggaagccctttattagtttttctctatcaatccatcttttatcatttccaaactaggataaggagaagcttaaatatgaaatgtatttaaaggtcttatcctaccagttgtg

SEQ ID NO: 458135 - DNA, 537 bp, Homo Sapiens
cagggtcctctactaccttctcaggtcctgtcctatctctccatgtcctatacttccttcccaggccctgttactatacctccatgccctgtactaccttcgcagttcctgtatgatcattcccgtgtcctgtactattttcccaggtcctgtactatccctcacatgccctgtgctacctgtccctcgtgctgtgagcacgttggtcatggagtgctgatttctttatcggggtcgtagttgttttctgtgttgctgttgtaccctcctgtgtcctggcacgcccccctgtgtcctgtgttttctctggactcataatcgtaactctccctagactaacacatttttaaggttttgaactaacttttctgctatttgccaaaggatactagtctgtaatcgtgctataattttttattccaaatgttacaattatttttattcaatgcatttttaagtattccttctggacatgggtcagtttatcaatgagttagaatatagttggcttatgattgggctaaacattttggtatt

SEQ ID NO: 458136 - DNA, 427 bp, Homo Sapiens
cactagggatataatatcactttcactgtgcctggaggccacaatcctcagggaaggctgagaaggcaaacgaaacactcaagaggcacttaaggaaacgaacacaagaaactcatctcccatggcctactctcttgcccatggccttgttgagaatccaaaattctcctcacaaaatggggctcagtccatatgaagtgctgtatggatgaccttttctcacaaatggcctcttacttgatcaggaaacggccaagttggtcaaagatataacttctttggcaaaataccaacaaaacgttaaaaacctacccaaaggatgtcacagagacaagggaacagagttgttccaaccaggagatttactgttggtcaagtccctcctctcttcctcctcatctatggttcctgtggaaagtacctcgcc

SEQ ID NO: 458137 - DNA, 226 bp, Homo Sapiens
ggatacatcctccacatgtgttctttaatacttaagtggacagatttcaccctctgaggattccccatgcatccctcttttccgcttctcacttccttccaggggttagggtttacacatggtctctgggtacagttggaaactctttccacagtagtgatgggaattctttaccaaactcttcagtacctttttggttggtgtttgttttaagcattcatggaaa

SEQ ID NO: 458138 - DNA, 393 bp, Homo Sapiens
aggacgtggagaaatttaaagcattcaaaggtggatgctgagtaatatcaagtgtaccagatagcattaggtacctagacctcatgggttggcaccaagttccaatgagtaaggggagagagaatgcccttgggaatcaggacgagttttaataatcatgcgagcttgagcaagcgttaaatgaaactgttgtgtaagactgcgggcgttctgatgaaaaaaaggaatgatcagcttgagctcacaaaaaagcaagagagtctgaaaaccacatctgtggttgtaccagagcatcaactcaaacattcccttctgacagggaccaggtagcccagaatgagagcgaatatgtgtgatataaagggggtgatgacgggcacagaggagctcctg

SEQ ID NO: 458139 - DNA, 397 bp, Homo Sapiens
agaaccatgtcttttggcgtattccacagggttccttgcaaaggcaagtctttaataaaagattttggtgaagttatttgtcagggatccattcattccattcatttagtgtctaacaaatagttactgagtaccaaccttgtgaggtgccagagatgagatggagaacagagacacaggccctgttgtgcggagcatacagtcttctgcaggagacagagcttgtcagattgccaccaaatcaatgtaaaacaacaacacgtgacaaacgcaatggaggatttgtcccctggaaatactttagcctcaatatggaggggaggaatgcttccccgaggaagcgatgatcggaaacatgaataggactgaaccagacaagggagtgtgatatgcaagg

SEQ ID NO: 458140 - DNA, 734 bp, Homo Sapiens
gacttacttttccacagggacttacttttccacagggacttacttttccacagggacttacttttccacaggggatccctctcactgtggtttgccatatgctccacattgcgtcttatcccaccagtgacaccaccaacacaataggtctatagaataatatggcccaagagtcagagctccttgcactgcatctgaaacctgatccggaactcttttctgttttacataactctcaaatctggcagacttccatgttacctggcatataggctggacgagcatcgtaagtgtagaatgtgttccctccaaaattcaaacaaccttctgttcaggtatcgtgcttttttcttaatggtagtgagtataagatgcagcaaactaattattacttggaggggatatctcagtgtaccccctgactactgggctcctaaaaatgttgctgaggagacaggtccttgaattgttgtagggtttatttctctctttgtggagtgcatgattcctactaatgcaaacagcacattagccaactgtgacttttgcttctctatcagcatgatttggtggatataatggatcgttgtgatgttctgctagatgtccacacactctagaagttttggactatgttaaaatagtgcataggaaaacgaatatggagttgggtgtaaaactgtaaaaaatataattccctgttgcatgtgaagtacatgctcttccttatcctt

SEQ ID NO: 458141 - DNA, 329 bp, Homo Sapiens
tttccacacagggtctttacagctctctgactctctctcagtttctccatatcctggactctgtgtctgtctccttgtcttgtctctttcctccttttctgtctctggcccttgctctgtcctctgacagtacaaatatcgggggcctagagtcatattgacctgcattcaagtccaggctcacctcatccctgtgggactttggccaagttccacccaccctcactttcatttcctttctccatttccacctttgccaccacctgcccctgtctccttgtccctgtccatgtctgcctgtcttgattctgagtctctctatctcttgg

SEQ ID NO: 458142 - DNA, 440 bp, Homo Sapiens
gggcttcctgcctgtgcctgaaagaaatgttaagagtatgttaagagtacagtgacacaaactgggtaaaaagcgtcaatgttcacatgtagtgcagagcagatagggatgtagggtaactgggcctgtattggggtattagagttttatttcaaagagcaaaactcctggagtcctgagccaggggaactcgttaagtgacagaaaagcgactttaccctgaagaagattgtaggcacttctttgccaccatgatagaagcagaagctgtagctcagagccttgacgataagctggtgtttacagaatagttggaaatcactgttgttttccctgtttgcttctcccttgacaatgccacacacctccttcctggaaccactcataaaggctgacgctggaggttgacactcgtctgactgcacttacgctgtgtcagt

SEQ ID NO: 458143 - DNA, 422 bp, Homo Sapiens
aaagtgacagtcttaacccacaacaagctagctacaatgtgttcccttctggatactccactatgaaagggaacttaaacatcacggttcaagcagaaggaaatttgcattttggtgagggaaggatgaagttgctggagagtttttaagactgggaaagagatcaagctttcacacatgtgaaggctattatacaagaaggattaaatatgttctgaattaatctagaggtattagatagagcccacataaaacaagaagagtagttagaactcaaaaggccctgagatgttccaaagaagctagggaagagacacagacgaatataattatcattaagaataccaaagtgtgaactccagcgagaaagagaatggagagcctttaaaacttcatctaggccgggcgcagtggctcacact

SEQ ID NO: 458144 - DNA, 386 bp, Homo Sapiens
tacttttcacagggaacgtcaagattttaaaggacttgagtaaaaagaatactggagagagatccagaaaaagcctgcaaagaccctaaggcaagagaatgcctgtgaagtccaaggaacagcaaggcacccaacatgcatggaatagagggatcaaaggagagagtaagggcaggtaaagtcagatagggagccagatcatggatgatcttgagggctctcataaggcgtttagcttcacctggtaaggagtgggaagccattggagggttttgagcagaggagtgagattatctaccttataccttaacagagtcactctggttgctgtatttaggaacaagggcagaagcaagaaggtaagttgggagcacattgccatttgc

SEQ ID NO: 458145 - DNA, 162 bp, Homo Sapiens
  misc_feature (42)..(52): n is a, c, g, or t
tgaatataatacatgaagttactgctgtgtcaggctctgggnnnnnnnnnnncctgttaccaagttcatggctctgaggaggtcgggtttggtttggttttcttctttgcagtataagtggaagtttttctctcatgtaaattctgcttctgcaagggtacc

SEQ ID NO: 458146 - DNA, 410 bp, Homo Sapiens
ggtctttcttggttgccaggagactggcctcaccccacttagtgttcctcatgcctgcctggttgctgcccacagcctcttgagcgtcttcagcacttcatagtcagctgttagctctgtgctgtgtttcctggatcctcggcacctttgatggacacatctttgggaacatacggtgtgaaattcccattagattcagaaatgttaggacatcttagaatccaggaaatggggtgacagtgcagtggtcattgacctgccagtgtgtccaggccctgtgaccttgtctcttgtccatatagtacgttcctcggagtagatggccaggggatagttgttaaatgtattgattaaacctaaactagtcgctggttttcatgttgtgtccccttcgaagtacatccaccatg

SEQ ID NO: 458147 - DNA, 279 bp, Homo Sapiens
cccttatgagtaaacatatgagtttatagattccggttttctgtaaccagtaacttcaagtactctgttttaactaagcagcacagtgaaggttgtaagacatgcctgagcaggcctgggctgcggcagtctgggtgccatagcgaacgttatgagataagcccatgcgaggctcttttgagcaagcctagataacagccatgtgagctgcacagcaagggtcatatgtaatcctggctcatgaacctgtcacagtttgattagctgcctttgttctgc

SEQ ID NO: 458148 - DNA, 397 bp, Homo Sapiens
gttgaccaaaaaccccgttattttcccccattccatactgcctgtagcctcccatgcaaacccatttcagaacctgcagctgcagtcagtctggagtcaggtaacttaattaggaatctgtttcatgtcttatcattcagttcctattggttaattttcttggaacttatgtcagagggacatccatgtgcatcctaatgacagcctcatttgagacaaaattttccatcatggactaaccaaccaccaggtgaccccaggcagtctcccctggcctctaccacaagtccctctcccaggagttcatgctgtctttaggcccagtccatctgtctgtctgcttctctctctcccttcctgtcctctttccttgggcagctcctcctcttccccattt

SEQ ID NO: 458149 - DNA, 243 bp, Homo Sapiens
atgtttttgcaagtttttaccaacttcttgcttatatgtgtatattatgtagtagaaaattattcatcaatataaatcataaagtcttagaggccctgccctgtggggtgggggccagccctttgctactacataacctgccctagagatagcattcctgccttcatctcaaggattcacaaaatagggccccgctgctcgcctcatctcctgtctagtgttggacactgcccttgtgtctgg

SEQ ID NO: 458150 - DNA, 159 bp, Homo Sapiens
tctgaaagtcggtaaacgtgcaagagaataaacaataatcacgagagcaaagattgaatttagagagatccagagatcagggaaagtcatcacaaaaaccaaagacagcttgcccggagactagccttgtggagaacatgcacactgcggggctcacag

SEQ ID NO: 458151 - DNA, 527 bp, Homo Sapiens
aagagaccatgtgaagacagaggcagagatgcgaatgatgctgccataaggcaagggacacctggggcttccagaagctggaaggggcaggaaggcctcctttcttagaggctttggagggagcacagccctgaggacactttgattttagaccactagcctccagaactgtgagagaataagtcattcccaatgctttaagccacccattttgtggtaccttgttacagcagccctaggagactaacacaggcacgggtgatgcaaagacagaaaggttatccaggtaggactgatagaatgacacaagcccttcaagcagagagctttgtctggctggtggcagaggagaggtcaaagggaatcaaatcctgacaaggatctaacatgccactgccaatttgaagatggagagccacacgggaagggaagaatgcaggtgatttttaggagcagagagcattccctagctaatagtcagcaaagaaagcaggtgatatggtttggatctgtgtccccacgaaatc

SEQ ID NO: 458152 - DNA, 211 bp, Homo Sapiens
caggctggtggagcagttgcttctggaacatttcttgttgctacaactgaggaaaaagagaacagggtgaattatgcttgggttcttagagtttctgttcaggagtgatacacattacttctgctcaccttttattgacaaaagcatgtcgtagtgcgatgcttaacttcttcagggtggtgggaaagtaagcctcggacgggagcacgct

SEQ ID NO: 458153 - DNA, 128 bp, Homo Sapiens
cagggggcacaccacaaagcgtatggtctggatcagcagacatgaccgcgaaacagctgagcctttatgaccggcatgtccgggatctggaaaagatgctgcctgaaatgcgccagaatacgtggtcc

SEQ ID NO: 458154 - DNA, 744 bp, Homo Sapiens
  misc_feature (33)..(33): n is a, c, g, or t
  misc_feature (65)..(65): n is a, c, g, or t
  misc_feature (91)..(91): n is a, c, g, or t
gacttcccctgttgctgccctctccaacccagnaacactggctgtcccccctgaacagaagcagntccacccacatacaagagccgttcantctggatagaagggtgaaaggtgccccaaagttcctttgatgtggctgcctcaggtattggccagtgaaggggaccagtgttccatcttcagggcttacatgtagatcaaacaccaaggctgagggtggtggctcagggtagttggagaggcgactaatagaatcccttatgaaggtatcaaagatgggccagaacctgggccaggggccttctcctcctttaggcgaaggtggaggtcaagcagactatgcaagatgcgtgccatgctggtaacttctgccacacctgcacaaacagcctgttgcccgtgtacctgcagcagagagctgacaccttggcaggtgaggaatcgcaatgttgcaggcaccagaacctcagccatgtggttgagctcagcgactgtccggtgctgcaggcggtactcataaggaagggatgccatcagggcactaagtatacactgccaagtctgctctccaccacaccagactaggccacaacagcctaccactgtgggggatatgcctgttgtgtcagccacctccatcaagagaaaggtgcctgggggtcgtgctatctgctgtccactggggagactaagctggggaagctcactcaggaggcaagtgatggagtcagtcaagcactttgg

SEQ ID NO: 458155 - DNA, 156 bp, Homo Sapiens
gtcagggtatagaattatttgaggatgctttaaaaatgaagattctgagcctcactttcaatctgctgtgtgagggcttccaagaatggtgaccagaaaactcagcatctttaacaagcacctgaaaaactgagaccattttcccacgtcttaatt

SEQ ID NO: 458156 - DNA, 436 bp, Homo Sapiens
  misc_feature (313)..(313): n is a, c, g, or t
  misc_feature (409)..(409): n is a, c, g, or t
cttcttttttgccctcattttagttagtttgagtttcttgtggctctgtagtgactgctctaatagaatatcccttacaactttgtggcagttaatttctggatgatcactgtgacttccatttacatgtatttggcaagattttagagtattttcttttaatggactgggttcaatctttattctggaagcttcaccgtatttttcctgattttctataaaccttatttcacctggactgagaggctctccaaagccagtaacttcccctgggactccttggtttctctaaattttctttacaacaatcagntttttttaatttcacaaggccctgcggaattctaatttcataggttgggattttactcccattttcaacagaggatggtcatgattatccaaggancattttaggcagggacagcaagctggg

SEQ ID NO: 458157 - DNA, 412 bp, Homo Sapiens
  misc_feature (391)..(391): n is a, c, g, or t
ctttttcttcttttaattttgttcagcattaaaggagggaacttcataaacattgattgtcatttacagaaaacattcagaaatcatgtgtgcattatccgggaatgctaacagtattgaactaataatttacaggacataaaataaggacaaaaacctattacattctaaagtaatataaaactcttttttaattgttagggagtgctgttttattctagtatatttatgattaaaaaaactcaatacttacttcctaaatgactcaggctgcagttttactcacatacacagaaattagggcttatatattaaacaggagagagagatcagaaatttgtagggtttttaaaactatatatggtcactgggtttatttgtggggttgccnttttccccctacagggcccat

SEQ ID NO: 458158 - DNA, 617 bp, Homo Sapiens
  misc_feature (214)..(214): n is a, c, g, or t
  misc_feature (223)..(223): n is a, c, g, or t
  misc_feature (308)..(308): n is a, c, g, or t
  misc_feature (356)..(356): n is a, c, g, or t
  misc_feature (433)..(433): n is a, c, g, or t
  misc_feature (484)..(484): n is a, c, g, or t
  misc_feature (598)..(598): n is a, c, g, or t
ttttttttcaaatggctttcttttaatgctaggaaaactgtccacctttcaacggtgacagggctgttaacacaggtaagagcaaacaaggtaaaaagtgaaagcacatacagatgatgcacacaaatatatataaaaattgaccagaaatcacaggacatgtaagcaatgttttcttaagcagaacttattttgtactttaaatagactaaantatttggtntaggtgggaggaaagacatcagtattcaacaattttaacttgaaaaccagctgtaataaagcctcagctcattgtttaataaaantaaaaaaggaaccacatcgtacttttggacaatcatagaacgaaagcncacaaagaacacatttaatatctccatcacagtgcaccaaggatgcagccactaaggacttccagagggaaacaagnacagggtctgcatccatcatattgcattacaaagttaatgccatcagaganaaaaaatctcacctcacgtgctcaatgttctagctggtaagcaccttatgagtatgaggctacaattgagagaaactgctcagtctgcatcaggacacccaattccttcacttnccattggctgatgcattta

SEQ ID NO: 458159 - DNA, 435 bp, Homo Sapiens
  misc_feature (318)..(318): n is a, c, g, or t
  misc_feature (350)..(350): n is a, c, g, or t
  misc_feature (358)..(358): n is a, c, g, or t
  misc_feature (366)..(366): n is a, c, g, or t
  misc_feature (383)..(383): n is a, c, g, or t
  misc_feature (388)..(388): n is a, c, g, or t
  misc_feature (401)..(401): n is a, c, g, or t
  misc_feature (412)..(412): n is a, c, g, or t
gaaaacagaattatttattgcatacagcatgggactgtgatcaacctggacatcaaatgccgcgatggctgacagggcccaggcggcgggagtgctgggaagcccagtacacgtgctccctctctgtgggactccgggatccacggggcggatggttctgtgagttgcgagttgttcctgtttgtcttccagcccccagtcctccccggccactctgattagccagcctagggtagggcctggcataaagtcacacaggcaaaccccagaagaaggaaaaagggcacctgcatgaacaaagagttgggttgcagaggntgcaccggggtaagacttccttcatgcagttnggagtccncccatgtngggacatcaggagatgncaccncacagaattggtngctaggttttnctgggttttggcccagagaggct

SEQ ID NO: 458160 - DNA, 418 bp, Homo Sapiens
  misc_feature (287)..(287): n is a, c, g, or t
  misc_feature (362)..(362): n is a, c, g, or t
  misc_feature (392)..(392): n is a, c, g, or t
aaaggtttttctgtagcatttatatgaagagcatgtgtaaaacattctcaatctgcccctctgaatggattatgaaagatcagtatgtactcagaaaacggggtgctaaacaaagaaaagtctcagatcccactgaaaatctgttcagtttcacaggctctctccagaaaaatgcatatgtaccaatttgcatgtacaatttcagagccttcaaatacattctggggtccaatcacatacttcaggttcagactcctagctcccaatattcctacagttctgaaganttagcagtcctctcatttctacagtctgtatttcttctactgaatcttgggtgggaggggactccaaaccaggantaaactaaaagggtaacttgcttttaaagnggtaactgtttacttatttgcccttg

SEQ ID NO: 458161 - DNA, 396 bp, Homo Sapiens
  misc_feature (294)..(294): n is a, c, g, or t
aattataataattcatttaattctactctgtaatgagataccattttcatccccatttttcagatgagaacagtgaagctctgagaggttaagtgacttggctgagctcatgaagcaggtaaagctggcaatcaaaatcagctggcagtcaaaagaaggatctagaatcttctccctctagatcccttctttctccgcttgctatccccctcagatcccagcacaaagtagggctagggatgaaaatgcctgggagggaaacgggaaaagcagttatgggagccagctggctgncagggtcccagggggagggcgggccttggggagctctgggagtggggttgttgcctttgcagtggggccccatgcctgtgactgaggggtgggtgttccggg

SEQ ID NO: 458162 - DNA, 398 bp, Homo Sapiens
  misc_feature (324)..(324): n is a, c, g, or t
  misc_feature (337)..(337): n is a, c, g, or t
  misc_feature (341)..(341): n is a, c, g, or t
ggatgtttagaaaaaggatgtaaccttttttagtctgtttactaaattctaatacatttgtataatgaaatactagtaaatactatgcagttacaacaaaacataagctgaactggaaacttattgacgttttgttatatgaaaaagaagctacagaacagtctatagcatatgttttcatttgtgtaaagaataaaacatgtgcacattcatgtatatgtgcagatattcaccaaattgcttatggtaatgacctcttgggcggaggcagattccagcagattgagggagcagagacaaagactgaccttcatctatctttgngtccttctgaggngttngaattatttacaattagtattacttttacaattatcatgcccatttaaaacaactga

SEQ ID NO: 458163 - DNA, 437 bp, Homo Sapiens
  misc_feature (286)..(286): n is a, c, g, or t
  misc_feature (303)..(303): n is a, c, g, or t
  misc_feature (357)..(390): n is a, c, g, or t
  misc_feature (404)..(404): n is a, c, g, or t
gaaaacacaaataaatatcattaaaccatcctgtcacaaggcagttaattccaaattttgccaccatagagaagcagctgcttgcaccgaggcaggccacccttggcttcctcctctggaaaaccagagagacaaaggtcaggggctgtcctaggagagggccacaagccaggacctgcacaaactgcagagcctgcagaggccagtccctgctcttcctcaacttggaggcaaagacaaacaggagaggcctgccccagcccctgaggggaagttctgcagatgnttccccaccggggcttntgggtagggcaggagttcgccttttagggggttctgtgccttactttcttcttnnnnnnnnnnnnnnnnnnnnnnnnnnnnnnnnnncagccagcccttgnaccttttggggcattccttttgtttttttgcag

SEQ ID NO: 458164 - DNA, 267 bp, Homo Sapiens
  misc_feature (245)..(245): n is a, c, g, or t
  misc_feature (254)..(254): n is a, c, g, or t
gatgcgtaatcttgacaagtttatttcaaaatgtaggaatggacaatagctctctttcctcctcctccttttaaaaaatgtgtgtgtataactgcgtgtatatatatttgatttttaatttagaatacagttttactcattgctacaaacatccactgaacttgtttatagtgcaatctctcccttccccagtcagtgtacaaatattttaaatatgggaaatcctaatgcagggggtgggctgngagagattntagagaatatatg

SEQ ID NO: 458165 - DNA, 348 bp, Homo Sapiens
  misc_feature (41)..(41): n is a, c, g, or t
  misc_feature (140)..(140): n is a, c, g, or t
  misc_feature (166)..(166): n is a, c, g, or t
  misc_feature (332)..(332): n is a, c, g, or t
tggatgcaggtgagtttattaggcagcattgtcccgcaggnacagggcctgggtggggaggtggggggcagccgttcccaggcttgccccaatcagcacagcaggagagagagtagaggcagcagcagggcgggagctangggagggtggggccctgggcccaganttctcatggttgggacaggcagcctggacaggaacccgaggtgcctatggatggtgttacttcagtatcgtgtcggcacactggttgttgatttcttcctgtggggaggggtgggaggccgaaggaggggtcttctggggaaggagggataggatggggttgattncggaggctgagcatca

SEQ ID NO: 458166 - DNA, 454 bp, Homo Sapiens
ttttcaaaacaacgtggctggcgtgattgtatctgaaagggtaaaggaggaggaaagctgagacgcctgcttggtagcagagttgggtgtgggagtgtccacagacacccctgtcctgcagggtggggagtgggcacctgtggccccaggcaggttccttcccacagctgctgggcttctgggcctgccctggtgcctggaatcacacatgacagggtggggaggacaggggcagtaatgccatttgcctgcctgcattctcttgtcctgagattggccaggtcccctgtcagcagctggttggttggcctgtggggaaggaaggagggtggagttgtcctcatcctcacggctttggtccctccctccctccccattcctcgaaggaacagggtctgtcttggccgccatgacagatgagaatactgaggctcaaagcggttgagcagcctgc

SEQ ID NO: 458167 - DNA, 495 bp, Homo Sapiens
ctataaatctctaatgttatttaggttttttaaggttttggaagtaacagagggatacatacagcaagatccacttacatagttttaaaacatgcaaaacaagattatatatcgtccatatgtaattatatctgtggtaaaatataaagatatgcattttggggacatagtcaccagattattagtagctcaaggaaaggcaggaggaagagtgctctgggtggggggaggttcacagggtgcttggactgtacctatgatttcttcaaataaaaatttcaagcaagtataaaatatgggatataggaatgtaaagatttgggcaaagctgggctgggtgggtatccaatgttccttatcaccatctctggtacttctctgaatgctttaaataggtcacaatcattgtaagaggactggttgagagcagcaagtcccctgtctccacactccaagaatgaggggactagaccctcgcttattcctcagggttcc

SEQ ID NO: 458168 - DNA, 483 bp, Homo Sapiens
  misc_feature (436)..(436): n is a, c, g, or t
  misc_feature (443)..(443): n is a, c, g, or t
ttttttttgatttcacaaatcacatggtttattgccctacagagatgatatttttcctaggttcacaatgcttaaggagggggagaacaacatgaacaaatctcacagggaatgcgctgggtagacagggtgtattagtcacggggtgagtgagttccaaagttactaaagtctacttgctcaattaggatggaagcaggcctctgtggagagcgaagctcattaaaatgtggtgtgtctcttttataagagcagctcttgggagagaagctgtccaatgcaacggagattcacagagacatatatggtccctcaaggctagagggtggcactggtgtttgtgggcgatgcttccaagttcaaaggctagcagggtggggcccttttcgaaagagagggcttacagagtttagctttgccacagccccaagctttncaaagtnttctgttcgaacccttagggttttacatagttttgaagtt

SEQ ID NO: 458169 - DNA, 504 bp, Homo Sapiens
  misc_feature (219)..(219): n is a, c, g, or t
  misc_feature (395)..(395): n is a, c, g, or t
ttttttttgatttcacaaatcacatggtttattgccctacagagatgatatttttcctaggttcacaatgcttaaggagggggagaacaacatgaacaaatctcacagggaatgcgctgggtagacagggtgtattagtcacggggtgagtgagttccaaagttactaaagtctacttgctcaattaggatggaagcaggcctctgtgggagagcgaanctccattaaaatgtggtgtgtctcttttataagagcagctcttggggagagaagctgtccaatgcaacggagattcacagaggacatatatgggtccctcaagggctaggagggtgggcactgggtgttttgtggggcgatgctttcccaagtttcaaagggcttaggcaggggtngggggccctgttcgaaggaggagggcttgacagagttttaggctttgcccacagccccaaggtttttcaaagttttcttttccgaaccccttagggtttttacaaagtt

SEQ ID NO: 458170 - DNA, 485 bp, Homo Sapiens
aagaatgagtatttttgatttattcaaagtttcaatctaaaacctcaatgaaatctaccacctttattacaaggggactgatggttcctgaacagaaagaaacaaaggtcaggaaagatggcaccggacattggagagggaactggccgagtgtgcagaaggtttggtccaatagatcactgacaggctaaaagccacattttgttgagaaattacatcagaactgtttaaagagtataaacctccataagaaaactaaagatggcaaatgagattcaactctgttacttcaagtctataatgtcttcatcggagaaagccgtgagctgggaagggggctgctgccggagaccgggctgccctctctgtctgccacagggtcctgggtcagagctggctgagtgcccctcagggttggcttcggaagtagaagcactttccaaggagcctgatgggatcctgtcactgctagatgacctcactgc

SEQ ID NO: 458171 - DNA, 245 bp, Homo Sapiens
aaagcttacatcttttcaggaactgtttatttttgaacatgtgacattggaacacaattttgtaattggtttggttgactgaagaagtgacttcttgaattggggtagaaaagccaaggtctgtaaattgaagatagactgcaatattgaaagcaaatttcagattcctttggcacactttaacttgaaggttaacagatataatatatgtaggataaacacatacaaacacatacaatatataa

SEQ ID NO: 458172 - DNA, 132 bp, Homo Sapiens
gtaaatttcttgttgtcatttgtctattgtttccataggaagtacttaacttttttcttgagcaatagaagtttttatgcatgaaaaatgtcaaccataactatagataaataaaatcatcttcatggctgc

SEQ ID NO: 458173 - DNA, 370 bp, Homo Sapiens
  misc_feature (353)..(353): n is a, c, g, or t
aagaagaaataggattagatttattaaaaccttttgagtgtggtatgggactcagcttattcactgggaatgtgcctcaaactcagaaaccaaatccctgtaaatcttaccaatcaactacattgttatgctctttccatttaggaagttaaaaaagtcgtttaggacactatcaaaccacttttaggtacttattttaaaaacatatggataagagttctagaaaacaagagaaacattggaaagaataaagcagcgtatgtttgttcacagccttgagtttgattcctgttttgttactgtagggaaaaatgtcctatttcagaggcaggggggggatggggaagggcagnccatggggtgccacact

SEQ ID NO: 458174 - DNA, 335 bp, Homo Sapiens
gtttattgttttgtttattgcctagacttaagaaagacatggaaaatatgacaatactacagatgaaactttaaaatatatcatgtctatagctgtcacactgtgaatagcacaaaaaatgttgaagaaatactcttccagtattccaaaactattatccaattcaacaaagccactcacatcgctgatgaatgcatgaagtttcaacacatcttgggtaatttcactttcatctttctcactaatgtaaacaaaaataccaaccaacattcacatgtaaactatacttgtccggtcatttacaaccataggtggggtttgggtggcaggtttga

SEQ ID NO: 458175 - DNA, 460 bp, Homo Sapiens
accaatcaaacaaactactatggttatctcaaaccaaacgtcactttacttttttggtaacttttcattataataataaactctattcatgaatatgcagcctccataatcttctcccttgtaacaaacgtgcagtccgttcacaagctgtaaaaacaagcccaaacccaagacatcacaagaggcaagagcagtggcagtgagaagggagcctgtaaaggatgtttcaaaggagggtcccaggctatgtggccactggatgtaggcagtgagctgagtccaggctttcggtctgggaagtggcagaggctgagacaatggccaaagaggagttggagaggaaactatgctcggtttcactcctgccagcccaacagcctattccctgggtgtgaatcaactggtgtttgatccaactttgatccgttgggctgaaggttttcccacaagcagcacagta

SEQ ID NO: 458176 - DNA, 417 bp, Homo Sapiens
ctaaagggtatagacagcatttttatttatttcacttttctggtttcctccttaatttttaaaattaaaatatacaatagaaaaattaactttaaaaaagaacataatctactccaccaccaataaccttttgtggttaagtttttactgctcaagttcatcattccctgccccaacatccaatatttattgagaaggccctttaacatcacaagactctaatgccatgcactgatttttacgatcttactgggaaaactgctgggtgcataggaaaagtatttgtggcatgctgtctgcatgcatatcatatatcattttaggattgctagggcaggcaaagggagggaacaccattaaacactaattttttactcctgggtggggcttaggtaatttggctaaatgtccctggta

SEQ ID NO: 458177 - DNA, 305 bp, Homo Sapiens
gggaaatgcttagaaaatgctgtgattttattcatagtatatacaccacaaaacagacactttccattattttgattacttcaaaatttaaaatctgcttgtttttcaattgatttttttcatgacagatgctgagttctgacccatttttttcccctgacagtatcaataggctgcccgactacatgatacaattgtttttagcatttaaatttaagactatggctcagtgtttgaaaaataaataagttaacaaaagagaaacattattaggaggaaaatgaaaacatattcaccacatggat

SEQ ID NO: 458178 - DNA, 446 bp, Homo Sapiens
ttttttttcctagtccaggttcgaacccaggatcacagattgcatttagttgttatgtctctttagtctcattttatctggaacagttcctcagcctttctgtctcttgaccttaatatttttgaaaggtacaggcaagttattttgtagaatgtccctcaacatggatttgtttgatgtttcctcctaagattcaagttataaatttttcacagggaataccaaaggaattgacactttgtccttcttagtatatcacatcaagagggcatatgatgttgattcatcccaatattgggtgatggctaggctttaattgcttgggttaagggttatatccaccttttgttaattaaaaaggtaatgtgtggggggaaacacttgccggaatatggtaaaatattctgtttccctcatccaaactttggactgttggggttttccgt

SEQ ID NO: 458179 - DNA, 223 bp, Homo Sapiens
tggtgtaacaggaaataccagagtaatggtttgttgaggtttgatgacattactgattaggctacaaggagttctagagagctgagatgaggacaggtagggaggatgtgacaggctccagaaatctcttgtgtgatttctcggaaagctcttcagtatttcacagcacaagactcacgtcatatcagtttgtctgaataacaaaagagcagcatctcatcca

SEQ ID NO: 458180 - DNA, 208 bp, Homo Sapiens
ggatccttaagaaataggtgctttttgaagaatcaggggagaagtaacgcaagaccccagaagtatgccaacatataaaaccccaagtcaaaaggtcaaaccacgcatttgatccctcaagtcccctgcttgaccctcttccaagtgtactttccttcctttcattcctgctctaaagctttttaatactttcactcctgctcaaaag

SEQ ID NO: 458181 - DNA, 313 bp, Homo Sapiens
  misc_feature (222)..(222): n is a, c, g, or t
  misc_feature (249)..(249): n is a, c, g, or t
  misc_feature (278)..(278): n is a, c, g, or t
ggtgtgtacatgaagacaatgcatatgattgcattgtaaagacaaactataactacacattctgatacaaatgcatgactaccaattatatcaaaaaagtggccggttaaacttcaacagctgtggattcagattagtttttattaagaatattgtattctagagagctatatttagaaatctcttctaaattgggtaatcatagttttcttaatatgaggnaaaataacaaaaaccatataggtaggnctctatggtatttaaatgccctttcgggnggtaaattatttttttccatacctccccattttaa

SEQ ID NO: 458182 - DNA, 446 bp, Homo Sapiens
  misc_feature (426)..(426): n is a, c, g, or t
ttttttttaactttatcttgttttgattgaagaaacatctctaaaaataccatctgagtgcaagataaaaaggaaatagcaattcaaggcacaaagctaagcacatgcaacaatatagatgatttgggggtgggacagtacagaattcagaactgatagaagttatcagctccatatttcagaaagacctaatgtcttccttctgcttatactgttctgacagaattttaattttggcagagatcactctcgatgttatgatgtactgattcagaggtcccaaatcagtaacctgatcctaggatagatcctcaaaggtcaactgccactagggtgtccccttcttgatgcattcttcatgctgcctggggttggggcatggctaagcacttcaagttcaaagggttagttgggcattatcctacnttgttcaacaaaggttttga

SEQ ID NO: 458183 - DNA, 430 bp, Homo Sapiens
  misc_feature (348)..(348): n is a, c, g, or t
  misc_feature (408)..(408): n is a, c, g, or t
cttgttaattctaattttaaaaaagagtttggtatggttttaaagtttccattgaacctctgaaggtggcttatgtctcgactcctcttctaggactggtcatgagctgacaagcatagaggcaaagtatctcaacattacaaaacccccaatcttcaaggaaaggagcacattaccatggagccacaggactccaaaggacctcagaaagcatttagccaaatctccttatgcaggaaataaatgagaatttaaggctcagatgggttaaggtgatttgtcaaggtcataaggaacttgtcagttccagacttgtagtccggggctgcgtccttttgttaaaccagnaaacgtctggcataggaaagggattaatccaggtttttccttcaggaccgagtttggagnggaagttgacctttttgggtgg

SEQ ID NO: 458184 - DNA, 603 bp, Homo Sapiens
  misc_feature (532)..(532): n is a, c, g, or t
  misc_feature (548)..(548): n is a, c, g, or t
  misc_feature (563)..(563): n is a, c, g, or t
ccttggcacatggctacttatcggtcattcccgaatttgaataaaggaatttagatgtgggcaacatgcacagtgctagcttggtttgccctttcctctacatttggatttactgaggaaatttagtttaacatttatcttgagttctagcaatacatagctcacaagattggggcctcttgtccttcagggtcatttcacaaggtcaggcagtctctgtttttcctccctgactcacagagtatggctccttaaacctctaccttccagggatatgaacataggtggcagatggagaccctgtgctctgcagcaaactaacttggtgggaggatgcattatggggatacttgccttttaggtttcacattggtttcttggggcagcattcagcagtgcccgctttcaagaatgttggacttaaaaagaggggctggggtggggattgatggaagaaaagttaaacagcctttgtttgccagataggtgttggcttgcaatggttacctgctagggccaatgagtcacacanttagggtcactcatgnaggacgtttttaatngtaaacttttaaaaaggaaaaggccagttttctttaaagg

SEQ ID NO: 458185 - DNA, 546 bp, Homo Sapiens
  misc_feature (20)..(20): n is a, c, g, or t
  misc_feature (294)..(294): n is a, c, g, or t
  misc_feature (298)..(298): n is a, c, g, or t
  misc_feature (300)..(300): n is a, c, g, or t
  misc_feature (302)..(302): n is a, c, g, or t
  misc_feature (305)..(306): n is a, c, g, or t
  misc_feature (310)..(310): n is a, c, g, or t
  misc_feature (312)..(312): n is a, c, g, or t
  misc_feature (315)..(315): n is a, c, g, or t
  misc_feature (317)..(317): n is a, c, g, or t
  misc_feature (322)..(322): n is a, c, g, or t
  misc_feature (329)..(329): n is a, c, g, or t
  misc_feature (334)..(334): n is a, c, g, or t
  misc_feature (336)..(336): n is a, c, g, or t
  misc_feature (346)..(347): n is a, c, g, or t
  misc_feature (349)..(349): n is a, c, g, or t
  misc_feature (362)..(362): n is a, c, g, or t
  misc_feature (365)..(365): n is a, c, g, or t
  misc_feature (372)..(373): n is a, c, g, or t
  misc_feature (384)..(384): n is a, c, g, or t
  misc_feature (388)..(388): n is a, c, g, or t
  misc_feature (392)..(392): n is a, c, g, or t
  misc_feature (394)..(394): n is a, c, g, or t
  misc_feature (396)..(396): n is a, c, g, or t
  misc_feature (436)..(437): n is a, c, g, or t
  misc_feature (454)..(454): n is a, c, g, or t
  misc_feature (471)..(472): n is a, c, g, or t
  misc_feature (477)..(477): n is a, c, g, or t
  misc_feature (497)..(497): n is a, c, g, or t
  misc_feature (499)..(499): n is a, c, g, or t
  misc_feature (503)..(503): n is a, c, g, or t
agctgtatttttaatattcnggtatagatgtcaaattacttctgaatacttataaaatatgaataaatagcagagtaggaagaaagtttcttttttaaaaaattcacctctgaactagcacatagagctacagattttcccttggggaattatgggcagaatcaagaattttaaaatgcagttgtcatctgatttcctctgaacactgacctttgaagctttgtgaatcctacgttaagcactctgagttctaatttttctccttttgaaaaataaacttgatgaaatcttggngggngngngannatgncnggnancaccncagggancaccnanaaaagccccnnanccataaaggcagngcnaaccacnnttacccaatancaanaaancncnaagtgccgtaaagaaacaattacggggtcctatgcacaanntaaaaccggcccttacngggtttagtaaccgtannttctntttaaaggcaggtaagccantntgtnagtaaaagaagtttttctaatagcagtattttatatgcatgat

SEQ ID NO: 458186 - DNA, 457 bp, Homo Sapiens
agcaaaccaacattcctttaatatctctatatcatagtgacacaaatgaggaattactttacatattgccagtttatttctttgaaccagtttaacaatatcaacataattgattactaaactgacatgatatgtactcaatggagacttttctttccattctcctgtttagtgcagaggaggttctttggtgccttcctaacaacagctcatctatggaagttatactttttataccattcaaactcagtgctaaggatttaaaataaatgctgccagctgaaggacacatttttctcctcctttccttcctcccttccttccatcattctcctgtatggtaaactcacgggtacctaggttgggttaagggatgaggtgttggctataaaggataacacaggcacggaaagaggcctatctttgttttccaaggtggatggaaggtattctgggg

SEQ ID NO: 458187 - DNA, 231 bp, Homo Sapiens
ggttttttaaaaaagtttaatattattacagtcaggaggaaagagaaactcttggttccaaggacatagacattgtttctgagaacatctgctgccttgtgaagagtgtatcatggagaacacaatctttttgtctcaatgggcatgtcacaaggcctacaaagcaaagccccagagaagctgtattaagaaacagtgcaggagcctaatttgttttctattttgacattc

SEQ ID NO: 458188 - DNA, 401 bp, Homo Sapiens
  misc_feature (285)..(285): n is a, c, g, or t
  misc_feature (303)..(303): n is a, c, g, or t
  misc_feature (322)..(322): n is a, c, g, or t
  misc_feature (328)..(328): n is a, c, g, or t
  misc_feature (374)..(374): n is a, c, g, or t
  misc_feature (385)..(385): n is a, c, g, or t
gcatcttgtctttgagttttattaggaaggggagtccgtcgtggtgtgagacgttagaccggaaggctgtggcttgctaaataaaatccgcggtctggcacctctggagagggcagagctcctcagaagagctggcctgaggaagaagccctttgccccctccccttctataagttagtgtcatttggctctgggaacgctggggcccgggtgggcaaaacccctggcatcggcggtgccccccttagtggctggcacctggtcctgcaggacccggtgaactgncctgcaccgcggggcttncagtctcaaagccggcatncacaantgggggacaaaacttcaagtccaaaattgtcaagttgaaccggccncgggggaaaanggaattccagcctcaa

SEQ ID NO: 458189 - DNA, 465 bp, Homo Sapiens
  misc_feature (54)..(137): n is a, c, g, or t
ccacaagaccagcttttaatatgactgtgatttgaagcacgaataaataaatgnnnnnnnnnnnnnnnnnnnnnnnnnnnnnnnnnnnnnnnnnnnnnnnnnnnnnnnnnnnnnnnnnnnnnnnnnnnnnnnnnnnntctccatcggacaaacataaaagcccccctaccccagataaaaagattcagactgtacaagctgtgtcacagggagagaagaacgacatgggcaccatgggtgaacacaggcgtcccccacccgctggctgctgtgccgccgtcataggcactgggggggagggaggttgggcgcgggtcacctttgggcgccgaagccccatgggaaggcttgggggaaaagggggtttttggggccggtttaaggatttttcacaaacgacacaggatctgattgtaggcagagagtccctgggtttcctattggttttagcatttttgtttccgg

SEQ ID NO: 458190 - DNA, 622 bp, Homo Sapiens
  misc_feature (41)..(41): n is a, c, g, or t
  misc_feature (96)..(108): n is a, c, g, or t
  misc_feature (266)..(278): n is a, c, g, or t
  misc_feature (414)..(414): n is a, c, g, or t
  misc_feature (420)..(420): n is a, c, g, or t
acactttgggaaggcccaaagtgggaggattgccatgaagnccccggagtttgaagacccaccccgggcaacaaagccgagacccctgtctttacnnnnnnnnnnnnnttagcctggccgatggtgtcgtgtgccctgtagtccctagttacttaagaggcctgagttgggaggatcagttgaacccagtggttcctgggttgcagtgagcctgtggtcacaccactgaactccagcctgtgcgactgagtgagaccctgtgtctnnnnnnnnnnnnntataatgaatgtgatttatgtagataaattgataatatagtaaataggtaaatgccttaaaaagcatttttaaagaatttgtaaattctaaaacaataaaaatttggtatacatcacagagactgatattatgttnaaaagnaaaattggtgtacagtgacccttcgtatctgtgggttccgtatctgcagattcaatcaactgcagattgaaaatatttgagggagagaaatggatggttgtctgtactgaactcttgttattcccaaacaatacattgtaataactatttacatagcatttacattaggcattacaagtaatctataaatgacttaaagtat

SEQ ID NO: 458191 - DNA, 442 bp, Homo Sapiens
  misc_feature (420)..(420): n is a, c, g, or t
  misc_feature (426)..(426): n is a, c, g, or t
ttttttttgtagagatggagtctcactttgttgtccaggcttgtcttgaactcctgggctcatgtgattcttctgccttggctcccactctgctgggactataggtgtgagccattctgcccagccatattgtcaaataatatttaaatgatatttaaataagatgacaaaacactcctggtacaatgaatagatttatgtatatgtatgtcaagagtgagagagacataaagactgtctgatatttactaaatttttaaatttatatttactaaattattaatagtaattttactggtagtggttttatagtaattttccttttaaaatctattttctttctttcataggtgaggaaaataaactacctgaaggtttccctttaaaaaaatctgtatttggggggcttcccactttggngttagngcccaccgggcccggg

SEQ ID NO: 458192 - DNA, 413 bp, Homo Sapiens
  misc_feature (95)..(95): n is a, c, g, or t
  misc_feature (209)..(209): n is a, c, g, or t
  misc_feature (287)..(287): n is a, c, g, or t
  misc_feature (293)..(293): n is a, c, g, or t
  misc_feature (299)..(299): n is a, c, g, or t
  misc_feature (304)..(304): n is a, c, g, or t
  misc_feature (330)..(330): n is a, c, g, or t
  misc_feature (353)..(353): n is a, c, g, or t
  misc_feature (402)..(402): n is a, c, g, or t
attttacatttaggtttgaggttttcattgtcatcattaagtttcagtatattttctgcagtcatccacaaaaatgggtcagtagcacaaaagtntttcatcagaacataaatgtaacataaatattagctggaaccatataaagttgctacttgctcactttgacctctaaaaacagtaatttcatctggcatgaccaaatacaactntaagtaacatgtatgtttacaagcaaagctgactgggctctccaagccacagggacagcaagatgaagtttgcagggntgcagnctgggngacgnttcacttcaggggcatctctgaaagngggctctcctggcgggcaggggncaccccacccggggagggttcacagccgggggttcacacgggagtctgncaggggtgggg

SEQ ID NO: 458193 - DNA, 475 bp, Homo Sapiens
  misc_feature (21)..(21): n is a, c, g, or t
  misc_feature (57)..(57): n is a, c, g, or t
taccagcccactgtgggaaancggtatgatttctaaggcaaactgaaatagaatttnccattcggtcctgctgtaggggtttagtccaggatggtggggaaaattataagcccacaaaccttcttggaaggcctgaagggttttgcaaaagtctcaggataaggttatgtctgaaggcaacctaatccataccttgagtaaatagcttaaagtgggtacaaaggaaggtagagtagtttacctgactagtttgtttactcatgtggtcctaagactaacctttgatctaccacaggtgcttaattgctttctactcaggaagtccgggaagtctgcaatgtcaattaccctctagttgtgtttactcacaacctttgtcaattaatctttactgaataaatgcaagtcttgctgactgatcaaggccgtggctgtgactaagtggcctggatgctaggctggactggcaaagcag

SEQ ID NO: 458194 - DNA, 433 bp, Homo Sapiens
  misc_feature (117)..(152): n is a, c, g, or t
  misc_feature (165)..(165): n is a, c, g, or t
  misc_feature (170)..(170): n is a, c, g, or t
  misc_feature (223)..(223): n is a, c, g, or t
  misc_feature (264)..(264): n is a, c, g, or t
  misc_feature (300)..(300): n is a, c, g, or t
  misc_feature (334)..(334): n is a, c, g, or t
  misc_feature (373)..(373): n is a, c, g, or t
  misc_feature (399)..(399): n is a, c, g, or t
  misc_feature (407)..(407): n is a, c, g, or t
gcccatagtacagttcatctttatttggggcaagaagtattgggaaggattattcttactgtatttgtccccatatcccaggaagacctagggcaacacgaaatttgtttcccactnnnnnnnnnnnnnnnnnnnnnnnnnnnnnnnnnnnnctcctgggcagtntggtntggtgggaaggaacaccagactgggaagacaggggcacttgtgcttttgccgnttactgggccgtgcgaccttagggaaaagtcacttcacctnttcagggtttcgggcccctcatccataaaaacagtntgtgatttaagacttaactgagggttcagatggnttttttccagcccgttgggtttaacacagctggcatagngttaaggctgaggaacttggagggtncccaggantttcagggcaaatggctttaaggccc

SEQ ID NO: 458195 - DNA, 505 bp, Homo Sapiens
aattaaccgattcagatgaagttatttcttctttataggaagaagaaaatcacaaaggaaatcttcaaaggtaagtaagattgatgaaaataatagattactagaataaaaatgtcttggtcttaaaattttgttttgtcaatgcagtctattttaccactctcttcaaaatgaccttaaaattatgccacttctgaagaagtggctgctttattattcatttcataaacatggtatttttgattattaacaaagaagttagacgtgctgtgtcacatgtgtatgagttttatggtaaggactttccagttgttgttgtgttatgtatacaaaggaatgcttgtgttgagtggtttttgaaaggtccatggaaacctctcttttctcatttaaagtctgggaaaactctcttttgtatgctgtgagatgctttatacactgtatttaaaagctccactaagagaatttattaaaatattttctggcagtagtccttgaagaagat

SEQ ID NO: 458196 - DNA, 259 bp, Homo Sapiens
aaacagtaagaataccactatttatttagcatttactatgtaccaggcacagggctaagagctttacatgaaataatcatttaaccctcattcgatcatttaatatctaataaggtagctagatatagacaaggaaatgtgttagtaacttgcccaagatcacaggtggtgaaggtagtattcaaaacttcagacctcaagttcttaatgactacagtagatagaaacatgggaaagtacttacaatactttgatttga

SEQ ID NO: 458197 - DNA, 402 bp, Homo Sapiens
  misc_feature (350)..(350): n is a, c, g, or t
agaaaataaaagaagcgaagattttaaacactagttggcttttgaagagaataaatatttactttgaagaaaagacttatgaggacttaaaacatcttacttaactagctacaaatagctcctccctggactttatgtagggagtaggaatcattctcaccaaaagagtaaggaaatgttgaatcaaagtttccttttcagtaatctttcccagacaggaagctgttatctgtcttcctttaaaagtgctgcttatacccttgcaacttaaatttagctctgaggcagcctctcctttctccctgtggggtacaaatggtggtaaatggcagacagatgttaaacaaagntaccttcccacacagcttcctttgatttctttaagtaaactccaatctctat

SEQ ID NO: 458198 - DNA, 233 bp, Homo Sapiens
aagatattttactttttttctttaatcagcacatttcttttgataaatagtcatgagacgtgttctgtgagtcactacaattctcacttggcacttggaacagtcgtgttatataggtttaccataactctcagaacaggagtatattacaaacaagtggagtagaacatagagaatacataatttgttctaatattcctcttccttagagccttcaaacttaaaccaagttg

SEQ ID NO: 458199 - DNA, 324 bp, Homo Sapiens
tggaattgaactttcttgcgccgtaagcaattgctggtcatattctgctgctaaaagtctctttgttgtgccaagagaaataatgcagaacaaatgttatttaatttttatttactttcagcaaacacatgaatgaaagaggtcaggtaggctgtcctgggcattctgggcctggctgcggcacaccctccttcacttggcccctgccaggcaagaaactttctattcagtctttgctatctttcataaattgtatcattgctcttctgctgttcatatcatcttagttattcacaaagtctacttgataaaatggctcaaggg

SEQ ID NO: 458200 - DNA, 505 bp, Homo Sapiens
agtttgtatgatttatttatgttaaaaaatccacacatgatgctggggtttcaatggctttgtttaagtgatagtttttcctttttagtgaaagttggagcgatgataaacagctccagctgtaaaaatgaaaggcggaggtgaagctgaggtgattattacagaaaaatgctgagtggggaggggtatttggcccttccatcctctaaaatgaaaattaccctctgccacaacgtgccacgaacaattacctgctgtttattaattaacctcttttaaaagcaccgcatttctgcaagaaactggtatttctctaatgtgaaaactggcttattcgtgtttattggaaccactatgtcccatgtggtccaggcttagtgcacacttacctgacatgcattttttttaatggcacatttgatgattggaaataccttcctagaagaagcccagacactcagcacgacttgcttggcgtattagttctaaactgagtccccaaaga

SEQ ID NO: 458201 - DNA, 455 bp, Homo Sapiens
  misc_feature (407)..(407): n is a, c, g, or t
  misc_feature (421)..(421): n is a, c, g, or t
  misc_feature (430)..(430): n is a, c, g, or t
gttatggcaaagtaagctttatttaattggtagcaggagagtcacaacttcaaactccagaaaagatgaagtaaatttgcaatgatttcatacaccaagattcctcctacccaaagctgaagatatattttcaaggaaaggtgatggaaagaaaaatggtgctcgcccaagagattcttccatccagacaggcatatactttgtctatcatgagtcaagccctgatccaaaggcttgttaacttataattacactaaggcatctctcctatgccaaggtaatgtgggcaagtattgtgaggggaaatacaaatgccctaatgttaaaaagttcattccagtgtaggggctggaccctttcttcaaattgggggtctgggtcagatttctccctggctaggggctacnggggaaaggaaggncttgaaggnggcccatttttaccaattccggttt

SEQ ID NO: 458202 - DNA, 410 bp, Homo Sapiens
  misc_feature (272)..(340): n is a, c, g, or t
  misc_feature (384)..(384): n is a, c, g, or t
  misc_feature (397)..(397): n is a, c, g, or t
aaattagtttgcttttattttcctgtacgttctataatagacatatcaaaaaagctaacaaatgttaatttttgaatactttccgaaaaactaaaacaagaaatgttaacataatgctttatgtgcttttagtttttatcctctaaatatttttccagtctgctttctttaaaaaattaccagcttatgaaaataaatctctttccatttaatcatttcaaccacctaaaatttctctctataagaaactccagggtttaatgaggcagtannnnnnnnnnnnnnnnnnnnnnnnnnnnnnnnnnnnnnnnnnnnnnnnnnnnnnnnnnnnnnnnnnnnncatggtacatggacgtatccgggggcgaggggacccaaggtctnaaacaatattacnttaaaacttcggg

SEQ ID NO: 458203 - DNA, 415 bp, Homo Sapiens
  misc_feature (86)..(86): n is a, c, g, or t
  misc_feature (108)..(108): n is a, c, g, or t
  misc_feature (136)..(136): n is a, c, g, or t
  misc_feature (333)..(333): n is a, c, g, or t
  misc_feature (389)..(389): n is a, c, g, or t
aaaaataaagcctctttattggtacctgtaagctcaggtacaaggtgttcccacaaggcacacaggctggcaaggcctacctgggncaaggggcaggcccagagcctngcgtttcttgggcacagacacagagagnaaatggaataaattatagttctgacactcagggacaatgtagaaattatgatgcaaaattaaacattaggcaaacaaagggtataaaaaccctcaggagccacccctcgccaactggcctcagggcatgggcaggtgggccacggttgaagtgcagtgcccagaaagccctgagataatagtctggggcatggttcncgccccgaggtaggccctttgccctctctgggcttcctgtttcctccttccccctnctacatccctgggcctagaataaagg

SEQ ID NO: 458204 - DNA, 521 bp, Homo Sapiens
ttttttttggacacttggttttctcttatcctaggagactatgtgtgattgctctggctttaggaagcagaagctctgtgtcttgagcacagccgtctggggcagttgaaaccagttgggagattcccctggttccagacgttgttcatttggggtcctgtgtttccgactccacgggagtcactaatagtgtgacatctcttcatcacggcacccagaggatacagacctccccttaggaagggcatgtcactgttgacaggggagcaccacagttctggcctgctctaggaggtgaggctggctgcccactcagtgtcctgcctggtgacggaggcgtctggccctgtcctgggtcactcctgggtcactgctggtcagcttctcctcttgccttcatcgtgcagcaaagacagcggttgatcagaagcacagattctgaacaaagtcttcccttccaaagaatgaataaaggaggctttagttacaagctctaaattaggggcaaatttgaaattagc

SEQ ID NO: 458205 - DNA, 443 bp, Homo Sapiens
  misc_feature (281)..(281): n is a, c, g, or t
  misc_feature (324)..(324): n is a, c, g, or t
  misc_feature (367)..(367): n is a, c, g, or t
  misc_feature (408)..(408): n is a, c, g, or t
caggaacttaaaagatattgcttttattctctgatggcaagttacttataagtaaagttacttccagcagcagaaggccaaattgattagaaatggatcatacctattgattcacatttcccctaaactgaaagtgctgaaacaccgggcaacagccagtgtcccaaactccttcacaagagcatggactgcaggccatggagacacagaggggagcacaccattcacaggcctttccaaagcatttgctagatcttccacattgaaatcttcacccagantgaggaggcaacaccaaactatttaccaggcttagttcaaatnctgttcatgaggggaggggtttctgtggaaaactcctttcctnaatttatagggcctttaaatttttcatggcttataaaaaancaggtgggtttttcaacgggacgatttgttttttt

SEQ ID NO: 458206 - DNA, 396 bp, Homo Sapiens
  misc_feature (313)..(313): n is a, c, g, or t
  misc_feature (323)..(323): n is a, c, g, or t
  misc_feature (368)..(368): n is a, c, g, or t
  misc_feature (375)..(375): n is a, c, g, or t
tttttttgaatttctagttttgttcatgaattgtttgcctgacttcacagagtagtctattggtgttccttttagtttgctgagcttccttaacataattgttctgaattcattataaaccaatttgtaaatctccatttttggggagttggttattggaaaatgattgtgttcttctggtggtgtcatgttttcttgatttttcatgtttcttgaattattgtgctgctgcctttgcatttaaagaaacagtcaccccctctgggtctttactgactgggccttagggaggagcaaacacttttcatcagtnagtcagggtnagggggattttgagggttgctcctcaggacattttctatgggganggaaccnggctttcacaacatcttggtt

SEQ ID NO: 458207 - DNA, 452 bp, Homo Sapiens
  misc_feature (360)..(360): n is a, c, g, or t
  misc_feature (368)..(368): n is a, c, g, or t
  misc_feature (393)..(393): n is a, c, g, or t
  misc_feature (422)..(422): n is a, c, g, or t
  misc_feature (440)..(440): n is a, c, g, or t
cccatgcaaagcattttatttgcatctacttgtgcagttctcataagcagtggatcctgtggtcattcccatttaacagaggactagaaaggagcccagagatattaaataacttgcccatggtcacacagctaggatgtgctgagctaaggtctacaccaaggcacagggtctccagatcagcccttaatccctggatctcagttctggtgctaccatgggttgaatagttttggccagggggcacatgtcttctcgtcatgactttgtaccatgtgttagagagtcctgggcttggaaactacatttagtcattagtggtatgaccctatagcaagtaatttactctttgagttagtntcctcatntgataagggcagatattagaatatntctcttgcccattttggggtagttaaatntaagcgtgtattaaaatngcaccctacacg

SEQ ID NO: 458208 - DNA, 335 bp, Homo Sapiens
  misc_feature (239)..(262): n is a, c, g, or t
  misc_feature (265)..(265): n is a, c, g, or t
  misc_feature (282)..(282): n is a, c, g, or t
  misc_feature (289)..(289): n is a, c, g, or t
  misc_feature (303)..(303): n is a, c, g, or t
  misc_feature (325)..(325): n is a, c, g, or t
ctttgaagcttttatcaactttaattgatataattataattggtatgcaatatgtcttacaacaaatgtggatacaatgacatcaaatatcaaagaattttcccacctttccatctttaaatgacttcagctaacttaccccaagagaaaaatctggcattgatctcttggttagcattattaccaatatcaactagcactattaaaatcaaagttgaaatgggtacattcatttgccnnnnnnnnnnnnnnnnnnnnnnnnggnttaaaggcaaagaaggngattcancgggcaatttggcntctggcccatttgcaaatttcntttcctgggg

SEQ ID NO: 458209 - DNA, 578 bp, Homo Sapiens
  misc_feature (526)..(526): n is a, c, g, or t
  misc_feature (539)..(539): n is a, c, g, or t
  misc_feature (557)..(557): n is a, c, g, or t
tgtatttcattcgtttttatttctccataccagggttcagcaaagttctttctataaagggttacttagtaaatattttaggttttgcagaccattaggtctctgtcatggctactcagcactaccacggtagttgaaagcatcaatagataatatgtaaataaatgagtataattgtgttccagtaaaactatttacaaatacttaccatgggctggatttggcctgtggcttaggtttgctcagtctgctctatagtattctgttacatgcatgtaccataacttagccattttattgtcagcattcaaattttttccagtaagagtatgtgcataggaaaaaaattgtgtatttcactttaaatatacttttaaaatttatggcataacataaattcggacgataggtttcctatacatcatcaaacattagggcctgacaggtcaagaaaaggccttataagtaggcaagggacttctcaggggtccagagattttataagatccccacttaatggaatggngtgtggaatggcnaattggtaattcccgtcnctggaagtatgggcccctaaa

SEQ ID NO: 458210 - DNA, 449 bp, Homo Sapiens
  misc_feature (367)..(367): n is a, c, g, or t
  misc_feature (389)..(389): n is a, c, g, or t
  misc_feature (434)..(434): n is a, c, g, or t
gaaactgacaatatcttttattttatctatcagattgttgaaaatggaacactgagctcaggtgggaaagacaggcattcacattttgttaataggaatgaaaactggtacggtcttctggaggagaagttacagtatgtagctaaatttacatgtgaataacctttgacttggtggaatttcacttgtggatatcctatatttgccaaaaggagaagttgaaaacaattgatatgtccatttttagggaaaacattactgtaatgaaattattgcaattcatacatcaaaatgctacaaaatcattaaaaatgtcaatgctggtgtttatatgcagataccagaagtatttacattatgtgaaaangcaagctgcattgcactttgangggcttctacgtgtaaatcaaaactgcccacacacacattgatanaggcacagaaagacg

SEQ ID NO: 458211 - DNA, 333 bp, Homo Sapiens
ttttttttacagtacttacttttcaattttattgtataacttttcattaaagtgagaaagccattatattcataagacaaacacagtatcaaagaagttaaagtcattaggtaatgaaataacaatcatctcaaatttggatgcacatgctcaataactttttctctcagcctaaatgccttattgacagggaaaagttatatgagaggagaacaaagtggcaagaaaactgcactggcccctcaggacaaaaactcatcagggaaagattcaaatgttttaaagttctgcaaaagcaatatgaaaaaccaaagtccagcattgggggcgggt

SEQ ID NO: 458212 - DNA, 526 bp, Homo Sapiens
  misc_feature (406)..(406): n is a, c, g, or t
aaggtgattatatttattgatacttacatattaggagttaaaacaaatttaaaacatacgagtactgtacacgcaagcatgcatcccctgagtctgagtgaggctgtcactctagcatctggaatgctccgttgtatattcaggaggggacagtgaaaaagacaaataataatgtctttgtattatgaaaagttttgatctcatagatctcctgaaagtctcaggtatcccccgggggtccctggggccacactgtaaggaactgctgcctactttttcccatgggaatgtggaatcaaaacctgttgaattttaggctgtaacttaagcctagtttatattttgtaaaaaggaaaatgtacaggaagattgtttacataatgatatacaactttaaatattttcnggcatttaccttatatgatgggcatgaatctagaaacatgaataattatcagactagaaccttctaatttaaatatctaggcttcagcctgccattgttatagttcaatcgaaatgtgtc

SEQ ID NO: 458213 - DNA, 275 bp, Homo Sapiens
  misc_feature (246)..(246): n is a, c, g, or t
aaaagttttatataaaatattttattagagtctttattctttataagtatctaactttatatttatacgctctggcctcccccgcctggccagttgggttgttttgtctaacgttcattgcgttctaattcggctggcatttgactaaggccttaatgggttttgactatactcttcccatctgcaccacagacctggaatgagagaggtttttcttttcttcttgcagtaaaggctgattgaggnttcagaagctggtattctatggagatgag

SEQ ID NO: 458214 - DNA, 471 bp, Homo Sapiens
  misc_feature (451)..(451): n is a, c, g, or t
acaatgttagtttctggaattttattatttttaatacatacatttcacaaacagaaaccctctaaaaccacacacaattccacaaccaaatgtttcaattttatcaacattctttaactatttacactgtctttcctcaacaaaagtgcaatccaagacatcttgacaagaaatctttactgacaagaatttatttttgagctggttttaatggagcccatccattatattttctttcaattacccggaatattcagtgaacaggacatagagatgaactgggttaggcagcatcctattataggaaataaaacactaaacaagaacactttctcctcacttccttcccaacctccaatgaaagttactcaacagctggctaccaggacacaaaacaggaaaagcaaactggagttcctggacctagacacaggagaacagactgtggtantaaagcatcagtcttgcagg

SEQ ID NO: 458215 - DNA, 490 bp, Homo Sapiens
  misc_feature (412)..(422): n is a, c, g, or t
gccacagaattttgaaagaattaatttataatgcaatctactaaaaactcaaaaacagatatcatgtggaaggtttaaacaagtggatacaattttactcttagcaattatctcattaaaattcttagaagatgtatataaggcttaaagatttctaatgcacaaaataactcttcaaacaataattttatgaattattaaattgaaacaagtcagaatttaaaagggactgattaaggctctttctgaaaagctaaattagagaatcccatcagtaaggtctgaaataccagaataatatttgaattgaacattctttatcaccaagtagcatgctgataaaaagcatttttgaaagaaaaaggaatgcctaatatttatctaaatcctgaacttaggagtttccaaaaannnnnnnnnnnggattacaatgaaagtcagttcccctaagctgataccattattattcttttacgttttgtagtaaaaa

SEQ ID NO: 458216 - DNA, 146 bp, Homo Sapiens
cttatttgtaattttatttaaggagaaatactctttccctttgatacgactataatattataaacagcaaggaatatgtcctgctttctgcaattttagaaagtcattccattctgggtgacagaatgaggtaagactgtctcttt

SEQ ID NO: 458217 - DNA, 272 bp, Homo Sapiens
  misc_feature (26)..(26): n is a, c, g, or t
  misc_feature (28)..(28): n is a, c, g, or t
  misc_feature (85)..(85): n is a, c, g, or t
catgtttttatattttaatatatttntntgaaaaattacattaacagcataaaattcaaaagttatacagaagaaacaataagangtaaatctttcgtcctgtcctgtgccccatctagtaccttaagacaatcagtgatagtagtttcttggctgtaccttcacaaatattctaggtatttatattatttatttccccgtacacaacaacagcgtattatagacaacattctctcctggcttttttcacttactctttatccatattgata

SEQ ID NO: 458218 - DNA, 438 bp, Homo Sapiens
  misc_feature (419)..(419): n is a, c, g, or t
aaagaagcatatcttattttcatcttaaaacagtaagttaagaagagcttttatagtggcaatcaggaagctatagcactgcagttggtaaaaaggcagtcaagactgtgtggctaaatgggcctgtagaaaataagggagagaaacttgtactctacagctgattttaaaagaaattcttatcatccttatatttaggaagagaaacaggaaggaaatatatggataaagttttgtcatttgtaaagtttatgggctataataaatgacggcatccaaaatcctcaataatagtcctttatacatggattgctgatctaatattttgtttatggaacatggtacaatacaacactcacttcctactgtatctccttttataaattcagtacatttctactgagggcataaagtgtttncatttaaggccacttctta

SEQ ID NO: 458219 - DNA, 495 bp, Homo Sapiens
  misc_feature (97)..(97): n is a, c, g, or t
ctcgcaaacagaaaaactgtgatattgtgacttgcagcaaaattcacttcatggaatgtgactgggggacctaagtaacaatcaatgactgttttgnacaaaaaaacttcaatcccatggcttcaacctatagattctttctgatgggtagcatatactgtgtgtagctatttttattattgagttggtgtttttctttaaaaagaggtacattcaaaggatttaaagaaaaagattctgtatagcattttcgctcatgaagaattatgattatacatgcttctcactttcatcaccctttacctattattctagtatgtattttctgtgattttgatgtttattttttattgtattatatacgttcttacaagttacctcaaattttgatggcacacagagattgtatatttcgagatgtgaagcagtgaacaatggaaaaactgacacactaatattatggaaacagaagggagcgctaacataacattccct

SEQ ID NO: 458220 - DNA, 718 bp, Homo Sapiens
  misc_feature (297)..(326): n is a, c, g, or t
  misc_feature (680)..(680): n is a, c, g, or t
  misc_feature (685)..(685): n is a, c, g, or t
aataaatacataaagctctttaccatttccctctattattttgattaacatgataataggatctttcaaagcatcattataccaattttcacagcccgatgtaagactcatttcacagtaataatcatgactagcattagtaaatgaatgttgatgccataaataacagtataaggcatatttacaccatcttaatatacataaacaccatacacatacacaaaaaagtcacagacccagaacaaagaaaattcaatctcctagacagcttacatttataggctttgtctaaaacannnnnnnnnnnnnnnnnnnnnnnnnnnnnnctttccaagcaacaaacagatcttccctatttcttgtgatttatttgtaacattgtattcatgcaaaaataatacttgtttcattgaattaacatttagacagctttagatttgggtcctatagccatcgtctaaaattttacttgatgttgcttcatccatatatcattttagttggtatgatatgatggtttgtttttggtaagttacaaaatgacaaacatatccagttgaccagagttcaaaaaccaagatactaaggcttggatcatgcacattttactttcattcttgtaaaatgggtttgaatcaggatattccattttgatttaacacttattgatttaatatttntcccnttttaatcatgtttctaaaaagggacaacaact

SEQ ID NO: 458221 - DNA, 305 bp, Homo Sapiens
acaactgcttccatttattgagcacctgatgccagatgtacaatagttctcaaggtagggtttgtctccatttcacagatgagtaaacaagctgtaataaaattttgtttgaagtacagtgggggcatgcagaagttagctattgccgtgtaataaaccatcccaaaacacagtggcttaagataataaacatttattattgcttctaagtcttagagtcagctggagggttcttctgctttggctgggcttactcatgtgtcggcagtcatctgtgggttgggtgactctcctgatcttgactg

SEQ ID NO: 458222 - DNA, 316 bp, Homo Sapiens
  misc_feature (240)..(240): n is a, c, g, or t
  misc_feature (268)..(268): n is a, c, g, or t
  misc_feature (285)..(285): n is a, c, g, or t
ctagatcaataatttcctttattttattcttgttggaaagaagaatgattttagtgcactctgcaaggtcatatattgtcacacaaaactgccacataccacaagactgtgcacattccaaccttaaagggaggtgttaacattgtagatactatggatttgtatatttatttcaataattttatggaatttgatagaaaattgtcttattctaacaaaatcattatattattataattnctttgaaagacaaataataaattgtccngaggaaaaatgcctttnataacttgtacaaaagtattgtgtgaactgg

SEQ ID NO: 458223 - DNA, 232 bp, Homo Sapiens
atttctctccatttatttaggtcttctaaaatttttctcagtagtattttgtcgttttcagtgttcagagcatacacatattttgctaaatttcaccctattgcatatttttatgcttctataaatggtgcttttaaaaattctatttctgaaatagacagttcatagctatcatatagaaatagaattgatttttatatgttgaccttgtatcctgcagctttgccaaaca

SEQ ID NO: 458224 - DNA, 547 bp, Homo Sapiens
  misc_feature (402)..(402): n is a, c, g, or t
  misc_feature (417)..(417): n is a, c, g, or t
  misc_feature (450)..(450): n is a, c, g, or t
  misc_feature (487)..(487): n is a, c, g, or t
  misc_feature (511)..(511): n is a, c, g, or t
  misc_feature (516)..(516): n is a, c, g, or t
ggcctcacagctttttattgaagtacaacataaatactgaaaagtacacatataaacatgcctgcagtttcatgaagttttacaaacccaatccacccacataaccagcatcaagctcaagaaatagaacttgtccatccccctagaagtccccagaagccccctccaaatcactgcccctcccccaagggcagccacgctcccaaccttttaattatattttgaaagtaaagctggcaggatcttttgctggatcgaatgggggcgaggggagctgggtgaaagacaggagtcaaagagagcccccagggtttgggggtgaagttctgggattcctgggggcttccatttactaaggatgggggaacttgtgatgggggggcaggaggactatggggttgnaaaccagggggtttngttttttggggacccgtttggagtttttggggnttgcccgtggaggccctggggggaaggttacatgccntcttattctaaaaggtttgccaanttcantgttcttcaggggacaagtaaccaagaggga

SEQ ID NO: 458225 - DNA, 642 bp, Homo Sapiens
  misc_feature (273)..(335): n is a, c, g, or t
  misc_feature (463)..(505): n is a, c, g, or t
aattactcaaattttttattggcataaataattcagacattggtttctcactaaacattgcactaaacacaagaaacaacaggcttgccggctcagaggcacacaaactgtccaacagcccaagttagaaatactttttttagaagtgtagaaaactttataaatgattctgtacaaatatacacagtggaccctccatccatctggcctttctttcctggatggcatctgaatagagtgttccttctcagcaacaagacattggcaacaagnnnnnnnnnnnnnnnnnnnnnnnnnnnnnnnnnnnnnnnnnnnnnnnnnnnnnnnnnnnnnnntggccccccaaaagaaaacatgaaaccaccttcttacatcaactcactctgcaacagtcgacacaaacaaacatggagaaaagaatatggaccatcggtccgcgttggtctgtacaagaattagtctnnnnnnnnnnnnnnnnnnnnnnnnnnnnnnnnnnnnnnnnnnnctttgtgtatagaaaaagataacagcataatttacatatagagaaagcctttttacaattgaggaattttcctaaggtcagtaacttcaagagtaatcaatcaaattaatcatgcgttaagtctgtcgagtggatcc

SEQ ID NO: 458226 - DNA, 540 bp, Homo Sapiens
ttttttttacttaattgagttttaatgctacataatattgaatcacaacttaaaatatgagaattaccatcaatctaagcccacattgcattctctcaaagcacattttaaaatctaaaaattggtgtcatttattaatttcattgtaatttgcacttaattagaacctctccaagcttgacacttacacacaaaatgactcattctggcacaagtgggaaatgaaccgtcctacaaaagcaaatctcccagatacttgacactcaacgcttcaagcatggaaacttgttttagaggcacttttgagaggaaataagtgtcttgaaattaattacacagcagttctgtacctgcttcaataaagtgtattaaacgacatttaaactttgaaggcctcaggaccattttcagatgttgtgtactgtgttacaatgtagtaatgctaatatcaccacttacataagatgtaacaaaatgcaaagcacttaaaggactgatgtgaaatgagcaaatgggataaacttattattcttaatttaa

SEQ ID NO: 458227 - DNA, 645 bp, Homo Sapiens
  misc_feature (538)..(538): n is a, c, g, or t
  misc_feature (586)..(586): n is a, c, g, or t
  misc_feature (600)..(600): n is a, c, g, or t
  misc_feature (634)..(634): n is a, c, g, or t
caatttataaagaatggaggtttatttaggctcatggttctggaggctgggaagtccaagattgggtggctgcatccagtgaggccctcatgctgttttatagcatggtggaaaagtgaaaggagcaggggagagagagcactcacacaccagagaaaagggggctgaacttctttaattgctaacttactcccatgagaaaggcactaatccctcttaaagacctaatcacttcttaaagaccccacctcccaacatggccaaaatggcaataaaattttaacatgagtttcagaggggacacaccatattcaaatcatagcagtactccaaagtcaaatgctcactcttgggcatttaccttgggatttgaaggccaaaaaaattcagggggtctcaatgcaaaaacagcagagtctgggcacaaaagggaacttatttacaacacctagggactctgtgagggaaggacaggggacctgaaaaggggttcaggcaggcacgtctcctggcattcctcaagggggccctttaaggngtaattaggtaggtcttccttatgggtcccttttatgggtcaccaggnttggtcaaaaggtnacttttaaaggtcttaactggctttgtttgtggntctaggatttt

SEQ ID NO: 458228 - DNA, 447 bp, Homo Sapiens
aatttataaagaatggaggtttatttagctcatggttctggaggctgggaagtccaagattgggtggctgcatccagtgaggccctcatgctgttttatagcatggtggaaaagtgaaaggagcaggggagagagagcactcacacaccagagaaaagggggctgaacttctttaattgctaacttactcccatgagaaaggcactaatccctcttaaagacctaatcacttcttaaagaccccacctcccaacatgggccaaaatggcaattaaaattttaacatgagtttcagagggggacacaccatatttcaaatcataggcagtacttccaaagttcaaatgcttcactcttgggcattttaccttgggattttggaagggcccaaaaaattttcagggggttttcaattggcaaaaacaggcagagttttgggccacaaaa

SEQ ID NO: 458229 - DNA, 434 bp, Homo Sapiens
gcgactctcactaaaactttatttctaagagtgaaaaattagaaaaaacttctgaatgtccaacaacagtaagacagttgcataaattgcttatagaataatatgtaggtatgtccatgtatattaacaaacaattctggatataactaaaaacacaaattcaccatatatttatatatgtgcacaggctattaacagcagttatcactaggtagttgtattacaattcatttaactgttcacttgtctttcttaaaattgtttcaagttcttcaggaggtaacacaaggcttggaaagaatacttaagatttaaatcatcagagtgagactgccataacatgcatgtaagaattgactggtacaaaaacctaaagggtctcagtataacaactcttctctgtattgttcttgccaatggtttagaaattgcgt

SEQ ID NO: 458230 - DNA, 249 bp, Homo Sapiens
  misc_feature (111)..(111): n is a, c, g, or t
  misc_feature (188)..(188): n is a, c, g, or t
caattcaatgatattttattagataagaacatgctcataatataaaataagctgtcaaatacattcgtaaagtaggatatgcaggagtggatggatggatgaatagatganctgatagttggataaatacatacataggtggcttttgaaatgcctgggtaaaaatgatgagattattagagattttnattttctttttcatatattttgtattgtataaaataagcatgcattatatttctaaatgaa

SEQ ID NO: 458231 - DNA, 425 bp, Homo Sapiens
ccctccagtagccttgattgttgaaggagaaaattacccagttttaagaagcagttacccagatgccttttgtgtggcctatactctcccaattctaattcatgcattcttcaatgagcatagagcagttactcctctaaagaattaagtaaggaatgagtgcaagtaaattgccagggctgtcacttggatcactgacttgcatcgtggtttgcaggactctaaaccctccagaatttcaatacagagcacgattgatttgtactgagttgactttgcaaatctgataggttataactgcttcagggaaagtgaggaaccacagggaatgagagcaagccagcaagcatgtgaataacctttgccctcccatctccttaccccatcatggcaaatttaacatatggacaaaccacatttttata

SEQ ID NO: 458232 - DNA, 286 bp, Homo Sapiens
  misc_feature (180)..(180): n is a, c, g, or t
  misc_feature (240)..(240): n is a, c, g, or t
  misc_feature (257)..(257): n is a, c, g, or t
caacttttatcaattttttattattttactatttaaaaattttaatcttgaaattggttaaccttaggtaaacactaaccatatttttttatatacattatatacacgagaaataaatagtcttccaaatagcattttttaaaaagcatcattatatacaattaaggcttcaggccaggngtataaatatacaactcactgagaattcaatttgcaaagcttccattagtaaaaacagangtcagaagtgaccaggntgtacagccaataatatgggttgagcaac

SEQ ID NO: 458233 - DNA, 350 bp, Homo Sapiens
aacatttttaatgatttctttttattgagttgtttatttcttgttgtatccccactcccaggacaacatgaactacatgagggcattgaccaccccccaatggcttcgatatcttttaattttttatatctagcatctattctacttcacaacacatagttggcatttaaatctttttgcaaatggaactattatccaccaggtcagtagggcttctctcttattgtcatgataattatataagtaggctattacctgtattttacagatgagggaagttgaatctcagaggaatcagttcacttgccaagtgcccatggttagaaagtggctggttcaagtgctgaatc

SEQ ID NO: 458234 - DNA, 264 bp, Homo Sapiens
  misc_feature (239)..(239): n is a, c, g, or t
cagccccacccttagcacagtgtttggggcagaagaggccagaggggttaggagaggtggatccagcaaggaccctgcagccagccccacaggtctatctgaagacttcagagccagtttcacctggggcatcatgacagtcctgtaaaggcagtgatcagtactcccatttcacagaggaaggaaatgggctgagactcagagaggggtaagtgatctgcctgaggttcacacagctngggactgctagtatgccagccagtt

SEQ ID NO: 458235 - DNA, 356 bp, Homo Sapiens
  misc_feature (274)..(274): n is a, c, g, or t
  misc_feature (335)..(335): n is a, c, g, or t
  misc_feature (344)..(344): n is a, c, g, or t
tgcaggaacagtggtttattgaccaggcaggcctccccagcccggccactgctccccaaggggctcgggctgtgtgggctggccttggcagaaggtggacaatcctctaggtccaaggacatgggggtcacagaggtgggggccttgggcccacactttcagaggagagttcccaaaagtttccagtggctgtcccaggcaggtatcaggttcggcccacacctgagtgcccatactctgggcagggctgggaggcacctgacctcacctccangcagctctgcaagtgtggggtgaaaaaaggtgaatctgtgtgaggatggggttggctgaanttgttggtnaatggcctgggc

SEQ ID NO: 458236 - DNA, 385 bp, Homo Sapiens
ggatttaatcttatctttgtcggcgagggaagggttagccctcagtgctcaagacacaaagaggactgaaggcgcattaattggtacttgctaatcaagccttagagaccagagcactccaggggaattttactttggagagaaatctcattggccctggagcagccctgtatccactttgtgaatgttttagagagggttaatggggtactagcacagtgtgattagttcagttcattggattatcattttgtaaaagaggcagcatctttactagtactctaataaattataaaattattatatccatttctgttccttgtaccttctttctttgaattaaggaaaatggtgtggtaaggtacagtgaacttttgagccagaa

SEQ ID NO: 458237 - DNA, 1229 bp, Homo Sapiens
  misc_feature (546)..(546): n is a, c, g, or t
ttttttttgaatgctctcacctttatttctctcaatatacccgtgatacagatatttcatatgtaacaaagataaggacgtgtgcaggtataaaacagaggcagaatcatggctaaaacatctagcccagcaatgaactcattatccctgaggggtaggggcgggggaggagaggagtcacaggcagttcacccacacctggaaaatcgatgacttcatggagaatgaatgactcggggggattcagatcatgaagtcatgagaagaaggcctttcttcccagggatgatgtttctcagtatcaataatcagttgtgggtttttttcttctatttcttccagcagcttattgagttcatcattaaagtcatctattttcaacctgagtgtccggaggtgccactggaacatgtcaaggtttcaaacagcatcttcactccactagaccccaagggattctgacccaggtccagagtgacgaggctctgggttgcagctgagggcagagcagaggtcttcacaactgaacggagggatggaacatcnccacaaccacagacatctcaagttgcacagtggtttcctcaaagcctcacacaggaacttcattcccttaactcctatgtgattcagccccagatccaaacacaacaggcttgatttttcttggagaagctttgtgagatcgcagcagccatcgctagttatgtcgcagttccaaagcaccaaggtctgcagtttacactcggggtacctcaagccctcacacagaaacttcaacccctgtattcccaatggggttcttggccaagcacaggtgtgtcagctcccggctgacaaccaacacagcagcaaggtccttgcaattggcttctgtaaggtgacagttttccaacgacaacctctgcagaaagcacttggggtgtctcaaagttgtgtacagcaacttagcaccctcatccagaagctcattgtcggagaggtttacgcacgtcagggactggttgacttcaagggccaaggagagatcagcccactgctgagtggtagcggaacaagacaccaacccgagatatcgcaggttacattctggatgtctcaagacctcacacaatgcgggaaacatatcatcctggtcattgccttgaagggttagatacgttacagtcttgtgacctcgaagagctaggcagaggttccgatgagcatcagctggggaaatgtttttg

SEQ ID NO: 458238 - DNA, 427 bp, Homo Sapiens
ttttttttatcagcaggaaccaacatttattgagcagtcattatgcatccattatgaaaaaccactggacactttacccattatctcataggtacaatcatctcttttaatggatggagaggttaaacacagtgggctctaaaaccagaatttaaatccaaagcccatggattttctaattattattagaatatataatagagactattattagaatgtataatatacattattttaaagaattctctctcccttcaaccatttcaagggaagttccatgttctgctttggaaatcattttggtcttcttgaaagaatctctcacagccatagagctctccacatttcacatttgctttcacccacccattttgtttcttgttcattccttctatgcagtctacgcaaggctgtgggtggcagaatt

SEQ ID NO: 458239 - DNA, 482 bp, Homo Sapiens
gaatgaaccaccatgctcggcctcattttgaacattttaattagaaagttacaaaacatcatgggttctttatacaagatttgcattagaataatttaataaaatgcaaaccaatgtttatacgtatcttgtcatctttccatatctcattgccttatgtgaatttaaacaagaaactatttttcgtttagatcttaagaaaaaaatttaggcatataaaacagcctgaatattaaaaaaagacaagggggtcagtgttagggaattcctctgcttgaatacttcaaaatagctttgtttccaaaactgttttagtaaggcctaaaggagcactaaaaacgggcaactgatctccaaagtaaactgaggcacacactgaggggtgtgtttctggggtgggcattgaagcatggatcaccggggccatgtccttccagtggcaatgcctgcttgggatcaggaagcagctccatgtgttcttg

SEQ ID NO: 458240 - DNA, 515 bp, Homo Sapiens
  misc_feature (21)..(21): n is a, c, g, or t
  misc_feature (464)..(464): n is a, c, g, or t
  misc_feature (499)..(499): n is a, c, g, or t
ttggaccgaggatttgtaacntttgagatttaattttaataactagataagaaatataggagatttttattggctaaattctacgtcacacaggacaatgctggaaagaagcaggtattttaaaaattgtactccagtggcacatatagtcacgtctttactcttaagcctgtctgagaaacacttagagaaataacattcttgatattatgttggtccagtgaggatgagaaggtattttgacccaaacatatggatgcaggcttcaaggacacagcgaattataccatctgaagcaactggaaacgaaaagctgtgtggctgggaatcagcagtttgtaacaacagctggtgctgtggggcagcagtctaatggggaaatgtcttcagccagccaagccttgcacacagacaaaacaaaatccacacctgtggtttgtttacaaaggggcaggaaagggccntgggaaggacacctcctttatatgggtggagagcncctttaggcgtttttg

SEQ ID NO: 458241 - DNA, 590 bp, Homo Sapiens
  misc_feature (27)..(27): n is a, c, g, or t
  misc_feature (37)..(37): n is a, c, g, or t
  misc_feature (122)..(122): n is a, c, g, or t
  misc_feature (127)..(127): n is a, c, g, or t
  misc_feature (505)..(505): n is a, c, g, or t
  misc_feature (509)..(509): n is a, c, g, or t
  misc_feature (534)..(534): n is a, c, g, or t
ttttaaaaactggggctccgaagcccnttcccagggntgttagctcatattgctctgaagcaggaacccgggcaatcccttcccactgacccctggtccgtgggcggcctgccttctccccnacccnggtcccccagtaccagcatccccatggccaggtgggcacagggcccagaggatctgcccacagttcttctctggcccgaagaaacagcagagagattggaagaagaagctgcaaagccacaactgacgcatttgaccatcatgaggatgatgcccagcttgcgatagagcagcactgtggcaggcagcatgagcacgcctgccgcaaaacaggctgcagcccccacggctgtggcgcagctggtctggcgcagagagaaggccagcgccaaagccaggcccagcaccacagcaggctcagtgctcaggctgtgctgcaggctatacagctctagacggctagtgaaccaaccacggcggaggcctggaggtgccatgnccantccgctgcagccagtggctgacctnattgtagaagagctgggtctggttgtagtccggactgttccggaagttggtctgga

SEQ ID NO: 458242 - DNA, 469 bp, Homo Sapiens
  misc_feature (20)..(20): n is a, c, g, or t
  misc_feature (31)..(31): n is a, c, g, or t
tattatttaacacagaacancaaaaaagcanttatccaggaagggaatcaagctcccctgtaataccctggtcccttagggaacatcccctggatgaacactgaaccaaggggaacaagatgacagatgaacaagtagaaatagctctgttgaggagccaactcctaaactatagctaaacatttttatagtcggtatctgcacctgaatgagagtgaggtcactggaaaccagctggatgagaaaatttctcacggcagccttttgcaagacagggaggtattttgcaagataaatggccctttgacagctcctttacgatggcctatcttgccatggaggatccagagaggatcacgatgttttctaccaagacctgtgtcagactgtggttgagttttgcctacgtggactatgtgcagtgagcaaggtagccacgcaccatgccagcctcgtgccaagcttggcg

SEQ ID NO: 458243 - DNA, 492 bp, Homo Sapiens
  misc_feature (401)..(401): n is a, c, g, or t
ggtgcagattgattttccaaagatggcagcagcaatatctctcatcacgcatatccttataacatgaatttgacctttcttccatgtagagatgggatctatttcccctcttgaatctgggcaggttgtaactgtggcagatgtgattctatatgacttctaaagctttgtcatacaaatgacaaatcatcaccttgccggctagattgctcacggtggatccccgaaccaccatataaacagtgccctgaggttaccatcttgtgaaggagcccaagtgagccaacatgtaggagaccacgtggagatgctctgaggccacacgaagagaaagagagacgctcaacaagcccccagctggctagccccccgctctcccagctctggctgtttgtcttgantctaaccacatggaggggacccagaggccagattcatttaggttgagttcccttccccaatttccccaacccacaggaaaccttggaaagt

SEQ ID NO: 458244 - DNA, 528 bp, Homo Sapiens
  misc_feature (466)..(466): n is a, c, g, or t
  misc_feature (492)..(492): n is a, c, g, or t
  misc_feature (503)..(503): n is a, c, g, or t
atttctgatggcttctgctatcactgctgccagaagttcttcttttgctttttccttttatcaaaacacttctatacacctggctccgggcctgcggttgagtcctataacaacgcataatgttctggaaggacttatcttcttttgtgacctttgccatcacataaatggcacacattaataactggtccagatgtctgtccatcataagttcaggacactgaattatggagaattcaaagcaggtccagatttttttcctcaattcatctgaaatatctagtttggcacagagatcccgaaggcgggacagctgctaaatggtatacctttctaaagaaaagcgataaagagctggtcttcctggggtctattactactgctgggttacagactgggccttgcttctgctgtttggccacctgggggaaaatctgtttgaatgggcccacttggaccagggganttggcaaagttgtttcccgttcaccngtttgaggagntcaggatttccagccagggggcttt

SEQ ID NO: 458245 - DNA, 583 bp, Homo Sapiens
  misc_feature (35)..(35): n is a, c, g, or t
ctgaattaaggtgttttaccccacctcctcctaanaaaggcccatcttctgctcctaatgaaatacttctatcaccttataaaaatgataaagaggcacatcaaatatttccagtaataaatggaaaattccccaggaggcttataagaaaaagtgacgacctcaaggcagcaggccaagagagatctgtggaacgcatcttgttccagaataccagataaatccatgtctcctagtcttttttgttccctgcctcaataaacagattcctaatactttatagtaaagcatctccgcaaaacgaaaatgtttgctggcaatttctttagcacaattactgaaatcctcgtctggctggaaatgctgagaatatatttcaaacatttctttcagtctgttagcaatagcctgggttggatctctggaacatgtcctgagaatctgttccagtttctcacttggtgcattcctgaggcctgtcagcatggtgtgaagacgactcaagctatgcgtagctgtagaaactggagtcacacaagggctattctccttaatgtacctaacaccagttcagtgaccgcgt

SEQ ID NO: 458246 - DNA, 532 bp, Homo Sapiens
  misc_feature (488)..(488): n is a, c, g, or t
cgcaagcttggtaacgcagggcaaaaaaccttttttatgtgagaacatataacttatttaaactacttcaaatgcttttgaaaaatttcaggagatttttattcaaatataaaaatacagaaattgataaatgccagagcattaaagatatattaaatagtgaaagaaaaatattgtttttaacaatacctgagataaattacatgtttgtagaactatgttctatgatcaattataaatttttactgaatcttaaatgccagaattgaggatataaattgctcctactacaatttcaaatttcgaagacatgttatttattgtcttatatcttacatgatccttttttctcaaatgggtaatgaatgggccagacacagggtatttcatttacaaagcaagcaggataatcataacgcagggatattacacttccactcttggattgtttcttcagggcaagcttttctagggtatggggaagtgcnctttccaatttaggtcaattacactgtaggcttctaggttaagc

SEQ ID NO: 458247 - DNA, 198 bp, Homo Sapiens
caaaaatttttcattgtctccaaaggatatataaaaaaccttttagtttaccatggtacccagtaactctagaaaacagatgatatcatcaaaaattcccagaggcaaaatgtggctttaaaaatccacattgatttggggacttttgattgagctaaaggcattttgtttctgatgagtttttaacctgtatttctt

SEQ ID NO: 458248 - DNA, 515 bp, Homo Sapiens
  misc_feature (36)..(36): n is a, c, g, or t
  misc_feature (123)..(123): n is a, c, g, or t
  misc_feature (129)..(129): n is a, c, g, or t
acgaggctcctggggaaaggggccagaaattttttncaggcccttttccaagagccagtggagcctcccattggcaaatccaatacccccagtcctgccttcctagacgcgcctaatttcctntccttncagtgctcccttaatggctttgtgttgccgtttcatttcctagtacatgagatgtgtgtcctgattataggcattgtatttctttctaatttctttttaaagattgtatttacctttacatttggtaagggtattaaagttagagggggaatgtcaaaatgtcaactaaataaaataaaatgttactacctttaaaaaaatcagctaaaataagaccattttagctggaaatttcattcaaactctctaagcttcagtttcccccatcacagagtttttgctaggcctaaatgggatagcatgtgctaaaattcttcacaaattgtttatgtactatttcctatttctgttaatgtgctgctctattgatggcctgcgtgccaagc

SEQ ID NO: 458249 - DNA, 487 bp, Homo Sapiens
  misc_feature (53)..(53): n is a, c, g, or t
tggactggtccttggagcttaacccaatacaaactaaaagttcacgcggtgtncctggcaaacagcttttaaagtagaacacaaaggggaactttccgttgctggtcccatctctctccccagctcttaccctcaacccaggcaggccctggagaaatgacaaaatagactgtgtccttgcccgctagggaacaaaaccacagaagggaaagttgttgaggctatccttcccagggccctcatggcatggaaagtctaaagagaacactgtttccctaagacccgtgaaatcagcagaccagatgaactcaagaccttaaggattttaggaaatcaatgagtagcaaaactgtacaaacactgtagaacccagaaacatggagaatgtgagaattcggaaactgtttaaaagagccaagcattggctttgtcaggtaaacaggagatgatgtacacactcctatattcattaaatttaccttttttg

SEQ ID NO: 458250 - DNA, 476 bp, Homo Sapiens
  misc_feature (52)..(52): n is a, c, g, or t
  misc_feature (63)..(63): n is a, c, g, or t
  misc_feature (71)..(71): n is a, c, g, or t
ccggtcaaacgtcaatgtttcccctcctgtgcccttaaaaagtttggaacangctggttaaangtccccanccaaagctgtcaagaatcaacaaaataaatggtctttcaccctgtaatgctccgccaggtgaattttcaagccgacaggctttatcatactgcttgctgcaccccaggaaaggagcaggaaaagagctcttgttccctgaagtgggctcggttatgggaaaacagggcactcactgtgataaatgtcttctcacagccgggaaagtcacacttgtaagggcgctcgggctcgaagtgctgcgctggtgggagctgagcttggcgtgcgtggggaacgctcggcgcacacctcgcacttgaacaggctctcctgctcgtggcccttcatgtgcgccttgaggttatagaccgtagtgaacttcttgccacagccgccgggctggacagcgccgggcgtgccaagtg

SEQ ID NO: 458251 - DNA, 392 bp, Homo Sapiens
  misc_feature (28)..(28): n is a, c, g, or t
  misc_feature (59)..(59): n is a, c, g, or t
  misc_feature (69)..(69): n is a, c, g, or t
  misc_feature (96)..(96): n is a, c, g, or t
  misc_feature (132)..(132): n is a, c, g, or t
  misc_feature (134)..(209): n is a, c, g, or t
  misc_feature (253)..(253): n is a, c, g, or t
tcatacaaattaataatgggtattatgnttcctgataatatttataaacatttatatgncatttgccanataccacatactaagaggtttcataangtattaaattgtttactcctgataattcagagaacnannnnnnnnnnnnnnnnnnnnnnnnnnnnnnnnnnnnnnnnnnnnnnnnnnnnnnnnnnnnnnnnnnnnnnnnnnnnacatagtatcaggcttcaaacccagcactcacacttcgtgtcantaattcttggtgacttcaatattcaccctctgagagtctggcctttcagtttcttgaggttctctctcacactcattcctgtcgtcatatgcttagtctcatcagcaaagactgcaatccctcctcgtgccaagcttgc

SEQ ID NO: 458252 - DNA, 424 bp, Homo Sapiens
  misc_feature (79)..(79): n is a, c, g, or t
taaaattccggaagccaacctaaaatttgggagccaaaatgaagattaagaaccatagatttggggttgggaaaataanggtatccgttaataaaagttgtgtgtcctaaggtgagagttcctcaactttggaggtaattgtagagtgcctggggagaggaggacccataaactttgattagaaaatagttttatttttattttcactaacctctattaaaaataacatttcctttcattatgaatgaagacaacactccaccatcatattagcaataaacgtgactctgacttagcagtatcatctttgtaaatatcagatattttcataccacattccacttgctgcagagaactcaaaatatagtttgtgttcatcactgcattgaaactaatagcccccggccacgtgccaagcttggcg

SEQ ID NO: 458253 - DNA, 509 bp, Homo Sapiens
  misc_feature (35)..(35): n is a, c, g, or t
  misc_feature (495)..(495): n is a, c, g, or t
gaaaaaataccccacgaagaaagtatgtccaaganttttacccttcccccactccctccccttctcaacaacacacagaattaagcagtctaaaacaattcctataatgtagcccacaaaagttcccattttatttggaaaaagcaaacacaagtaaatcccaacattttcccatgctagagcaatggattatcggatcggaaatatgtatttcaaaataatatatgggaagaattttctattgtagttgtttttctatttttcctacaacaaacataatcattatatatttaaaaccaatgccagggggagaacaaccagaaggggattaatttcctgtgctcaaaggtaaagtatttctaggtaaatggaaacataagacggcgatacagattttactttcaaccaccattcgaagtgggtcattaggacaaggtcaaaccaagttcccaaatcagttaaatgctgttactttctttcactttatttgcccgngttcccaaccttga

SEQ ID NO: 458254 - DNA, 595 bp, Homo Sapiens
  misc_feature (20)..(20): n is a, c, g, or t
  misc_feature (28)..(28): n is a, c, g, or t
  misc_feature (47)..(47): n is a, c, g, or t
  misc_feature (66)..(66): n is a, c, g, or t
  misc_feature (74)..(74): n is a, c, g, or t
  misc_feature (87)..(87): n is a, c, g, or t
  misc_feature (115)..(115): n is a, c, g, or t
  misc_feature (121)..(121): n is a, c, g, or t
  misc_feature (580)..(580): n is a, c, g, or t
aaggggcccaaactggtggnacaacaanattttccggggtcaaaccnaagaagtaaccctttgggntaaagtangacagtcccccanaattggccaatgtccttggaaagttttnaatccntcctccacctccactaatcctagttttccagttgggccctttttccttcctttccagttatgccctgcccttcaaatcctagcagccctctttcttttgcccattcttttgtgagcttcaaagcccagctaataaaacatgttggaagcgtatgcaaatttcagttcagagtctaagagtgatattcttgaagatctctcccataagtaagttgcaagaaactttgtgacatctcctctggcagctgaaaggcctttaagacgtaattcctgatttttttgctttgccagagaggtaacttctggataaatgaccttttcactaaccctccatgtactctacctgtccttaaaaaggctattagaagtgggaccatggatgtaaaagcactttaaaaaagcataaactgtgaaatagtattgtttagcccatgtatctataaagaaacacacaccctgngttccaagcttggtc

SEQ ID NO: 458255 - DNA, 619 bp, Homo Sapiens
  misc_feature (402)..(402): n is a, c, g, or t
aggcttgttatttaaggtttataataatcgcactaaacacaatgaaaaacaaaggagaacattgagagatcactttaactttttataatcagtttatgtgtattttatggtagtaaatgataaaatagctagtatctacatacagtttatacatttgtggcatacctttctcttaatttttaaggtatttttaggctacttggctcatctgagtttttcaaagtgttgcgagtctccaaaaacttctcagtgtgtttactgaaaatttatgtgtcagtgggcctgagtggttgaaaacggtgttattcaaaggccgcctgtatttctaattcgtccctctttgtgattactgctggctaaattcagacctacattattagattattggatttatttcccaanataccctttgtgcctacaagtttaccttccctaatttcctcctgctcagttttctgaaggatgtcatatataggctactcctctgcttattgcttattgacctcatctcctgtcacccccactacacccacgaccctaaactctggcttttctcagaaaaagatgtgcttttcctaactccgtcccacatcttcagtctggaatgttctgtgctctt

SEQ ID NO: 458256 - DNA, 671 bp, Homo Sapiens
  misc_feature (26)..(26): n is a, c, g, or t
  misc_feature (38)..(38): n is a, c, g, or t
  misc_feature (557)..(557): n is a, c, g, or t
  misc_feature (567)..(567): n is a, c, g, or t
  misc_feature (628)..(628): n is a, c, g, or t
aagtagttcgtttccttgggtttgtntttcccacagtnattagccaatcccaagttgtgtaattctaattcaggaagagcgaagtccaatatcaaataacactgaacaaagtgacaacttctttcagaggtgttttaatacccatatctttcaatgttttaaaccattctaaagactaaggaatcacagaagtttccttattcagaaaattacagaaattaagtcttaatcatgttcactttctattataaggtcctctctgagaattttttgtggattatcctttttactgtcttcaacagtaaccactcttcatcttacagggttgaatttgctttctggaaatggctaaatgttactcagaaccaagagtagtagaaaaagtagacaaagaaagaatatacttccaggtgctttctcaaagtgatactaattaaataatatagctgattttcttataccttattaccttccttggatattatttctaaggagaggagtttcaaaaataactttaaggatggcagcatcattagaataagtattaacttcttaangtaaaactangatgacattgaggggaacaacacttaattagatgtcaaaattctgatatgtctgctaaagnaatcattaattataataattataatcatacttaggaggtgtcc

SEQ ID NO: 458257 - DNA, 423 bp, Homo Sapiens
  misc_feature (35)..(35): n is a, c, g, or t
gagtttttagtcgcttcctaacctacaagttaaanggatacctcattaatttttaccagatatatacatatactgtaacaataggaagtctttcaccaaccactaatactgtaaagaaagcattgtatcgatctagtattatttaatgaagacggacagcaattttaatacaatcttcttttccaagacctttgacagaccttaggcccattttccacctttatgtctaggaaagtataagtaaaacacttttgagggcataaaaaacacaagcttcttgttaaggtgtatcagtagccagggaaatctgctgtgcccctttgagggtcatctaactaaggcatagagaaagaaactgcctcaagtcagtttctatcacctctgcagggaagctggccatgcaaaccaggacatggtttcaaa

SEQ ID NO: 458258 - DNA, 249 bp, Homo Sapiens
  misc_feature (177)..(177): n is a, c, g, or t
  misc_feature (186)..(186): n is a, c, g, or t
  misc_feature (213)..(213): n is a, c, g, or t
ctgctcggggccagtggtggtatttctctccccacaatcccacaggcaaggccccacagtcagcctgagggtcaaatacgacctgctgcctgcttttgtaaataaagctttatcggaacataaccacatcagtccgctgacatgtggcctgtggagacctccgaccagaaccgtagnagttgaatntcaggatgggaggctgccacggaaagntggaaatgttcacttatttgggcccctttacagaag

SEQ ID NO: 458259 - DNA, 424 bp, Homo Sapiens
  misc_feature (312)..(312): n is a, c, g, or t
  misc_feature (335)..(335): n is a, c, g, or t
  misc_feature (346)..(346): n is a, c, g, or t
  misc_feature (352)..(352): n is a, c, g, or t
  misc_feature (384)..(384): n is a, c, g, or t
  misc_feature (393)..(393): n is a, c, g, or t
  misc_feature (398)..(398): n is a, c, g, or t
aacatctgcctccttttcatttgtgaagccagaacaccacattcctcagcttttacacatctgagacacttttttgctaaagggatagcttggcgcttcagtgagctgctgaatatgctcagtcattcaactcttcactgtccaggagtcatccctgcctgggaaggttccaagtttcccagcaagcaccagttcccttgggagtgtgtcctatagtgaataaatgtcaaattctccccatggccaaaaggtgagggggaagggaaataactaggagagtgaaagaggaaagggtctttgctttcaagtagnaatcatctagtcctctgtttggnctgtctcagtnttgggnctttggcaggagcccgatttccatgatgcccnggggcctcntggtnctgggaccaatgccccaggaggaggg

SEQ ID NO: 458260 - DNA, 315 bp, Homo Sapiens
ctaagtcagcccaatggtgctattttacatatcaacacagttgaaaggaagtactgttattttgggctgcagtgtttcctccacatctaaagaaagcccattttgaaactggatactgcattaaaacaaagaagggaaaattattttaactgtgtgcagtttttgaaattaggcatttgtactattttggttttacataattctcttgcattaacaatttactgttttgtgaatcatgtgtactaaagcaaattaagaaaaagaaaataattatctgtgaaagactttgtatattaaacaagtgacgcaaacctt

SEQ ID NO: 458261 - DNA, 193 bp, Homo Sapiens
ggctgcttttctgatgtctttttttcaatttagacattttctgtgtgaatgtgccttcaaatttgctttagtatattcctctgcaaatactgatctgcatgcttattctgatgacttcttttccagctcttctgtatcactctcttttgtgatctgtaagtcttgtgttaataaataattctttggcatattt

SEQ ID NO: 458262 - DNA, 373 bp, Homo Sapiens
ttttttaactgttagatatttgtgcaataaataaaaaaggagggaaaaccatatcagagcaataggcaaggaggtggcaaactagataagtctccttggagaacaaaaaatatatttaaaatacaatagccctactacaactgatttatggctcaggtgactaaacacaatttgaagcagtaacaacactcataagctgaaaataaaatacttttagcccttttattcttcttgcctctttcccaaagaatatgccaatgaagctgttcttgatgtcacaatattcatatatcgcagaatttctgcatttaaactaccttgcctactgaaaataggataatcatttcatctctaggaaccagtaaccaaaaaa

SEQ ID NO: 458263 - DNA, 437 bp, Homo Sapiens
  misc_feature (417)..(417): n is a, c, g, or t
aaaaaagaaagctaccctaaggcacatatgggccatttcttatggaagagaaaggatgactcagagggcagaatcacagccaggcagagcaaaactggatcttaatcaaagtgtatcttttgaccctggggcagtgatgaccggtagataccagaatttctacagatggtgactaccatgtgcctcctactctaccccactcctttttgagtaagactatctattgcattattcctcaagcaccattttacaatgtgagggagatgagaggatgaggtggctgatagataacttgagtttttagttcacaggtcttaaactgtagaggaaatgtacttggataatctgtttcccaacaaactgcacccgagggagcctcatcttgcagcttggggcttgatttcaggaggttgttcnggggttttttgaggccattt

SEQ ID NO: 458264 - DNA, 349 bp, Homo Sapiens
  misc_feature (25)..(25): n is a, c, g, or t
  misc_feature (32)..(32): n is a, c, g, or t
  misc_feature (39)..(39): n is a, c, g, or t
  misc_feature (48)..(48): n is a, c, g, or t
  misc_feature (69)..(69): n is a, c, g, or t
tgatatgtagttaatacagttacanccttaancaattgnccttttagnctctgtgagcaagcctcttgncttttccacttttggctcttgcacctagtgccatgtcccaatttaaaaggccagagtcagaggaagatgcacctctttagtgagtgctgctaaatcatcccactcataccagcatgatcaagtgggagaaaatggtcttgtatttcaaaaggattggagaagctagttatttcataagaatatagaaggtgaagttggaattagaaataatcctttacaactgccaatttaaattgaaatatttaatgcctgtgaggttaggtcagtatcccagaatacc

SEQ ID NO: 458265 - DNA, 345 bp, Homo Sapiens; identical to SEQ ID NO: 217395

SEQ ID NO: 458266 - DNA, 678 bp, Homo Sapiens
tttttttaacaattttgggaaccaaagtcttacatcttttttaaaggcgccattttacagtagaaagaatacaagtgggcctgggggacaggcactggcctcagagctcagtcgtggagcctctggagtcgtgcagctgaggccactctgggcagagcttcctgccgtcacacagatgaggatacaggcaagggggtgtgcagtctctgaggctggagtggtgctgctgtcccctaggtcccgttctttcaattcccattccttggccttccgcagcacatgccctcggcagggggagctgcccggggcagcctggctcttcttcaagacggccgcgctgttcaccggcacggggccctcggtgtcactggtgtcacagctggagatgggcgagttttccagggtccggtgccggaacactggagactgtggactcgatgtccctgacttgggctcgatggccagccccagggtgactccgcccgccagcgctttcttcaggctctccttgacctccgtcagctccagctccaggctgacacgctccgcctccttctgccggcactcctcctccagctgcttcagcttctcctccaggatcgcctgcggcttcctgccggcgttcacttcaatagccgctcgaaggtctattctttccttgcggagctgggccagcct

SEQ ID NO: 458267 - DNA, 454 bp, Homo Sapiens
  misc_feature (274)..(274): n is a, c, g, or t
  misc_feature (394)..(394): n is a, c, g, or t
aatagaaaaaacatttattatatatgcatgcaagaacactacaaagagtagctctctgaacagcaaggggtaagggtttacagatcagctttatggtgtgtgtcttaaggcttcagaatgaaactacaaaaagttctgataaggcttatttacaataccttgggaggtcctagtgctaagtgcccttataagaggaacactcagaggagggttttggcagctgaattctcggtaagacctgctttactcatcaaagtttagctaaggctttttngtctgcagctgctgtttgttcagatattctcaaagtaggacttgtgtcatattgatggggttgttagtcccttcattgccctatttgaaacttgacatgaagtttcactgacaagggagntgtgccgattgccgtgggagataaggccaggttcagaggttggggagtttaaggggttct

SEQ ID NO: 458268 - DNA, 347 bp, Homo Sapiens
ctgctattttctgatgctttgacatctggggcattgctgtctctagagagactacttctcctgggaccagccaatttctagtgatagtagaggactcaccctgcacgtgcacctttcatatacagatcaaccaatccaaaacctacacctccaaccacctcctttagggagctctcacactccagaccactatccagctgccctaattacccctggtgccagacagtagaggcagtctctacaccctacagctcaatcaagtcattcaaacccgataatcctaaacctgcttactctgcccctcccattctttggcactgaatccacagtagagcctcttggtccat

SEQ ID NO: 458269 - DNA, 532 bp, Homo Sapiens
  misc_feature (249)..(405): n is a, c, g, or t
  misc_feature (452)..(486): n is a, c, g, or t
acaaagtcaggagcttcattaacttgatgattgattcattcacttacttaatgcaagacttcaggggaagaagagtcgctgagtggaggagatgggaaacaatgcattatgaaacgcccatggtctctggatacccacccagccagtccccaccctcctagggtctggtctcgaccatctcatcatgtgttttgagggtgcgttttcctaccagttgtttttttgtctttgagacagggtctcctctcnnnnnnnnnnnnnnnnnnnnnnnnnnnnnnnnnnnnnnnnnnnnnnnnnnnnnnnnnnnnnnnnnnnnnnnnnnnnnnnnnnnnnnnnnnnnnnnnnnnnnnnnnnnnnnnnnnnnnnnnnnnnnnnnnnnnnnnnnnnnnnnnnnnnnnnnnnnnngccagggtgcccacgctgttctcgaactactgggctcaagggatccnnnnnnnnnnnnnnnnnnnnnnnnnnnnnnnnnnngcataagccaccagcaacacgcccagattcttctacacccttaatt

SEQ ID NO: 458270 - DNA, 319 bp, Homo Sapiens
  misc_feature (262)..(262): n is a, c, g, or t
gctgttagcagcttttattgcagcggcagagaggggctgccccaggagagcagagtgcacagaagagcagctcagaggcagctccgcatcataattacacccacttttaactacatgctaattaggggttggtttatgcagaaatttctagaaaaggagcagaaacctcagggtcattgggattttaccgtgggaagtggcagtaacttctgggtcttgccgtggcaatggtaaactaacaaggctcaccggctggcacgtntcacaggcggctgctgccaccggccctgtttcagctgctcctccacgtggtctggtg

SEQ ID NO: 458271 - DNA, 482 bp, Homo Sapiens
  misc_feature (248)..(248): n is a, c, g, or t
  misc_feature (424)..(424): n is a, c, g, or t
  misc_feature (432)..(432): n is a, c, g, or t
  misc_feature (465)..(465): n is a, c, g, or t
gttttaagctgttcaggactggactccggtccctttattgagactgacaggccagtgggtccacccaaacaaaaataaatttctctcccaaagcctgcctgcagtcggtggcacccacaatgtcctggctggggcccatggctgcccctaaccccaacagcacaggtctggctccctgggaatgagaggatgctggctatccagtatctggagatcctaaatgaagagggaggtgagtcctgggtggnccccctacccccagggagagctggcccgcaaatccatgatcttgtgttggggccctcggggttcagttcatcggccaggggtgatgacgtcgtacttcgatggccctggggtgcttgcagcttgtttgaattgtgtttcgggcacttgtcttcgtcttgtaaccaaacaggccctngggttttngggccattgggcaagcattcagccactttcttnttgacaacttaagtttt

SEQ ID NO: 458272 - DNA, 412 bp, Homo Sapiens
  misc_feature (381)..(381): n is a, c, g, or t
agctataaacaacgtgtttatttcattttaggatacattttcagaggcaactaggtagaaaggtgaactttcccatcacttagacctcaagtcagcagctcatgcagcagtgattgctcgggtgactctgagtgacctgttctacctctagagctgacgtttctgttctggttaggctaaatggaggaaataaaaattctccaaacatttcattaagattcactgggaaacagtaccctgagtgcttagagctgcactcctcacacagaagacacagtaagggttagggaaccttctcaggggatgaatacacacgaactttcaccacagcgaccaagaggcttatattggggagtctgatttccggcctcttggggaagntgggaaaatccaaaaccaattttcatttaaa

SEQ ID NO: 458273 - DNA, 326 bp, Homo Sapiens
tttttttatctattatgatatgtttatttaaagttcaaaaactggccgaactaaaatctacttgtattggaacacacctgaatgtgatgaaagtatacagaaaagcaagaaagttatttaaataaaagtcaagatggtggttacctcttaggtgggggctataatgagaaaggaaggacaagatagagaaggttcttactgtcagtgttccctttcttgatttggtggatacaagtgtgtttataattattctttaaacaatacaaatggttttggcccatttctcttaatttatatttaaaataaaagtgttaaaaaggaaggat

SEQ ID NO: 458274 - DNA, 594 bp, Homo Sapiens
  misc_feature (129)..(129): n is a, c, g, or t
  misc_feature (574)..(574): n is a, c, g, or t
ggccggagaagatggtgggttgccattctggtaggaaaatctgagttttcttatttttgacctagaagagattctttttggaccaacctgcgaaattggtagttaggtctatggaaagtggtaggattnttttttttaatcctgtgcaaaggaaaagaggtgctttgtgggaaatcactaatgagaaggctaacctgcagcaccagagaaacctttccaagtgctaggcaggagaactgaagaactctttcagtgaagtgagtcagcctagaagaggcaacccacagtcttgatttttgttgctgtttcctgacctgttcttgcctgttacctggggcctacacaggtcccgagccaacggggctttcatacccaaggatctgtttccttgctggaaaatggaaaccctatctttcactttacattcctttcaatccaactgatcaaaactggtacccacacttgccctttctccctctctccagcacactcccctctaaggaaagtaaaagcaaagcctttcttaatgggcaacactttggggctgttctgtttggttctggccttatttctnttttcaacctgttacatgga

SEQ ID NO: 458275 - DNA, 494 bp, Homo Sapiens
atttattcagcatgcatttattgatctctgatgatacaaagataaaggtaatccctccataccattaagtaacattctgggggtgggggtgagacaaacaaatgaaccaataattaattacaattatacatttcaaggagacttttaatctaggttaatgtgaaacgcagccatcaatggtttgtcaggaaaagggagatgaagtcttgctctggggcaacgtttggcctcattgcagtcagacttggctgggatccccttgtctttcctgtcccggggcactgggctttcacaagccatcactggctttggtggcatctacttgggcattcgttggcttccaaaaagaaagtgggctttctttctcccaggaaatcaccctcccactccatgcttgtgggtgagagcctctccatcaacatgctggtctgtggcaaagttgggtttcaaagctagcacctggggttgggcttcgaaggctataaagtaacaag

SEQ ID NO: 458276 - DNA, 365 bp, Homo Sapiens
  misc_feature (328)..(328): n is a, c, g, or t
ttgagccactgcacccggcctagcagcattgtttaacactacaaaaaccatataaccactgagctccttctcagaaggaagatggcgaaagctcactgctcaacagtgactagattcataacctggggctttggtctgtttgttttaggcttaactcttgcagatttggggaatgtcaggttccaaaacttgagttcattattcctgtcaattcagggcacacccttaccataagcccatgaaagacatcttgttgggttattttattattttttctttatctccatgctcactccccatttttcatcctgcctattacataggtgtntttggaaattaaatattattggccgactccagtttaa

SEQ ID NO: 458277 - DNA, 542 bp, Homo Sapiens
  misc_feature (175)..(228): n is a, c, g, or t
ttttttttgtttgtacaataaaggacataataagagtagtgtccatgactaattaaaaatgcgattctgactggctcaaccccatgagctctatgcttccttatattttcacgtaactgttctctcacaatgctgctttttgtcacatgattctacaatattaatctcataaagnnnnnnnnnnnnnnnnnnnnnnnnnnnnnnnnnnnnnnnnnnnnnnnnnnnnnncagttaaatgtgaaaagtcacttcctctagccaaatctgaagagctcaatagctatatgcagcaagacactaaactgtattgggtagcacagatatagaaatttctattattcgagaatgttctattggatggcactgtacaatggatttagaaactaagactgacccacttactttcttcttttaaaccacccatactaagatcaagactcccagcaacaacaggtaccattacatgtcatgtgccacgcactgaactaagcccttagtgtatattatctcatcaaatctttgtaataagctcatgttatcat

SEQ ID NO: 458278 - DNA, 114 bp, Homo Sapiens
caacacgcctgaggtgatgtttaattaatgatgataatggacggggatttgagaaatcttttcattttcgcttgctaataataattttagtcagagttacaagtagggttcttg

SEQ ID NO: 458279 - DNA, 366 bp, Homo Sapiens
  misc_feature (192)..(316): n is a, c, g, or t
  misc_feature (327)..(327): n is a, c, g, or t
ggcattttcctgtgctttctgtgggggctcccagcctctctcctggagcctggaaatgtctggaagcacctggtctggaacagccttcactggtccacagcaagggtgctgagctccccacacttgacatcctgtaactcttggcaaaaacacccagagcatccaaaaggggccccaaaaaaccatttaaannnnnnnnnnnnnnnnnnnnnnnnnnnnnnnnnnnnnnnnnnnnnnnnnnnnnnnnnnnnnnnnnnnnnnnnnnnnnnnnnnnnnnnnnnnnnnnnnnnnnnnnnnnnnnnnnnnnnnnnnnnnnacaaacatctnttaaaaaatagtaataattcaaaccattaagtagctttt

SEQ ID NO: 458280 - DNA, 421 bp, Homo Sapiens
  misc_feature (16)..(16): n is a, c, g, or t
  misc_feature (21)..(21): n is a, c, g, or t
  misc_feature (55)..(55): n is a, c, g, or t
  misc_feature (63)..(63): n is a, c, g, or t
aaaattatttataacncccangggccaaaaaactgcacctacccaactgggatgntccttcancccaccccatccttatttggcagactgactgaggggatagtgtgaatgacatgtaagatctgctggctaccagtgctctgagaggaggtcaggacagagcctggggtcagaacagtaggaatgtttgctgaagtgctcatgtcagatgttgacgtggacaccacaagggtctggggagaagactgtggcttggggggacgtattggagcttgtagcatgctagcaggctggagaggagccttgggcttgtgaaaggagaggtcaactggttccacttggggcaggctgaaatcactagccaaaagttcttctgggggctcaatcttgatgtcattaaacagtgctgggttctccatgg

SEQ ID NO: 458281 - DNA, 507 bp, Homo Sapiens
  misc_feature (475)..(475): n is a, c, g, or t
cagtttaaaaaagagaatttattgaacatctaacacatacataaaaggcagtaaagacaaatgagaagagggcaggatattgaagtatacagactttaatgctgagttttgtatcttagtaagttactgcaccttacagagactcaatttcccctgatttaggaaggcgatgctaatgggtattgcataggtgtaagtataaaaatgttgtatttaagagaatcccacaagcttggtataaggcagaaaataaatagatgtgacatgtatgagtactttattacatttgtatgctacctgcagactagaggaagaaagaaacgcagccactatacttgcttagcattatattctaatttggaatgtaaagagaaaagagaaaaatagaaagctatgcataaacacatgcattaaaatgaattttatgtggactctttcaggaaaatgttcctaaggtattttatttttttattgnggtaagatacataaaacataaaatgtactctg

SEQ ID NO: 458282 - DNA, 488 bp, Homo Sapiens
  misc_feature (386)..(386): n is a, c, g, or t
  misc_feature (418)..(418): n is a, c, g, or t
  misc_feature (452)..(452): n is a, c, g, or t
  misc_feature (457)..(457): n is a, c, g, or t
cagtttaaaaaagcgattttattgaacatctaacacatacataaaaggcagtaaagacaaatgagaagagggcaggatattgaagtatacagactttaatgctgagttttgtatcttagtaagttactgcaccttacagagactcaatttcccctgatttaggaaggcgatgctaatgggtattgcataggtgtaagtataaaaatgttgtatttaagagaatcccacaagcttggtataaggcagaaaataaatagatgtgacatgaatgagtactttattacatttgtatgctacctgcagactaggagggaaggaaaggaaacggcagcccactattactttggattaggcattattattcctaatttggggaatgttaaggnggaaagggggaaaaatgggaaagcctatggcnttaaacccctggcttttaaattggattttttgtngggcncctttccggggaatgttccccagggttttca

SEQ ID NO: 458283 - DNA, 915 bp, Homo Sapiens
  misc_feature (890)..(890): n is a, c, g, or t
ggtccggtgaaggcaatgacacccccgccaggaatgggccttgctctagccagactagcaggcctggccacggcctcagggtctctgggcctcagattctgctgctaagaaccctcccgggatcttgcatttcttggcctgttggtcccctggctgtgtcgagctgtagggagtgcacgcagcaacacaggtcagggagctgctgtgaaacagagggcagccagctctgggactaggggctttggctgttgctgacccccttgatctctgcagatctgctgagacctccctgctatctggagtgagtggatgtagcaccccagggcatctcatgtaacaacttgcccaacatccagagggtgtccagcacacaggtggctctcacaacagctgtggactgtaatgtgtgtggaccgtaagctgctgactggatggattagacttgaacacgtgtgggtcatacacacagacatgcaccctcacgtgtgtatgttattgacactggggtgtgcccgtttatgcatgtgcaggggtgagagtgtgcactcatgtccaggtgaactgggtacgcacactcagtcctgctggcagggaagaagccacagacagaatcggcagggagtgtgactatccacacggggtcgagttcacagcagccggctccggggaatgtctgtatgggcacacctgtggggtagtgtgcaccccctgggtcatgtaaacagcaggtgggggagtgtgtgccggggatctgggcagccctcactgccagctggcacagttctcgggcaggctgtgcagaaatgggcctccagggttctgtttgtcgggcgcggatcttcgggcgagggtcaattttcgaagccctgggatcttgcaagctcctgctntttgggggatttcctgtttccagaa

SEQ ID NO: 458284 - DNA, 409 bp, Homo Sapiens
  misc_feature (371)..(371): n is a, c, g, or t
gttttcacccttctagatactctagtattttgtaaatttccttgtcatgggctgacttttacagggaacattttaaaatctaaatttattatcctgcttagcatctcaaacaactaacctttcaaaaaaatttatatctaatacctttcatttagagatgaggagggagacagtgcaattcatggtccacagagactcctctgctctggaatgggggtgaagatgggacaatagagggtcaggcctttataataaattaggcaaaaggttcagtgtccagctatagtggacaacatgaaactccataaaaatgactggatagggggactgcttgagacttttcttttgggcattactaacaggaattcaanggaattccaaccacggttagttttccaaattctactga

SEQ ID NO: 458285 - DNA, 320 bp, Homo Sapiens
  misc_feature (225)..(225): n is a, c, g, or t
  misc_feature (269)..(269): n is a, c, g, or t
cagctgtaacaactttatttcagaatgactgcaggaaggaatttcataggtaaacaactaatttatagctctatatcacaataacactgaatcagaaacacttcatcccacataaaaatttggcctgatcattttttgagttttaatcctcttaagtttcacattatagaactgaatacacaaaaacactaacacagctgggggagacaatggtttattgatcangagaaattatttctagcaatatctcacttgccgcgagttcacanatatgacaactgcagatgaggataaagaagtaagttaggggaagagagttg

SEQ ID NO: 458286 - DNA, 270 bp, Homo Sapiens
aacaaatggaagtaaatttgtttcacgtaaatcttaattttcaacctttctggataccttaattgtaactgtcagtttgcactggtcggtatatggaaacacattgctctaccctgctacttagttgattttaaagtgaatttacagtgatgagaaatttgtgaaaaatatattgtatttcttttgatgtttcaaaaggttgcctatgaaaaactgatttgttaaaacatgctacgtgtccaaaaataaagaccagaatgacattttgat

SEQ ID NO: 458287 - DNA, 352 bp, Homo Sapiens
  misc_feature (231)..(231): n is a, c, g, or t
tactaggagattcctaaagtcaagctgtctagtctttccttagtcacaccagagggaacagggatctgaatattcagccttccctaccccacactttggaaaatgatccacctccacagtcaggctttcatctctcatcctcttctaggcagtactttggatacaaaaaaagggtacagaaatgaaaggaatggtagagaagatgaggcttcgcatgatgggatcagtggnccgcccatttcaaggcaatggtccacacaggttcctaccacatgtttaattgcttactgtgggtgacatgcgcctgaggttttttggggttcaccgtcgaactttcaggtttttgggtaca

SEQ ID NO: 458288 - DNA, 274 bp, Homo Sapiens
gaggtacaagtcatgacacagcagccagagccggcttggaaattctgagattgactcctgcgggccagggccagtaactaccaacctggtgtcagacgagcaatcaatcgcaaaggaaaccttggggaagtatcccagcagagtccccataaacgagcagtttaagattggataagagattcctgtgatcagagaagctggggaacaaaggaaaccagttgttctccttattcttaggcaatatgcctgcaacctgctttcaaatggttcagcc

SEQ ID NO: 458289 - DNA, 251 bp, Homo Sapiens
taccgtataaaaggcgaaacagtatacctgtagagagcacttaccatgaatggagcttgcaggagtagaagttgctctggatgagtcagtgagtgagtggggagtgaatgtgaaggtctaagacattactgtacaccactgtagactgccatagccttcacaaatactgaactaaggatatactcagtttataaaaatattattctttcttcaaaaataaattaacctggctgggggtagtggctcacata

SEQ ID NO: 458290 - DNA, 488 bp, Homo Sapiens
ttttttttaaaggaaatgcccctgagtcataatttgaacttttaaaaatagatatttaaattggcttttgattctaggtttcaaaataaatcattaataagaagctcattattctctattttcactccaaatccgttcttggaccttctttgctctgtgctctcaggagctgacctcatgactatatcacccagctcctcttaccctctggctttcagtaggctttggctaatggccaatgaaactgcagggcaagaggagtgaggggctacagcatttatttccctctttcactccctgttagctttggtagtggctgtatttctctactgatagttccttgcccacagtcgtaactattgctgggttctgataatcattccttctcctgtcccccagggctatggtggtaacaacttcctgctattgctagctcagaagtgcttcaccattccttggtattagtcctgcccacccctctgtaagta

SEQ ID NO: 458291 - DNA, 429 bp, Homo Sapiens
  misc_feature (387)..(387): n is a, c, g, or t
ccagtttttttgatatttttcctttattctggtaactagtttcaacaagaataatgttaacaccattgccccgagtatttagatagtgttttatttaactctagtactcataagaaaaagaataaaccgaagatatatcttagcggtgtgccttacgtagccttggtggtataaatgattctgcagattgcactgctaagatcctagttaccttttatcacagcaccccagttttcacataaaggaatggttttcaagtgccctttgaatgccttaacttttggctgtttatttgccatctaaatatgggatttacaaaaagagtgatgattgcctagttatgagtctgaaattatccttaataatgtaacattcagcgtcagtaangagttaagcaagtttgttataaacgttggattctttgttctg

SEQ ID NO: 458292 - DNA, 459 bp, Homo Sapiens
ttttttttacaaaataacacaatttattactattttgaaacaaatcacaaaataacattcagaaactcaacatttctaaataacttaattcacaataagtttagtcataaagtcatgctacaaaactcctgtgtataaaagattattaccaaggtattcatagatgttaaaatgttcttcagaatggagttggttctagaagccaaagattctggaatgatgctcgtaatcatgactgccagcctgggagaggagctggctatgcgcatgtgctcttagcttccaactcaccagtcttttgatgggagtgatccctccagggcagtagcacctcagaggcaggtaccctactgatcacagaggcaaagagcctcccacccatataatgttaggcaactctacattcatttaaaatctagaggtgggaatgataattcgcaaagcttctattctgagtag

SEQ ID NO: 458293 - DNA, 471 bp, Homo Sapiens
  misc_feature (421)..(421): n is a, c, g, or t
  misc_feature (433)..(433): n is a, c, g, or t
  misc_feature (440)..(440): n is a, c, g, or t
  misc_feature (445)..(445): n is a, c, g, or t
acaaaataacacaatttattactattttgaaacaaatcacaaaataacattcagaaactcaacatttctaaataacttaattcacaataagtttagtcataaagtcatgctacaaaactcctgtgtataaaagattattaccaaggtattcatagatgttaaaatgttcttcagaatgggagttggttctaggaagccaaaggattctgggaatgatgcttgtaatcatggactgccagcctggggagagggagctgggctatgcggcatgtgctcttaggcttccaactcaccagtcttttgatggggagtgatccctccggggcaggtaggcacctcagggggcagggtaccctactgattcacagagggcaaaggggcctccccacccatattaatgtttaggacaacttttacattnctttttaaattntggggtnggggntggttatttcgcaaggttcttttccg

SEQ ID NO: 458294 - DNA, 431 bp, Homo Sapiens
gttaccaaatgatttattatgatttgtgctaaattacaatgcatatgaaatggagtcatttatggaaacacataaaaatagttacctattctgtaattatattcacacaagaatctgaaatatagtttctgttcttccttttaaaatatatccacagaatgacttttgtagttttcaccatacaattttacaatactgatactgcacctgtatcatttaccatactataagaactaaacagaatatgaaagcagttaatagcaaattaattttttatatccatcaatgaatccaaaggaaaagagtagtttgtttccattgggcaggtgaggattaggatgggtaggtaattcgcaggtgtagggatattgccataccatagggtatggtatggtatatattttatatggttgctccgggggctggttccc

SEQ ID NO: 458295 - DNA, 334 bp, Homo Sapiens
  misc_feature (159)..(214): n is a, c, g, or t
  misc_feature (312)..(312): n is a, c, g, or t
aggaactgactgaattaaagcattttttagggcctttaattgtttcagaagagaatggaaattgactaactttaaactcttaagtattcacattcaaagcttgagagtaaactaagaaaataaaagttgaatgtctatctttcgaatgcatagtttagnnnnnnnnnnnnnnnnnnnnnnnnnnnnnnnnnnnnnnnnnnnnnnnnnnnnnnnnctgcaaaacacatttattatctcacagtttctgtgtgtcagagattcagaagcagctggggctagggtgggtcctagcttcagggatctcttgttganggttgcccatcccagtttggtt

SEQ ID NO: 458296 - DNA, 337 bp, Homo Sapiens
  misc_feature (285)..(285): n is a, c, g, or t
agcatttaagtttcgtgaatttttattttttggtcaggtgcagtcttcattgctactaaacaccagaagagaatttctgactctcaccttgtatttagttaaaacatgcatgacatttgtcatgtgcacctggtgacatgactgcctgcctgccaaagctcaggtacccaactgtgatcacacatttgggtgccttggtatgggctggggaagggttcctaatactggcagtcaactgattctccagataccaactgtgtgttcaacaattctattcaattctgntacttactaaacacctggacttattgcagacaacacaggttaaagtctcaat

SEQ ID NO: 458297 - DNA, 300 bp, Homo Sapiens
  misc_feature (156)..(156): n is a, c, g, or t
tctgaatgatggcagtaacaatttatccaaagcagagaatttgatgacttagttaacacaggcttctgcttggggacttccatggagcaggtcccattttcatctcttgaacaaattttgtactttggaaaaaagaatacccaaaaaaaccccagnaaataaacccaataatgatagcagagtaatatatggtaataacattttccataattttgataaaataggggctaatgatattgacagatttcccatagagatgaaaaaattataaacctgtagttatatgtattttataaatag

SEQ ID NO: 458298 - DNA, 502 bp, Homo Sapiens
gtcaaaatgcatatttatagcaaactcgttattcttcctttagtgacagcttaggaattaatcataaaaaaggacacattgccccactgctttctcaagaaattttttcttagctcataacatgagggttaatataattaatttatgtctttgaatatatcacccccagaattcaaactctgcaatcattatttaaatattaaattctgatagtatacaacacactaattatgctatatcaataattacaaataatttggggaaaattataaaacatattacatgtattttactggttagttaaaaggaaggctctaaggactttctattttgggtggatatattatttccctattataattatttaaaaaaatctggcataacatttggttatcctcttatcccatcaccagacatgtcaacattttactttttctctctactctagtaatgaaaaatatccttttcactgcagaggccctgtttccatactccatcctaa

SEQ ID NO: 458299 - DNA, 319 bp, Homo Sapiens
  misc_feature (16)..(16): n is a, c, g, or t
  misc_feature (41)..(41): n is a, c, g, or t
  misc_feature (60)..(60): n is a, c, g, or t
  misc_feature (125)..(125): n is a, c, g, or t
  misc_feature (158)..(158): n is a, c, g, or t
  misc_feature (163)..(163): n is a, c, g, or t
  misc_feature (169)..(169): n is a, c, g, or t
tccccttccctccccngttgccaaaacttcctcattggganttggagtaggagcaggtanaaaaattaattaaatattccaggataacaatacattgtgcaggtgtgaggaaaagggtgcagaanaatggccaggggcctactgttttagataccagntgccnggaggncctcccagtgaggtgacctttgaggagaggcatgcaggagatgaggggacagtgaagaggatttctaagaacattccaggcaaagagaatggcgacagctaaggccctgaagctggcggcagcctggtgtgtgtgaggaaactcaagatc

SEQ ID NO: 458300 - DNA, 425 bp, Homo Sapiens
  misc_feature (244)..(244): n is a, c, g, or t
  misc_feature (366)..(366): n is a, c, g, or t
gccttttaaacattttattttgaaatattaataattttaggcttacagaaaagttacaaaagtgatacaggaaactcctgtatactctttatccagattcccccaatgtcaacaacccacatgccatgcattgcacagttatcaaaaccagggaatcatcactggtacaagactctcaagtaaactcaagaccccatttgaatgtcaccaattctcttcccaatgttatttttctgttccgggntccaatccggggatcccacatgggcattcattcctcatatctccttaggtctcctccaacctgtggacaccctcccaggtccctccttgtctttcatggaccatggacacccgggggtgganttaccgggtcagtcattttggcaaaattacattcccaccctgtggttgttggaacggcc

SEQ ID NO: 458301 - DNA, 472 bp, Homo Sapiens
  misc_feature (40)..(40): n is a, c, g, or t
  misc_feature (102)..(102): n is a, c, g, or t
cccaaaaaagtgtgaaccctgcctgggtccttttccggtntaatgcgctttccacccttaatgggaaccgttttcccagaatgtctgtgcgaaaagacaaanttgcccttcagtttctgaatgaacgatggagacactaattcttcctcaaattcattggagctaaaagatcccgagtggtttctttgccttgtttttcccatcatggtagtgttcgtggccatgacatgtctcaaagagtcattaaggtaacggttcaacaagctgctcttgtatttggggggtgccacgtagtcctcactggcccgtgactctggcctcactcccgctttgatgaccgaattctcacttttaatcacaggatggtgaactggggtattatagcccccttcgttcatgtgggttcttggaggattttctccatcttcagaacatgagtcatcatctcgtacgctaagccgttcagcattgc

SEQ ID NO: 458302 - DNA, 441 bp, Homo Sapiens
cattggtgcatatatcaataattaatttccttttattgctgagtagtatttactatatggatgtaccacattttgtttatcctttcaactgttgctggacatttgggttgtttccagttttgagctatataaacaaagacacaaagatttgtatgtaaagcatcgtatggacagccaccttatttctcttggagcagaaagggaccttaaagatgacagaccaaacatcaacttcacagatgatgacacagaaggtgaatctactgaaaagagctaaagaaagacaaatctcttgaggcagatgaagggaatgcaaatattcaaagaccctgcagaaaatcagtcaacaagatgctgtttgtcttggtcttagtgtttgctatctgttggggccccgttccacattggaccgacttttctttcagctttgtgggagggagt

SEQ ID NO: 458303 - DNA, 367 bp, Homo Sapiens
  misc_feature (31)..(31): n is a, c, g, or t
  misc_feature (48)..(48): n is a, c, g, or t
  misc_feature (61)..(61): n is a, c, g, or t
aagggcccgcccctgaagccatccctacggncccgagtcagggctgtnaaccccctacctncccaatggcccactgtgagcccacagaaggaagacatgtacgtgctgttcctactttatatgatgtgagaagcccaacatcagtgtcccttggcagcagtctacaggcataacttgttttattgtgctgaattttattgtgcttctcaaatattgcacttttaaaaaaattgaaagtttgtggcaatgctgttgagcaaatctgctggcatctttcttcccaaaggcatgtgctcacttcatgtctctgtatcaattgtcataattttcgcaataaacttgattattattatatgtgcttatggtg

SEQ ID NO: 458304 - DNA, 544 bp, Homo Sapiens
  misc_feature (398)..(398): n is a, c, g, or t
tggaatgccatgctcctgatgtctctccatgtgtgggcgccctgtgcttgatggaaggggagctgtgggcacagccttgacagtctaggagggggtgcctcagggagaaggtggggcaggggtgctcccaagcagcactggtgcaggaaacagaggctggaaaaccaactgcatctggcgttgcttcaatggacccaccctgggcaccactggtggtaggggctgtttttgctttcttacaaagacccaaatgaagagagtaggaggtagagaaacctaacttttgatgccataaaggagtgggaaccaggctgcctagtgatcccaagctcccacatgcgcttgcaggccgctgtggggtgctgtcagccagtgtagccagcttcaaccccgccacnacgcacgctttctctgcatggctgtggggctgcattgcaagccacaccgcaatttcgactcccacacgtcgagttggcatccacgtctctaagtgggcctgcctttcatatttacattaaagcccgcaatgtattcactatgattt

SEQ ID NO: 458305 - DNA, 378 bp, Homo Sapiens
aggattatgtaatacttttattttaaaataaatatgctaaaaacttattttgtacagctttgaattaatgagaaaaactttaggtgacaacttaaaaatgtgtaggggaaacatgatttttcaaaaattatcttagggattcatgagcaaaaactacttgaggacagatggcccagtgtcctctgtcttgggcatgacttgggcaaggtcccctcacataaaggccactttataatgagactttctctctttgggccaccaaattgctccttaaaatatttggaaggctgtggggtcttagggtaggaaacttgcctggatggcaggccatgtttaggacctaggggctgaagttagggcaccgggctgcttttcgga

SEQ ID NO: 458306 - DNA, 127 bp, Homo Sapiens
agcagattgcagttactgctttattgcaaaagctcctgaaataaaacccaaatactatcagagattaacatgggttatgagcaactacagtccattcaagtacacgttctaataaagaactaaaatt

SEQ ID NO: 458307 - DNA, 496 bp, Homo Sapiens
  misc_feature (18)..(18): n is a, c, g, or t
  misc_feature (26)..(26): n is a, c, g, or t
  misc_feature (41)..(41): n is a, c, g, or t
  misc_feature (55)..(55): n is a, c, g, or t
  misc_feature (115)..(115): n is a, c, g, or t
  misc_feature (125)..(125): n is a, c, g, or t
acctttctgggaaaatgnaacccccntttgaaccgctgcgnaaattcccgtgggnaacaattggcgcaataggcctctgctacctgcagagccccaagacctctcccccacgctnacctcaaagnccgtgcccgatgtggtgtcttgtggctcaagggctgtgccaaggaagctgcggaccaaggccagggaccacacgcctgaggtgctggttcggagctgcttagtaccctgtgagaagacaaagaccatccgggagggcgtgctggccatcattaactatgtgtccaaagtgggcaggcgggcccgggtgccccaggtgcccattcagttccaccagcagagactgggccatggactcatcatctcctgtcctggggcccggccagagcattcagtggcctgggacaaagaccgccagcacctctaccgcacacagtacctgaagggtgtcaacaggtccatgagggtgttcattgaccacggcaaccagctc

SEQ ID NO: 458308 - DNA, 499 bp, Homo Sapiens
  misc_feature (21)..(21): n is a, c, g, or t
  misc_feature (55)..(55): n is a, c, g, or t
  misc_feature (60)..(60): n is a, c, g, or t
ccttcaactggcttgtgtttnaaatgccctttcccaatccaacaacctcgaaaancctgnaccctcaaacctccctgttcaaaacaatgtgcgcaaccaccggtccccgccctgtccctttctgcgtttgaaggtttaatcatgaaaatctcatcaaatcccatcttgtctggatatttagggacaactgagacatactgggagggttccattggaggacggtcaatcattgcttcaatctgcacatggatgaggttctcgatgtcttcctgcagtgtctgatggggcttcagggggatgggcaggtagccatagtgctctctgttgcagaggtacatctggatgcctgcttgcctgctggagaaggcaaagacaatgatgtcatcaaaggtccaggtgtagtcctggtgtggggggtagaaagtcagcttgtccgaggcctccttcctgaggtcaattaggaaggtggagtggaccatggggacggggaagcagcctg

SEQ ID NO: 458309 - DNA, 594 bp, Homo Sapiens
  misc_feature (409)..(409): n is a, c, g, or t
  misc_feature (443)..(443): n is a, c, g, or t
  misc_feature (467)..(467): n is a, c, g, or t
  misc_feature (492)..(492): n is a, c, g, or t
  misc_feature (503)..(503): n is a, c, g, or t
  misc_feature (510)..(510): n is a, c, g, or t
  misc_feature (550)..(550): n is a, c, g, or t
  misc_feature (575)..(575): n is a, c, g, or t
aacagacttaagaccgaggtttattttttctttcacgggacagtgtaatgcaagccaggaaactccttagtagcttttctctaacagcagctcacagatccaggcagcttccatcttgcaacttcgccatctcggtgtttcccttccagtcacagtgatgataaagagagtaaagagaactcacaaactgttcccaactgccttagaccaaagcgacacctgtcacttctgttcacagcccatcaaccagtccccgggcccgatgtgagtacaggggaggtggggaaatgcaggagaaaccgggagggagttgatgaacacgaccacctctggccacagaggggttaatgccttcttcctaggggtgcacgggtttgtttcaccgttgggcagttcattcaggaaagtnttttgggaaggagatgggcagttgagggattttnaggagggagggacggggttgtttntttgttacatggattgggcagaaantcattccattnggcagcntttttcccaaaagggtttgggtttccaaccagtttttgtngttcctttccagagaggttgacttngcccggggtccattagggg

SEQ ID NO: 458310 - DNA, 279 bp, Homo Sapiens
  misc_feature (263)..(263): n is a, c, g, or t
aagtttggcaatttctattcattattttctttaaaaatggtaataatatagcttctacttaagtcatttaaaaacaatagttttctctgcaatgtagactacataagaaagacttttcattctggtagagtgttttatctgagccttagtttatattgcctgatgaatgccagaattcttacttggttttcttttcttttcagtcagtactgctccccagcctaaaccagtaagtataaggtgtttttatatttaattttganctatggactatgggca

SEQ ID NO: 458311 - DNA, 467 bp, Homo Sapiens
  misc_feature (19)..(19): n is a, c, g, or t
aattcaaggaaatccatgnaaacccttccccccaaaaaaggtggcaattttaaactgggcccctaagtggttgaaaccagcccagcccatgggaaagggttttggggaaacaggataatgcaaaggcccctgtggtggaaacaacccagctgtggttgaggaacaacagcaaggcagccagtgtggctggagtggagtgagcagggtgggcccaggggtgagggagaacaggccagagagagggattagcaccaggtcttgtagggctttttatggcatagaaggagctctgaagcaatgaagtgccttgccgtgtgccacatgccagccgagacagtctgcctaactcgggagccaaagctcgctgcttggcttgaggcccctataagaggacaatgtaacccaggctggtatgggcacattctgcatttccacttaaactcagatggcaagcccatcaaaccttg

SEQ ID NO: 458312 - DNA, 281 bp, Homo Sapiens
tttttttttggtcaggagaaatttgtgcatttttaatccaaaatagaaaccttcataaaagcatcataggtctccattcaatattgactataattgttcacatgcccacgctgaatgctaacttgggctcaccctcaacacccacgaggtgggtactattattatcactcacatttgaccagagggattgtttgattagggtgaagtagttgagagttcagacccaggggacagcctgcctgcttcggatcctggggccaaccccttgccctgtgtgacct

SEQ ID NO: 458313 - DNA, 364 bp, Homo Sapiens
ccgtttgggtgggtgcctgtaaactcctaccctgcctacgggttgtaacagttaaggtcggcttttttcccatttgcaaaagaatttttgtcattttccctccctcccttgatggtggaggttgctgcacagtaaacgtagatggaacttcatcaggagagtcatctttaggtgcgtatgagggatcatctgagtcagactcagcatcagagccatcttgaataagatacgcagctgtgtgcaacaaagaacctggcagattatttattgttccaccttcttcatctcctgattcctcatcagaaacaggtgctgtagcattttcaggtggttgtatcactatagcacttgcttctatgctgtc

SEQ ID NO: 458314 - DNA, 102 bp, Homo Sapiens
ctcttcaaatttttgttccttgaatttttctaggtaacatatatgaatttcatgcaaaaattcaaaaaattgtaacctcagacataaatgggttaaagatgt

SEQ ID NO: 458315 - DNA, 350 bp, Homo Sapiens
aggctagtaacacaatttagaccagaataggttttcatatatcaaaaaaaggaaaggaacacggagagcacagatgagacatatggaggctctatactatagacccatccttgctctgtgctggaatcatcacaggaatcgcacccattcgacttagattaggggcagctaccttagcaggtgggagagtcggactctgaggagtgcgttcaaagtcttcacttggtacttggttatactgagtcttggaatatccttccatgttggaaggagacatggaccccagggatgaatgattactgccgatgtagcttctggcagtggacgtacggctctttggaggtgcacat

SEQ ID NO: 458316 - DNA, 297 bp, Homo Sapiens
  misc_feature (165)..(165): n is a, c, g, or t
gtaggtttggtaggcctcactgctctccagaggctagtgttcctatcccaggatggctgttgggattaggagtggaatgaggaatagtttaaggaccacaagagatttggcctccttggaacatgtaggaaggcccttcaaggatgtaattctagcccagggaanaaaatccttttcagcagacgcttcccttcccttcccctagggaatgtgtccctactatagtaaactcttccttaagagagttttatgttttctctgtcagatcaatttgtttttcttaatgttgttcctatc

SEQ ID NO: 458317 - DNA, 350 bp, Homo Sapiens
  misc_feature (47)..(63): n is a, c, g, or t
gtatgaaactatttcctttaaagtcctttgccctccccagttgatcnnnnnnnnnnnnnnnnngagagaagctctcactctgtcacggctcactacagccttaacctctagggctcaggcaattttcccacctgagcccccgcaagtatgtgggaccgcggatggtgcaaccacacccagctaattctttaatttgtctatagaaatggggtctcgctttgttgcctagcctgtttataattgttttaaatatttcttttacattgagaaccacatcagacaatgttacctttttgcctcaaccatcaaacataatttagaaaactcgagaaaaggaatgtctccttgca

SEQ ID NO: 458318 - DNA, 632 bp, Homo Sapiens
  misc_feature (587)..(587): n is a, c, g, or t
  misc_feature (605)..(605): n is a, c, g, or t
  misc_feature (622)..(622): n is a, c, g, or t
aactttttcaattttctaatttaatagaaataaccaaaacaatgtggctttcaaacaagggtttaaaactaatctaatacaacttctacaacacattccagagcattataacaagaattatttacaggcagctaatgtattaaataaccatgaaaagaaaaaacttgcttttattacacaccagcaaaaacacaggaacgaaacaattagaaactgcaaccttgttttaaaaaattaaatatgattatttagagaatacgataccacagaaacagcactttttaagaatcatattgaagggcagttaactatgtgcaaaaataatagtactagtagtaataataataatgaggggaggagaccaattgaaatactggaagcaaggaactagtaaggctgtgaatttaaccctttcgtgtgtaggtatgtctacataaaaaattaacaggctttcaaattgcacaaatctttttttatagggcttatggtatatgtttcactgtgttttaaaatggtagtagatgcctacatttttcaggaccaggagcaggcctgcattccctcccttaagattggaatttaggccnccctggaagggatatgcngtggcccttccaaatcntttggggcct

SEQ ID NO: 458319 - DNA, 546 bp, Homo Sapiens
  misc_feature (29)..(29): n is a, c, g, or t
  misc_feature (72)..(72): n is a, c, g, or t
  misc_feature (111)..(111): n is a, c, g, or t
  misc_feature (116)..(116): n is a, c, g, or t
  misc_feature (140)..(140): n is a, c, g, or t
acaacttcgggacctatgcagaacattgnaggtgccaatgagtctggcatttaactctgctgtatcctatcnacactttagcaatttaaaagtacgtctcaaggaatcttnccttncccaatttgagaactcaactcacnttaaaatggaaacacgcaacaaaaaacagatgcctgctttctagaactccattgtcatgaaatataatatttgcctaaaataagagatttactttagaaaattagagtgccttatttcttgcaaagtacaccatggaaaaccctcgggggaaaattgttgcccaaatgtatccattaactgtatttaaaatttctgattgcctttttgaccatgttattgctaaatagcaaaacaaacgaaaacaaaaacaacaaaaatcctatatcccagctagatttcttcctttagcatatggtagtgtcttcgatattttgtacaatgtgtagtattttaaatagtaaagaagtgaccatgcatcaagctgaaggtagtgactaatgctcaagagctagctctttaaaacta

SEQ ID NO: 458320 - DNA, 464 bp, Homo Sapiens
  misc_feature (43)..(43): n is a, c, g, or t
  misc_feature (305)..(331): n is a, c, g, or t
tccacactttagattttaaaagtacgtcctccaaggaatcctntctttcccaatttgagaactcaactcactttaaaatggaaacacgcaacaaaaaacagatgcctgcctttcctagaactcccattgtccatgaaatataatatttgcctaaaataagagatttactttaaaaattagagtgcttatttcttgcaaagtacaccatggaaaaccctcgggggaaaattgttgccaaatgtatccattaactgtatttaaaatttctgattgcctttttgaccatgttattgctaaatagcaannnnnnnnnnnnnnnnnnnnnnnnnnntcctatatcccagctagatttcttcctttagcatatggtagtgtcttcgatattttgtacaatgtgtagtattttaaatagtaaagaagtgaccatgcatcaagctgaaggtagtgactaatgctcaagagct

SEQ ID NO: 458321 - DNA, 252 bp, Homo Sapiens
ggcagatttagttcttctcttccaaaagataaaggtatatcctggaattgtacttaaaacttacagatgactaacaaatatatactttatatgtagttaatatttagatctgtcttctttaatacttggaggctagaagaagcatctttaggggaactatataatcttttgttagcattttctctgcattttaaaaaatcatttcaattcaaacatttatcagtgtcatgaaatcagtaatgactctttaac

SEQ ID NO: 458322 - DNA, 332 bp, Homo Sapiens
  misc_feature (237)..(237): n is a, c, g, or t
  misc_feature (321)..(321): n is a, c, g, or t
cagcactcactgctttattatcacagtaggtgacaaaggccgcaggagagggggaaaggtccagagctgtggagaaagaaggggctccctgtctccagggtttgtttaaggttttctccatggcctagggcccagccacttgcctcactggcctcaaagccctggagttgagccctctaggcagtcaagggcaggcaggagatgggccagagaggggaggatgtgttctttaggtanagaatccctgaccacggggtccagtgcctgtgggccaaccaccaggaagctgtgcatgcccacagcccgaggcccctggtaatngcagaggtaat

SEQ ID NO: 458323 - DNA, 419 bp, Homo Sapiens
gatttgcccccaacagtccaagaaaaattatttgatgaggtgcttgatagagacgttcaaaaagaattagaagaagaatctccaattattaacctggtccttggaattggctacacgtttggacagtcgactgtatgcactttggaaccggactgcaggagactgcctacttgattcagttctacaagctacctggggcatctatgacaaggactcagtgcttcggaaagccctgcatgacagcctgcatgactgttcacattggttttacacacgctggaaagattgggaatcatggtattctcagagctttggtttacatttttccttgagagaagaacaatggcaagaagactgggcatttatactctctcttgctagtcagcctggggagcaagctttgggagcagacgcacatt

SEQ ID NO: 458324 - DNA, 351 bp, Homo Sapiens
  misc_feature (61)..(61): n is a, c, g, or t
  misc_feature (89)..(89): n is a, c, g, or t
  misc_feature (127)..(127): n is a, c, g, or t
aaaaattcaagtagctttgcaaatactagttgatactcagtgaaatcacgtcactattttnatgcctgaatccatacctttgtgatttntgtttaattacagaagcctattgccttgcagcaatttngttgttataatactgattaattggttactccttcttattataactcagtaatacctgtggtcatttggttcctctatcctgacaaagttcactggaaattgccctcagattttataaactgggggatttcttaattagataaaagttcattactgaagatggaatattatataagatggaggaagggtaattaatagacatgagatatagaaatactttgttag

SEQ ID NO: 458325 - DNA, 599 bp, Homo Sapiens
  misc_feature (360)..(360): n is a, c, g, or t
  misc_feature (386)..(386): n is a, c, g, or t
  misc_feature (407)..(407): n is a, c, g, or t
  misc_feature (515)..(515): n is a, c, g, or t
  misc_feature (544)..(544): n is a, c, g, or t
  misc_feature (566)..(566): n is a, c, g, or t
  misc_feature (587)..(587): n is a, c, g, or t
ggacttagcaaaaccagtcataatgatttttctatatcaaaaccagccctaacaatttttatacaacttttaaataaaaacagtggaaaatacaataaataagtcctctaaataaagctgtggtatgaagtttaaatgccccaagtcagaagtcaattggatgtctctgtctgagctgagagcacatgacatacaacgaaaccacatggacagacacaaccccgaatgccaattccagtgtcctgtgcagtgatgaccacactgttagaagcattttaactcttgtttttacaaactttcttttttacatatatgttaggcggtcaaaggaactctgttttttcttgggtccaaaccagngggaaatttattggtcccaaaccagnacccaccccaatggcatttgncctctggatgtgaggaaaggaaacacttaggggctttcaaccagatgaggggcgttttgggaaacccacagctgaagtcactttcaatgtgggaacatggggcacctnccctaaggtcagggacaggagagggtgtncgtttttattgctttcaggctngggattgatgggtcctggggnaattttatgttg

SEQ ID NO: 458326 - DNA, 414 bp, Homo Sapiens
  misc_feature (380)..(380): n is a, c, g, or t
  misc_feature (388)..(388): n is a, c, g, or t
caccttattttttagctttattgagacctaagtcagcatccgaccatttaggttgtccaagccagtgtttttagtgtgttcacagagttgtgcagccatagtcagtttagaacattttcaccaccccaaaaacaagtctctgcctgttaagtagtctctccccattcccccaacccccagcccctgggaacctctaacctgctttctgtcgctctgcatttccctgttctgggaaatttcacgtgaaaggaatcatacggtgcatggtctgggtgcctgggcttctggtcactcaggcatgatgggtgctttgggtgggcgtgtccgtgggggtcatccatgggtgtgggcttcgtccgtgttcatgggcctgtttccgnggccttgnttcccgctgcgggttttcaagggcct

SEQ ID NO: 458327 - DNA, 361 bp, Homo Sapiens
aatgtttatctatttttcaattaatttaatacagtttctaatgtgaaagacatttttctggaacccgttttccccttaaacactaaagagacctcaagtgaaagcatattgcttagtaggaaggtagaaaatgttaatccctgcgattctttgagttttaatgacagggtcattttcagtaaaggaaatgctcaccaacacatagtcaccaactattaaaggaatcatgtgattggattttcccctgtatacatgtacccttggtcataatcccactatttcatacatatttatgcattgctagattttcctaggactccaatagcatgctttccaagtgttattattcccttaatgttaa

SEQ ID NO: 458328 - DNA, 291 bp, Homo Sapiens
cattagaaagagtttattcgaacctgaaaataaaccactgatttattcttattttatttctcctcctgtaatattcacagtgataatttcttgtggaggggaaaaatagtttccagaaagcagagtctaagacaacagctagcacacctgccgtttattttggaaagtgatcatagggaataggagtagggagcttaaaagagtgaaatggggaagaggaaaatagaagggtatgcagctatgggcttctgcggcccacagagtcttccatggaccatgtagaatatctga

SEQ ID NO: 458329 - DNA, 479 bp, Homo Sapiens
  misc_feature (23)..(23): n is a, c, g, or t
  misc_feature (34)..(34): n is a, c, g, or t
tggttgggtggggaatggacttnaaatacctcantgtccactgttccctgtctccaaccaagaagcctccgctttcctccctgtccagaacatccaagttgtccatccagttaccgtaagacaagtaagcttgtagtccccagatcttatcaaaaccccaccagcatagtcaaagcgagatgtaagcagcaggcgtgtgacattggaaccagcattgggagagaaggtgaaatgattgttgacgttacctgggccaatggaataacggaaagatctggggctggaatcaaggtcggtacatgtcagcttgaaattctgaatatttgtgccaactttcagatccactgggagggccaggaaataagagtttggagtacaaattggcttttcatcattttcttcaaggatgttcacagtaacctggattatcaccgtatatttattgccggctgctaggttacttggattttcgtagtcta

SEQ ID NO: 458330 - DNA, 414 bp, Homo Sapiens
  misc_feature (373)..(373): n is a, c, g, or t
  misc_feature (380)..(380): n is a, c, g, or t
  misc_feature (385)..(385): n is a, c, g, or t
gagacatgtactgctaaagcaaggactttgatccttttttccctttgcatttttaccatggttggaattgtaacacagacacaaccttatgtcctgcttccaaaacataaataatggttgtaaagcgtcccacacgttgacccaaagtctcctttgaaacaggaaattgagacacgccggttgtgaaacctactgaagtgagcggcggcgccagggattcctgggaccccgacctctttgcagctcgcacagctaagggcgagggcgcctttcggcagaagcagcaaaccgccggcaagcccagcgaggagggcttcccgggtctgggctttgggaattggcttggcacccagcggaaagggacgttgagctnagcggcnggggnagaagagttccgcaggttcagaggggcgg

SEQ ID NO: 458331 - DNA, 417 bp, Homo Sapiens
  misc_feature (336)..(336): n is a, c, g, or t
atgaatttatcttcgtttattaattacaccaagtaaaaatgtgagacgcctctgtttcttataacctaactttcttttaaagagaaaatgtccttcttcagtcgtaaatccaaatttacaatagaaactgtgtcctccaactgccaatatgacatccagggcaaactttttataaaagacacacaaactcctgggtttgtcatcagtcagtaggtatgtatttgaggtgtcccacatagtattttgtaaaaacttgagtcaaccttttaaaatcagggcatgttcgctggaaaatccaggatttccagttttcttggaaaaacgggttaaagccangccagggtcctggactttatacttggacaacaggcaggctgcagctggattcctttgggataggggcatgtgtgtttccag

SEQ ID NO: 458332 - DNA, 172 bp, Homo Sapiens
caaatacatgagaaaacaatccaagaatcactgcaggaagaaatgatcatttaagctcaatcatgttcttttgccttttaatttcatttaagagattaatattagagtcataaaagctttacagtttcaacacacatacacacaatcacagaattaaaaatctttactcctt

SEQ ID NO: 458333 - DNA, 509 bp, Homo Sapiens
  misc_feature (39)..(39): n is a, c, g, or t
  misc_feature (486)..(486): n is a, c, g, or t
gagaaagcaatgatagattaacactgttagtgtaacgtngccagtggagtggaaagaccgcaacacctgaatcctgggttttgtaatgtttttatgtcctgactcacattctgtcacatacgctttcccctaatagtcgggttacaaaaaggaccagagtggccgcttgagccagatgactcaatcagatgaaatgtgcctgaggccaacgatgtacacttgctctatagaagggtgtcaggggcaagtacacttcaccacagcaatagcttgcctattagtctgctgagcagtcatgaattttattgtatttcttgggtaaggacaggccagaatgagtgtcaccagtgggtaattgaatcaacttctcacacatactgaaggctttattatgtcttcatgcatacttagtgtatcatgaatatttggtatctttgtggcttttcatatttttagtgcttcatgaatatttggtatctcttgctnctttctatctgtggtcacacata

SEQ ID NO: 458334 - DNA, 670 bp, Homo Sapiens
  misc_feature (298)..(308): n is a, c, g, or t
  misc_feature (556)..(556): n is a, c, g, or t
  misc_feature (587)..(587): n is a, c, g, or t
  misc_feature (619)..(619): n is a, c, g, or t
  misc_feature (649)..(649): n is a, c, g, or t
caatgacagaagttccaggactggttttccagtacatctttaaacaaggccccagagactctatgtctgcccgtccatcagtgaactcattaaaacttgtgcagtgttgctggagctggcctggtgtctccaaatgaccatgaaaatacacacgtataatggagatcattctctgtgggtatgcaaagttatgggaattcctttataggtaactgccatttaggactgatggccctaatttttgaggtgctgatttagaggcaaaattgcagaataacaaagaaatggtatttcaagnnnnnnnnnnnataagcaatgtaattatgctattcacaggggcctcaagaattggtatgtatgatgtgatctggtccagccagggcctggctttgtcagctctctaggtttgatatgactttagtaaatttgtcaatatagatggtaggaagcagaatgccattttattaaaacacaggagaagttatatctctctgattatgatagtattttattttacttatcccaaaccctcctttctcagtatgggatagatccnggggaaacccagattaggagatagttaagcntttagttaaacattgtttctggggaggaaccngggaccaggtgttaaggttgttagggaatnccccggaaggaggcccagtcc

SEQ ID NO: 458335 - DNA, 410 bp, Homo Sapiens
  misc_feature (46)..(46): n is a, c, g, or t
  misc_feature (54)..(54): n is a, c, g, or t
  misc_feature (363)..(363): n is a, c, g, or t
actgcaggatatctcagagtctttaatatgcaaatgttaagaaaanggatacangtatgccacatttcccaaatttatttgtccatagacacttctatttacagaactgtgttaatgtctcttgaaacaatggtcatagaacagtttgggttaaagctatttaaaaatgaacaggctgtcttctaaaggagtagggtcaggttcacatcaagatatctggaaaaactggttggtctggctgccgctcttatatttctgagatgcttgtcattaaaactgaagtatataaagtttggggcacttaggagcaatttctcttaccctgttaacaggtaaccattatctgttaatatttaacagggngccctggttaaccatggaaccattgttacggggatttaaccattaac

SEQ ID NO: 458336 - DNA, 374 bp, Homo Sapiens
  misc_feature (13)..(13): n is a, c, g, or t
  misc_feature (26)..(26): n is a, c, g, or t
tgtagccaatganaatggagaggccntgaaatcccaaaccagcacaccctagagggtaggggtcctagaatgggaaaacttaagactgaaaagaaggaaattgggtaagttccagtggggtgggaagccccagaatagatttaggaggctggggtctggaattagggagttgaggttataagattcagaaccagaggaatctttagggaaaagtctagattccagaatcagaagcatttggaggctgaattatagaatcagaggaatttggatctgaaatcaaaggcagttggaagctgtgaggcttagaagcagaggaatttatagaataaagcatagaattagaaaaagcctggctgggctcagtggctcat

SEQ ID NO: 458337 - DNA, 528 bp, Homo Sapiens
  misc_feature (419)..(419): n is a, c, g, or t
  misc_feature (474)..(474): n is a, c, g, or t
  misc_feature (478)..(478): n is a, c, g, or t
  misc_feature (485)..(485): n is a, c, g, or t
  misc_feature (504)..(504): n is a, c, g, or t
ttttttttctggtgcctaccaaggtgaggtctttatggtgtatagagattggtgagtttcagagccagtgtggccagtctagtccctcccctttccctagcccagcacaattccctccattgagggcccacatcacctccagagggaggagggaggggtcagacccccccatagcaccaatctggataggccactctctgacaaaacagagcgagcagtgccttccacaaacggggtaaatggggctaagaaggggggaggccttttcctgtgggagaccaagagtaggcaccatctgtaggaaagaaagctggggggtaaggggaggcacataggatggttggcagacagctttaggggtcctgggcttttttttccccaccttgggcaatatgtcaggacagcaccgttgcctgttncatgttgcctgtgttggctgggagaagtttttcagtttgcaaaaccacccaaggngttnagggganccccagggtaccccaaacnttttggggtaaattcaaggtaaag

SEQ ID NO: 458338 - DNA, 321 bp, Homo Sapiens
  misc_feature (47)..(47): n is a, c, g, or t
  misc_feature (282)..(282): n is a, c, g, or t
gctcttgctgtgtatgtctaagctcagggaagactctgttttccganccaggccgtggctctctgtctccaaagtccgatctgccatggagattacttcactggagctgtgccataggggtgccactttctccttgcctggccctgagcgaggtgacgatgtggcagccccccagcgaggctgtgctgccgtggctggggccataagaggtggtgtcaatgccactgtcagcagaggtgccttgcagatagttatagctgttgagttcggattctgtgcggnccccatcgtaccacttctcatcactatgggcacttgacg

SEQ ID NO: 458339 - DNA, 433 bp, Homo Sapiens
  misc_feature (66)..(66): n is a, c, g, or t
  misc_feature (359)..(375): n is a, c, g, or t
ggaaagttccttgcccatcccccgcctctttgggcaactgtgtgtgtggtggtgacgcatcatagnattgcttcgtcaaaagacttaggttgttggtcatgatatgactgcaagtataaagcgaggtgcacacaattaccaagcatagtgacatgcatgtatacatttcccattttgacctatttcttcatgaatatagtttgtctgctaataactcacaccggtgtaactgtctgtatacctgtttatgcttccaaaaatatgtattattgcctattttattgtgtgaagtggctgatgtgttctgttgtgtttttatgtttctcaaataaatccttttaaaatgtaagtatcttttnnnnnnnnnnnnnnnnnttttcccagaattatatttccaggatttagatcttttgggattgtgattttcggattt

SEQ ID NO: 458340 - DNA, 380 bp, Homo Sapiens
  misc_feature (253)..(253): n is a, c, g, or t
  misc_feature (279)..(279): n is a, c, g, or t
  misc_feature (283)..(283): n is a, c, g, or t
  misc_feature (301)..(301): n is a, c, g, or t
  misc_feature (346)..(346): n is a, c, g, or t
  misc_feature (357)..(357): n is a, c, g, or t
gatctggtcacagttatcctttttagcaacacaaaacagtaatacaatgttcctgaggggacgcccttcaggccctcagcatgttgtagccacctgtcctggggcagcgagtaggccagactggggccagattgaggccggttcagtgggccctcctaaggtcggctcccccacccgtctcccaccctgagcctcacagtcctcacacaagtttggaatcattattctaaaagccataatcccaaacactggntccccaacatgtgaaatactgaaagnacgncaaatctcttaaagtttnaaaatccctaacatcttaaagtcttaaaaattcacaatcccgggntagttggcatncatgttagggtgggagctactgg

SEQ ID NO: 458341 - DNA, 540 bp, Homo Sapiens
gaatgctatttgtccattgttattctggaactgaaaccccaaattatagtcacactatactatgacttgtagtcccatttcataggttgcatgatgaactaatggaaaggctggaaaacatcatggagaaagtcagcaacacagccatgtcttggatgctgggtgtgtactatgtgtatcatagcaacaagcaaaagggcagagatgacacttttaaggtttgtcacccaaaaggttttaaagagcaactcacaacggaattgaagtgaactacaaggtgtttgaagtcaactgcctttggcaattagttttaattacatattgtttcccctttttgctaacattattcctgggtctttttaatctatgggatggggggtttctggggatagccagcctttgactttatcttctcttatttgatatttaatgctttattttaaaaaatggtgtttgcccaattcattgaagctggacaagggggaggacatatcttagatcaaatgtctttggcttcaagacagtggaggcacccaggtc

SEQ ID NO: 458342 - DNA, 363 bp, Homo Sapiens
  misc_feature (154)..(154): n is a, c, g, or t
  misc_feature (219)..(219): n is a, c, g, or t
  misc_feature (232)..(232): n is a, c, g, or t
  misc_feature (271)..(271): n is a, c, g, or t
  misc_feature (314)..(314): n is a, c, g, or t
gttagttaaattgacttttattattgaattataatcatttgtgcaattataaaaccaggtgttcctgattgagatcaattattccttcacctgatcactatagagctaataaggacttagaattgccgttcaagtatacttccagccgcgctgnaagccttctgggaaaggcatttattaagccaaagagtgggtgggaaaaaaatccaggggaaggancaagggacagagnattaaaatcctttagggaaaagggcctaggaaaggctgnatttgattcatcaagttaggccttgctggggtaggctgggctntttggacaagggggatcttttgagggtatttccctaacagggaactttc

SEQ ID NO: 458343 - DNA, 518 bp, Homo Sapiens
  misc_feature (362)..(362): n is a, c, g, or t
  misc_feature (434)..(434): n is a, c, g, or t
ttttttgttagttaaattgacttttattattgaattataatcatttgtgcaattataaaaccaggtgttcctgattgagatcaattattccttcacctgatcactatagagctaataaggacttagaattgccgttcaagtatacttccagccgcgctgaagccttctggaaaggcatttattaagccaaagagtggtggaaaaaaatccagggaagaacaaggacagagattaaaatcctttaggaaaaggcctaggaaaggctgatttgatcatcaagtagccttgatgggtagctggctgttgacaagggatctttgaggtattcctacaggaactttgattggggtggggcgggcacngaagtggggggcaggggattgaggatgaccaaaacaagcatgtttaggggaaccagcccagtcagaaacccnttttctgctgtgtttcctctgctgagggtgggagttgcccttttctccttgtgaacatttccagttctgactcccaagggtttg

SEQ ID NO: 458344 - DNA, 280 bp, Homo Sapiens
  misc_feature (90)..(90): n is a, c, g, or t
  misc_feature (150)..(150): n is a, c, g, or t
gatttactagggggtggtgaatataatggagagacttctggggaggaattcctggctcccgcgtggacttgcagagctcaacaggcagcnacgtggctgagttgtccagcaaacatcacataaggctttgggtcctgcaggtggggctgncatgagcagcaagctcagtccagaagaacagttcctctccaggatccacttcctgcgcacttttatgtgcagtgtagctggagcagagctcccggaattccacaggcaactgagaacggagagggatgca

SEQ ID NO: 458345 - DNA, 343 bp, Homo Sapiens
tgaggtttctgaacacaacctttatttgatcattttagtatatatttttttgcccattcgtatatttatttcaccaggtcagaatacttacaatgcatcaagcttcatgtgaattaccaggaattcacaaatgtataaaatatcaaggaacttagcatctaatgagggagacacatgtaaataaataaagtttaacttacgtgatacataaagttaagtgatcaatagtaattttgtcaagttactgttgtttctcaggtattactggttttatacagaaagcattgtatacagaaaatatataagcatggcacaatagaccgtccagtgtccttgtcccgtc

SEQ ID NO: 458346 - DNA, 1514 bp, Homo Sapiens
  misc_feature (22)..(22): n is a, c, g, or t
  misc_feature (36)..(36): n is a, c, g, or t
  misc_feature (75)..(75): n is a, c, g, or t
  misc_feature (101)..(101): n is a, c, g, or t
  misc_feature (1131)..(1131): n is a, c, g, or t
aatttggtccccacgggggaancccccctaccccantggttaaaagccgtaaataggccccaaaataaaagtttnccctgaccccgaaaaacaaaactccngcaaagttttaagcaaaaagttaaacagattacatgtccttctattagttccagccccattcagttaactccttgctctgcttgatattccatgaatatttcagctcttcatgagtccctgaatgtttttcctttatttctaatatcacaatctaaagatattggaaatatgcatttaagagcacctaagttctacagctgattataaaccaccttttgaagaggatcaaaacaagactacgattgtctgtgaatcacaagatgtctttagacagtcacagtcaaaaacacaattgacaaagaaatttcgttatttctgtggtttacaataacttaacataataaccctaattataattgatatcatatactcagatattagaattttagaaatcttatacaattttggaacatatattaatatatatattaatgttattcactaaaatgtaacctgaataagattaaacattattcttattttggcaatcccatgtaattaaacatgtcaaataatccaggggccctctatggcatccaaaagttaggggtcaaaaaagacaatcttgaagctaaagttcgatttggggaagcctactgaacatattaaaggtttaaaacacttgatattataaaatagaattccaggttatcattggccaaaatgatgactcaaaaacttttttaaaaagcacaaaacctttacccattaaaagggaagacaactttccaaacaatttgtctcttgcctttcccttctttttttggtagtttatttgcaaggcaaacaaaaatctttcattatcctttactattacataaaaatcttgttcaagacagagtcaaatgtcatccttgcatcagtctactattaatgtcatccccaatttttaataataccttatagataaatctatccaatcttaactagtttgaccatgaggtgagattcttgtaaaccttttataaccctttacaaattcttgttaaagagcagatcagtaccttaagaaaaccttgttgtgctttnatttcaaggttcaatttacagaggaaccaaataatacccttttgaatttaatcaacgtgttcacacacagcatttattttgtaagattaatttttacaaaccatccacaacttgttcaaacctttggctttatcctatctaatttcaaacaaatgcccagccttaatttattacaattatgattcgtagactttcactcaattacataaattcactctcggttgaggaaaagagagaggtggcagaggattaatccaaaggatcctggtgtccactacccttcaaagccagaccctggtggggccaagtcctgccaagtcatcaggtgctgattaaatgcagggcactgggtgggaagcaaattcctaaaatgtggttctttc

SEQ ID NO: 458347 - DNA, 479 bp, Homo Sapiens
  misc_feature (16)..(16): n is a, c, g, or t
  misc_feature (73)..(73): n is a, c, g, or t
  misc_feature (244)..(244): n is a, c, g, or t
agaaatgcccccggancccccgcctaacttgtaatttgaatgttgttcctccaaagggggaaactgaaagagnccccaaataaatatgttcccctgtccctgtggctgccctccccagaagtggaagttccttggggttcctcacagtcatcttttattttgaaaagactaagatgaagacaagaaggaagagggctctttctctgaagcaggttagagtaaagaataagaaaatagaaaaagnaaaaaagaagagggagaatgacttattgtgtctacagaaggaaagaaaaagggaaaatattacataccacctatcagaaactagctaaatagatgcactaaagaaatcatttttaaaatttcaagcaggtattttccatccaaactaaacagaaagtccaagacaggcacaacataaactaaagtaaaaactggaaacctggaaaaatcaactctttgattcactaccaacattt

SEQ ID NO: 458348 - DNA, 271 bp, Homo Sapiens
acaactaaaataaattaagatttttcttggtctggggaagtagacggtagcaagggatgtttcttgaaattacttattaaaggcttattactaatatctaattcaataagcatcacaacctacaaatgttttataatacaattattcacaaaatccacaaaacagcttatgttagcctgattttacacatgaagaaatgaaagcaaagctaaaggaaattaattgtccacagttgcatgttgaatcatcagaaacaggagagtatcacttc

SEQ ID NO: 458349 - DNA, 257 bp, Homo Sapiens
tattccctgttttggctcacgatatcttccattaactcttacatccctgctgtggagctcctgttttatataacagtaacttcattgagttccttttttcttaaagtttattggcagtatgttctgacacagcatccattgctatatgacaacttttattctctgaaaagagttcttcacctgccatttctttttcccatttcttagttttgtttggtttttaaatactatctttacatagatctaatgctgttttt

SEQ ID NO: 458350 - DNA, 320 bp, Homo Sapiens
  misc_feature (54)..(54): n is a, c, g, or t
  misc_feature (125)..(125): n is a, c, g, or t
ccagagcaatctgttaaattacattttggaataacctattcaaaatggtttttnccatacgtctttaagatgataatatttatatgttcaaaaatttaaagtctggaagactatgtacaaacagnaaatggtagcattacctttaggagctattgagaggaagtacaaatagagccacttgccttcttactatcaattctgattgtcccatgttttataatatattcatgtagtactctaaacaaaatcttttcagatcaaatcaggggagatgaaatgagagtggattctgagcctagtttttttcagggaacaagacc

SEQ ID NO: 458351 - DNA, 366 bp, Homo Sapiens
tatgggttggttcatcacaaccttttatttcacaatattaatagtaatcattatagctaccatgtattaagccttcaccatggggctgttaagtcttcattgcttagctttactaaactagataatgtgtttgcttatctcatggatttctcttaaccatcccctgagatccccctatagttcttatccctttacccccattttacagaagaggaaaactgaggctcagagaaggggagtcacttggccacagtcgcacagttggaaagtggtagagccaggatgagacgctaattctgactccaaagctagttatatataataatagcacccaagtaatgtatagattaccatgttttcacatat

SEQ ID NO: 458352 - DNA, 359 bp, Homo Sapiens
ccattttattctgatctaaagaatactttatttcattatttggtgggtaatttgtcatagccagaaacctgtatcatcatatgttactcatgagtgtatatagcaagttaagtcactcaaatctttaatgtggaaggagttactcagaagaaagaagaagatgtctttttcacatgtattttctttctaggccagggaagcctttaaattaatttcctacagtagtgctgtagagagtgtgattcccctcccttcactccactccctacctatatagtctgtaggattatcctgttcagaggaaggttgaacctgtgaaagtatcctttttataagaccacgttaatcttgggggggtg

SEQ ID NO: 458353 - DNA, 490 bp, Homo Sapiens
  misc_feature (409)..(409): n is a, c, g, or t
taaaaagaaactgttatttctaacacttgttatttattctttaacaaaaagggaaactttgaagaggaactttttacttttcacatgcggatccattagtcctcgagaatttaacagtgaacctatatagatgtattttgctgtccttacagaacatgcagtgtaagaagtacctttaatgccaacctacacacttctttcccgaagtacccaattaagtgcaaatgcttaatgtctttagtgttttatagtaaagcaaaaaatccttatttagaattagaagtacaggcctgtgcaacatggcggaaccccatctttaccaaaaaatacaaaaattagctggacatggtggcatgcttatgtagtctcagctacttgggggctgaggtgggaggatcgcttgagtccngggaggccaaggttgcaagtgagccattttcgcaccaattgcacttccagccttgggtgacaaagtgaaactttcaccttt

SEQ ID NO: 458354 - DNA, 440 bp, Homo Sapiens
gcatctagaaaaaaactgatttattaatttacaatggagcaatatacatactcagcaactggaatgtttgtgtttcccattcaggctaaggttttcttggtatgaaggttcttggaacgctgcatcataatctactagcatacactgagtgtctaatctgggccaggtctgtgctagacatttttcacaaacaacctagttttatctgtgagcccaactcaattaagtgaggatcattcagaacattttacaggtaagaaaactgaacagcagagaggttatgaagctaagcagcagcaaggctggagtctgaattcagatctatttgataataaagtgagcgtgtttccattataccctgctgcttatgtgtgagcttttctagtcagcttcaaagcatccttggggatgttttcactggctgggcctccctatatgga

SEQ ID NO: 458355 - DNA, 474 bp, Homo Sapiens
  misc_feature (23)..(23): n is a, c, g, or t
  misc_feature (29)..(29): n is a, c, g, or t
  misc_feature (38)..(38): n is a, c, g, or t
  misc_feature (79)..(79): n is a, c, g, or t
  misc_feature (86)..(86): n is a, c, g, or t
  misc_feature (161)..(161): n is a, c, g, or t
  misc_feature (198)..(198): n is a, c, g, or t
  misc_feature (203)..(203): n is a, c, g, or t
aagagccaactctgcaattccantgccancaatccttnaaacatgaatcactcggggttcaattagaaatttcatcaanctgccancgtttccttgttgaaataattcctttgaagatgtccgtcctcatgatgactgcatccaaggaatctctcaagtgnagaacaaaggtaactacctgcccaggccggcacaagncctgnagttggagagggcagcagtaaactgttcaaggcactgtgagtgaggatggtaggtatggatgccgcccaagagcgctgaggtagtttacgaggtggaggcatgtttgttggcattgtttgagaacttgttccagctcgaggggaatgagaagcatctggaaccggagaatgtagtgaggggttggctggtgacattccaggcatgcgtgctgctggtgaggggccagacacttgaggagatccctggccagttccctgctcgtccacttgg

SEQ ID NO: 458356 - DNA, 521 bp, Homo Sapiens
  misc_feature (12)..(12): n is a, c, g, or t
  misc_feature (61)..(61): n is a, c, g, or t
  misc_feature (80)..(80): n is a, c, g, or t
  misc_feature (116)..(116): n is a, c, g, or t
aacccaaaaacncctgaggtaatttaacaagtggaagccatgtttgttggccattgttttnaaaaacttgttcccagctncgaaggggaaatgaagaagcatctggaaaccggaangaatgtaagtgaaggggttggctggtgaacattcccaggcatgcgtgctgctggtgaaggggcccagacacttgaggagatccctggcccagttccctgctcgtcccacttggtgaacaccatagtgtatggggaactagggtcaagagttccatgtggactagcaaaactggcccctggtcctattgagattccatgcgaggatgggggaggagttggaacaaatgacgctggtgatgggctctcaaaaggcccactgggggagctggcagcatgcagatttcctggagactgtgtgtgcatcattgagggagactgattgactgtgctatgataagatgtagggggtgaagtaagaggataagcacctgatgttcctggctgctttggaaatggctgttgctg

SEQ ID NO: 458357 - DNA, 326 bp, Homo Sapiens
ccatttgtatcagcttttattcttcacaaaacatttagaagatacagaacttttaataatattcttctattcgtgattgaaccatgaaatatgagaaaccaacatgcatttcaactttgtgatgtacagagtggcaggtattgatggtagggcaggatttcacagccgtgggaaaattctatcatcctaacctaggtctttgtgggcaatgtgtgctataaatacaagcttctgggcattagcaactggggtcagtcccaataggtaaatcactaacaaaaagtccggggcaggcagaggaaatgggaccaaaattggaaggaacc

SEQ ID NO: 458358 - DNA, 502 bp, Homo Sapiens
  misc_feature (343)..(343): n is a, c, g, or t
  misc_feature (402)..(402): n is a, c, g, or t
  misc_feature (411)..(411): n is a, c, g, or t
  misc_feature (416)..(416): n is a, c, g, or t
  misc_feature (421)..(421): n is a, c, g, or t
  misc_feature (437)..(437): n is a, c, g, or t
  misc_feature (445)..(445): n is a, c, g, or t
  misc_feature (454)..(454): n is a, c, g, or t
  misc_feature (464)..(464): n is a, c, g, or t
  misc_feature (482)..(482): n is a, c, g, or t
ttttttttaaaccacaaatacgtttattcctctaaaaacagtataccatctttccaattttcaaaatgttattatcaattgtctgcagattactctcattaagctgatttttaaaaatctcagacagagcagagcaattcaccagcaccatcatcaagtgagctacaaatctatcttttaccagagcaaggagacacttaagatcaattcaagagaatagctttcagtgttcacagaaggggtactcacattcatttgtcacatatttcaggccctcatacaccccttttaaattgtctaactcctatcccagtttctttttataggtcttaaaaacaggggntcacccaggtaggatactccttcggggcactgctggaaatggggttcaaacgtgggggntcccccggntcccngtttntcaggtgtttaaaatntttttatnttaggcacnagggttaccntagggtttattccgtttnggtctaaggggttgtggttt

SEQ ID NO: 458359 - DNA, 464 bp, Homo Sapiens
  misc_feature (17)..(17): n is a, c, g, or t
  misc_feature (34)..(34): n is a, c, g, or t
  misc_feature (39)..(39): n is a, c, g, or t
  misc_feature (46)..(46): n is a, c, g, or t
  misc_feature (72)..(72): n is a, c, g, or t
aggggtccacgggatcnaagaaaaccccctgaanggttncctcaanggacccaaaacttttcctgttttccnggaatgacgagtccctttttgtaatgcccaataaatacatgacccattcagtctcagttttagtacttttagtgatagcaagttcattaccgcacaaaccagccctatgtcatatttgaagagctttgttggaatattttcttactttgcccctaaatcatccttctatcccatatgtctctgaaatcacacaagtgcaattctcttccagttttcagttcttcgaatattatgaaaacataattatttcacaacagttttctttctgaatagaggggattgtcttcacagccctgtcttctgtagcatctgcttggaggcctcttggcaccctgaatactgtcctagggaaattgtctagtttacctcacttttagggcttcgatgccacc

SEQ ID NO: 458360 - DNA, 481 bp, Homo Sapiens
  misc_feature (461)..(461): n is a, c, g, or t
gagggcttctctgaccattttcataccagcaacaatttaggcagaattataaacatctatttatcgagtgacaatacaaaccgaagagatcctagtagagattaggggtcagttaaaatcaactagccactgccacttgtcatctacatagcaaaggctttatttagcacaggactaacgtgaaaagtagacccagagatgaaaaggctgtcaggagacagggggctggtgtccacctggtatctactgtcttatgcaacatagaagattaccttttagtgtagtgctcctacctcagtttgtaggaatctgggtgtttctatggcagtgagtgatagcctcaacttctggaccttttcatatttcacattaggaggacaggtggcagtatttccctattcctaggtatggttcccctgtggttctaggagtttcttaaccagttacagtaggtctattgnccattttcttaaccagctaa

SEQ ID NO: 458361 - DNA, 427 bp, Homo Sapiens
  misc_feature (328)..(328): n is a, c, g, or t
  misc_feature (382)..(382): n is a, c, g, or t
  misc_feature (397)..(397): n is a, c, g, or t
  misc_feature (412)..(412): n is a, c, g, or t
ttttttttcggcaggatgctctttttcttccacccctgggcctgcctattttcctcccttgttattgacagtcagccttcgtgggacttggtcacaatgtaggatcagaaagcacaggttattgagacaggcccatactttgtaacactccaggagaatctgcataatctttttcggtcttttcaccagcaatgacagtatgttatcttactaacggaatcagcccatgtccatgttcataggctgggcattattaaagggggcaacagctaaggagcccatttcaagtgggaataacaatatcttttccgggtgggtgggaaatccnggaaatgcttctgggctctggggatgaaggctaaggtccttagggatgggcttnggcatttgtaaactncctactgtaggtttnaacacccctggttga

SEQ ID NO: 458362 - DNA, 433 bp, Homo Sapiens
  misc_feature (392)..(392): n is a, c, g, or t
aaaatagatagcaaaaaaatgtgttggctgttctcactgtttatcttcctaacttcttttgatgatggaaggcagttttgtggaaattgccagccaggactttgacatgaaacagacccagggctaaattttggctctgtggtgttggataagtggccttgaataaattagttattaagcttcagttttctagcttttaactgattataacaatgcacacacatacctgacacactgttaaattttcttctcttcctgtttcttatgttaaggaaagatactctgtgttttggcatatgttggtgaatttgtaccatttttatcctctcagtccttccttttataagacaataattggagtagtttaatcttattcatgtggcaggataaangagggtttatggaagtttaggggtggaagtagggccagggg

SEQ ID NO: 458363 - DNA, 495 bp, Homo Sapiens
  misc_feature (142)..(162): n is a, c, g, or t
aaattttaagaacccaacaaaaaagatttgacttccgaatagaatgttttctttaagaggcatgaaaagcaactattgttgtgttacagtgttaaaaatattcagttttctttgacaaaaatgtgtactgtgtaagccttgnnnnnnnnnnnnnnnnnnnnngaagcagcagcagcagcctgctgtgtggcatcctgaacttttataaaggtttccttgtgccaaataagtgcaaagatttaatttactattaaaaaccataagcatatgttatagttccagaagaattattttgtcatcaagtgattttgatctttagtgtcaatatttatatttagattaatttttataaatgaaaatattttaatggtttaagaaaatgaggacaacaggataatatctttgatgacttctgaaagttatgcttcccttcatgttatatgcacattgccaagaattactgtcaagagaaatgataagtaaaagtcatttatg

SEQ ID NO: 458364 - DNA, 250 bp, Homo Sapiens
gcattttaataaacttaatttaatgaagcgctgcattccacaagtacagtcagtacagtagctctcctttgggatggaaaaattacaagaagcaatgccgaggaccgtgaactgtatacagaagccttgtggatctagaaaccaacagtgtgtgaacttaggacattctcaagttttaaaacgtggccattataatatcatcacattacataaatatcacatcaccaatattcgttttgtttttttcttt

SEQ ID NO: 458365 - DNA, 475 bp, Homo Sapiens
  misc_feature (15)..(15): n is a, c, g, or t
  misc_feature (23)..(23): n is a, c, g, or t
  misc_feature (35)..(35): n is a, c, g, or t
tgtggctcccggaanacccgganccctaaaccccnagagtttccatggaacttgaagccttggacttccagatcagtcccttaaaatgggtgctgggccagagaccctatgccctccccccatttcccccatccccaattgaagacaaatcatgtattttaaggttacatttattagaggtctctggcttcttgaaagatggagactttataaatgtcaagcaattattactgttattttcatatcaatcagtgatatttttggtgcacaatttaaataaatacttgaggccagtggttttcagagtgtggtgagatgtgcagcatgagcatcacctgggaacctgtaagaaatgcaaatcctctgccccagcctagacctactgaatgagacactgtgagagttggctccaagcctacagggaccctggcacacagggtttgagaaccacagtgaaaaacccgatctccacaac

SEQ ID NO: 458366 - DNA, 521 bp, Homo Sapiens
ttttttttaaaggcaggggactctcaagaaaatgatgaatattattatttctttgaattcttgaaatcaacataaagttgtgtgattcctctcctcctacccccaattttagcataactggtagtaatataaaagaactagctctttgctaactgtgcataagaaataattttttccccagaaatcagaaatgaagacaagtgccacacatcattgatcgccccaacatgggattttcgcacaaaagaaatacagctacccagtatgcagtttacctgactgggagaaaaactgggatcgtcgccaagagttctgaactctaaggcggaacactggcagtgccaggcgactctagatcagatggcagaacagaacaaacagaaaaccatgaaaactggggtgagaactgaatagaaccatgctcccaagtactatagggagtttggctctagtcaataccagaattgagagtcagtaaatctacagtacaaaatgtcttaataacacacatataaaacctg

SEQ ID NO: 458367 - DNA, 747 bp, Homo Sapiens
  misc_feature (12)..(12): n is a, c, g, or t
  misc_feature (44)..(44): n is a, c, g, or t
cctcccagtttnacaatgggtggcagttaccttactactgggtnggaatcaagctgttatgatttggttgccaggaaagcaaattgcctaaaaagcagttatgtcctcagcaaatcaagagcccttgaacatttcccaatgctccagaaggacaaactggtaggagcaattgtctactatgacggacaacataacgatgcacggatgaaccttgccattgctctgactgctgccaggtatggggctgccacagccaattacatggaggtagtgagcttgctcaagaagacagacccccagacagggaaagtgcatgtgagcggcgcacggtgcaaggatgtcctcacagggcaggaatttgacgtgagagccaaatgtgttatcaatgccacgggacctttcacggactctgtgcgcaaaatggatgataaagacgcagcagctatctgccagccaagtgctggtgtccatattgtgatgcctggttattacagcccagagagcatgggacttcttgacccagcgaccagtgatgggcgagttattttcttcttaccctggcaaaagatgacgatcgctggcactactgatactccaactgatgttacacaccatccaattccttcagaagaagatatcaacttcattttgaatgaagtgccgtaattacctgagttgtgatgttgaagtgagaagaggggatgtcctggcagcatggagtggaatccgtcctcttgttacagatcc

SEQ ID NO: 458368 - DNA, 375 bp, Homo Sapiens
  misc_feature (25)..(25): n is a, c, g, or t
  misc_feature (78)..(78): n is a, c, g, or t
  misc_feature (109)..(109): n is a, c, g, or t
  misc_feature (152)..(152): n is a, c, g, or t
  misc_feature (163)..(163): n is a, c, g, or t
  misc_feature (204)..(204): n is a, c, g, or t
  misc_feature (233)..(233): n is a, c, g, or t
tgccttttgaaatgccatttcttancctgaagacttctcgttgtccgccctgggatctggcttctcctactctgtacntcccggccggcaggcttccctaggcctaaanacgtgtccaggaggcgggcgaccctgcgaccccgccgtcagancccagaacccntgccggctcccccggcgggctctggaggcgcccagcctccntgctccccgcctgaatgtcagcgcagggncccgcagggaagaccaagcccaagctccagggggtggaatgctgagcacaggttccccagacccagcctcatacaggtggggggaggcggagagccccggcagctgaacagcaggcttcccacttgcaaccccccgccaccc

SEQ ID NO: 458369 - DNA, 551 bp, Homo Sapiens
  misc_feature (11)..(11): n is a, c, g, or t
  misc_feature (130)..(130): n is a, c, g, or t
aaataaatacnttggctccccatggctaattcagggttcccttgaaatcaatccccaaaaagctggctgccaatcccagcctgttcacccaaggtttgtccctggtgatggctttaccctcactccctcnagtaagaataactgggcccctggagtggatggtcctgagggaggaagtttggctcacttgataaagcagaactttcaaacactttgagctcatccatgatggaataggctgccttgggatgcgatgagttctgtggtcctgggaggatacaagcagagaaagtctggtggccacgggaccattcttccctggtcccaggaagcagggactgcacagaaacacagggacttagtcaccacaacatggaaagccacagcaaccctcagagggagaactgtaagtcttccaggctgtccgttggctccggggctcctggctgtggaccggggcaggaggcagacacctaatattgcaaggcaggtgtttgttcctggttggagagatttcctttacgtggtgatccgggtgacttccatgttgc

SEQ ID NO: 458370 - DNA, 499 bp, Homo Sapiens
ttttttttaataagagacagagcctggattttaatacagacctaattgaacacctgctatgtgccaggcattgtgtgaggtgtttagatatattatcccattgaacatactagcaatcctgcatgggaggtattattattatcattattgttattcctattggacaaatgagaaagccaaaactcagagaagtgaaaagacttgcctacaggccaggtcaagatgcagtacttgaacctaggctgagtccaagcctttattctttccaccatgtataagcctccctaacagaagcccaccagactattatagtggaattgtagggcatcagagggagtaatacatttgggctcccatgggctattcagggggttccctgaaggtcatccccaaaagctgggctgccagtccagcctgtcaccaaggttgtcctggtgatggctttaccctcactcctccagtagaataactgggccctggagtggatggtcctgaggga

SEQ ID NO: 458371 - DNA, 449 bp, Homo Sapiens
  misc_feature (421)..(421): n is a, c, g, or t
attttattcagtagtccaaattaaagaaaatgtttttctcaatttaaaataatttctttttcttttgtttatgcaagtgcatacatgcttcactgaaagcaaaaccattataattacattaaagtttataaaatatgatattttaacctcatatctaataagtatgtacaaaggtaaccatcactccttaaatccacatgaaaactactgtaactgatcatgtattttggaattagacttgataataaaagattatcatgtatcacatatctcacaccaggggaacaattagctacataattgtcataccttaatatcttttaaaggtaacagtaattttcaacacattttattttaaaatattattttaacaaaagttacattcctctccacaatgagggcttaaatgttcacccacggnaggaacttttatttcccctattatttcc

SEQ ID NO: 458372 - DNA, 309 bp, Homo Sapiens
  misc_feature (91)..(91): n is a, c, g, or t
  misc_feature (112)..(112): n is a, c, g, or t
  misc_feature (114)..(114): n is a, c, g, or t
  misc_feature (117)..(117): n is a, c, g, or t
  misc_feature (175)..(175): n is a, c, g, or t
tcagctctgtgctgaggaggagagggttccgtggaatcttccactggccagctgggtagtgaggtgtgctgccagcctcagagggctggcnaggtggatgtggtttgaaaananaantacgggccttgtttcttaaagatgaggtgggtggccgcccaggctcaggtcagcgganacaggtgccaccgccaacatgcttgacttgggaagacacagcctctcctggcaccctccaccgctctccctggacctctgccctcagccccaggctgcctgagcccacaaagccctcagagcctgcaggccgtg

SEQ ID NO: 458373 - DNA, 597 bp, Homo Sapiens
  misc_feature (29)..(29): n is a, c, g, or t
  misc_feature (79)..(79): n is a, c, g, or t
  misc_feature (101)..(101): n is a, c, g, or t
  misc_feature (176)..(176): n is a, c, g, or t
cggcagaccatggaagggaagaaaaaggnaatagacctccatggttttcaagtgagtttgaacagggcctcagcttcanccaggcctccattagccagacnccatcctctcagcactgtgctcgacctgtgagaccctttgcttagcagcttggaggaaaatgtttttttaaaaanggtactatacacacatacataaatgcacacgtttatatgtgccatgtgtatatacatataaattgtaataaagtagttttagaaagctgggggtaccaaggcctctggggttgacttccttgcattcagaattccacaggacgatacctacccatgaacttctctccaatttgaaacactccatcttcccttaagatcgcctgatactgaggagactgaggcaggtccacaaaacaaacgaaggtcctagaaaatgtgtcatcagtgacactgttcacatgtgaaaggaacactagagtcatgagttatttgagagctctctaccctttctgactccccctccctgcccagacaactcacaggccggaatactacatctttaaatatttctggctaagccctcgccacatatgtcagtaac

SEQ ID NO: 458374 - DNA, 411 bp, Homo Sapiens
  misc_feature (88)..(88): n is a, c, g, or t
  misc_feature (357)..(357): n is a, c, g, or t
  misc_feature (370)..(370): n is a, c, g, or t
  misc_feature (385)..(385): n is a, c, g, or t
gtgatactataaaagttatttattcgctatacacagaacatgtcccctataaaatgtacatgtaaatcactaaaaagtataatttggngaacattttctcaattacagaacatactaaatcagttaggataacagctctctgtctgcctcaaaataatctaattatagcacccagtctcctttatacctaatgcaaagttaaatacttattttgggggttatatcctaggcatgtgtttgggtgagggcaggaggtaaacaatttattataactctaggtatattacagtcactggcacaataaaccagtttattacaggattaaatcattttttcattatttataataatgggganccaaatacggggntacttttaatggggncgggttaacccaccaccattactttt

SEQ ID NO: 458375 - DNA, 693 bp, Homo Sapiens
  misc_feature (142)..(142): n is a, c, g, or t
  misc_feature (643)..(643): n is a, c, g, or t
  misc_feature (681)..(681): n is a, c, g, or t
agcagattcgagatatgtttgttgctctcgggttttcgatacaacatcatgacacttttgtttcaagctcatgttttccgtctcccctccactcttagtaaaccttgatctgtacggagcggcctgtccgaggctacgccgncctcctggctgctgctggactgtgcttaggacagcgcccatgcctcggagggactctgtccatgagaaccacctgtgcaaaggaacagagctggatgtttccaggtagattttggcctcccagagcaatgcggcatttgagaagcaacagttcctaactccttatcttcagggaaggaaaagaaaatcacagcctaggaagatggagattggattttaatctcggttttaaaaagaggacaaacaaaatgtctctaagccaggctagatggaatgtgctcccgctctctcctgccgtgctgaaagtcatgccttgcggatgcctcatgacagcagtggctgagtctccccacccacccccaacgtgggcttcattttcagattgctttcggccccacccttgcaaggatgtggttcacggatggccagggaggttccgtctttaggccacagggatgggtgttgcagagttccctcctcctgggggttgccagggcagagnttccagggcaggttgagcccgacagagagttgccaggncacaccccttcg

SEQ ID NO: 458376 - DNA, 412 bp, Homo Sapiens
aacggaacaaaataatgtttttattaaaaattgtacccatagcacctctctgtcttcctacaagttgtttctttttttcttttaatgagatctgtttttctgcacaatttcagaaaaagttgtagggaacgtttagggacctgacggctccctaaaccagaaggtgacgcgggaaggagacgtgtcccagcgggcaggctcagctcatgagtttccacgttgtcctcacctttcagactggatccatgctaccagggcgctgacccacagggaggccacacttagggtacgcagacgggttgctcgtcaggaggatagctacactgtgtgccaagaatgcgtaagaattaaaaaccatgctacgaaccatttggggcaaacatcatgctttcagcccagtcacagttaggtt

SEQ ID NO: 458377 - DNA, 465 bp, Homo Sapiens
  misc_feature (271)..(271): n is a, c, g, or t
  misc_feature (362)..(362): n is a, c, g, or t
  misc_feature (409)..(409): n is a, c, g, or t
  misc_feature (415)..(415): n is a, c, g, or t
  misc_feature (430)..(430): n is a, c, g, or t
ttttttttaaggaacaaaataatgtttttattaaaaattgtacccatagcacctctctgtcttcctacaagttgtttctttttttcttttaatgagatctgtttttctgcacaatttcagaaaaagttgtagggaacgtttagggacctgacggctccctaaaccagaaggtgacgcgggaaggagacgtgtcccagacgggcagggctcagctcatgagtttccacgttgtcctcacctttcagactgggatccatgctaccagggacgntgacccacaggggaggccacacttagggtacggcaggacggggtttgcttcgtcagggagggataggctacactgttgtgcccaaggaatncgttaaggaaataaaaaacccatggcttacggaacccattaggggcnaaaccntcatggtttttaagncccagttcacagttagggttacaaaacagggggtt

SEQ ID NO: 458378 - DNA, 334 bp, Homo Sapiens
  misc_feature (298)..(298): n is a, c, g, or t
tcgtctccacggagggctcctcttccaagcagaagtcctcctccaccttcacaatcaggatctcttcctgttccaggtcctgctccaaggttggcaggggctggaggccagggacagtggccattgcttccggtgggccttgttccttttcaggccttagagttgaacctgtctctctctatacctctggccagacacaggaagagagtttttttcagggcctggaagcgctgccggccgtgggcagttcggggcaggaccggagcggcgggtctcggcgggagtaggactgcgggcnctacagcttggcagccagggacgccagagccggggc

SEQ ID NO: 458379 - DNA, 511 bp, Homo Sapiens
  misc_feature (128)..(128): n is a, c, g, or t
  misc_feature (154)..(154): n is a, c, g, or t
acaacccgatggcataatggattctggggaggctgtttttctctcccttgtggaagtctcaattctcctgcatctaaaagttttcaatggtctgtcctctttcatctctctactcctgcaaaaagggnagaaaaatagggcttccttaaaatantctagtgacttgagggcaaacatcatttcacggccttcatgacccagcagtcagatctgcagccaagtggatgtatgttgattgggtttggagctcaatgtgccactctcttccaggggggctattagtgttctgagctacaaggagacaccggattgagttttcccaaggccataaataaattgggagctatttcctgctcccaggcacattactgattatagcctggtcttctaaatactctaaaagcctgttcccctaaatgctgggaaagagtcctgtaacctctgggtggtaacaattgaagggtgagtacacgggcatttataaatcttacacttgagctgttaattgttg

SEQ ID NO: 458380 - DNA, 462 bp, Homo Sapiens
  misc_feature (390)..(390): n is a, c, g, or t
  misc_feature (422)..(422): n is a, c, g, or t
  misc_feature (433)..(433): n is a, c, g, or t
  misc_feature (447)..(447): n is a, c, g, or t
ttttttttaatgactgaataaagctttattttaatgtaaaatatgaaaagaaaaatttatatactcatatataacaacttccaaaatgttttctgtggtacaaatggatcatcttaaaaagtctgtaaagaattcatcctccacccccatatgccaaaatatgatttcacataatttatcttcagaacttatgaacagacttggaatcacaaaagcacaggaaacaccagaaaaagtgatggtacaaacaacaggttttgttttaggttccagtagtaagcagccctacagatgggaacagggaggaacacttttctggaagggggcccagttcagggagacagggttaggaggaggtctttgggggttgggttccattcctgttggccnaggttgtcttttaaaagtcaggctgtgtgtgnttctgtggacnttttttaggggctnggggggggatagggt

SEQ ID NO: 458381 - DNA, 496 bp, Homo Sapiens
  misc_feature (446)..(446): n is a, c, g, or t
  misc_feature (449)..(449): n is a, c, g, or t
  misc_feature (455)..(455): n is a, c, g, or t
  misc_feature (458)..(458): n is a, c, g, or t
gcagagtcggccgtgtggaagaccggagttttattattattcaaatcagtctctctgaaaactcagggattgaggtttttaaggataacttggtgagtagagggccagtaagtcgggagtgctgattgttcgggtccaagataaaatcttagggagctgaagctgtcctcttgagctgagtccattcctgggtgggggccacaagaccagatgggccaatttatctatttgggtggtgccagctgatccactgaatacagggtctgtaaaagatgttaagcactcatcttaggttatcacaggagcaatttaaggaggttcagaatcccgccacctccagctgcattactcctacaccataatttctaatctcatggcaaaatttgttagtcctacaaaggcagtctgatcctcaggcaggcagggactttgttttggaaaagagntgntattgnctntgtttcaaagttaaaccattgtgaaccccaaatatctg

SEQ ID NO: 458382 - DNA, 498 bp, Homo Sapiens
tccagaggagacctgctcaggttggccatgttgaagcccacagtctcctctgttgggttgagagctgccagaggttctgactgtgcttacagtctgcatgtcacagacctcaaccccactcctaggggcagggaaggaatggtatggacagaagactgggagcagcattaaatagcttcatggaaacatgcatggtctgtccatctctattttacaggcctagctttcaacaaataatagaaagaagggtcttgtatttatatgctgagaagtaagaattcagggagtgatgatggaaggaaggggtttgtgggaaatggagaggaaggaaaggtagtaggatgtttccctttcaagtgtggcacgagtttcaaaactacagattagggactgaccaaaacaaaaatatctgaagactaaaacaaaccactgcctcctatcttttttgaggatgaatggtcccaagtaatccttgtgagttttcgttaggttgggaag

SEQ ID NO: 458383 - DNA, 418 bp, Homo Sapiens
  misc_feature (31)..(32): n is a, c, g, or t
  misc_feature (401)..(401): n is a, c, g, or t
cactttattttcaaaattttatttttatggnnttttcagcatgtttaaacttaatttttagaacaaaatccaaaagcttaaaatcagatatcttataatgtgtcacaattaagtatggagagttctgtcatttttgaggaaaatctttcataattcttaaaatgcagatatttacaacatttttaaatacagacatatacaacatggcatatttaaatgtacaaaatagttgaaattatattttatcacagaacattccaaaattcaaactaatttttaaaagtccacaaacactgatagcatttgggaaaaaaatagcaacaagtttatcaataaccatggccatatgtttaggtaactaacttacttatacacaacacataatttacatgtcaaatccncaaatccaaaagatata

SEQ ID NO: 458384 - DNA, 508 bp, Homo Sapiens
  misc_feature (17)..(17): n is a, c, g, or t
  misc_feature (49)..(49): n is a, c, g, or t
gggggcagagacacccnaaaaaaagaggcaaccctgtggggcaaaacangtcctcacgatatccataggcccctactcccgtttggttccatttatttggtatcatttgacaaagatttttccctttcacgtcagcagattcttctatagaattttactaattgtaatcagacctcagctttcagagcacaaaataatacaccattaagttttaaaatacttttcaaacaagacaaaggacaagagatacaggccaagacaatggtcatccttccacttggccaaagtctggtctccttcaaattttgattaatgatgcttttgtaagaagtttttcccaattaattccacccagttctgttctcctttatactatttcaacacaatatgtaatcagacaaaacggtattacatgaatttgcacttgcttagatattattccacaagcatctgggtacattcagtcctaaattagaatatagtcagggactatgcctttcatttcttc

SEQ ID NO: 458385 - DNA, 400 bp, Homo Sapiens
actcagaaaaataaattaatgaataagatttcctctattaaagttttttcttggtttttaaaaaagtgacttgcacatatacaaccttttcattagtaaaattgcttagttcatgcaatcaaattaattatataagtatttcatggcattctccaagctctactacttgaacaggtctgactgaggcattactatgctaatgtactctgatcccaaatgattgtctacctaaaaataggaacaaatactgtattttctgggaataaaccaataattcggtatgggttttaggtactgggtattaactgatgacccaagtcattaataaaatgttaaaattatattcaacatctaattactgttagggcaaatttgtaatacaatctaaaagtttcttaaa

SEQ ID NO: 458386 - DNA, 412 bp, Homo Sapiens
  misc_feature (15)..(15): n is a, c, g, or t
  misc_feature (58)..(58): n is a, c, g, or t
  misc_feature (304)..(304): n is a, c, g, or t
ttttttttccaaatnggtggtgatactagtttcttcaagagagaaggctgggatgcanggctagggaaactgtaatataagttgagctgagaagatgagcgcctaaatttttgacaaaaggcacctcagggtaaaattttcaagtgtcaaaaagcaatttaagagggaatggactccttagaagagtaacactcctgaaagctgagactcagactgaaggaaccacgaggctgatcctaatcctcagtggtcttgcacagaacttaaaggcaagagcctccttgattcaagttaaaggccaaantgggaagtttcaatcacaaataactcctttgggttattcatgtccctaaaatttaaaattgtacatggggagtttaacttgatccttttgcttacagccaacagggtt

SEQ ID NO: 458387 - DNA, 483 bp, Homo Sapiens
  misc_feature (357)..(357): n is a, c, g, or t
  misc_feature (392)..(392): n is a, c, g, or t
  misc_feature (438)..(438): n is a, c, g, or t
  misc_feature (446)..(446): n is a, c, g, or t
  misc_feature (456)..(456): n is a, c, g, or t
gggttattagctgaatactaaaatcaatcgttcaatgtcccaggattttatcaattagatttaactgtaatttaagacagtcattagcttcctaaattcttaaactttcagagcttataaaagcaacacagcctggctgtgtaatttcaatcaccaagtagagtcaaaacgtgtttcaagagatcactaaaatgcctgctggaactgaggaagggaaaaaacaagataaaaacaaacactagcaaaaccgataccctagtcacctaataagcttttaggacaacagatctccctccagattcttgcaaggtttcttctttgacctggactccctttaggtataatatttatttgggngcccctactatcggggtttaggtggggtcatcggntttggttcctctatatggtccaaaggcacttcggtacccttccacnttttcccnctcttggganttcggggtggggggcccggtcaccaaa

SEQ ID NO: 458388 - DNA, 402 bp, Homo Sapiens
  misc_feature (367)..(367): n is a, c, g, or t
  misc_feature (374)..(374): n is a, c, g, or t
  misc_feature (391)..(391): n is a, c, g, or t
gtgagtaaatttaaatgcttttattaacaatcttcttacattacaaggataatatgacaaaaagaaagtttctgcgtacatattatgataaaccaacatagctctatttgtatccagtgttctaggtcccgtcacacaggtactataaagcgtagtctgcaaaataataacatcaagaggttttttttaaagaaagtattaacatattaatatgtatgtgataatagactcctaggtatttccccccatccccacttatttttcctttgtgattgacatggaaaatgggttcagcagcgtgggggggtgggagaagagagagacgggggctgaaataggacgggattcagactgctgggttcttccnggggggncaaaggtgaagggctgngggggtgcccc

SEQ ID NO: 458389 - DNA, 212 bp, Homo Sapiens
  misc_feature (174)..(174): n is a, c, g, or t
aacctacaggaaaatgaataattcactggcttttatatctgtttccatgccagttattaactgtgtgcctttggacaagttatttaaatgctatcttaatttcatctgtaaaatggattaatattacatcccacctacttcaatgagttgtgagaagtaaatgtattaacagcntattaagtgcttagaacaatgtttggcacaccaagcat

SEQ ID NO: 458390 - DNA, 294 bp, Homo Sapiens
  misc_feature (234)..(234): n is a, c, g, or t
  misc_feature (249)..(249): n is a, c, g, or t
ggctttttgttcacattaaatagttgactggcagttaggtgaggagtgggggcaagataaggaatgaattttagcatttgaggatcacccccacatgacttcatcttccgactgctcagtttacccagaggtatactgccacccccaatttagggagtaggagccaggctgttagtgtttcgagaccaaacagggaagggccagagagcctcttgctagtgctcctctctgcanttttacagtacggtntctcctgtttgctaaatcagttgtcactagactatctgttttcca

SEQ ID NO: 458391 - DNA, 265 bp, Homo Sapiens
  misc_feature (47)..(47): n is a, c, g, or t
  misc_feature (112)..(112): n is a, c, g, or t
atatttagtgtttcagatcttacgtatagtttaattcaaccctaaantcccctccagagctgaaaaattcatctcgattcagtcagttagcagatactcttatgcgttcctnttttttttccctatggaaatgttccctagagtcctctatccacctgctccaactaggactggctattttctaggttgctgcacaactgtaatcctgggtctccttttacctttctttgtgttaagattccatggtttccctggattaagatcc

SEQ ID NO: 458392 - DNA, 641 bp, Homo Sapiens
gcacaaatggtattccttttattataatgttttaaacttggcttaaagttcaaaatactatttccagataactttccactgttacatcaactaggcaactttgttatgtttatgttatatgtatcagttacttatcagcacagaattttaaccactctgctaaattttgagaaaacagctaaactcaatataaaatttggcctacagaattatagtggctatttgttactaaaaatattccaaaagaaatttacttattttactatattccatattctttaacttaaaatctgctgccactgtttagtaaaagtgggacaaataaaattctttaaaatatagaaaatacagttcctgttaagattttgcaaacaaaaaaattaataaataatacaatttgagtactctaaaacaatatactttgtagtctagattgtggttttggtcagtatgtctgacactatgaagatttacatcagttcagggaatgagttctaatactattaataaatagtcaatataaccaaacacctgacaggattccccatatgaatatttttaggaaagtatacaaataaaaagattaacaggtttttaaaatccttaagagcaagaaagaacaaaagtatctaaaacttata

SEQ ID NO: 458393 - DNA, 492 bp, Homo Sapiens
  misc_feature (44)..(96): n is a, c, g, or t
  misc_feature (169)..(169): n is a, c, g, or t
aaaaaccagcccccatgaaaacccatgtcttcttggtgaaaaannnnnnnnnnnnnnnnnnnnnnnnnnnnnnnnnnnnnnnnnnnnnnnnnnnnnggcactgcgcctttcccctaacagggctgaaagtgcccttgccagacaagggctgggagttattcctgtgctncccccctgccccagcagggtgccttggacatagtaacccctcaggaagtgtcagtccaatgaacataagggaaaggaagatgggaggagtgaagacagagggacagagaagtcaaagggtaaagcggtaaccatatttgggggatggccagtgaaaggtgatttaatgccaaccccatgagtaaatgggatctttactctgacccatgggacagccggtccaggtactcacctggtcaccctctacctgtggatcacaaatactgagagaaacatgagaacaacatgcatgattgtaccaggaatcatttattatcattgttg

SEQ ID NO: 458394 - DNA, 524 bp, Homo Sapiens
  misc_feature (20)..(20): n is a, c, g, or t
  misc_feature (31)..(31): n is a, c, g, or t
  misc_feature (37)..(37): n is a, c, g, or t
  misc_feature (59)..(59): n is a, c, g, or t
  misc_feature (273)..(376): n is a, c, g, or t
ttccaccgtatgaaatccangggagacacangacatnacagactgtaagcactctcccnaccccattatcacccccaaaattcaaaaacaagaaacgatgacctttgaccttacttggatggacttccatagttcctgcttggccaatctcaaatactctcatgtttcccaattatcttttgttatcagtaaaccaaattgttttttctcctaaagattcctgttacattattaatgatttgtccttgaagttttaggagaaaatgggcctgnnnnnnnnnnnnnnnnnnnnnnnnnnnnnnnnnnnnnnnnnnnnnnnnnnnnnnnnnnnnnnnnnnnnnnnnnnnnnnnnnnnnnnnnnnnnnnnnnnnnnnnncctctataaaaaaatagaattagccagctgtggtggtgcacacctgtagtcccagctacttggaaggctgaggtgggtggattgcttgaggctaggaggtccaggctgcagtgagttgtgacccggcctggacaaaagagcgaggccc

SEQ ID NO: 458395 - DNA, 260 bp, Homo Sapiens
  misc_feature (40)..(40): n is a, c, g, or t
aaatcactgacaccatagtctaactcacagatgtctaacncagcacaattgaaaaagtgctttttccctcctggtgtccaggaggtacattagctgcagacagatgcacagcactgattacatatttccgtagtgagcctctgagttaatagagcaaatgtgctgtgtctattaaacatctaaaacctaaataaccacctttcaaagaaagcacttcatctgtaagaaacagcttttgcagaaagtggcttaagatattc

SEQ ID NO: 458396 - DNA, 359 bp, Homo Sapiens
  misc_feature (26)..(26): n is a, c, g, or t
  misc_feature (49)..(49): n is a, c, g, or t
tgtgccttcaccgctccgtgttctcncatccccaggtcagacacctgcnccctctttgtcattctccaacatgataaatgctcttgcacaccaactaccagcatctctgtggtctgtgagccagtgtacatgactgtcctttgtcttggagaagaggcctgagggggacagtggatcccctccatgccatcttccgtgaaggcgcatcagtcagccgagatttcactccagcccgggtcggactgtggggcggggtgaccccacaaggagaaggctggggtgccgaatgggggtgagagggccatgagtggagcgggtgggccatgcagttgccttgagaccttgagcgggtcattcac

SEQ ID NO: 458397 - DNA, 340 bp, Homo Sapiens
  misc_feature (63)..(63): n is a, c, g, or t
  misc_feature (70)..(70): n is a, c, g, or t
  misc_feature (95)..(95): n is a, c, g, or t
  misc_feature (273)..(273): n is a, c, g, or t
  misc_feature (304)..(304): n is a, c, g, or t
  misc_feature (313)..(313): n is a, c, g, or t
ctcgataatcctgtccttttccacagtgacaggagtaggataggactggttgcttttattgcnagtgccnaactgcccataagaattggcgcccnaagcatacacttggccttcatctgttaatactaatgtgtgtgcgtagccacaggcgaccctctggacacggatgccttgcaaagctgccactctgcaaggggttggctggttgccactgttgccgagtccaagctgcccgtttccgttgtaaccccagacatagacctcccccgtgtnctacctaactgcccatgccagccacatctgncccacatgnctatggtcacaactactttattttgta

SEQ ID NO: 458398 - DNA, 671 bp, Homo Sapiens
  misc_feature (337)..(589): n is a, c, g, or t
tgaggcaccgtgcctggcgtcatcggtattatttaaatgaattatgttacgttcttttgtgctgtcttcaaaatctgttatatattttacacttacaccaaatctcaattaccatggtacatttttatctgaaatgcttgacctttattttgatttcataaaattcatagttggagaagtagattcacatatccaagttgttccaattatataatagttttccaaaaactgagatgggtgtccattttttatttaagtaaagatgcaggtctggttatgttgaccaagttgctgggttgttttgttttgttttgagacagagtctcacctttgtcannnnnnnnnnnnnnnnnnnnnnnnnnnnnnnnnnnnnnnnnnnnnnnnnnnnnnnnnnnnnnnnnnnnnnnnnnnnnnnnnnnnnnnnnnnnnnnnnnnnnnnnnnnnnnnnnnnnnnnnnnnnnnnnnnnnnnnnnnnnnnnnnnnnnnnnnnnnnnnnnnnnnnnnnnnnnnnnnnnnnnnnnnnnnnnnnnnnnnnnnnnnnnnnnnnnnnnnnnnnnnnnnnnnnnnnnnnnnnnnnnnnnnnnnnnnnacctggggctcagctgttcaattaaaaagtaaatacaacttaaaattctatgtttccattggcagtagtgcaacattgattt

SEQ ID NO: 458399 - DNA, 255 bp, Homo Sapiens
gagaaagtacagcatcagagcagagataagaaaggagaaaactaatgccttttaaactgagttttcatgtaaacaaatcagctgagatggctgagggaagctgagatctgttttcctaaggctgatagcctttgatcctgttgattcctaagccctcaaacacttgtggctacagagtatgccagggcttggagttaaatgggccaccctagaacaagaatgagatgactgagaaaaatggaggcatgctgtctc

SEQ ID NO: 458400 - DNA, 255 bp, Homo Sapiens
  misc_feature (208)..(208): n is a, c, g, or t
tagggaggaaaaagagcccttaactgatgaggccctaattttgacatgtgtagtgactggactggctttttactaacagtggtttttaggtcagggctctggctctggcgatgtggttgtttggggagaacatgaaccatgtttaatcttctgtggggtgtttgttcagttggtaaatgaggctgtcagctctggtccgcatgccagnaaatgcatctgatttttcacgtacagcattagtaacatatatattat

SEQ ID NO: 458401 - DNA, 240 bp, Homo Sapiens
  misc_feature (30)..(30): n is a, c, g, or t
ttttcatttttgaatgcaaatactttcagntattttgtaagagctcacttaatatttcatggttttacgtatttggtggacaattgctgcagaagaatgaagttttcttgtatcacatatcattgaagattgtaaagtactcacttctttttccatggttatgttttatgtaatgttgtagtacccagcatgtcaaaacacaattaagagcaggtgtaggctgggcgcggtggctcacac

SEQ ID NO: 458402 - DNA, 317 bp, Homo Sapiens
  misc_feature (198)..(206): n is a, c, g, or t
tgaagtctaaccaggaaaaaggaggatgtgcaaaagtatgtttgtgttattattttgtgctttgttttagcttaatacataatttatgtctacccctgtttctgctcttaaaatacactataggaaaatgctatctggacattctttaagcctttctgaaaagtacttgtaacagaagcctttccatttaatggtttnnnnnnnnngtaaatagaatttatggctgtcctgggcccaattaaatttccattcaaacttgtcctgactggaaaataaattgcctatggattctgaataaggggtttgcacacttggag

SEQ ID NO: 458403 - DNA, 477 bp, Homo Sapiens
  misc_feature (32)..(32): n is a, c, g, or t
  misc_feature (62)..(62): n is a, c, g, or t
gttttaaaaaatcctgcccaaaaatgttggcnggtaatgaaaatggtccaaagaagccctcntccccttccttagaatcccagctgtgttttagccattcccagtatttggtccttgccccatttggcatcagacatctctttgctggttaattgttcaagcaccctttaaacaagcaaccctagtgcctccactgggaagaggtcccagatctttgatacatgtcaggcatggaaacagagctgactgaccctcttctgctaacatactggtaaggatcagttttattgtctagagcaggattggcgtattatggcctgtaggctaaattcagctcactgttttcataaagttttattggaacacagccatgttccttcatttacaaattatctgtggctgtttttgtgctgtgatggcagaattgagcagttgtgacacagtatggcgtgctaaaccaaaatatttactgtgtag

SEQ ID NO: 458404 - DNA, 165 bp, Homo Sapiens
aaataattgcatcagttcattgacctcatcattaataagtgaagaatacatcagaaaataaaatattcactctccattagaaaattttgtaaaacaatgccatgaacaaattctttagtactcaatgtttctggacattctctttgataacaaaaaataaatttt

SEQ ID NO: 458405 - DNA, 520 bp, Homo Sapiens
  misc_feature (464)..(464): n is a, c, g, or t
acttttgaaaatcaagcaaattactatggggtttcttgggtcttcattattccatttatatatattttttatttcgaataataaatcaacctttatttttggcaataagattatcactgacgaaaatatgtacagttcaagaagtagaaataatattttccattagttaatttaggaaatattggaatagcatattataattatttatgaggttcccaatgttgtttttcacagaaaataaggtaaacattcaacttaaatcccccatgaagttttttcatgctcatactcataatcattatcacataatgtgcttattcaacaaactttgtatctgggatatatttttaacaataagtttgttagcattatttatttatctttagagaggaaaatatttgccatctgtttatttaccctttggaggccattaatacttgggccactccaccttggaattgccnttggggtgtatccaccatggggcttaaaattaaatttgggggtgtcgccgggtttt

SEQ ID NO: 458406 - DNA, 283 bp, Homo Sapiens
  misc_feature (98)..(98): n is a, c, g, or t
  misc_feature (148)..(148): n is a, c, g, or t
ggaagaaccacgtgattcaacctcttttgtttgcgctctaggaaattaaggctcataaagtgacataaggagtattccctttttttgtatcctctggnaagtaattttaataagattggagtgcattttcctttcaagcatcagtagnaattcaccagtaaaactgtctggagctgggtgcagtggcttacacctataatctcaactacttgagaggctcaagcaggaggatcacttgaggcaaggaattcaagaccagactgagcaacaagactccatctcc

SEQ ID NO: 458407 - DNA, 318 bp, Homo Sapiens
  misc_feature (207)..(207): n is a, c, g, or t
  misc_feature (249)..(249): n is a, c, g, or t
  misc_feature (276)..(276): n is a, c, g, or t
  misc_feature (284)..(284): n is a, c, g, or t
  misc_feature (293)..(293): n is a, c, g, or t
  misc_feature (304)..(304): n is a, c, g, or t
caaaagtgttgggattacaggtgcaaaccaccatgcctgggcaagtaacatatcttttaaataatgagttcaaagaagaaactacaataaaaatttaaatatttttgaactgaataataataaaaatgttatatatcaaaacttgtgggatacagaaagcagtgctttgaaggaaatttactgccttaaatgtttttaaagacaagnaaaacatggctgaaaattaataaactaaacacacaactttanggtataacagactaaactcgaagaaantggaaggnaggggatanttataagagcngaactagagataga

SEQ ID NO: 458408 - DNA, 468 bp, Homo Sapiens
gtaacttggaactttatttttaaagtattctgaaaattttccaagaattttaaccaccacctacttcccttaaacacacacacatttttatcttacaattataacccctattgcagtacaaaacaagaaacaataattctaagttagccagccaatcaaactacttcagtaaatgatcatactacagcctgggatcactcaaacaaaaaattcttctagttctctttaaagatatttatcgtttattttttcatgaaaccaaagtaattgattcaacaatactaacagttctaggcatggcaacaaaccatctactatcctaatgtttaatcttcttaacatgtatattttcattcctataaagtttccataagaagcttgcaatggacaataaaggtaaataagtacagttgtcccttgggtatccatgggggtattggttcctgggaccggtccccccaacccaca

SEQ ID NO: 458409 - DNA, 721 bp, Homo Sapiens
  misc_feature (47)..(47): n is a, c, g, or t
atgtctgaaatattcattaaaaagtttattaaacctgacagcctctncttaatgtttcacaagcaagacaaacttttatttttgtttcttctttaattggcatatggagcttgggaatattagtaggagaacaaggagactatgtgaggcatataaaaggcaccacactggaaagaatccaagagaatgaaaaatcacttctttaaataatatttagacacagactttgtatctatattagatataaatcatgtctaaatacaaatctaaataatatttacaaataattattacacaaaacctatgtaacacacactttatagtacacaactgtaaatagggatacaaatctccactgctgtgggttcaaaacagcaggcttggaccactcaaaaatgacatctgagaggaattaatagtcatcctgaaagttctgcagacagacgctagcggacaaaccactttgacacttttcatgctatcattcagaaaaatagaatacatgtaataccaaattaggaacactgataatgaacatatatgcaaattatatcttccaatgatatatctgtgatatatgaaaataattttgaagaaataagcttaaaatataatttacggaattccagaaaactttttcttccttcactacatcctcaggaataaggcaattgagtggataacagtttgaatcttacttcaaagtgtagctacaaagtaa

SEQ ID NO: 458410 - DNA, 358 bp, Homo Sapiens
  misc_feature (321)..(321): n is a, c, g, or t
  misc_feature (336)..(336): n is a, c, g, or t
caggtgtgtgagcacaggtcatactgtgtcaagtggggcctggttacagctgcagaagttctgagagtcagctggctttggggacactctgctttgagccagacgcacgccaggcctcagcccaggggttcatctatggggcccagcaggggctcattggaggggatcgtataaaggtccctttccctggggacttcccctcatcctccttagcctacttccaccagtctctggcttatggggcagggccaagacacaaggctgggcctactcactcctctcccagctcctgtcctcaatggcctcccatggggcagagcngcctctcaggctcantcacgccctgaccctcgtgcca

SEQ ID NO: 458411 - DNA, 428 bp, Homo Sapiens
  misc_feature (327)..(355): n is a, c, g, or t
aacagccaacatttactgggctcttaacttggtgcccggcacacgctaaacatttcacatgcatttacttctcacaactcaaagaagtgggtgctgctatctccattttacagatgtgtcagctaagcataagataattacaaagaacatccaaggtcacacagttccccttcaacctccttcccgaccacctgtaactaggcctcagtcccacccttgcctctcaggatccaccccttctttgtagaatatagctgaacaccagctcccctgcttctccccacccaccagaggcggaagggcctacaacccgctcctccagcccannnnnnnnnnnnnnnnnnnnnnnnnnnnngagatagagtctcactctgttgcccaggctggagagcaagaccctgtctctaaaaaaataagaagggcatcag

SEQ ID NO: 458412 - DNA, 361 bp, Homo Sapiens
  misc_feature (256)..(256): n is a, c, g, or t
ggttgcagtgaagccgatattgcaccattgcagtccagcctaggtgagtctcactctgacctatgagagcggagaacactgagatatcttgcccatggcctgccctgtggttagctgtcgttttttccttgacacttgtaggctcctcttcatgtttacataacctcagtgggaaaacgccagcgaagagagacactcagaatggacgatctaaagttccttccagcttccaaattctgggctggttttcagaganccagggctcgggatgcgaatgtccctgtctacgatggggctgccgttacagccttcctcccggggctctggagacgcgccagctctttgacacctctcctgcgct

SEQ ID NO: 458413 - DNA, 446 bp, Homo Sapiens
  misc_feature (419)..(419): n is a, c, g, or t
ttttttttgtccagaattttggtttttaatacctcttgttggataaaaggacattgtttttcattagcttgtcttcaaaagacagagaaataagataaattaccttaaagaaattaaatagaaaattaagggaacatgtaccaaggtggttttagactctcctcagtttctttgaaaaaaggagggcttaatcttactaagtgtccttggtgacatttatagatgttgtctctgtgctctttaatgaggaacttgcagtcatttagttatagactttaagtctgggcagaacgtaaatacctcccgatgaagtagtttcaccttcagtaggtattctggaaatattttcttaaaattctgtatttggggggaaaaatatactttcctaaaatattaaactgggagtatggacttctgtncagggttggagggcccttctgggcttt

SEQ ID NO: 458414 - DNA, 533 bp, Homo Sapiens
tatccggaagtgtgtggctgtaatattgacaaatagaacttatgagagtgaactgccatctgtttcacaaaacgcacccttctaagagaatacccagtcttagtgcatttagtacatagtcacaacattgaaatgacgtgagaatcaatacaaaatatttattttttttcaaaccacagaattcttaaccccagagccacacaataaagttctcagaattgtaagccattaacatttttctaaacaatgcagtccagagatgaagataatttccaaccagcagggatgcaatatatagtaggttcccctatgaatgaagctcaaatttagcatttcctttaattctcccacagccactccatcaacagaagcagaaacagtacacatattcatgcccctcggctctgaaaagaggttcatggtgggtcataggtgggtcttggcccgtggaggaaggaaggtgtccaggactttagttaatcaacagtggggacagagaggaatgatttcccttggaaaacaacagggttcct

SEQ ID NO: 458415 - DNA, 144 bp, Homo Sapiens
ctctagaagccagagataagagagttcatccatcactagggcaagaacaggttttccttcagaccagaccaaaatttagaagttatgtgggcctttggtaatgttgtcagaattgccctagctccttatcaggttctatctcat

SEQ ID NO: 458416 - DNA, 463 bp, Homo Sapiens
  misc_feature (389)..(389): n is a, c, g, or t
  misc_feature (395)..(395): n is a, c, g, or t
  misc_feature (407)..(407): n is a, c, g, or t
  misc_feature (436)..(436): n is a, c, g, or t
ctgtgttcctgtttttgtaccagcaccatgctgttttggttactgtagcactgtagtatagtttgaggcatcaggtaacacagtgcctccagcactgttcttggtgcttaggactgctttggctattcaggctcttttttggttccatatgaattttaaaatagttttttttctagttctgtgaagagtgtcattggtagtttgatgggaatagcactgaatctgtaaattgcgttgggcagtatgccatttttaataatatcggtccttcccgtccatgagcatgggaagtttttccatttgtttgtgtcttctctggatttctttgaggcagtgttttgtaattctcattgtagaggatctttcacctccctgattaggctgtatcntagggnatttttatcccnttttctgggcaattgtggaagggaattgncccttccggattggccccggggttggc

SEQ ID NO: 458417 - DNA, 513 bp, Homo Sapiens
  misc_feature (467)..(467): n is a, c, g, or t
  misc_feature (498)..(498): n is a, c, g, or t
tgtggttcccctccttggagtctaaagatccaaatgccagggagtggttctcccatatgtgacaggaaggcagagcagcagcgcatttcactccactcccagattgtgctgagaggcaggagggctggagagagggagcctgtgtgtgctgaagtacagaggatcagctgtaaatgcccagcctttggtggcaacagttcgggggtgtactgctggcagccacgtaacccacacactttaatgcactcatttgagtgctgcagaccccaccgcaggttaaggcacacagtgatgaatccctgcctttgccttctgtatcggctatttaggagccggggctgggacaactttgtctccgtggggagacagggagcctcttaggggagcctctgccccactgcctgcagctttccatgctgttagcccagtttcctgccagggtttagcttcaggaagccattcccctngacccttccaacaggttgcttcaggtgaggnttccagccaggggtt

SEQ ID NO: 458418 - DNA, 505 bp, Homo Sapiens
  misc_feature (46)..(46): n is a, c, g, or t
  misc_feature (53)..(53): n is a, c, g, or t
  misc_feature (87)..(87): n is a, c, g, or t
  misc_feature (95)..(95): n is a, c, g, or t
ggttgtggtccgcaacaaaccctctggtttccaactaactctggangcctgangtgggaggatccacttgaaccctggaaatttgangcccacantgaaacccatgaatcacggcaattgcactgccagcctgggggacagggattctgactcagaaagaaagaaagtgtgaataggacctcagctggcgagcctacaggagaaagagatgagaccatgtgcagaggtgcaaaggtgttcaaggacatggcaagtctgcagcctgacacaggattggtagccagctcacatctggaggaccccctgctggacactaaggagggatctggcatcctgaaggcaaaggggaaacatgagctgcttaacgtggcttggttcctatgaactcatattgagcatttagtcagctaaaatctttcagctgtgtcacgggtttgttaaaccaaagtccagaactttccatttattccacttaaatttctggatcctatttctggcatgcact

SEQ ID NO: 458419 - DNA, 239 bp, Homo Sapiens
  misc_feature (44)..(44): n is a, c, g, or t
  misc_feature (186)..(186): n is a, c, g, or t
aatctatatgataatctgaactgacgcaggaaaagcatttaacnaaattcaataccctttcacaataaagcactcaacaaagtgggcataaaaggaaattacctcaacataataagggccatgtgagaaaagcacacagctaatatattcaatggtgagactgaaagctttcctgtaagatcaggnacaagactatgcctgcttttgctacttctattcaacacagtattggaagttct

SEQ ID NO: 458420 - DNA, 227 bp, Homo Sapiens
aactgtttctaaaaagcttatttattcatttccataactattcataggatacagtcatgcaaataacagctttttcatatagggcttgaaaatattacaattatattgcacaatattgcacaacaaatgtacatttgtacatatacacaatatattacatttttacattgtatacatataattgtattataacaatgttacatttatatacaatacattacaactta

SEQ ID NO: 458421 - DNA, 484 bp, Homo Sapiens
  misc_feature (431)..(431): n is a, c, g, or t
  misc_feature (453)..(453): n is a, c, g, or t
tttgtaaaactgaatcaacttttagcaagaattaatttatgtagttttaaatgttaaattgtgtatatttaacagaaaatacttatctggcacctcagcagttttaatgttaccttatacttttaacagtatgatttatattgaatacttagatgttttcataagattttatcaaatttgataatgtaatgataaaatgtttttttaaatgtgaactatttaacatataaatggggacacaaaacctgaattgtgatttctacataatgtgataattagggttcaaattatgactcatcatttaattgattataaatgagtatatttctggaactctttattgcctccatttttacaatcataatataggcaataatttctatttttatttcatgggactgtggggtggaggttatttatcctggacaccnttatccttggtttccggggggnagggggtgtattttttgtcggttagggttaa

SEQ ID NO: 458422 - DNA, 532 bp, Homo Sapiens
  misc_feature (20)..(20): n is a, c, g, or t
  misc_feature (64)..(64): n is a, c, g, or t
  misc_feature (122)..(122): n is a, c, g, or t
  misc_feature (192)..(192): n is a, c, g, or t
cttaatccaattacattggncgacggctgtttcctaaaacccctaagggttgccccaaaatgcnaaacctccggtatccaatggggttttaattggcagaggctgcttttatttaaaaaaanccgacagtataactgtcataatttatggaaggcactgccttccgataattatattcctattaaaaaaacnccatttatagtgaactctgtcactgataaataaacaataaatatctcagtgccaaaaggacagaaagctctcccctaagattaacactttggccaaaatttggcagcatattattctttaaagtctgacaaactgagtctgcaactaaacacctgaaactggttctctttcaatgtgctttggaagaaacaaaaataacaaagaactaaatggaggcttatgggggaagggacagaggaaaaggaaatatactaagtctttggcttctggtcccctcttttcataaatgacactgaggttaacatattaaggccttattcctgcaatcaacagttgaacc

SEQ ID NO: 458423 - DNA, 501 bp, Homo Sapiens
aaagtcaatggtggcctaaaactcggaaataaggctgacagttcgcagtgagggaaaaacgtgtaaacctttgggcccacgtagctgccccctttttcaccctgcccagcagaaaacaaagtgaacgctcttcttttctctgtaagctggaaattaccaagggcatacttgagcctaccaggccccgaggaccccatttcaggcccaaatgtgccagttttacccttgctgagagtgctcactgcagtcttcatcaaccaacttctaagtgggtgtcaatgaggagcagcctcacgctttttctgcagagagaaggtagagagagatgagggctttcggtgtggccctgtgaccccaggctactatcccaggctatggcacgtcttcgccagaaaagcagcgaccgagttatttccctgttgacaatgcccagcagccgggccctgttattataggggttattagaggggtcgccttcttctctaatggttcctgttcagg

SEQ ID NO: 458424 - DNA, 455 bp, Homo Sapiens
  misc_feature (79)..(79): n is a, c, g, or t
ccttaaaacaccaaccagcttccaaggtccggaacacgaacacttttcctgtgggtttccagttctttggttaactaanttttgggggaagttttgggtccttaaggtggactaagcatctgatgggacaaaatcttccatcatcaagttttttccatcaaaatctgagaaatcttcatctgaatccaaatccattgtgaattttgtttttgttgctgctctccgtggctctgtttctcgtgaagggacatcaaaattactttcgtcactgctcctatctgattctgaatcagaccagggatttctcttctttccttttttgattggcttaaatgccaatgtagtttgtttctttgtctttgtacctggttctcttttctgtttcttttctaatctttgttttaggccttctagttccacaccatcttcttgagggcttccttcagtattttcat

SEQ ID NO: 458425 - DNA, 541 bp, Homo Sapiens
caggagcgaataccaacctttatttgcacttgggttccagttcaaagccaccttagacagtgtggcaaagtgggaaaaagcacagatcctgggaccaaggttcagattccatctcaagcgagcatatgaactgtgtgacaacaggcagacagtacctctgtgtctatgagaaagcggggagagcaacaccccagcttctagcagctctacagctgcctggacctgcaggccctcctaggcccacttcctccccagcacagtgtgtgttcccgggcgtgtgtggctctgggtccagctctgttcagggtgggactccaggtgaattactgaacctctgaggtgtacccccaaccccaaactttcaccaaaagcaataaagaggaactctagaactggagccaggactaagtgagaaaaactgcttataagtgcttaataaatactagttatttacaacttttgctcaagccgagggcagaggcctttgtacgcagctgccgaactctgactctagttctgcggaagaaaaggatgcagtatt

SEQ ID NO: 458426 - DNA, 350 bp, Homo Sapiens
  misc_feature (290)..(290): n is a, c, g, or t
  misc_feature (317)..(317): n is a, c, g, or t
  misc_feature (336)..(336): n is a, c, g, or t
atggcatgagaaaagtactttattcgtgcataatttttcagttccattcaaaattacagtacaaaaaaattcccttgcttgcagagtttttgttactttttacttaaatatttagagttaagaaaaaaatcaaatttaaaatcactattgatggaagcttatattccttatgaatatatacatgtatgcatatatacatctctgtatgaatcactcaaagcaattttaaacatcattcttttttgtatttaaaattgcccttttaaacatttgggaggttcccgggggtnggagggctttaatggggatttttcccnggggtaaatttcttggggnttggaaattgttcc

SEQ ID NO: 458427 - DNA, 488 bp, Homo Sapiens
  misc_feature (419)..(419): n is a, c, g, or t
  misc_feature (425)..(425): n is a, c, g, or t
  misc_feature (460)..(460): n is a, c, g, or t
cactggtacaaaatctttatgtaagtataaaataaataatatgaatattaattaataacaacaacacaacagcggcaacaatattaataataacaagagctctcccattggcccacggcttcctccagcttttctcttctgcttcacacaactttgtgagatagctgttttcatagctgggaaaactgaggcccagagaggtcggcacactggcctgaggtcacacagcaagtctgtagggctgggagccgagggaagggcaaaggggtcccccggatccagccagggcagagagggggatttcaggtttaggtccagaggagagtgcctccccacagtctggcagtcattagcagggtgatggtgaggctgagatggggcagggccgggcttaggagcagccccacttgcggtacttngacatncagggtcttgggttggttacagccactttttagtnccagcaggagacattcattttggttcat

SEQ ID NO: 458428 - DNA, 605 bp, Homo Sapiens
  misc_feature (79)..(79): n is a, c, g, or t
  misc_feature (188)..(188): n is a, c, g, or t
cctaccaacatgcaaaaaccaaaagggctgcagccttacaaacttgaccttataatttaggtgcatgtggtatgagganttctgaggcatttttacacaagctggatgaaggatgagatgtctccagctccccctcttctccgcccacattcctgaccatccaacacactttagcaaggaaaagggantagaggaaacaaaactaggaggaaaagccagaagagaaactccctcctagattcatgctgtgctcagaaactggggtaggagaatggaagtctcccaggaagagctgttgatcccttcctgctctggaagatgcacttctatgactgcccaccagcctcctcctctgggtgtaaccgaacaccatggtggagccacacttcagagaaacacactgcttgcttttaacgttaaacacatcctagcctgtggtttgtgagccacatatggtcctgggagccccacgaaataatgatgaaagaaaatcgttgaaatctggacacagaagctctctgaagctatacttttcctcagtgactctgcaaattgtattagctgtccaatattcactgagcattgccatatgcccagtatcatat

SEQ ID NO: 458429 - DNA, 521 bp, Homo Sapiens
  misc_feature (15)..(15): n is a, c, g, or t
  misc_feature (23)..(23): n is a, c, g, or t
  misc_feature (43)..(43): n is a, c, g, or t
  misc_feature (72)..(72): n is a, c, g, or t
  misc_feature (77)..(77): n is a, c, g, or t
  misc_feature (100)..(100): n is a, c, g, or t
  misc_feature (131)..(131): n is a, c, g, or t
atgttctcccagctncccccctncttttccggcccccaaaatnccttggacccatcccaaacacacttttangcaanggaaaaagggaataagaggaaanacaaaaactaggaaggaaaaagcaggaaagnaggaaactccctcctagattccatgctgtgcctcaggaaactggggtaggagaaatggaagtctccccaggaagagctgttgatcccttcctgctctggaagatgcacttcctatgactgccccaccagcctcctcctctgggtgtaaccgaacaccatggtggagccacacttcagagaaacacactgcttgcttttaacgttaaacacatcctagcctgtggtttgtgagccacatatggtcctgggagccccacgaaataatgatgaaagaaaatcgttgaaatctggacacagaagctctctgaagctatacttttcctcagtgactctgcaaattgtattagctgtccaatattcactgagcattgccatatgcccagtatcata

SEQ ID NO: 458430 - DNA, 488 bp, Homo Sapiens
  misc_feature (111)..(245): n is a, c, g, or t
  misc_feature (445)..(445): n is a, c, g, or t
  misc_feature (459)..(459): n is a, c, g, or t
gtgtttatgcattcatttattgattgcgacagagcaagaccatccctactatcaccattgtcatcatcaccatcaccatttctatcataatcaccaccatcatcctcctcnnnnnnnnnnnnnnnnnnnnnnnnnnnnnnnnnnnnnnnnnnnnnnnnnnnnnnnnnnnnnnnnnnnnnnnnnnnnnnnnnnnnnnnnnnnnnnnnnnnnnnnnnnnnnnnnnnnnnnnnnnnnnnnnnnnnnnncacccaggctaatgttttgtatttttagtagagggcggggtttctccatgttgggccagggctgatctcgaactcctgacctcagggtgatccaccttttttcaggcgtcccgaaggtgctgggaatttacagggtgtggaggccactgtgcttgggtctattttttaaagtaggattcaaaatgtggcccacatgaaantgtcacaaatttcntttccctcaacccagggggtggccccagt

SEQ ID NO: 458431 - DNA, 437 bp, Homo Sapiens
gtttttctcaagtgactttgaaggtaatgcttttgcttaccatatttccaagatggccacgtctgtgcccttaagcaaatatttaatctctgacctgattttccctcatctgtgattacatcacagtttgaggatcatctgtgataacgtgaacattctgtgtatatagtaggtagtcaacagatgtaccctgtgaggctcatcttttattattctttgccacattctttatagtgcctttagcacaaataagatccagcatcttaaacagatttgcaatgaggaaatattttgttttagggtaaaaatgttgtacatcagctctcaggtaaccctaggaggacttatattaatggggtggcaacaaggaaaactgggctctgccaaaaggaatgtggattttgtggaccaatgtggagggtgggagggagggtagg

SEQ ID NO: 458432 - DNA, 425 bp, Homo Sapiens
  misc_feature (35)..(35): n is a, c, g, or t
  misc_feature (392)..(392): n is a, c, g, or t
gtttttctcaagtgactttgaaggtaatgcttttncttaccatatttcaagatggccacgtctgtgcccttaagcaaatatttaatctctgacctgattttcctcatctgtgattacatcacagtttgaggatcatctgtgataacgtgaacattctgtgtatatagtaggtagtcaacagatgtaccctgtgaggctcatctgtttattattctttgccacattctttatagtgcctttggcacaaataggatccggcatcttaaccagatttgcaatgagaaatattttgttttagggtaaaactgttgtacatcagctctcagtaaccctaggaagacttattataattggtgcaacaaggagaactgggctctgcataaagggatgtngatttgtgacaaatgtgaagggtgggggagggt

SEQ ID NO: 458433 - DNA, 446 bp, Homo Sapiens
  misc_feature (66)..(66): n is a, c, g, or t
  misc_feature (75)..(75): n is a, c, g, or t
  misc_feature (87)..(87): n is a, c, g, or t
aacgaaatgacggataaggccaacgttcctgtggatgcccagagccggggcccaaatgtgggtcancatccccangctcaagaggancggccccagtttgtctgaagaacactgaaagtcccaagaggccctggggaggggcttctgaccagcactcctcctgctctcattccaacacacacaaagggaatgtcctggtcccagggagccagggctctcttgctgccatgtgaataattccctgtagcagccactgctagacagcaagcttgggaagccttcttatgcagaaatcaaagtcatttttataaaaagtgtcacagagtcccttatgaagacagctggacagagcaggagccgacccttccctgactgcccagttcagtgagcccggtaaaatatctgccgtcagcagcctgccatgaggtgcagtgaggaccttctac

SEQ ID NO: 458434 - DNA, 504 bp, Homo Sapiens
  misc_feature (50)..(50): n is a, c, g, or t
  misc_feature (106)..(106): n is a, c, g, or t
  misc_feature (116)..(116): n is a, c, g, or t
  misc_feature (157)..(157): n is a, c, g, or t
aattttccttagtccttgggaccatgtgctttaagggaaaaggaataccnggtaacttccctatatgaccatcccagtgccctgaaaggggtgcttacacccttcnaaaaaagggngagtcccagcctatccaaagggcagtaacacataatgagangaaactcagagttattgcctttcatactgctttccctctgctgttggcccacccttcttgactgcaaagccagaaaataaactagatggtggttttggacaattgtacacaggaacagaatctctaataacctataatttttagtacttaattatgtgatgttttattctaggaaataagaaacagatgacatcattgatgtatctttctttcatcttcagaatttttgcatcttttcagaaaatgacaaattactatttttctgttgcactcagcaattgtgactatacttaacaaaattcttgtagtctgtagagatatcaataaaattgtatatgtttgtacat

SEQ ID NO: 458435 - DNA, 392 bp, Homo Sapiens
  misc_feature (29)..(29): n is a, c, g, or t
  misc_feature (47)..(47): n is a, c, g, or t
aaatgggatcccccaccaatggccagcantactatttgaaaaataanttggccagaaagggttccattccacaagctgaacatttttaaatccagaaaaccttaaggaaacccggaaacatgcctctttgtgtggctgaggcaagagtattcccaaacagaggaaagagcaagtgcagatgccctaaggcaaagcctgcttggcatattcaggggagagcaaagatgcgtggctggagtgggttggagggagtggtggcgatagaaatgaagtcaggtggcgggagggggaagcagatcttacagggcctaggcagcctttgcagtgttgctctttactctgagtgtggtgagaagccactggaagatcctgaacagagcagtgacatcatc

SEQ ID NO: 458436 - DNA, 427 bp, Homo Sapiens
  misc_feature (299)..(299): n is a, c, g, or t
  misc_feature (389)..(389): n is a, c, g, or t
  misc_feature (407)..(407): n is a, c, g, or t
ttttttggacctcaacatgctaatcttgttacatatgaatattattaagctattaagaattttgaaattaaccacatcagtgatttattcagtaagagcagttacgagaagggaatggatagtgctggctgggagccacacttacctggggtgaggccccttctccaccattcatgagtttggtagtcacaagtgagttacttaaatttttggaacctgtatccacatctataagggtgacttaatcatgtttacctgacagagttattgggaataggataatgcacggaaaagtaccnggcatataggtagggctctatggttactacaatgattactattggataataaacaatttgtctgaggattatatttggcaaatcgggccnaaattaataacttagggnaatactccaaaccatttctg

SEQ ID NO: 458437 - DNA, 235 bp, Homo Sapiens
  misc_feature (103)..(103): n is a, c, g, or t
taaagaacaccccaaacttgcaggttcccctctctctgcaaggacaggtgcaggtatcccatcaacggccccacccatccttcttgaacatacccataaaaanacaattattccagggccctcaaatctcattctacttctaaatccaaatggcgaattgcaaaggctgtggatatctgcatgaacagaagggcatcattaccttctctttcttatcttttgacttctttctttc

SEQ ID NO: 458438 - DNA, 285 bp, Homo Sapiens
aggctgtttgggtagtttttcctcctcacttagcagtatatcacaactttccaagtgattaaatgttaaagtcatttttacagccttggcaacgtagggagacctcgtctctacaaaataaaaacaagcaaaaatctagctgggcattgcggcatgtgctacgggcccagttgcatgggaggcagaggtgagaggattgcttaggcccaggagctcgaggctgcagtgagccatggttgtgtcacacttcactccagcttgggcaacagaggaagaccttgtctc

SEQ ID NO: 458439 - DNA, 523 bp, Homo Sapiens
aacttaccctaggttaaaaagaccccttaagtccccacaaaactgtaattttttaaacaccccggctaaaactgtgccttcctagatgttaatatttttgccttatactagttgagctttataatcaaaagctaatgtcctactcaaaggaaaatacatgtcctattaagcagatggtccagtggtatgtagaacccttactggcactgtgttttcctggcagtggaagattcctagtacagaaaattgtctcttgcctaaaaatattagaagtacccaaggactattgcataagagaaagtttgtagcaattttttgctaggcagatggtacacttgaagacaacaatgacttcattcaccaaggaaaacactacttagcaaagatttacaatatcctaaacacaaacacatatgtggctgaggtggaataagcagcacgttgtcccaaaaacacacttaaggctttactttagcagcatcagggtaacctatcaaagaggcgctgttaatggtcagttcat

SEQ ID NO: 458440 - DNA, 477 bp, Homo Sapiens
  misc_feature (401)..(401): n is a, c, g, or t
  misc_feature (444)..(444): n is a, c, g, or t
  misc_feature (455)..(455): n is a, c, g, or t
  misc_feature (464)..(464): n is a, c, g, or t
caggcgcagtctttttatttgcaatgactcctgcaggctggcaatctctccgggagcaccctccacccggagagggagcaccaagatgaccaccctcttcctcacagggtatggcatccttgagggaaccttgttgcgacactttgccaaaggtttaccctacctttgtttttatccatgtaactttgatttcctattaaatccatcctattaaagccactctcctatttcccataagattttttggtttcgtttctgtaccccatccaaattattttcttacccggggatgcctcaacctaaaagcaacatttagggctgtctcaggggttctggtaaacttggggctccattccatcaatggtcctacggggaaggtaacctccaggcaggcactctantggactgggggtatgttttcccatggtttattggaggtctaanttatcaacctnacatgtgancctgggtagggag

SEQ ID NO: 458441 - DNA, 413 bp, Homo Sapiens
  misc_feature (347)..(347): n is a, c, g, or t
  misc_feature (380)..(380): n is a, c, g, or t
  misc_feature (388)..(388): n is a, c, g, or t
gacttgggttaacttaggggctgcaaatctttttcttctatcaaggtcacttaatatggaatgtttttgtcagactgtcctttgttggaatactttagctgttcagctactttgactcctaggagagaatttagttaaggttcaaagtaattaactggctttgcattggttgagtcccacaccattattcacttagtagtcatataaatgtttttatttaaacttctctctcttcaatgctgagaataaggctttaaattactgattcacctttaaaggaatgttgtgagaattgatgtaatttctgtttctgtttccatctaaacttctttattaaaagggggggntagtttttttgttttggggggtaggcaccctanttatcccngtaacccaaccacccctaacccatg

SEQ ID NO: 458442 - DNA, 547 bp, Homo Sapiens
  misc_feature (316)..(316): n is a, c, g, or t
  misc_feature (442)..(464): n is a, c, g, or t
  misc_feature (489)..(489): n is a, c, g, or t
  misc_feature (516)..(516): n is a, c, g, or t
  misc_feature (521)..(521): n is a, c, g, or t
  misc_feature (534)..(534): n is a, c, g, or t
ggaacttgcctgtcaagacagttctttttgtaaacctaagaacctgagagcagggagattccagctgctaggagttaaataattcctttggcacttagcgtcctatcaaaacagagaagcaaaagaaaacaatgagagcaacaccaccacctcaaacaggtgccctgtgctgggccgtgtcctgagagtgcataggagagacatcgagacatccacaagataatgcccatttcacttgatcttcttcatgtctgggggaaaccaagacacaggaaggttaatgaatgacctgcctgagggtctcagatagtcatgnggcagaatccctttcaagcctcaggagtttggctccggagtccagggccttccacggcttgctgcacagcaccagctttccttgttcagcttcaggaacttctggacctcccttgccagggtgctnnnnnnnnnnnnnnnnnnnnnnnacagcggaccctgggtccttgcctnttaggaggcgttacttggagggcttgnattcnttaagttccagtnttttggcaggttc

SEQ ID NO: 458443 - DNA, 457 bp, Homo Sapiens
ctctgtaatactcatctttattccacaatagacgcaaaacacaactgttaggattattttatggaggaagggacgacccctaaaggcaaaggccacacagcccacaatcatccactgcaggcctgaggccagacgcctgcggggaggtagacctcagcctgcctgggaagcaagcacgctggccaccccgaaagtctcccagggaggaaggggggctgttcaggaaaaatagccgggctcctctgaggccgagacgaaccagggctgacatcacctgaggttcaatgcctcgctccaggaggagacacccaaggcgctgtggagagaaggcgagggactcccatcagggtgccctgaagaaccaccacagagctgccgacacgcacacgccaagcacacagcactggcacaggctcctcatgacgttcccctgaccaggaagcccagatcctcatct

SEQ ID NO: 458444 - DNA, 475 bp, Homo Sapiens
  misc_feature (56)..(56): n is a, c, g, or t
  misc_feature (78)..(78): n is a, c, g, or t
  misc_feature (93)..(93): n is a, c, g, or t
  misc_feature (257)..(270): n is a, c, g, or t
gaaatggccggggaaccacaacacctgtgacctttgaaagaatatgccgggggtantagccagaaaaaaagaccctangcccttggatccacnaaataattatacacattaacacctcctagttaagtgtgcccccattaaaaaaaccccatttaaactgtaaagccagttccctaattgcctaagcctccctttaaaaatcctttaggagccttagatttacccataagactacccacaagatcgggaaacatttnnnnnnnnnnnnnngggcttgcggggatgggtcagacatttttaaccagtcaggtgtcttctgagaccggtgtatccactgaggtagacagatttgccatattcactttaagaatgtccaataatattcacttattccactaccaaactgtttacagttctgaaattgtaatgaatgatttgatgagagatgttaacttttgcttactttctataaatg

SEQ ID NO: 458445 - DNA, 482 bp, Homo Sapiens
  misc_feature (298)..(335): n is a, c, g, or t
  misc_feature (359)..(417): n is a, c, g, or t
  misc_feature (446)..(446): n is a, c, g, or t
tttttctttgtatttccaaaaagtactttattggtaaagatattaaaattatccagcaaccatcctttggtataaaaagttactatggtcactaatagtatgacagcctttccaccgagagtctgaggactgcatgcctcaatgaagcagagctattttgattaatgtatgccaacaaaaaagtaacaaaaactggatggatgtatgactagggaaatgatactgatcccatttgagaaggaaaattgatttccatcacatgaagagagcagtaaaatgatgaccaaatcctctcaannnnnnnnnnnnnnnnnnnnnnnnnnnnnnnnnnnnnngaggacagagtctcggctctgtannnnnnnnnnnnnnnnnnnnnnnnnnnnnnnnnnnnnnnnnnnnnnnnnnnnnnnnnnnggtccccggtttcaagcattctcccgccntcaggtttcccagtagctgggggttacagggctgtg

SEQ ID NO: 458446 - DNA, 685 bp, Homo Sapiens
gtaagtcatgagtgccatttattattacgcaaagatatatatcatgataacagaaaataaatcactatggtttggcatggaacacaactgtatgttatacactacaagcctgtaggggttgggagggtgcaatgagttaaacaaccttgggttcaaatcccagctctaccacttaggtaggacttagggtaaactatttactttctctgagctatattactcttacttataaaatgatggaaacttaagtttcctggcacagggtgattaaatataaacaatatactaaacattaggtaaaaacacattccttgttcacatataatatttaaacattaattttcttctttcccttttaaatgttcagggatatgcagtgagttaagtgtgtattttaatgtgtgccaactcaagagtatagtcatagtatataagtaaaaatgcagaatttaaaatgtgtataaaatatgcccttgattatgttgcaatatttatagaatagaaagtaaatatctttgtatttttctatttcaaaattatttgaatgtattcctttaatcaacaaaattaataaatagtatagaaaaatatcaacttcaatgcagattctgaacatgatccaacctgatcttgtacaagctaggagtcagagtaggaatggggaaagaaagggggcatgtatgca

SEQ ID NO: 458447 - DNA, 527 bp, Homo Sapiens
  misc_feature (29)..(29): n is a, c, g, or t
  misc_feature (34)..(34): n is a, c, g, or t
  misc_feature (43)..(43): n is a, c, g, or t
  misc_feature (90)..(90): n is a, c, g, or t
aggtttcctttacaacaacaaacccagantaaanacgaggtanttgggaccgaagaaaaaagaagaatggagcaagcaacattcaagatnatgctttaatcaagctttgatttcatgtttaatctaaaaaaccgaagaagcaaacaaggaacaagaatgcgtgaggcgcttttgcctccccccgaacgggctccctggtggcatctcccaaaactcctttccttagtggctttctcaagcagcgacttcggccttcatttctcaagcccagagtttggaggacgttccaagtccttggtctctgcttgtaacagagtgacggttgtctttccataatgcttctgccattttctctctcacagccaagaaagccaggcccccaccccacagtgcctacccctccagacgggggctgctcctttgcagcaaacgcggtcaggtgcccagctgcacaggcccccacattcttcgcttgctgactgaccacaaagtctaggagggattgttttgctagactcctctacaac

SEQ ID NO: 458448 - DNA, 499 bp, Homo Sapiens
cctttcattatgtttttaatttttggaaatacagttgtttttccaatatgtcatacggtaagatgtttggggcttactgttatttaaaaataaaattaaaaatatatgtatccttaaattctcagttttaattgataacatagttaagtgtcaacagatataacccccaaaaatgagttcttcagggccatcagtaacctgatctttatttaatcactagtctacatgtccacagggttgtaacttgaatttactgtatttagagcttctacatgaaggtcaaaatgcttatttgttttgagaagtatgtttgctaaaagttggtttctgattgaacttctcaacagtctgatttatgtgctttgggccactcaaagggcaccatttagggccttcttaatccgtcacttcaaccgggcagtctatcctcagctggataaaataccgtacctttgatcaaacactggatttaatgttttctttgacacgtgtgttttcc

SEQ ID NO: 458449 - DNA, 339 bp, Homo Sapiens
  misc_feature (329)..(329): n is a, c, g, or t
ggtggggccctgatgtagattttaccctatgtacagaatttaaccgttgaatatattaaaataacaaatctggcatggtttgcggaggttagatttactggaaatgtaatcatactgtgaattgtgctctgatggttaaaagacaagattgtcaagcattccgtattaacagtggatgtagaaaattttttcagatggacaaaatgtatatggtacagatgtaaagttttctatgtaaaaaattctgtacaactttctgtacaatattgattcccatctggcatattctaatcaggttataggtcaataaagtttttgaattatttcancagtgcaatc

SEQ ID NO: 458450 - DNA, 463 bp, Homo Sapiens
ttttttttgtggcttaaaacaaaacagctttattactgcacagttttggaggtctgaagtctgaaatgggtttcactaggtacaagtccaggtgtcagcaggggtgtgttccagcttctagaggcttcctgcattccttcgctcatggcctcactcctccatcttctaagccagcaatgtcaggctgagccttcctcatgctgccgcctttctgattctttctctcctgcctctctcttataaggaacattgtgatgacattggacccacccagatgatcccagatagtctcaccatctcaaggtcagctgattatcaaccttaattcagtctggaacctcaagtctcccattgccatgtgacataacatagtcacagggttccaagggttaggatgtagatatctttggggggctattattctcccctatcacaaaagggaacaccagagtcttcagtttag

SEQ ID NO: 458451 - DNA, 330 bp, Homo Sapiens
  misc_feature (176)..(242): n is a, c, g, or t
  misc_feature (262)..(262): n is a, c, g, or t
cttgttaaagaaaaccagtttattctaaaaagctctaaatgccctgtgcttggtccctggtcagggagaggtctcaagaggttactacctgcacaggggctgaaggtacagggggaaagtcaggtttcagttggttgagtcctaccttatctgtttgttaggctttttctagaaannnnnnnnnnnnnnnnnnnnnnnnnnnnnnnnnnnnnnnnnnnnnnnnnnnnnnnnnnnnnnnnnnnaggttcaagcaggtctcctncctcatcctcctgagtagctgggattacaggcacacaccaccatgcccagctaataattttaaaattt

SEQ ID NO: 458452 - DNA, 489 bp, Homo Sapiens
aagaaagtattttatttttgtgtctcaacagatgaaattcataaccttgttttctgataagacaattcaaacatacaaatcaattacaacaatgtgcttatcagctcccctcccacccctatattttaatgcaactgacagttttgaaggacaccaagacaatagggcttagctaaacaatacggcaattaaaaatggccctctaagaaaataattacaatagttgttgaaaagaatttgtcctttgaggaaaacagactgaaaaggattatcatggaaatgagggagaattatagcttctcttccaataaaggagaaaaggggatgtatgttaaaacaatgatacagaaagctggggagtcagactgaaaacagaaagccccaggcaataaatgtctccaataaaatgcatccccttgaagatatccattcaaactcttgtttcatattgaaacaaataactgttccgccacacccagcaccctggaa

SEQ ID NO: 458453 - DNA, 297 bp, Homo Sapiens
  misc_feature (25)..(25): n is a, c, g, or t
  misc_feature (46)..(68): n is a, c, g, or t
  misc_feature (108)..(108): n is a, c, g, or t
attactttttgacaaatggaaatcntcagatagtttttgctgtctnnnnnnnnnnnnnnnnnnnnnnngttatatactgtttgaagaaaaaatgtttagaagaaaaanaaaatcaatggaatacaaatgagatgaacttgtgcaaactgtaacttaacatgccccacaaagtttctatgtatatattaggacaaaattgtgcaatggtgacaacagttttgataacctataaaagttaggttctaaattcctatgcagtgtgactcagttaaatagagcctagaatgcctacttggg

SEQ ID NO: 458454 - DNA, 287 bp, Homo Sapiens
agattcaaaattgtttaattagatacattttatatatcctgaacataatggctcccatagaaataaactagtattttgtacacaaactttatttactgtgccacattcataatatactgggccaagtgcaaacatttattacatcccctggtgtgtgcagagctctgctcccacaaacacctcattatctaggatgacagagaacaagattagacaagatggataattaaaatccacaaggtaataacaaaaatgtactttatgattataaactcttctccagctac

SEQ ID NO: 458455 - DNA, 556 bp, Homo Sapiens
  misc_feature (25)..(25): n is a, c, g, or t
  misc_feature (36)..(36): n is a, c, g, or t
  misc_feature (79)..(79): n is a, c, g, or t
  misc_feature (87)..(87): n is a, c, g, or t
  misc_feature (92)..(92): n is a, c, g, or t
  misc_feature (100)..(100): n is a, c, g, or t
acgattaagtgaagtaaaacccccnaagtgccaggnagctcctggaatttttaaacaccttgggggtgaaaacccctgnctcctaantacangtaaactncctggtgaacccccggggcaaaggcaatacccccgggtaggtactcccttccccgaaactgcctgaagagagggaaatgagatagtgatgtcagatcccaagcacagaggctgagcacatatagtcagtgctcaaaataataggagctattactattactacttcacaagcaactagatttacattaagtatacttgacacaaaaagaatattaagtctttacccatttgcccttcatgtttaaaggtttggtttgggggctattttatattttgaaaatactgccttgcaaagatgtggtctccaagaaactgccatcttttagaaatgctagaaaggtttgctgactctgttgtaaaacaattcagatgtttaagaatgatgactgcttaaaaagagatgggtttttctaattcttctccccatacatttactactgaatcacctctgaaactc

SEQ ID NO: 458456 - DNA, 1684 bp, Homo Sapiens
  misc_feature (197)..(276): n is a, c, g, or t
aacaaaaatcatactcttttattatagaatagagattataaataaatgtaaagtgtgcatgcagtcaactgcataatatacaagcaatatctatgtttttaatcatcatcttctttggcaggccagaatccagctggacatgcaatatttacatatcaaaatccatgtgtggtcatcatcttgaaagcaagtgaaannnnnnnnnnnnnnnnnnnnnnnnnnnnnnnnnnnnnnnnnnnnnnnnnnnnnnnnnnnnnnnnnnnnnnnnnnnnnnnntaaaagtggatttcatctttgtcagattcaggtgattcaggccttgagacactaaaaatatcctgacatggtatctgggggggtacttggagtggcatttgggatttgggagatgaggcctggggtacgcttttttccgacagtatttttaaaatttctgccacctgcttttctagggcagtcattctgcagctgagcagctggatgtcctctttgagttcgtgtttgacttcctgcagtgtggtctgtaaggcctgctcggggatgggataaaaggggtgcttggcatcagcctggatgggactgtgctctagcggacttcgggcctccccagccttatccaaacgaaggtcactttttgtaattccactgtcacaagaatctgttttccttagtgggtttttggtcacactgttctctgaatcactgctcttggggtcctcagacaatagccccattgactcagctttagtgacattattccagtcttcctttttctcctcatgggctcccatattattcttgagtcgcagccacccttttccatttccattcttcattcttattgggctgttgactttgagacatttttggtcagcaccgccgttgggcttgagttccatggcatcacggttgttctgcttaagggattcactggttttcacataggccagagacgtctgaatgggagtaatctgtgacacagtcaccacgctggttccggtgatggaggttccattctgtaaggagcggctctctacctggagttggttcctctcagggtcaccctgtgttgagccctgattccgcagctccttctgctgcttgaacttctggaagagctttctgactgggtggtccacgggaatgctgagggtcacctcattcttctgccggaggcgctcctcctcctctttcttcacatcactgatcttacgaaagatgatccgtttcctcagattgcaagtaagagtgagattccttgagaaggagtttgcaaaagctgtataaaagtccaggactttgagcaaggcttcccgcttgatgatgtgtaggtcacagtacgtcagtgcccggacgttcgcacatgcatgggcaagggtggtttccttccagaagatgtctccaaatacatcacccttccctaaaatagccaccacctcatcatcctggatgacttccaaggatcctgacaccacaaagcagagggcatccacactttctccagcatggtaaatgaggtccccgggagcacagtgaatggtttggaactctaccgccaaggcgcgcagacacccatcgctggccaatcgaaaagcaggatgttcattaaaaaccttccggtttagatgaacacagatatcagctctcatgtccttgggacagatggagaggacctcgtgccaag

SEQ ID NO: 458457 - DNA, 548 bp, Homo Sapiens
ttgagctctttgtttttatattaatgaggagaaaagtatgaaaacaagaagtcttaagtaaatattgaggtcattgtttttggcttaagtttattatagaaaatcaacactaatgtttttagcttttaattgtcctattcatgaggctagcaccttaatcactgtttagttttgtattcatttttaaaagcaattattgaagccattttcaatagattggccattttaatgttcagcaacctgaatggttatttttgttaattaaaattaaatttttaagagatattttcaaaaccctatttattttcttgttcacagtaatgcatgtcaataataaatgtttccccttactgataagcggccactttaggagtgtagcaaatatagattgagctatgttagtttgcaataatatatgttaactttagtaattaaagactggtttctatagtatgaatgtcttaattttgagttatatgatgtttatttgaatgactgttgaacattcaaatttgtattatttggagatgaagatttgactaacagtg

SEQ ID NO: 458458 - DNA, 455 bp, Homo Sapiens
  misc_feature (11)..(11): n is a, c, g, or t
  misc_feature (25)..(25): n is a, c, g, or t
  misc_feature (131)..(181): n is a, c, g, or t
tgccccacccngtcctgaacctaantttttgggggggtaagaggggggaataagagaacagggtccctacccatgttggaccttagttgggtcctcaaaactccctggccctcatgtggaccctccctgtnnnnnnnnnnnnnnnnnnnnnnnnnnnnnnnnnnnnnnnnnnnnnnnnnnncagccctgactgatgtatttttctaagaacacagctactttgacagctaaataataatccagaatgttgtttgaaaaacaagaattctgaatgaaaaattttatggatagaacatttaataacatcaagtttaattagcctgatattaattcacaatagtagtggccttgtcactgggactgaagtccagtggaataaagtccccaccctcgtctctgaatcatatttgagtagggcattcttacgctgtttctggcttttctttagtagcttt

SEQ ID NO: 458459 - DNA, 420 bp, Homo Sapiens
  misc_feature (381)..(381): n is a, c, g, or t
gaccgtacgagggaattttaataatacactctttacactgaggaaattgatggtataaaagtaaaggtgatctcacatcaaataaatagtgaatccaggattcaaaagaaagtttttgactctatggccattctttaaaggtagacaattgcattgtgggtgatatttggttccaacaaattattgtttgaacaatgataacttatttcaacaattctcctacccatgtagttgtatgtgcactttgtatatcacagaaaaggctaggcaaggaaaacctgaaggttgacaaatttattataatccggggctttacccctcatactgggatacttttacaccctggacgttttatccaacatggccaaaaaatttattccnttcaatggggggggtacacggcaaagggatttcacgggt

SEQ ID NO: 458460 - DNA, 404 bp, Homo Sapiens
  misc_feature (47)..(47): n is a, c, g, or t
tcctcattttttaggattacctaaaccattcctacttatcccacatngtgcccaagatgtgcccatttaggttctctgcagaaattagctgtttgggtatcatcacctgcccatacatgttgtgtgcagccagtgagaagtatattctctaccactgctctttctcatgattattttctctattcctattaaaatgaataattgatatgttaattaagtaaagcaaatcaataaggaatgaaatgcatggcccaaaacatagaaaatgaaaatcgtttgaccatttatccaattattgaacccaattaagatgatccattttaaatttaatatatgctcgcttttggaatgtgttatgcattgatgttaagtgaatggatctaagtaaatctattgatatctct

SEQ ID NO: 458461 - DNA, 503 bp, Homo Sapiens
  misc_feature (11)..(11): n is a, c, g, or t
  misc_feature (27)..(27): n is a, c, g, or t
  misc_feature (39)..(39): n is a, c, g, or t
  misc_feature (44)..(44): n is a, c, g, or t
  misc_feature (62)..(62): n is a, c, g, or t
  misc_feature (69)..(69): n is a, c, g, or t
  misc_feature (170)..(170): n is a, c, g, or t
  misc_feature (183)..(183): n is a, c, g, or t
  misc_feature (408)..(408): n is a, c, g, or t
gtctgctctcnggataactaaacctgnaacatctctccnacccngtgcttgccaaacacaantcacacnacggggacaagtccccttccccataaacactgcaactatatttagggagccccagaggaacacttttcccattggataacatcagtgctccttaatcaggnaatagggcatccnaatgacccccaaatcaaatggtagcatcatatcccacaatcatcgctcacttgatgacaacactttgccagccttttaaaccgcatctggggatagcaaatttgaattccatctcaaaagagactgagaaagagccatatcaaggccactagctctggcatgattctccaacatcaataaatgggagaagtggggaaagaaaatactcttatctctccacaaaanaaaattctagacattcaacatcacatgggttcatatgcattcaagggccaccctgcctgcatttcagctacaaggacccttaatggaatggttat

SEQ ID NO: 458462 - DNA, 505 bp, Homo Sapiens
gttttcagaccaagagatcagctgtctaaacagcagcttttttgattgttgggcttcctgaaagaaaccttgctgacagcttctcactgacctgcaggacggaaccgtacctgagaggggatgggggctctctcacaaaagaatatttggggcagaaccctggaactggccaccagggacatcccaaatatcccctcctcctcagggctcaccccgacatcctcagccaaatgaaggctctgaacccagccatcagctcgcaaggcacaactcactttgcaggctaatcaaaatgctttctgaagaaaagaaaactaattatcccacggctctattttttgttgtcgttctgtttgaaataactatgaagtcttcactctgcctaacactaggccccaacccgctgtttctttccacttttcatcttgcaaaaccagtgcctccaacctctctggggctcacacatcccatcaatttatcagggacacagtagcatgtttaaccc

SEQ ID NO: 458463 - DNA, 264 bp, Homo Sapiens
  misc_feature (144)..(160): n is a, c, g, or t
ttttttaactcctaccttttatacctttcaaatatataaatagtattaacagttatattacaatgtttgtgtagtaaacagaaaataactttcaaagtgatattgcatgaggtctttgacaaggttttgtgaaagcacaactcnnnnnnnnnnnnnnnnntccaaccatgtgggactgtttaatggccagtttaaagcatggattacgttcactaggccagtcctgaatgtgaggtctcctcttgcaattactgtaagtagaag

SEQ ID NO: 458464 - DNA, 439 bp, Homo Sapiens
ttttttttctcgtagatcactcatttttattaaagaagtgtgctcatgataaaaaattgtctggtatgacagcaaatgcataactatatatatagaatttatcccttaacatattttagaggataaagcaacagagggacgatttaacagtaagcgggccacctgcaggattgtcctgattctctctcagtagttactccttgctctctgcagagacttaagttctctttgccccagtgcccagacctgccttctcttcaccctgtcatcatgcacggttgggccctggttggccttttctgggcctcctcacagcagaatgtgcatcatcattcctcaagggcctcgtgctttccttgtaagtcacacagtttttgtgatttacatgcaagtaagggggaggagaaacacaaacaccttccgtgtgaatctaaagcat

SEQ ID NO: 458465 - DNA, 292 bp, Homo Sapiens
  misc_feature (216)..(216): n is a, c, g, or t
  misc_feature (223)..(223): n is a, c, g, or t
ctgtaaagaatgtcactggtattttgatagggattgcattaaacctgtagattgctttgggtaatatggacattttaaaaataataattattctaatccatgaacatggaatatctttccctttttgtgtcctcttcaatttctctcaccaatattttatagttttcattgtaaatatatttcacctccttgtttaaatttatttctaggtatttnatttttngtagctattgtaaatgggattgctttcttattttcagattatttgttgttaacatatagaaataatatt

SEQ ID NO: 458466 - DNA, 402 bp, Homo Sapiens
  misc_feature (93)..(93): n is a, c, g, or t
  misc_feature (136)..(136): n is a, c, g, or t
  misc_feature (166)..(166): n is a, c, g, or t
  misc_feature (184)..(184): n is a, c, g, or t
aaaaaagttggaaaaggatgtttcctcaggggaaatactaggtccccagttgaagctgtgaagagggggcaggttgcccatgtttttttcccnacaatagtgccacagtgtcttttgaatgggagaagttctgaanaccctactgaagtagcccctgctgcagtgntctctaccatgacatgcnccttttgctttcccagcacttttattaacttttaattaatttttattgttcatgttgctattgctattagtctactgtctgtctcattggactgtaagctctatgagagtggcaaatatatagtatcacttaatattgtatgtctagtagctaccagagtgcctgccgttataacgagcatggataaatttaatatttttgaattaaatgaatgaatt

SEQ ID NO: 458467 - DNA, 936 bp, Homo Sapiens
gctctgatggtttagaagaaagtgggaccttgcttaaggtcactaaaaagaagtctactcttccaaatccatttcatttgggaaacttgaaaaaggaccttcaagaaaaagaattagaaatatataacacagtgaaactgacatctggtcctgagaacacacttttccactacgttgccttagaaacagtgcaaggaatctttattactcctacccttgaagaggtggcacagctaagtggctctatccaccctcagctaataaagaagtttccatcagtgttgtctttctatttgtgcagttttccaacagacattggtggaagagaaaaagaaaggactaaatagtggagaccattcagattctgcaaagtcagtgtcttctcttaaccctgttaaagaacatggtgtgttgtttgaatgttcacctggaaactggactgatcagaaaaaagcaccaccagttatggcttactgggtagtagggagactttttcttcatccaaaacctcaagaactttatgtctgttttcatgactcagtcacagaaattgccattgaaatagcttttaaattgttctttgggttaaccttgtagctgtgctttcttgatgcgtagaaacacgtgcatggaggatcaaacactgtcagaattgctgaaatcaatacacaaagagataaagtttagcttctttttactattcaatattgaacataatattgttaaatattgagatgaaatgctgttggatttgatacattaaatcttaatgtaatattgtaagacttttgagaatatacttgattaaaatgtgaaagaagggattgttaacttattgctattttggtatataatgttaatttattgactagtttgaaataatgtgaagtgttttttatatcagattaatataggaaatgtttattcttgaaaaat

SEQ ID NO: 458468 - DNA, 753 bp, Homo Sapiens
cacaacatgcgtatttatagagtagttaggtaccatttgtaaggtaaatcctttaaaattctataatacatactaaaatagtggttattggtctgatatatgctgctcttggttctataaactagataaaagcagtgctttgtgaaatgcagtgttctctcttaacgccactggtgataggaagtagttcccttcagttcaaatcctgtgcccttatttgctgcttgctgacgtaagcaataagtaaccctctaactaatggtatctacatatttctgtaacttgtatttaatgatggtgtacctggtgattgtaaaaatattagacagatataaaagtatctatataatatctataaactgttaatgctgaggtatagtctgtgaattatgtgttttgtatttttattcattgtgtaatttagtggtggtgaaagttctacactcaatccttaaagagtggcagtatccctttttcaatttaacatggtctgcatcaatctgtttgcctgctaaacaagttaggataggaaatagtaaaataaatccaaacaagagtgtaatattggttagggaaacaaacttcaagtcaccaactgaagtcattacaaactccttgtacattcactgtgagtttcaaagggagtcagtccctaatttacaggtttcctttgttcactttctaggatgtgtacttttgagggggacatgagggtaggggcaacattacaggccaaccacacactggggggct

SEQ ID NO: 458469 - DNA, 320 bp, Homo Sapiens
acgtcttccacactccacccttgccctggcaaggaggtagggggagcagggcctgccctgagggcttctcccttccccttagtgccttccagtcccacccttccctgctcaggccccaggaagaagttaaaaatagttagttcctacattaaaaaagagacagaaccagattctctgccaaaaggccagtgggagaagaggggatgtcatctctgcagtgggaagggcagggagtgggtaggggaggactgcaaaatagtttcttcttttaaaaagtgcttggtaagtcttttaaagtgtgtgtctatatctatgtacag

SEQ ID NO: 458470 - DNA, 218 bp, Homo Sapiens
  misc_feature (19)..(19): n is a, c, g, or t
  misc_feature (126)..(126): n is a, c, g, or t
ctctgagttcaccacatgnttttgtaattttgtggttggtgattaatattttgaaacatctttttattttcacctagaaacaagagtaaaatattatttattgtaaaatatgtgggaatcatatanctatatatatatacttagaattttctgtgtacagagaaagtatgtgtacacattttatgtaaataaaaagaatttgctagatctgtcacatt

SEQ ID NO: 458471 - DNA, 186 bp, Homo Sapiens
  misc_feature (152)..(152): n is a, c, g, or t
aataaatcactggaactgagcattctgtaatattctagggtcactccccttagatacaaacaatgtggctatttgttttagaggcaagtttagcaccagtcatctataaactcaaccacattttaatgttgaaccaaaaaaagataataaantaaaaaagtatatgttaggaggttataaatcttg

SEQ ID NO: 458472 - DNA, 386 bp, Homo Sapiens
  misc_feature (289)..(289): n is a, c, g, or t
  misc_feature (342)..(342): n is a, c, g, or t
gtatttataaaaatatatttcacaaagtaggaaacaatacaggagtttctctgaatacaatacatggagtgaataaacaatattgcattaaagcaaagtagaaaattaaaatgatctgcatgtaatacttgagttttatcatacattttctactcctaaatggcaggtttgcattacaaattaaatatgctcacatcttctagtgctgttcctttttgggagtctaaggacattctgtggcatcaccatggaaggatcaggggatagggagtgctaaaaacggtaaacnggtggaaattatggtaccaaatcagttccctgctcttaaaactgtgggggggntaaattgggggcctgttttattggggcaggggcctggatgttgg

SEQ ID NO: 458473 - DNA, 504 bp, Homo Sapiens
  misc_feature (485)..(485): n is a, c, g, or t
tgattatgaagacttttattaaattacagtgtattacagattatatcataataataagcctttcatctttaggctaatatgatacaaaaacctacttggccacattacttcttgagtttcttttgggcagctttcttcttgaccatctgtaatcgcttcatagcattgagctgtgattcttgtgaagttgggcctttaagggatgctgagggagagctgctggattctgaagtagttttgctggtagtacttccactaggtcctgatgttccactatttccattcccacttagttggctgctgcttcctggaactaaactacttggactaggaagacctactttgctggacattgtcacaactaactgagcgactaaggccagtttttacccaaggttagaggtggaggtggtttttaaaggtacagtgggtcgtagtgctgttattggaacctatttttgggacctattccacctttgggattnatgttgccagaccagttca

SEQ ID NO: 458474 - DNA, 350 bp, Homo Sapiens
tttgtattgtcaaaattgtatttcccatattgaagcagcttgagtttctactgaaaatgagcccgaattatttcactattactgtaaagggttcatcttactctggcattctgagaattagactgaaagtttaatttctgcagttccctcatattcagattctttctttgatgttataacacaaagtcattcctactcaaatgtaataaaattgaggctccacggaggcccgtgtccacatcagctgcagctcccactcagacagacggcctgccccacagcctgccctttgctgaagataccctcgctttatacttgcatttcgtcttttcagtaaaaacagtcaagtt

SEQ ID NO: 458475 - DNA, 304 bp, Homo Sapiens
  misc_feature (56)..(56): n is a, c, g, or t
ctgatttgataataacaggaattttaggaaaattaaagccattacctaggagattncaaaaacggcttccatatagagttgatacccatataaattgggtcctatagaagcaaaagcctatagacatacaggaagctgtaattaaggtaatgagactagagctcaagtgaaatatgggcaaaactgatgaataaacctgattaagccaaaatcacagagggttaccagtgacttggttagaagtttgaacattttctaggcatccaataatgtggttgcgtaggcacaggaataaaactgagtt

SEQ ID NO: 458476 - DNA, 422 bp, Homo Sapiens
cttgttttctcatttaatataccataagcgtattcccgcatcaccattcttaatctattccacgaaaaaataaattgtgttattttaatataatttactcatcagtcatttcttctagtggctattgaggttttccgttttttcactgttataaatgacatcataatctctgtccaagattcagataatctcttcaggacagtctagaagtagagtcagccacatccaagggcatgagccaggtctgtaggcctgtacagctgatggctgtgtaggagtgtctgtgtgaggcgtgggacattttaaatatgtggttaatatgcgtacatgcacacatgtacctatctgacttacccttaccttgcagttataggaaaagtttttattatgggattgcttgcgtgtttgagttggaaatagcc

SEQ ID NO: 458477 - DNA, 495 bp, Homo Sapiens
  misc_feature (178)..(178): n is a, c, g, or t
ggggaggccttgggtaacaacgggagagcagccctgaagttcccccagtaacccccccaaagtcccttttaaggggacctaataccccagtgacctaaacaataaaaggttgttttaagtacacggaggataaattatcccttgacattccattaagccagccttaacattaacattnaggcaaataccttaataccccctttaccctcttatcccactttcctacttgacactcctatcctacccagacaaagcctaggatgattcctgagtgttggggaaacatgaatgggggctgactctgtgtgtgacactttcttctacaaagttggaatcaatttcagtgagttgttgattcggaattgtttgtcatcaccagccctggaagaatggaaatgtgatttcaagcactgtatccacttataaaattatactataactaaaaccttattttagttagcaaaaacaatagggttttcatttacttaagagagg

SEQ ID NO: 458478 - DNA, 521 bp, Homo Sapiens
aaacaaataccattccttgtactttgtccctctgggaaattcctattcatccaacaagtctcattcaaatgctactttttacaatgaagctgccagatagttgtaggtacagtcaagcaccacataatgatgttttgatcaataacgaatgaacctgcatatacaacagtggtcccataagactatacaaccatatactctgtaactaacttttctatgtttaaatatgtataggatacatggaatatcattgtgttacaatttcctacagtattcaggtacactaacatggctatacaggctcatagcctagatgtgtagtgggctataccatctaggtctgtgtaagtactctctatgatgttcacacatgaagaaattgcctaagggcacgtttctcagaactcaaccctgttatgtgatgcatgacagtatttttcctgtgcctctgctgttcttgacacactccaccatcatccttttgtaatcctctgtttacccatctgtcttttaaagtatag

SEQ ID NO: 458479 - DNA, 1190 bp, Homo Sapiens
  misc_feature (536)..(536): n is a, c, g, or t
  misc_feature (664)..(704): n is a, c, g, or t
  misc_feature (1155)..(1155): n is a, c, g, or t
ctccaaagaacgatttgaccaatagcatttcttctctgggggttgtatttcaaagcatgcaactctccggggaaccagaactaaattgcttaaaatgaagtcattcctcagattaacttcctcagataaagtgtcagcggtctgcagaaacgaagaagacaaaactgagattatcactcataattctcttacttactatgtcagtgaaacaatgagtttgcatttttgcaatcctagaacattcttcattagccctgggtcatgacctcttccagttaattctctttcacacctttaggaaagatttaagatgaaccttcaataggatattaacataactcatagccaataccacagctgcctttcaaattaatgaggttaattgttctccagcaaacatgagtttgtctttggcattttaaatgcttcccattgatctgacattttgctgtttcaagttttaaagggctcaaatcaaagactattgataacttagcaaagagcgaagatccagaaatacgaaaacattgtctttntttttccatggaaaaacaatcatagccttttgaattcaatcgaagtttctacattagccatctaaggacttatttaattatttctgttctcagtcaagctaattccaagtgaatggaacagtattgannnnnnnnnnnnnnnnnnnnnnnnnnnnnnnnnnnnnnnnnttaagtttgtagacaagctctggggccatgaccacttacgtaaatgtttcagtttaaaaacaaaagattcaggcctctaatttgagccaaatccaggtgatcttgtttgaaatttttgatgaatttgaaaagatgaaagtggaacttttaacattcatgttccccaaatttttcactgggaagggatgctaattgcctacttaagatataagttcaagaataacattttcatagaaaattcagaaaactgcttgacacagcagtgacatagttagatgtggctcagatgccttccaaacctgagggtccccaaagatttctttaccagttgtttttaactatggaatcttaatcttgtttcattcccctgccaaaacaattttaaaaggcattaaacctgctggaattaattgggcaggatttcaccataggtttattatccaccccggantgtttatgtgttatatgtttatggtataggtatta

SEQ ID NO: 458480 - DNA, 440 bp, Homo Sapiens
  misc_feature (20)..(20): n is a, c, g, or t
  misc_feature (27)..(27): n is a, c, g, or t
  misc_feature (41)..(41): n is a, c, g, or t
  misc_feature (48)..(48): n is a, c, g, or t
  misc_feature (63)..(63): n is a, c, g, or t
ggaaccctaacaatccctantggggtnagaatagatacaantacaaanaggtaaaatatatantatgcctagatggtaagtgcctacagagaaaaataaaggcaagaaagggtacccagatacttgaggaaggtacaattttaaatagggttgtaaaaggcggcctcattgaggtggcatttaagcaaattccctggaggtggcaagggagtgaatcataacaatatctgggaaagtgtcttccaagctgagtaagaggagttggaccagctggctgctttaaagaataacaaggaagccagtgtgacttcaatttaacaagagaagaggaaatcagcagaggaggcccaagagcttcggcagggaccagaatagattaggctgcaaatgaccgctgaaaagaacatggcttttactcagagatgggaaacctccgaagg

SEQ ID NO: 458481 - DNA, 444 bp, Homo Sapiens
  misc_feature (419)..(419): n is a, c, g, or t
ttttttgttcacaaaagactttattatctagtgatgcatactgagaacatacagaaatctgcatggtccacttcacatgcagtagaacaatcttcactttacaataagtgagtgtcaactgttttatgcaatagacaacactttaaagtcacattcttaaagaaaagcttcatttacaaaagaaataaaaggtaaagaagcaattaccgcttttaaaaagcagctgctttgttcaagagtgggaaggtttatgcctgtattgaaagacaacatgatcacaaataatggaaaacaatggaacaaatggaaaaacacttttaccattaaggcggtacacttttcaaaatggacatacaaatagtttaaaaattttcattacggttgtctaggccttttaatttgggggtctttccggtttngggcctcaactttgtaatttgggaa

SEQ ID NO: 458482 - DNA, 374 bp, Homo Sapiens
  misc_feature (129)..(129): n is a, c, g, or t
  misc_feature (283)..(283): n is a, c, g, or t
  misc_feature (319)..(319): n is a, c, g, or t
  misc_feature (344)..(344): n is a, c, g, or t
ccacagatgccctttatttcatcattgtaatagtgattttcattcttgacatgcagcagtatgaactcaaatatgtaattcatgaaaattagggttgtttcttaaaatattctattcagctctgctggnttacaattagtatttgtcaaacagtttttatgctcaagtgaaaaggtaatgataaaacaccaccagaactgctaggatgcagtatccctttgctggggtttcatgatatgtctctctgggtaaatctgcgccccctaggagtaatcagtgcgantatggaaaatgaggcacattatttcactgttaggcngggcactgctaagggtggaaaggcncagggcattatggggcctgctgatgttttt

SEQ ID NO: 458483 - DNA, 490 bp, Homo Sapiens
aagctgcctgctctgctgaatgtctcccactaaccctgttttgctccctaaccccactaaatcccaccctgggaggctctgggcattaacggaaaggcttcaaccacaaggaagacaggaagcgagtattcccataaggcatgcgctccctagtggcacgagtggcttgggtcaggatcaaagagtgaaggattcggaagtcagctatcttctcgtttggagcacagggaccgcccagctagaggagcaccagcgcactgcgccccagccctgggcgagggtgcggaggatttgttctcggtgcaatccctgtggcgcttttccggggttctgcgcggatccagctccccatctctgctccttgctagggaccgcagtccctcagccgcagctgggtctgtccgccccgcctttgccctcgccttttcccggggcggatttggtgaagtcggcctcaagtccaggaggtctgtcttcgccgggccagctc

SEQ ID NO: 458484 - DNA, 451 bp, Homo Sapiens
gtaaaacaaaattttcagcccaagatacccagaaaagaaataccctgggcctcccaggaaaagctgctccaattccttctcctttcaaaggggaaacacattttgactcaagcttccctgctgtggcagaattccaataagcatacattatatagttattttccagttggaaattgatctgctacccagaaccggctgctgggatgtgaaatctggaatctgagctctgataagatatctagcagctgctcaaattgaaaaggggcctcaaggctgttttgagatggaatagctggcatagccaccagttccaaaccctcaatcagccacgcccagtcccctaactgtgagttgatgctcccgtaaagagctcaggtctgtgagccttatcaccacatgggttgcaacacagcagaatatcctgtgtgaccataatccaaaggctaaacct

SEQ ID NO: 458485 - DNA, 534 bp, Homo Sapiens
ggtggaaagtcgaggtgcttcagagttcttgatctttctgttcctcacaagacgaaggttcaactttgagaaaggtcagtcttgaagttaaatgaggtttagtccaatctaggcattactttgtcatttccttgagagtcagataagggaattacagacccaagactgtaattttaagtaaggtggagtgtcagattgaggaagtaaaatttctctaggaactcccatcctgtctcaattacattcccaccgcgtgccacttttaaaaaaccatatttatttagaagtgaaataactgtggacctaataaaaaatggaataggaattagtttttttgttcattacgtatttctgcacatctagaaagtaactgactgcttcattactggtaggattaaatccaatatttgcgaatataatttattaagaacaccttttgtccttccaggagtacttttaagacttaatattaaatagaaactttcagtgagaaagttccttccttttttgcttcttctgtgtttattcttccag

SEQ ID NO: 458486 - DNA, 421 bp, Homo Sapiens
  misc_feature (271)..(271): n is a, c, g, or t
  misc_feature (306)..(306): n is a, c, g, or t
agcattaaatcttttattttgaaacatttttaggtttacaggagagttgcagaaatagtagagagatttcccacatatctttcatccagcttacataaccatggtacatttatcaaaacacagaaattaacattggtataatactattaaccaaactacagacattatttgaattttaccagtttttccactaatatcttttttcttttccagggctaagtccagggatagtacattgcatttagagctgtatcattgctttaaaattctncacagattcacaatccctcattgcctgcccggggntggaccactcccagctcccctactccacctgccttgggtatactcctggattccacttaaacttttgtgggtattggggggtaaggaaggtctaatgggctttcaagtttaggca

SEQ ID NO: 458487 - DNA, 519 bp, Homo Sapiens
aagaaaaaccacaaaaagccattttcaaagagaagctaacgaaattcattaagagatattcgcaggtaataattctaaagatttaaaaattgccataaattttgtaatatatttattaaaatagttaaaacagcagcaatactatttaaaaatacatatatatgcccataccatatgtccattaagtccaaccttaactcttttcgtttcccatttttcttagcttttctaactacataatcctgttctctataactcactgcttattaaagcaaattctaaatacgatttctgcaatatggagaatactagtaccttcatttctgggtgaattttttttgatggctgaactataatgtgaagagtattttctaaaactattaacaagaaacaatacaatgaaatgcatagctcccataacatccaaacattggctttactttcagaatcctgaagacaaatgagaagctccatgcattagtgtgatgtgccaccaggtggccatcacctacactgcag

SEQ ID NO: 458488 - DNA, 444 bp, Homo Sapiens
ctggctgcttttctgcttttgggaactatcccaagtggccacatcaccatgtcccagcttaggtgtcttgtgaaaccttacttcctccacataaaaaggaaggaacggtttccaaagctaatgtttccaggctctgcctcgtgacactcaagtggcctcagatatgagcactggcacagagtgatgctggagaggtcacttagagagaagctgccgggccaagcacacgacaatcttggccctaagtgctcacccattcctcatgtgaccctgacattccggggaactgggaaacctgttccttaaaggcaacaacagtcctttctttcctctcacaacaaaggagcatgttctccgtgaatgcacttttcatttacggctctcaaaagaatatgccttctcaaggaatttttaatgcacttttcttgaatgtcagctcccagc

SEQ ID NO: 458489 - DNA, 483 bp, Homo Sapiens
  misc_feature (470)..(470): n is a, c, g, or t
gcaaacatatgcaaataactgaattttcaagaaatattcctggctagtagcatcttcaaaagctgactttggagaacagaatcagaaagtgaacggataaatgcgaggcacgcttttacatctggacttaacggtatcctgagcaagatgactaagatgtttatgcagcaatccagaataccctgcccccatcacaggcaataagtagcaaggctaaaaattttacttagtaaaattgactaaatatgggatcctggaaaatattcataaggcaggatcaggcagtccatgtgtttttgtgggattatgggctatttgaagggataagttcccaattctcctcttatggtcatggcataggcacctaggaaccaattttggaacctggagtggaccattccttgttttcttaggtggaattaaaaactttagggggcagtggaattaggttttttggggaactggccggnttggggactctcc

SEQ ID NO: 458490 - DNA, 653 bp, Homo Sapiens
  misc_feature (621)..(621): n is a, c, g, or t
ccttttggtaactgtgcactgtgtcctttagccagggccgtgcaacttatgaagacactgcagcttgagaggggctttgctgaggcttccccttggccatgtgaaagcccgccttgttgcctgctttgtgctttctgcaccagacaacctgatggaacatttgcacctgagttgtacatttttgaagtgtgcagggcagcctggacacaagcttagattctctatgtatagttccccgtgttcactaacatgccctctctggaaagcatatgtatataacatgtgtcatgtcctttggaaacctggtcacctggtgaaaacccttgggattcttccctgggcatgactgatgacaatttccatttcatcagtttgttttgttttcctttttctttaaatcttggactttaaaccctacctgtgtgattcagtagggtttgagacttacgtgtgatactgacaggtaagcaacagtgctagcattctagattcctgcctttttttaaaaagaaattattctcattgctgtattatattggaaaagttttaaacaaccaagctaaagctatgtgaaagttgagcttcaaagtaggagggaaaagttactggtggtaccctggntgcccgctctgcggtaggattctgtgctccct

SEQ ID NO: 458491 - DNA, 430 bp, Homo Sapiens
  misc_feature (367)..(367): n is a, c, g, or t
aaaaatatatctcctttatcgatgtttaagtagtttctctctgagtgtcttaacattttcccctctttagctttgatctgattgacttcttaatgctttggaacaaaattctagatagccacctgttgcagactattctacttttctgatttcaaagaaagggaacagattgttctccataaaggcctcttggggccaaaggacatagtaaatttccaagggaaaagcacattgatccttgtcgtagtctactcaacagacttccaaacgtgtggtgattctaactcgggtttggggcttttctttaaaagggtatcttgactaaaaggtttgtgtggaaatgtgatgccaggggggaatactcccntacttgttaaaaccccaaaaaactggggggggaaaggaatacatacaattaacctttaccatt

SEQ ID NO: 458492 - DNA, 444 bp, Homo Sapiens
tgaaaaaatgccagttaataatgccacaactctgatttcctgtggtgaattggaaagcctaacacataaagaagccccagtgtcccctggcaaagagtaagtgttcagaaattgatagttacaactgccacagcccaagagttgccctaggagatgtaacagctaatatcatatggtaaggatggggccctggcattaacaaaagggccttaggtaaaatactaaggaaatctgaaaatacagactttagttagtaatactatatcaatattgttccattaattgtgacaaatgtaccatgctaatgtaaggcattaataatggaggaactttggtctaaggtatatagaaactgtctgttctatttttgcaacagttctaaatatctaaaaaacattctgaaatagtttattaggaagataatagttactaattctgaattga

SEQ ID NO: 458493 - DNA, 340 bp, Homo Sapiens
  misc_feature (329)..(329): n is a, c, g, or t
ttttttttaagtctagtgatctggcagaaagaattcaatagggataatatgttatagggtcaaaagtatctataaatattatgaagttgtatcagatagacaaatgatgtgttattatccctattttagagtattctgtaaaaaaaggttaaacatctttcatttcaaattgtaatgtaactgtaacgtgaacacccctaatggccagaaattatctcaggcatcatgagactccctctctgtcacctctgaggttagcacttagctttatccagctttcggttgggggccatttttacaggcccccttaggcaacttaggcttcactnataaattttag

SEQ ID NO: 458494 - DNA, 163 bp, Homo Sapiens
gtattcgaatcaagtactttattagaggggaaaaatattcaaaaagaatagaagcaagaattatctggtttttgttgtaagcccatactattcaaatacaattcagaagcagaatttttaacttctcaaaagttccctaataaaagaaagctattttaacaaa

SEQ ID NO: 458495 - DNA, 328 bp, Homo Sapiens
agagtaattcaaagaagtgtgggccttacttgaaacttcagagatgttgatcatgaatttggcttcttttgatgagaaatggccaagactgttgacccatgcacacatgttggtatttacagttgtttcatggacactggccagtctacaagcagagcactctcatggggagcaccagatgagttccagccgcagttcttttataagctttaagtgcctcatgaagacgcgaggatctcttccaagtgcaacctggtcacatcagggcacattcagcagcagaagtctgtttccagtatagtccttggtatggctaaattccactgtc

SEQ ID NO: 458496 - DNA, 259 bp, Homo Sapiens
ctgttgtagatgaaactgtataagatttttacatcttgcttaatcaatattttcagagtctattagttcccctgggattctgaatataacatatagcctattataaatccctgtatcgtggaccttttgtgaacatttcaaggcgcatgcacaaccttgatgataaccagtggaaatgtaactaactgaaatgaagaataaaaggcaaatgagctggggataaacttgaatgttatctgattaaattactcaaattatt

SEQ ID NO: 458497 - DNA, 341 bp, Homo Sapiens
actgtaatagggagacccacacctgggacaagactgtatttacacgaccaaagttacctattattaaaaaatgaatttttgagtaaatgcctgaattgtctgtgtaattgccttgattctatgcattgttttccttgtggttacctcaaggaaatggagtcacttcagtagctattttactgaaaataaaacgagattttcggagataatgttctttgaaaagtgttaaaggtacacttatttatggaaatacacgttttgttagcaatgtagctgctacatgtttgttgtacattttatttttacaattctcctaagtgatttaacaattatataatcat

SEQ ID NO: 458498 - DNA, 472 bp, Homo Sapiens
  misc_feature (15)..(15): n is a, c, g, or t
  misc_feature (76)..(76): n is a, c, g, or t
  misc_feature (81)..(81): n is a, c, g, or t
ggtccagggaaagancaaatgaacaaacgttccaccttgtcctgtctccctccccacatccccggggtaccccagncggangtccattccttaactgaattttttccttccttgccttgatttcttttgatgccccataggagtactcagcaattctctttccccttaggctcactttctcctctgtctttttgtcttgctcctcgctaatgggagaaaccgagatgcaatgcagacacttgctgttttgtccttttataaaacagccgaggagacaagtgatggttaaacaattactgcagttgtaggtccggatctctttgttgtctcgcttgcacttgattgccacgaagatcatagttacaaagaggatgcccgcaatggagcccagggcaataatgaaaatcaaggacaagttcacagagcccattgactcttgggcatcgagagcaggggacaagtagattaggac

SEQ ID NO: 458499 - DNA, 275 bp, Homo Sapiens
  misc_feature (115)..(115): n is a, c, g, or t
gctatatttcagagcttttcctaaatgtattgtttataggtgattatcattctgtgacagtcccttgtttcaacaggcagcaggggtgttcagttggagcaaattagctttggcntgagttgttcatggggccttgatgttggggaaacagagacaaattcagttgtgaaaagtattatgtattaagtgtttgaatttatatatttttctatgtcaaaattataatataaattaccattgtttgtggaggattacatttaaaaaagcaaaaagtg

SEQ ID NO: 458500 - DNA, 563 bp, Homo Sapiens
aggttaataaaatagtgcaatcaaaacctttattaatttttctcattaaactgaaatgataaaccaaatgaatgagaaaagtggcagtaaaagatttagcatgaagtattatttctcaggtaatgtcaagaatattatgaaaatatatacttgcttataactgaatcaaagaaaatgaatgcatttacctttgaaaagcagaggtactgattgccttcaagcttcgggttataggaccttaggctgggagctgatggccccacatagctgatcttctggttttgtaatgagagaaaatggaagagtctctctggaaggaaaacttaggtcatttatctctcaagctttatctattccataatgtatatggaacactaatagttctgcctatctttctttgccagagtagaaaacaggttcaaaataaaatagtctgaattatcataaagacataaataagaatggaatatttaaaattataattcacttaaccagtgaaaactgaacacattaatcttctttagtcggggacctgccatcatcttttgcatattgtatttagc

SEQ ID NO: 458501 - DNA, 498 bp, Homo Sapiens
  misc_feature (439)..(439): n is a, c, g, or t
  misc_feature (474)..(474): n is a, c, g, or t
cagttcttttcttttagcacttcaaacatcaagttccactgtgctttggcctccgtttttctccatgagaaatctacaggcatttgaatcgatgttcctctatatgtaatgagttgtgtttctctggctgctttcaagattttttccttcatctttgcttctagtagtttgattatgatgtatctttatgtaggtatctttgacttcatcctgttttaagtttgcttttttaattagtaaattactttcagcaaatttgggaagcttttgtccatttttttcttcacatatttttctgcctcaatcttttctggtattctaataatgacatgcatgttagaccttttcatatataaatatagagaaatagtgtgtatgcatggggtgcgtgtgcacacaccccctcccccatctggcttaggaatttctgttctacccnagggatgcttgtaggagtatttttaaaaaaagganaaaaaggacctccgtttttcccat

SEQ ID NO: 458502 - DNA, 498 bp, Homo Sapiens
  misc_feature (25)..(25): n is a, c, g, or t
  misc_feature (46)..(46): n is a, c, g, or t
  misc_feature (77)..(77): n is a, c, g, or t
ttcaagttgcaaaaaaccttggctntgcccaactgctcccccgccnaatgcttgtcaagggccctgttgtgtaaggnaccctgaagtaaatccccaaaaccctgtccctgtgccttatttgggtttggggcaacatttttggcaagcctcgggggtgaaccccgggaccttcctgttgattccatatacagaattaagagcatcccctcgtcccagctttcctcccactgtctggtttatccccatgtctccaatttcccgggttgttttttctcagctttatgctttctgaaagtcagggttttctctcagagttttagctgttcgtgttgttgtgaaggtccacctgactgggacagttctcagggaaaagttgtgtgaaaagagagaactaccagggacgtccacatcctgtttggactccaggagcccatcttcctgtttcccttgctctcatagaaggtgactacagtgtagcctaatagggctaggagaaac

SEQ ID NO: 458503 - DNA, 604 bp, Homo Sapiens
ccctgtacctatgggacttccagaaagaagttaaattgagtaaaatcatcagaaactgaatccatgtaagaaaaaataattgttgaagaaagaagttgatagaattcaaaaaggccatctttttgctttcacatcaataaaatttaccaagtaatagatcagtactcactaatatttttgagaccatagttgtctggtcagaaaaattatattaaattagtaaattctagaagctctttaaaagggaagttttccttcttctccaattataggagttgatttttactttgcaaagtggctcggtcctcatgagcatctgcatgttgactcttcagttaagaaaattgttgttcatttagggaggtggatattctgatgaagatctttatcctaaaccttcctactatccttgtcttattcatcaaggcagatattttagtcaaggaattccagaggaaggctggctcctaaaatgtctacttggcagcccaataccagagcataaactatccattctggggtctggctttagaaatcatctttgtgggaagacctaattcttcacagcaaggatctcaggcatgccttctagatttgttccctc

SEQ ID NO: 458504 - DNA, 235 bp, Homo Sapiens
aatcacattttgaatgcaactgagaaactggttttgtaggcctaccttttatttaagagtacatctggctccaatgttaccccaaacatgcaaaacataaggcaacaattctgatcattttataggctcccaagcccattagcaatatcttagtcaaattttaaaaagagaacaggaaataaggaaggcctaacagaggagttaaataattgtgcaaaacttatcagttcttcct

SEQ ID NO: 458505 - DNA, 373 bp, Homo Sapiens
  misc_feature (18)..(18): n is a, c, g, or t
  misc_feature (41)..(41): n is a, c, g, or t
  misc_feature (311)..(311): n is a, c, g, or t
ggttaagggaacaggggncagccttcagggcagctggtagngggtggaagcaggccagcacagagccgcttcaccaggcggcggttggagccagacagggctgaaaaggagaggttactgcagatcgcatccaaaaactcatcaggaaactggtcgtggcaggcctgtagcccagcctttggcacctggtgcccaggacactgcataccacacagctgttctggcagatggcagtggtgctgggatggggtctgtggagtggcaggacttggtgtgctggcagagcaagtggatggagaagttggaaatgnctgtagggtggtgctgggcctaagtggttctcacagagggcctccacagtgaatgctcgccg

SEQ ID NO: 458506 - DNA, 498 bp, Homo Sapiens
ttttttttctggacacaatatgtttaatattagaagaatgattacacatagcttgttacagatttccaaaaaacagtaggtacagtttttaaaatttacattcacagagaattttaatgacattggaaaatgtaagaaactttgaaaaaagatggagtaaaatatgtataaaattgataatagttgatttagggtggtagaagtaaacataattttttctgtttatatttttctctatcttttaaattttgctaatgtgcatagattcttttaaaataataaggaaaataataaggttaatacgttataaaaaatagggacctggctgttgaagtgcgatgggagacatttgttagaacatgtgggcttgttacacagacgcttggggagtttgttgagagagaacgattacctagaaacaagagttacagtaaatggggtaaaaagggcaaaagttcttcagattactatcctatttaccaaagtttgtgatatgta

SEQ ID NO: 458507 - DNA, 432 bp, Homo Sapiens
  misc_feature (267)..(267): n is a, c, g, or t
  misc_feature (275)..(275): n is a, c, g, or t
  misc_feature (417)..(417): n is a, c, g, or t
caaacacggcaagccattttattataacaaatacatacaatactttagtaagtatccaaaatgagtacaggataaagaataactgataaaataaatattcaacacaaaatgttgaatttgggggttcagttgaatataaatcatcccgagcccattaatactgatagagatacaactccacataaccacgccatatattaaaatctctttcattaaacctaaggcaagacaccatcaactacaggagttttagggaaccattaaggnaaaaaaantgttggtcataggatttttttgactggcaggacatattcttaatttctaacaggtcgggtttacaaaaggaaaatatgcatcttgggaccgaggatttctggatatggggcaaactggggaagtgggtcagccgggttaggnctgccggaggagttt

SEQ ID NO: 458508 - DNA, 497 bp, Homo Sapiens
gtcataaattaaaaaattatggcacagagcagttaaccgtcttgtcccagtatgacacaaagtgatgggaatagggatgaacggtaaatgtctttcctcattccttataacaggattagtttttagaacaaatatgctgaagtttcaggtttgagtgatgatggactacaatacattgtcacactcttttaatggtataaaacctctaatgccaacgcagttgcatgtatggagcaaaatagattaattactacattcatagaatgttctataacacagaagttgaaaagactttcttagatttttacattatgaattttcagatgatgagtaaggtgtgaatgttgcctaaaggccttcttacattccttacattcatagggtttctcaccagaatgaattctcagatgttgaataagggatgaattaagtctaaaggccttcctacattccttacactcaaagggtttttcgccagtatgaatgctctgatgtag

SEQ ID NO: 458509 - DNA, 522 bp, Homo Sapiens
  misc_feature (398)..(398): n is a, c, g, or t
  misc_feature (439)..(439): n is a, c, g, or t
  misc_feature (446)..(446): n is a, c, g, or t
  misc_feature (460)..(460): n is a, c, g, or t
  misc_feature (486)..(486): n is a, c, g, or t
  misc_feature (497)..(497): n is a, c, g, or t
  misc_feature (510)..(510): n is a, c, g, or t
tttatgttatctccaaatgaattactaagacaaagggataataaatgggaagtgtacaacccggagacttcagaccagaaaatcaaagagagatgatgggaaagggtggagtaatgctgagttttgaagaatgggcacatttagacagaccaaagactgagcatcatatcattgctgccgttccatgaactgagagcaaactgttagatcatgacctgctacagaatcactagggcatcaggaagaagagtaggtatatggtctgtattaggagtataggcaatgggattattcttccagctgccaaggaagtcaaggaagggaaagcctgtattttgactttatccatttctattggaatgtctgagtgatacatagagtagtaatttttaggacantttaagtaacttaaagtttattttaggctttagtatgttangctgttntattttaaaaatgncttggaaaaattaggggtttgtttcnccccggaattnttccttttccccntggttggccccg

SEQ ID NO: 458510 - DNA, 384 bp, Homo Sapiens
ggtggttcttccctgtctggatggtaccaagagaaaaatgatacccacagaggcttttcataccaacagtttctctggccaaaatactgcacatacagggagttccacaaagaagggcctttgctgcttggttcctaaagcctgggggtatccaggtagggctctccctctagcccacccccaggtagacacagcataggtcctcaaacagcaggggccagcaggtgtaatgacagtctgtatacctccttccaaccttccctgcccagtgggagtggagacttgtttttgttgtccctccctgggtagaggatcatgccttatacctgtgcaaaatatatttttctcattcatatttccctagaaacttttatacagagacat

SEQ ID NO: 458511 - DNA, 459 bp, Homo Sapiens
  misc_feature (46)..(46): n is a, c, g, or t
gaaacaacctttcctccttctggctgggaaagttccccggtagganttagtggctctgcattctttggagagagatgtggagcccagtggaagagatgtgcaccggtggagacaacagcgaagctcccaaggattgggccacacctcaccaagaggagagaaaggagaaagcaagggacaagcttgcatctttgactgggtgggccgagacagagcaggaaggcatggctgtatgctgagcttccttctggatcttctttccattcatactacctgggagaggcacgggctgagggataatagtgcatgtggccccagcttgccccactcagtgctgaccatagccagtgaaggaagacactctgcttttggcccgggatggttcttacagccctggtaggcagagcaacttacgtggcaatacctctctgcctcagcacagaaggataggtgttactg

SEQ ID NO: 458512 - DNA, 515 bp, Homo Sapiens
  misc_feature (429)..(429): n is a, c, g, or t
  misc_feature (438)..(438): n is a, c, g, or t
  misc_feature (446)..(446): n is a, c, g, or t
  misc_feature (453)..(453): n is a, c, g, or t
  misc_feature (493)..(493): n is a, c, g, or t
  misc_feature (499)..(499): n is a, c, g, or t
aacattcgaagattttattttgctgctgtggtggagaatggctgttgaaggtcattaggagctagttaatacaggtcatatttcttgggagagctgatggagattggcctggtgattcctgaagaagtgacaagaagtggacaggtttgagacactaattacagttctagacaccgagtccctcctctgggaccacactcctttacagacctcatctctttagggatgggcagcatcccttcagggctgggactgcttctgccacacctcccaggacacataagccgggcctccaagaaggctgtgtcttttgctggaacattccacaggttgttaaggagacagagggcaggcatttcagcttcagggccccctaggaccccaagttcctggcattcgtccccagtgttcacaagggcttccaggcantgatggganggacgganggggggntttccttgccgttttttccaaagaacccaggtttcgaggntttttnaaggttggggcaattt

SEQ ID NO: 458513 - DNA, 172 bp, Homo Sapiens
ctgtatccaggccgagcgacaggtgggcttgggaaccatctcactcccggcctagatgctacaccaaaaggaaaaacttccctcccacaccccttcgtcctgctctggtttcctgactgccagtggggaagcacttcttttggaagccactggaaattgagggatgagacag

SEQ ID NO: 458514 - DNA, 336 bp, Homo Sapiens
  misc_feature (226)..(226): n is a, c, g, or t
acttgtaagaatttgttcccactttatttgcccatctatcctttcatcagacagtgagaaaaagaccaggtcatactcaccgctatatgcccagcacttggcctagtgctagacacctgacaaatgctcatctctccccaagccccttgtcccctcccagccatattttccaaagggttgagcagactctgacatgattgggggaggcaatgactgacgacaggangccctgtctgctgggcagcccctacagacagggctccaaataccaagccaagtagggtcctccccagccttagagacctttccagtcaagaccaccatgtacagtgattc

SEQ ID NO: 458515 - DNA, 112 bp, Homo Sapiens
gccttgagggctgttggccagagacattagtcttgcctgtagcccatgtgagcatgcttgggctgtgtcttccccgagctgagccttgtgagtcactgcagtttggccatta

SEQ ID NO: 458516 - DNA, 734 bp, Homo Sapiens
  misc_feature (641)..(641): n is a, c, g, or t
  misc_feature (645)..(645): n is a, c, g, or t
  misc_feature (657)..(657): n is a, c, g, or t
ggactctgaacctgtcttgtcctgggtcctccagttgttggaagccactcttttccccaaccatgctgaaatgccacctttaccacacactgatgtcttacatagacttagatctatttctggaacttctcttctcttcgcttacttgggtgtctcatctggcaccagccatacaattttaactattgtcaatttctaatgtcttattatgtggtgggatgagtcccttcactcttcttttacaaaatttcctagttattctctcacatctattcttccacataaactttaaattgtgcccagtcctccaccccctgtcccattcccacccccaaattctgggctctgtcattccctgtgccatcatcttccccccattgtaattactgtccactcaggggctgtgaaatagactatgttctataaagagggacaaaaagggcatcctgatcttgagagaggcctgctgttcctcccatcatttcacctgccccctaagcccaggagttgtcatgagaggtcaccaggcccccactcaatctcagcttgggaaccaaagtcacccaccttggttgtgttggggtggacccgccatctgtccctggtccagacgagaaagaggagtctctcctaggcctggngctnggaaagaatgtntggcccagttgtctgcacttctaattctcatcatggagaaacctttattcctatctccctttcctgaactggttttt

SEQ ID NO: 458517 - DNA, 330 bp, Homo Sapiens
ggcagagtggaatataactaggcagtgacaaatagcactttgcacgctgcagatgggatgagtcagcggggtgtctgggccttgcgaagccctggctgtctttggttgtgaaggggtcttcaaataactggtggaaatgtatgtggtgtaatgctggcaacagccaggagagttcagctctatttttggccaaggaaatgcttccttgtctctagccaactcttacctagtcataatttttacagcctccatttctggatctctgtaaatgctatgaggcattccagtagtgaaagtttttgatattatggggtccagagttgcccgttt

SEQ ID NO: 458518 - DNA, 325 bp, Homo Sapiens
aaaaaaacgtgtgtcatttcagcctattcagtgcattctgcagcacctgctagaatatttatcctccttctctttccacttaagtcctacatttacataaaggctactggagggttccatgttgaagcaggttttatttgcaaaactcagcctccatggatgtgtctttctgcagcattcctttgtgcctctcattatcacctaagggtttataaaatgggcagtggtaactctagttttaaatctagttaactctagagattaaaatccagtaactctagattaaaatctagtaactctcagctattgtgaacaagttgaagtt

SEQ ID NO: 458519 - DNA, 338 bp, Homo Sapiens
cgagacaatgataaaatcaagacagtgcttaagtctctgctgtcgttaagttcattatggaagatagttggtcaggatggaggttcaggtcagaggggacagggacaaactaagcctgggagaagatgaatgttcacagttttgagggaatttagcaaaagccaaactgagatcactcaagaccaggcgatggtagacagactctctaaatccaggccaccgatgatgttctccttctctgaggttcttctcagagaacatttcctcatctgtaaaacgggtgtgctaagtccccactgtttaatccctggggttgctgtgaggatcaaatggagcac

SEQ ID NO: 458520 - DNA, 432 bp, Homo Sapiens
  misc_feature (37)..(37): n is a, c, g, or t
aatacttgaccctggtgtaaacgttcccatgggattnataagtccttaaggtggaaaaaaaccaaaccaaacaaataactcaggaagccttaaggtgatttggaatggacattcgggtcttggattgacactgtttattctgctataattaaaattaatgaaactgggctgtaactagatagactatgtgttaatactgtgccaagtacacatgagattaatatcatcaaggttaataactattttagcaaaatcaacaaagaccagtcatatttcttaatttggatagtgtcatattaaaacaaatttgaaaaaccctcctctttgaacatctgtttatgtaataacatacatgaaggcatttcttggacttgccaagcttttgtggtaatcttagatcactaatgctataatatataacctaacagaagt

SEQ ID NO: 458521 - DNA, 535 bp, Homo Sapiens
  misc_feature (356)..(356): n is a, c, g, or t
  misc_feature (401)..(401): n is a, c, g, or t
  misc_feature (414)..(414): n is a, c, g, or t
  misc_feature (445)..(445): n is a, c, g, or t
  misc_feature (453)..(453): n is a, c, g, or t
  misc_feature (458)..(458): n is a, c, g, or t
  misc_feature (469)..(469): n is a, c, g, or t
  misc_feature (508)..(508): n is a, c, g, or t
cttctgttaggttatatattatagcattagtgatctaagattaccacaaaagcttggcaagtccaagaaatgccttcatgtatgttattacataaacagatgttcaaagaggagggtttttcaaatttgttttaatatgacactatccaaattaagaaatatgactggtctttgttgattttgctaaaatagttattaaccttgatgatattaatctcatgtgtacttgggcacagtattaacacatagtctatctagttacagcccagtttcattaattttaattataggcaggaataaacagtgtccaatccaaggccccgaatgtcccttcccaaatcaccttaaggcttccngaggttattttgtttggggtttgggtttttttcccacccttaggnctattattccccngggggacggtttacacccagggtccaggtantttttccnttccnggggctttacnttttaccaagggccgtggaccggcgggttgtttgggggnccttcccccgacccggaggttcgtggg

SEQ ID NO: 458522 - DNA, 335 bp, Homo Sapiens
  misc_feature (97)..(97): n is a, c, g, or t
  misc_feature (153)..(153): n is a, c, g, or t
  misc_feature (254)..(254): n is a, c, g, or t
cacatatcagtattatatcttttcaaaggaacaggtcaagatgagataaagttatgatcaaaggtagtcaaacatttattttatataaatataattnccttgcctatatccattagatttggggaaaaaaggttcaagtttacagtgccagancagctccttctttaaaggcttgtaaacagtgacttgttctatgccagcatgcacactttgagcatatcaactcacttaatccttaccaacaattctatgangattgtgctatcattcccatttcacagataaaaactaatgtatctagatatgataatcttgctcaggatcatgcactggga

SEQ ID NO: 458523 - DNA, 873 bp, Homo Sapiens
  misc_feature (38)..(38): n is a, c, g, or t
aaaaaacccaaaccatttgaattttgaactcgaatgcnattagcccaatggggaaaccccttgccaggtttgggggaacatgcatggaaatagggcttaaatgaagacgaggctggtgtaaatcaggggagaagctggatcaggcacatggtaaagggtgatgtgtggcatttgttttgtgtaatcagaatagtacccacccatccaacttcttggaaatatgtatttctgcttctccatgagattggactggaagcttccatcttatatatcccttccccatggataacagcaccttccagggatgggcacctgatacaaacttggcctatcagagcacttccctgggaatttttcccttggggccagagaaacatgggtgtcagtccctctctggtgataaagctgtgtcatgtaaagtctgggggatctataatgactaaaagatttgagagtcagagagagggaattctagcttggctcaggccctggtttcccctcactttggagggctcagacacccttttgcttgtgccacaatatgaacaatattcaccaccctcatttaactaaactagtctgagttgaatttttgtcatctgcaaaccaaaaagttctgatgacatttgcagtaagagaaatgtctactctttgtcattcaaagagttcaatttgttcattcttcaaattttgagcacagttctcaacaacactctagggttgttttgtgtgcattgggtccatcattttgtgcctgtaagaaataacaacaaaaatctttcctcactagtcagcatcaggttcaggaactccaggttctctgtagacacaaggctttgggattcccttcagagaaggagcaatgcatctcca

SEQ ID NO: 458524 - DNA, 431 bp, Homo Sapiens
  misc_feature (24)..(24): n is a, c, g, or t
gaagttctataaaatatgtatttnctaaacattggaaacaagttaaatgtttatcaattgagtaatggcaagtaaattggggtacatgatcttgaaggaacatgacttattctctcattcattatacaaacatatagactgccaaagagctatcagatacacagcaatttaacagttaccacatctgacttcaatgaatacacagtctggtagagtcttctaaaatgataattaccaaactacataggaaaggcgagcactatttgtgggtctaacgttaagagggaaaacaaatcaggattataaaaccatctgtacattacggttggcaactcttaaacatgtgaggagtgtggaacagggtctgggacggggtggattacgggggttggaccattttggtgtggggttgggttggggttgactttttt

SEQ ID NO: 458525 - DNA, 464 bp, Homo Sapiens
  misc_feature (411)..(411): n is a, c, g, or t
  misc_feature (435)..(435): n is a, c, g, or t
cttttacttgtgtgtgtatgtactgggggagtatagcttttattctgtgctcaattcgaaagagagtattataagttttcccagcccatccacccgctaaaaaagaacatatccaaattttaatatgtatacacccaacctgtacctatgtacgtgaatatacatgcactgggaaatctacttaagagtcttcactgagaagttcactcgatagaaaggtcttgatagagaagagaagaggaaagcaatggtctgaaggcaaatcctgctttaacttggtggtccatttcccattcattcctgaaccaatgaggaggcaggaaaggaaacaagtcaacccaaacaaggcaaactagggggctgggacggcgggcgaatgggatgctgggttcagtttggggcaatttcacntgaaactccttccagggaaccccngctgggaacttggctttcccaactttccc

SEQ ID NO: 458526 - DNA, 515 bp, Homo Sapiens
ttttttttcctaagatattgttctgtattacaaaagaagaaattagactcaattgccctattataaatttgctaaaaatacatatatatatattttttatctgaacagaaaaatagactactctgagatgcgtggacattctatgacatagtcgcgcatcagatacttctagagccagaaaaatggcaacagaaaatgcagaggtaactcttatttctgggtgtagccaggactggtttgggttgcctgggctgagtgacatgaaagcatttggatgctgtcctataagcagtgataggtgaggaaacatcagctcggggctgggaagcttttccattgtccctgcccggggtcttcagggggagccccttcttcctcctgcccactctgcagctacagaaaaagtcctttcccaaagaagcatgtccggaggctttttgccttgctctctcctgattcgagagttaccttgaatcgagcctgcaagcaagcacatggggtacacttaccgttgg

SEQ ID NO: 458527 - DNA, 279 bp, Homo Sapiens
gtcactctgtggcctagtgttggtaggattcacattgaccactgagcctttccgggtaggatcttgccttatggcttctggtctcatcccatcacaggaaaatcccaccacagatgtcactgttgttccgctagatggagaaatctgtagtaatctggggtctataaaaggtgtaaaggaggaggaagatttgtgtttctggagtgtgctactagcggactgagtctggcggacgattagagtgccctccttggatggggtcatggccggctcactttc

SEQ ID NO: 458528 - DNA, 529 bp, Homo Sapiens
aggatctcccactaaccccggacaaatagtagacacgtaacttatcctttttgccagatattgtcaccaagacattcaagccctcaagtacgtccatttgttgaaatcgtcttcggttgataagaggatagaccttcccttggccacttctgtccagcagcatcaggccactctctgtacccactagcaaattcactccccataaggcagcacacagaatctcagagttaaacctcttcttgtatttacgaatctccggggtgtcactctgtggcctagtgttggtaggattcacattgaccactgagcctttccgggtaggatcttgccttatggcttctggtctcatcccatcacaggaaaatcccaccacagatgtcactgttgttccgctagatggagaaatctgtagtaatctggggtctataaaaggtgtaaaggaggaggaagatttgtgtttctggagtgtgctactagcggactgagtctcattagcagtgagcttgtccggggttgttgggtaccgagc

SEQ ID NO: 458529 - DNA, 495 bp, Homo Sapiens
  misc_feature (427)..(427): n is a, c, g, or t
  misc_feature (437)..(437): n is a, c, g, or t
  misc_feature (450)..(450): n is a, c, g, or t
  misc_feature (457)..(457): n is a, c, g, or t
  misc_feature (466)..(466): n is a, c, g, or t
  misc_feature (482)..(482): n is a, c, g, or t
aatagatgtagactctaatgttttaactattggattctgcttaacaatatttcttaagcatggtgaagcacctaaaaaaatcaggctggttttggttgaatactatcctctttgtgaaataccaccctgaaatatttatatttttattttcataatagtcactcaaaataattttaccagtggaatgtgttcctattgtatatatcttttaaaactacaatcatgtatctagaggaaaaatctatttaagaataaagggctgtttcaattttcctaatattttgttatcatctagcacttgccagtaaacaaacgataatagtagtcaaagtattaaaatatatctaaggaaattgtatggcattgttactatattatgtgactcaattatatggcagttttaggcagttttaacactccagcttcngggggcttcngtaggaaatttcnggtaaantaggtcacngtaggggcttttttcnggataaatgggta

SEQ ID NO: 458530 - DNA, 419 bp, Homo Sapiens
  misc_feature (409)..(409): n is a, c, g, or t
tttttaagggaatgtcatagtgtagctgctgaagtggatattatcaatatggcagacaaagtaaattctaccaaggaacaatgcatgccaactccatatactgtgaggaaggaaacaggatgactatgcatggttacagcagaatgactgacggagcataatggctcattaccaaaggctctggcacacctgcaggaaggcacctctgcctgcattaggtactaccacagaatctgtctgttatgcaccatggaatacaccatgatcagtgagctcttcaaagaccattctggaaacccggggcagaaatactatccacctatgtgatgggccacctgaaggcaacatgtcagcatgtttaaggcctccccaatttgacggtaggggcattcatggggttccaattccnggttttgttc

SEQ ID NO: 458531 - DNA, 584 bp, Homo Sapiens
  misc_feature (13)..(13): n is a, c, g, or t
  misc_feature (34)..(34): n is a, c, g, or t
  misc_feature (59)..(59): n is a, c, g, or t
  misc_feature (66)..(66): n is a, c, g, or t
  misc_feature (71)..(71): n is a, c, g, or t
  misc_feature (78)..(78): n is a, c, g, or t
  misc_feature (87)..(87): n is a, c, g, or t
  misc_feature (100)..(100): n is a, c, g, or t
  misc_feature (132)..(132): n is a, c, g, or t
  misc_feature (163)..(163): n is a, c, g, or t
  misc_feature (170)..(170): n is a, c, g, or t
ggacacattccantactccccttgtaaagccccnatataactaaacccttgcatgccgngcctaancctgntaaaaancggttcaanagctcccccgganggaaaacctaatatctgaaaactgagtttgcnagaacatctgggggatcagtcaaccctaacnactttantttcccaaagaaactcagagaccttaggtgactagccacgctcacgtaataggtggagctgagagttcagccaatgtgaatgaaatcatgggctagaatattcccaatgactcccaacatgaccagctgaacatttttcttgctcatggtttcagtataacctagcctacttcttttcagcagagatccatcagtaaagcttggtaggttttccatcacagctaactagtgcactttgttggctctgtagtctcactgaaatagaaccctatgtgggtgtggtcactggtagatggtaagcagggtgctcacacaggtgtttcaagaagggggttccaataggccaggtacggtggcttacacaagtaattccagcactttggaaggccaaggtgggtagatcacctgaggtca

SEQ ID NO: 458532 - DNA, 483 bp, Homo Sapiens
  misc_feature (396)..(396): n is a, c, g, or t
  misc_feature (434)..(434): n is a, c, g, or t
  misc_feature (445)..(445): n is a, c, g, or t
tgagtgtttctattaataagtatctaagtttcaattgtcttgtatctttccctaattctccaaacggttcaatctccagttttattcagggactgggccattttgttctcagagggacaaaactgatctctccatgaaatcccctgcacctcactctgggcagctctaggctcagcagatgtttttctgccattaggaaacagccccttactctcagctcctgtgctaacacccatacccaccagctgggcgttgggacctctcccgtcatatggctgccacttgcttggggaaggaattctccagactccttttactttgtatgtgtttctaggggggaattctgaggggaaggaagctttgcaggcaacctctgtggcccaggaacatacgggntcacaaagtcctttgtgccgacaggggaatctattctnaattgttttangtgtgtggagggctcattgttcagcctaggattttccc

SEQ ID NO: 458533 - DNA, 330 bp, Homo Sapiens
ggtagctaaaaatatatggattttctccatgtcctctctttctaaaagagacctaattcttatattcccaacctcaagacttctatcatctcccactggccacagatcatcatcacgttcagcccatctcaaggggcacttgccctcccctctcagccctcacctgacaccatctctggacccacactgagctctgtcaccactggacccctcaccaggggaggctcccatctcctctgtgccttgccacatgctcttccctactgtaagttttgggcccaatgccactacctctgaggaagccttccaggaaccctcctttcccaccag

SEQ ID NO: 458534 - DNA, 332 bp, Homo Sapiens
tgtcagtgctaaaaagaggccgctaaccaaccaccacaaaagacatctcagatatttagagccctttccctctccctttccccattggtttcactttttgagggaaattcttatgcttttctcttataaattgccattgataaggttgtaataaacatcagagtttagaggaaggcaaagaataatagttttagctgtggaacggatgtgagctgatccttgggttcaacaatcattttgaaattgaggtttacccatagattccattagcctatatagagaagtgcattatttggtgtaaagtacctcctgtgttcacttagtgcccattc

SEQ ID NO: 458535 - DNA, 175 bp, Homo Sapiens
ggtaaaatattacttcaaacccctttttcttgctttatttttcagtgttttattgctttatgaactgtttaaccctgaaatccctctaggttatctatactgtataaaaaagcaattacccttaaaactgtactctggcctacttttctattttgcaattaaatatctttttcac

SEQ ID NO: 458536 - DNA, 460 bp, Homo Sapiens
  misc_feature (357)..(357): n is a, c, g, or t
  misc_feature (384)..(384): n is a, c, g, or t
  misc_feature (398)..(398): n is a, c, g, or t
  misc_feature (404)..(404): n is a, c, g, or t
ttttttttctaagctttcaatgacagatattttaattgtggaatttttaaagcaaacaaagcaatggaaacttcatttttattctagaccagtctatcccagacatgctgattatggttggctgtgctgagtcctcatttaccgtatgaaatgcaaatgtctgtcaattgcaatgcctggggccaagccaggccagtggacttgtgtgcagttcccaccggagaccagggagctgctcagacagcagacccagtcccagtccactgggttttgcaaacacaggctccctctgcagcagcatggggcttgtgggaaggggagggcatgccgccgccagcatgcatgccagggggtccngggttcttcccgtgttttgcagaggtnaggggtacaaagtngagctnggaaacaaaacatgtgtttccccttgggcttgaaggagttgccttaaccatttctt

SEQ ID NO: 458537 - DNA, 197 bp, Homo Sapiens
cacatgatacacagaaaactcaaggacccagaggggaaccaagttatgttataccatttacaaaataccaaggagtccacagctacctaacacatttactacagcacaggaaccaatgaaggtacagtgtacaaaaaactgtaaacacggcacaataaatagataaaacaccaggttccgcaccatgacatgatgtg

SEQ ID NO: 458538 - DNA, 408 bp, Homo Sapiens
  misc_feature (39)..(39): n is a, c, g, or t
ggtgagctagtgctaaaggccttcccacattctttgcantcgtaaggtttttcactggtatgaattcgctgatgttgaaccaggtatgaaaaggtactgaaggccttcccacactcctcacacccaaagggtttttcaccagtgtgagtactctgatgccgggtaagctttccatatactagaaaagctttcccacattccccgcactcatatggtttcttcccagtatgaatactcttatgtactgtaagttgatactaccgctaatagtctttccacattgcttacatttgagtggcttctcaccagtgtgaattctcccatgcttaacaaaggctgagccactgataaaggccttcccacatttttcatatttatagggtttctcaccaacatgcaatctctgat

SEQ ID NO: 458539 - DNA, 372 bp, Homo Sapiens
  misc_feature (354)..(354): n is a, c, g, or t
tagaaagaaacggcagatgacttgcccaaggccacctggcaggtttgtgggggagagctttccaaattaagacatttaactgagtgcttgctcaaatcaggatttggatctgggatttagtatggtggtctttttaatacatcaaggattcttaatctgacgtctttggttagacttcaggatctatgaacctactgaactacatgcaaaattgggaggatatgcattttttctatggaaagaagtaggtgcttagatcagattctcaaagagatttcgggcccaattaagattagaaagcactacaatcctctaggtcagccctcagccctacttccctgcagaacctggagnactcctgcgtagagctgc

SEQ ID NO: 458540 - DNA, 319 bp, Homo Sapiens
  misc_feature (118)..(118): n is a, c, g, or t
  misc_feature (289)..(289): n is a, c, g, or t
ccaggctttacaataggatttaatttgattttccaacaatcctgggagggaggtattattaaccccatttcacagacacggatatggggcttggagaggtcaagtggctttcccaagntcaagcagggagtagagccagagccaggatttggacccaggctgggccaacaccaaaacccatgccttcaaccttgacaccagcctgccaaccaaagacaggagaagggaaggccctggaggtgagctgttggcagcagtgaacttgctcgagctccctcgggaaacactnttgaaaggaacatttccaaagccatccagg

SEQ ID NO: 458541 - DNA, 494 bp, Homo Sapiens
  misc_feature (441)..(441): n is a, c, g, or t
  misc_feature (467)..(467): n is a, c, g, or t
ttttcaaccagcctgtaattgagctgtcagtttctgaaaacaaccgacgtgggttatacttaacaactattagtgccacagatgaagacagtgggaaaaatgcagacattgtttatcagcttggaccgaatgcctccttctttgatctggaccgaaaaacaggagttttgacagcctccagagtatttgacagagaagaacaagaacgattcatttttacagtaactgccagggataatgggacccctcccctccaaagccaagcggctgtgattgttactgttctggatgagaatgacaatagccccaagtttactcataatcattttcaattttttgtgtctgaggaatctgccaaagtatagtactgtggggggtaatcacagtgacagatggcaggtgctgggagaggattaaagctgtggactctttccttctaantgacatgatattttgtgttgggtccncttctgggatcctaaagtcaatgtctc

SEQ ID NO: 458542 - DNA, 411 bp, Homo Sapiens
  misc_feature (339)..(339): n is a, c, g, or t
tttggagacgaggtgccatgttagatccgggccaaatgaccactgccagcctccctttcagcatggctgaaatgtcccctggagactgtcaacttttcttcagcatggagcagcggtccagtggtcagcaggcaggtggacaccatgcttcccacctaccaccagctctctgcatccttgacagtgacagaactgagtgtcaatcccccagggagcctcaggtgagtccaggagctcaaagcagcttcttagaaagaaaggccagcacacggcctacagtcatcctttggtgacaaataaggagtgtccaatatctgcccttgaggaaccaggaagcangctctggagcccctacaagccagggaaccaggatcactgggcatgccagggactggtggctggtggtgtcca

SEQ ID NO: 458543 - DNA, 370 bp, Homo Sapiens
  misc_feature (159)..(159): n is a, c, g, or t
agtcgggcaactaattctcccttagaaacgtgcatcctcagtcctcagtaatccactaggggagatggcatgccagcagaaagtcagagaaaagggccctagaaccatccctttgtcctgggactgcttgaaaataagaggacagatatgaggcccttngagggaaaatgacaaaaccaccatacaaagaaagcaaaagagtttattatccacctaatagaattcaactttttggctttaataaagaatcatctcttttaaattaccttcaaaaagtataaaataagtttccagaaatcaactccaggctataaaaaggtcagtttttaaccactttctctacaagaccctctgatcaatatttgtttcc

SEQ ID NO: 458544 - DNA, 357 bp, Homo Sapiens
tataaatgaacatgctgcctgtttaaaggacttgctttctgctgtttctagatacctagcagcgcgagaactgtgtgacgtgctgcgttcttgttacgggaggtgcgtgacggggcagcgggggtttctggaagtcacctgtttctgctttctggttgcctgtgcctgtggtcatccctgctccttagcagtagtgcatgtttttcttctatctgcagggttgctctggtagctccatggtagagatttcactctcagggcctcccaaaagttgtgtatcatttgaaattgttctatttgaggaaaaacttttaagaaaagctggattccctgatcaccactaaagatcatcatgag

SEQ ID NO: 458545 - DNA, 465 bp, Homo Sapiens
  misc_feature (21)..(21): n is a, c, g, or t
  misc_feature (66)..(66): n is a, c, g, or t
cctgccctaaaaccttccttnaaagttgtcccttcaaacctccccatgaatgctgaaactccccangtcccaagcgccctgcctctccctccgccccggcaactgctggggcccatgcaagaaaaggaacttgaacaggtgtgaaggtccccaggtaacactcggtcaaattctctctcatttgggtcatctgcaacaggggtggcttccctcggtaggctcccaccgcagctgtgagctctgacaggtccacgtcgtcatacagggctcatctggggtgggacctgggcctgagtctgccgggagggcctcagttgcattgtccaggcaggacaacgtcggggaggaggcctgggcctgtgcactgctggggccatcgatgtaagtgttgggctctgagaactttctctgcatcagtaagagagagtttttggccgcactcacaatacaggagatccctatcgg

SEQ ID NO: 458546 - DNA, 477 bp, Homo Sapiens
  misc_feature (315)..(315): n is a, c, g, or t
  misc_feature (374)..(374): n is a, c, g, or t
  misc_feature (404)..(404): n is a, c, g, or t
  misc_feature (443)..(443): n is a, c, g, or t
gtaactttatgtaaataggaaaaaagtgctttctttttaaattggaaaaaccaaatgccctttttctgtaattataagagatcatggcaattctacattgtttggagaatttgctatagcttcagtttttcttcttgtatgtcagagtactttgccagctataattgggtagtttatattttttgcatactctattgtttctgtgagtttcacacaggagaaatgaagttgtggacatgaggtgggagcaagaagtaaaactctgaagtctgtgttatgggatatgtttgttaataattatttatttatttattntttaggagttaggggtctcactctgttcatccaggctgggaagggcagtgggcacgatncatgtgctggactattaacctcaaactccnggggctccaaaccattctggccccactttcaggcctccntaagtagctggggcctacaggtggcccgccacta

SEQ ID NO: 458547 - DNA, 593 bp, Homo Sapiens
  misc_feature (442)..(442): n is a, c, g, or t
agagactggttttttccagccttggtttggaagcttgtctcaaaaaccattacaaaatcttaaccttcaaatacattctaaatcactttaatttagaagataggtgagcaacttgagtgatcccaaaccaaactaacagtgctggtttgtccgacacccaaagcccacttcacacatttataaggacagagatttggtaactcatttgggtattttgtcagttttaacccttaatatacaggtatcccagctttgggcacatgtatgtccattcactttcaggaaggggtgtcagtactttctttctgtgtggtgaaaacataagccatggtgaactgataatttttgtttttaaattatttatattactgaattggcaaaattacagttcacactgcagagctaggttgtcctattggcataaaacaaaccagcaactttnctcatgtgtttggagttaaaatgtgtttttcagttataatttcaatttttaaatttcttggtgctttgtctaattaattacatcccataacttgtcaggatagttgctccaactgaattgctatcatttggctggatgggggtgaagtatg

SEQ ID NO: 458548 - DNA, 349 bp, Homo Sapiens
gaaattgaaaaattaatttattatatgaagaaacaggacaatatttattagcatcaacgactgcagagaagcagtcaacgaaagctcatatccacaatgcattgactggtaagtactggcacatacactcataaccatagcactaatgttttaaggtggtttccaaagaaatgctgtatttgacaatcaattttaatatatattttcccatttacaaggctgaaaagattaaactcacatccaaataatgccttgaatcagcattcaagttgtaaagcacaattatcaaaagatgttgctatatcctttatcgaaaactatactaaaatgataaattcatttgccacca

SEQ ID NO: 458549 - DNA, 435 bp, Homo Sapiens
  misc_feature (318)..(318): n is a, c, g, or t
  misc_feature (390)..(390): n is a, c, g, or t
  misc_feature (400)..(400): n is a, c, g, or t
  misc_feature (417)..(417): n is a, c, g, or t
ctagaatgcagaggagagaagttaattatttacattcactggatgccttaataaggcaaggttcttcaaagctggcccaaggatagtttttacaattttttatggttaaaaaatcaaaagacttatatatctagatgtgagtatgaaacgtatgttttattgtccataaagtttttattggaacacagccgtgcccattcatgtatgtattctctatgggctgctttcccactacaactgcagagctggggtaatcgaggacagaggaaatgcagggctggaaactatttactatcttgccctttccaggaaaaaggnttgctgggccactgcctcaggaaccttagggttgttaaggtctcacaggaactggggtttgaggaaaggggntttggactcntaagggggaaatttacncattttggaattttattt

SEQ ID NO: 458550 - DNA, 357 bp, Homo Sapiens
aatggtttttttattataatccaaaggactcctagggagacaaaagaagttggagatttttccaaactcctaatcagaagagagtccacaagccaaaactagcccacatgcattttcgggtttggcctggaaatattttgtaacactttaaaggatttgttccaacatttaaaatagaagactttgcatggcaattccaatgtcaggcatccctagaaaaatcagaagagttggcaacctgggactcaccctcctgcactccaacaattggctggggtagagtagcagtagcctgccccttaatttggcctgccacgttctcttatatactatggacctatcagctccacttcactc

SEQ ID NO: 458551 - DNA, 401 bp, Homo Sapiens
  misc_feature (30)..(30): n is a, c, g, or t
  misc_feature (113)..(113): n is a, c, g, or t
ttcccggtctggcccagctctgaaaagagnacacatgggggattcggacctttatggcacaggcactggtgcatctgctctctttgtcccagtcacacttgggatgccttaanttttcctgatattatacatgcaaatcacttacttttccatagaatttaccattcatcaaatgactttcaacaataacaatggtctgacattctttcatgtcgtactgagatttcagatatttattagagaaactataagacagattttcctaatatttttgaagtatgagttcctctgaatagttggtataacatccattaaaaaatagaaaaggttaactttttaccatgatcaaagctagagttcacaatgaaacacctgcatactctgcccaacatctctgtaac

SEQ ID NO: 458552 - DNA, 291 bp, Homo Sapiens
tttaacagaaggaaagttaagtggtagatgataaatgtgttcattgaggatggcatattttatgcaaattgataaatccactgattcaaagattagaaaggctctttcctggaaaggaagtgtcgattataaatggtgaagacttgcatacttgcattctagcaagttcttagctgccagccaacacattcatcaccaagtgccagaatggattttaaaatgtcacaacacaaattgctctgctcaaaatcaggcaccatcatagtcacacaagccaaaccaacctgcttg

SEQ ID NO: 458553 - DNA, 540 bp, Homo Sapiens
  misc_feature (510)..(510): n is a, c, g, or t
  misc_feature (516)..(516): n is a, c, g, or t
ggattttacaatacagtttattagctgttctcctcttcttcataaatggaatggataatgttgataattctttacaaaccagtactcatttaagaaactaatgaggaggttgtcaaaaacacatatttaataaacaactccaaagagcaatgggaagccaaatattattattaatatgaaggagcagagaaactgatttgtgaaataatttctacctttcactaacatttcttaaaattgctcaccatgaagatttgtgcaattctagtgcagagcagtggatgaaagctgtctgaggggaaaacacacacataaatggggcttttgcctgccttcctattaataaaaggagaactagaaggaaagggcaaggaccaaaatccaacctggttgaccagaaccacagtaacaacacgggacaaccacaaaaaacctcagggaacccatttgaaaaccctttggtagaaaagagggagaatatgcccacactttttaccttataatcctaanttcccncaatggttctcccccatgaccacc

SEQ ID NO: 458554 - DNA, 881 bp, Homo Sapiens
cattctgcatcaagtaagtttctatttcttttttctcaaagggtagaaatggtacatctcaatttttgtaaggcttctgaggattaagggcagctcatcgctcaggacttgacaatctctaaaggagctcctggactctttcacccacaaggatagatggagccactccctatcccacaactcatagcaaggatctcctatgcatctagattttaatgccaacggtttcttggcttcctgacttgacatgcaccatgcacaaagagcaaggtactgactggtctaaagccactctccccggacactgctaactctagctaaccatctcacagacatcctgcctctgatcataagatggtccctggaaggaagcataaacacttcccaaatactagaacagacagcccaaagtgcaagttctactaatgggagagtaaatgaatcacctctgtgtacagagaatggcacaggaaattgttatgagtataaaaccatatctcccctttcttaatcacttgttattatctaacaaaggtagatacttttgagaagacctcaccaactacataagtatgtcctataaattgtcttgaaaacatattcccatgtttaaagattactttgaagaaccaaagttgaatgttcaaaaataaaaactattcttaccaagtttcccaagcccaaatccctggagaattctagaaaccagttttgttggtttctagtatttcagtattcagtatttcagctgcatcgagccccgactctatcattatgttcctcattttctttccttctcctgaggaagtcttcagttatttccatagcaacttgtgataatgtcctaaatgatcacattttttgaatagcacatatattat

SEQ ID NO: 458555 - DNA, 321 bp, Homo Sapiens
ttctgtcagtgtgctactggatggccagaggagttatcgatctttatttgagcactaactgtttcaaaaattagaattagagttacagtagactctctacagcaccataaatacatatagttggaaaattttgtgtataggactaatgctaaaacagtgagaaagactgcaatgtaaaaccaccaaagcttctttccgaattcactttaaaacacaatgtagtgttgttggatttagcaaataaaaatataagatccttatttaacattgggaatttcagataaggaacaatttttagcataaatgtgaaccacaatttag

SEQ ID NO: 458556 - DNA, 285 bp, Homo Sapiens
attttcatgatactttattttttagttgttgataccttagcacattaggatgtcaagtaatcaaaactctcaaatgttgtcttaaataatggccaagctcaaaaacatacaatgttgagctaaatccttatttcaccaaattggtatcttacatctcagtccttcagttttacatggaaaagtaaatccaagtataattttctttttattagccatcttaacacactgtgatatattactctaaagtgatgactttaaaaatacacataccaaattcagataaac

SEQ ID NO: 458557 - DNA, 226 bp, Homo Sapiens
aaattttgttttctctgtttattatcatttaaaatatattaaaattttaacatggcagaagcaggaattttacttgcacatggcagtctacaaaaagcaaaacaaacaaaactccacagaaacaaaatttacatcaaccaataatatattaaaattccttttaggtaaagatctaaagaaatgttatatatgcacacctcttagagtttgtttattttcttcagtg

SEQ ID NO: 458558 - DNA, 250 bp, Homo Sapiens
  misc_feature (95)..(108): n is a, c, g, or t
aggaaggaagggccaggtcctacatgaccacagaaggcagaaagggcctttggttacaaggagagttgcaccaattggttttcgtttttttctannnnnnnnnnnnnncaaatcattttcaatctgtacagttctcatctgcttcaaccaacaaatgaaatgcctcgattggaagaaggggtggtaagttccttctcaatatatatggctatattgaaacatgttcactttcctgatatgtaaaatagac

SEQ ID NO: 458559 - DNA, 316 bp, Homo Sapiens
  misc_feature (242)..(242): n is a, c, g, or t
ttatctgtgatctaatgattagtgttgaaaatcagtgtacggcttccgtggtgtctcctctactgaaatgttctcagtcttggtggtgttattttccagtagtagtaagcaggggtttgagaagaatcatttctaaataagattttagattaagctttttctccttccacaactcccttatagctccttccctttgggatcttgcacataagcttaggtgttcatgactcccattgtgttancatcacttctttgctaagaaagaaacatgcatatttactagaagccttttggagacatggtaatgtgataactt

SEQ ID NO: 458560 - DNA, 462 bp, Homo Sapiens
  misc_feature (82)..(82): n is a, c, g, or t
  misc_feature (104)..(104): n is a, c, g, or t
gtccaaatccttgggaaagggaaaatccaggaaccttgttgcctgggttccctcaactccaaccgggaaatccccagactanccaaggagggctgccctcctanagggcggttccttaaacctctgggaacggaggctgctgaaatgtgcccaacaagtgagacagcctttgcattcctgtttattctggtatcaataaaaaggaactgttactatagtaacagatattccacttggtgcacggccacttccacgatgcggaacatcatgtccaagccacacgcttgagaggcacaaataaatacccattttgtcagattgatgaggaataagaaacacgccaagctttgttctgagcaaggcggctcacgtaaaggaatttcccttgtttcttatgggagggtcaggcaagagtggattccagcacttcccatgggagggaagccaagcttcctgaggcag

SEQ ID NO: 458561 - DNA, 759 bp, Homo Sapiens
  misc_feature (554)..(578): n is a, c, g, or t
  misc_feature (620)..(629): n is a, c, g, or t
  misc_feature (642)..(642): n is a, c, g, or t
  misc_feature (717)..(717): n is a, c, g, or t
caccactaattcatttattcagtaattcaacaaaaaaaccattgagcacttaatatttgcagaatacatggctagatgcagaggattcaaagaattgagtgaagtcacataaagtgttaagaacagtgtgtgatacaaacatgaaatatgttagctgttagaatttcaaactcacttccatatcaattataataaggatttccataaatagcagaatagtatttctattagatgctcacagatgctaataaaacagtagaatggtaaaaaccatgcatcccccaaggcaagagaaggtgagctattttgcctcggtggctcaatattccatcaatgggtcctgctttaaactgcaagtacctgccttccttctttcaacagactgactccacgttgctttaggaaagattcactgaaacaaaggaataaaccacccaagatatagtgtttttaaaaacattttttaatgaagaaattattccactccaaaatatagacacacaattaaatagtttaatcacttcaaaatataacatgtccccaggaggttccannnnnnnnnnnnnnnnnnnnnnnnnaaacaatacttaacagcaatacaaaaatccatacaatagtannnnnnnnnnacaataccaatgnaatattgtgaaatctttagtgtctctgaattgattatttcaaatggtgtcaaattgcagtagtcataattaaaantgtcttacagttaattcgcctcaaggatgcaacacttctgga

SEQ ID NO: 458562 - DNA, 590 bp, Homo Sapiens
  misc_feature (25)..(25): n is a, c, g, or t
  misc_feature (43)..(43): n is a, c, g, or t
  misc_feature (57)..(57): n is a, c, g, or t
aatctgcagtccccgtacagtgtanctctttgaagtggtactnccatatactggggncggggagggaatatactttagagcagtgtacagtggccaccttaaaattaacttgttaattaatcctgtgcaccacaagcaagcccctaccattaggtgaagtatggggttcaggaattcatttacatacacggggggaagaaaggaagaagagccccagatggctggtggccgctcagaagtgcgtctccttctctgtgatggctgcgatggtcccgtcactcttgagtttggcatcacagtcattaactgtcaccatccgtgggctcaccccaagtcttgccccgacattttcagatctgtgctgggggtcgtcaacttctggagtttctcgggcagcgtcccctccgtcttccacactgtgatgcagatccagagcgggatgcagagcatggaggacagggccatgagccagccaatgccatagccccaggctgggtaggtgtagatgttgttgtacttgagtggcttgtacttgatcaagaagaagatgaagatccccgcgcagaatcccaggggtcatgatcatccag

SEQ ID NO: 458563 - DNA, 481 bp, Homo Sapiens
acaataaacttgattttaaataagcaggtggggaggaggtacaactgggagggcggagattattgcctgcaagtcttcagaggaagccaaggtccacggcaggtctggaagccagcaaggcacacaaagagaatccctaagaaataacccaatccggctcctcctcccatttgggagatggggaaactgaggcccagggagggaaagggagtgcccaaggtcacttcatgggatcagggcagaggggggcctgcagcccgggagtcctgagtctgctggactttttcttctctgccacatagccttgctgtctgcaaacccagtgtcccttggaaagggaaggtttgaaggaaaaattattccctgggggtatggaggaggggcggctgtggatggtcagagacttacttgggacacagaacggtcattaaaaggccgacagaggaggacagccatcactccccaccccacctggcccaca

SEQ ID NO: 458564 - DNA, 305 bp, Homo Sapiens
  misc_feature (217)..(217): n is a, c, g, or t
  misc_feature (233)..(233): n is a, c, g, or t
  misc_feature (277)..(277): n is a, c, g, or t
  misc_feature (284)..(284): n is a, c, g, or t
aactttgaaaatttctttattacagacatttcagaaccatttaaatcaacagacaaggaaatttttagacataacatactgtgtttatcttgaggtacacattgggcccattagataacgttttggaaagtaatgccattgttaactggtagttaacaacccaagttttccaagcaaagaaactgtaaagatgggttacaaaattctttgaaaaagnaattacaccatttccntttaaggataaactctccaaattcttaactgatttcaatttttngggcttngctttaaacattttaaatgga

SEQ ID NO: 458565 - DNA, 432 bp, Homo Sapiens
  misc_feature (38)..(38): n is a, c, g, or t
  misc_feature (77)..(77): n is a, c, g, or t
cccgggggaaagaaaataaaggggcctcctggttaacngaagctgtggcccactttggggggttgggtgaatgccanggtaaaagtgaaaactgtttaatacccctttgccaatgaatcctattccttagatttcctttactcctctggtgtgctgaagttttactgtcaactcctgaactcccacaaggtactcttgcccatggatggttgtcaaaattgatacttatgtgggaaacacctacagaaaattcctattctgccattttggtgctataacccaaaattacatctttatataataccatcaacacaagtttataattgagattatattttaaatcaaataggaaaagacaaatgttacaaacaaaataaatttatactttgttttaaacttacacatgtagttacttatactggttctctttat

SEQ ID NO: 458566 - DNA, 220 bp, Homo Sapiens
gcatgtatctccattgtttatggaagcctgggaaaacaacagaagtagatggtattcatagacaatttcagataacatttggcaaaaatttaaaggtcaatcatttcaaagatagtaaattgaagtgtttacaaagtggtgcagtagacacagtacaggcattggagtcaaatatcttagctcaagtcatagcacttttatttactggcattttagcttt

SEQ ID NO: 458567 - DNA, 579 bp, Homo Sapiens
  misc_feature (560)..(560): n is a, c, g, or t
gttccaggtgatttatatcctcattaatcatagaagggttttttctgtctttttattttagctatttcggtgggtgtgtagtagtatctcattttggttttaatttatatatttccctgatgattaaaaggggatgtcctgtaaatgttttcttttgtgaaataccatagcacacatttaagggataaagaaggcccgtcccagaggcaatgttgcatacagttcctgtcccactggccctgctgactagatggggagtccagggtaacagctacccgataccacggctcgagagttaagatttatggcagattgatacctgcctgggtcgcatgatgcaatgagtatttttagacgagggaattatttcaagggccatgatagggaggccttgagcttaaggtatccgtttcaaggcctcctatccatgggccttgaaggcggataccttagctcaaggtgggacaaacaggttatttgtagcccagggagttcagatgaacctgggttccctctgcccttccccttcactccccgtgtgccctggggcaggttatttncccatgtctaaaagttacc

SEQ ID NO: 458568 - DNA, 411 bp, Homo Sapiens
  misc_feature (346)..(346): n is a, c, g, or t
tgtctttttattttagctatttcggtgggtgtgtagtagtatctcattttggttttaatttatatatttccctgatgattaaaaggggatgtcctgtaaatgttttcttttgtgaaataccatagcacacatttaagggataaagaaggcccgtcccagaggcaatgttgcatacagttcctgtcccactgggccctgctgactaggatggggagtccaggggtaacagctacccgataccacggcttcgaggagttaaggatttatgggcaggattgatacctgcctggggtcggcatggatggcaatggaggtattttttaggacggagggggaatttattttncaaggggccatggataggggagggccttttgaggcttaagggtattcccgcttttcaagggcctt

SEQ ID NO: 458569 - DNA, 544 bp, Homo Sapiens
gtcatttttcactcctccccccatagagtatgtaaaatgattagaaatgacaacagactatcatttagtatcagattagtgtgtgtatatgccataaattatttccttagcaattcctttagtatttttgttgcaataattctttaaacgctacatttgtaatgctgtcttggagcctaggaattatttttggagatatttatgcagacttccctctataatgatcggttttttattatggttaatccataaatattttgagatgtatctctaaaaaacgagcactctttgaaaacataaccacaatgccattattatacctacaaaaattaaccacaattccttaaaacataatgatgcctttttgaagagaggtatattgaggacttcattctgggggaggaaacctttccggataactttatttaccttttcctttgccaagcatacaacattagatttgaaatatgctttgtatcaagtggaagtgtctcttaagatagcccctagaacaacacatcaagaggcccaccaaagaggacca

SEQ ID NO: 458570 - DNA, 833 bp, Homo Sapiens
  misc_feature (245)..(253): n is a, c, g, or t
  misc_feature (798)..(798): n is a, c, g, or t
gtttctcttactagaaaactattttctaaatattaacactgaaaatgttttgttagcttttccttctttctctccagaagagacatggatagatgatagctgtttcattgtttgtttttgtcaagcatattcactttcctccttgtcctctgattctgagcaaagggcctcagactctgaacttccctcaagtgccgttgttatgtgaactcttccattcagattccagagaggttctcatgctnnnnnnnnntccttatttgtagcaatcgtagcaactaattccactaagtacaagggagttttttacactcctccatttttatagcatctgcatttctttttctttgttaggtacatgtatacacctgcctgagtataaatactctctctacctaataataacatcaaccaacatcttttccaaattagggccacagaacagcaacatttgtctgacagtagtataaagaataatgatagctctatccttaagaagtatttcctttcctttttatatagtcccgttagttgtaaaaccatattgatcaactagaaagaaaaatatgaaaagagagaaatattttaatttaaaaattgtaataccattgatttattaaatgccttctctgatacttttgaaacagatgtgaaaaacagaaaaagaaaaaattgtctgaaatgtttattttgcaaaacagtgcaatagaatctagttatgccttcatcactgttgacagtaaatactgacagccccttgcagtgtgttagttttagatcactctgttttagttgagnaggaaatggttttatatccatgggttttttatatg

SEQ ID NO: 458571 - DNA, 442 bp, Homo Sapiens
  misc_feature (245)..(253): n is a, c, g, or t
  misc_feature (399)..(399): n is a, c, g, or t
  misc_feature (417)..(417): n is a, c, g, or t
tttctcttactagaaaactattttctaaatattaacactgaaaatgttttgttagcttttccttctttctctccagaagaaacatggatagatgatagctgtttcattgtttgtttttgtcaagcatattcactttcctccttgtcctctgattctgagcaaagggcctcagactctgaacttccctcaagtgccgttgttatgtgaaactcttccattcagattccagagaggttctcatgctnnnnnnnnntccttatttgtaggcaatcgtaggcaactaattccactaaggtacaaggggagttttttacacttcctccatttttataggcatctggcatttcttttttctttgttagggtacatgtataacacctggcctggggtattaaatantctctcttacctaataantaacatccaaccaacatcttttccc

SEQ ID NO: 458572 - DNA, 403 bp, Homo Sapiens
  misc_feature (343)..(343): n is a, c, g, or t
  misc_feature (364)..(364): n is a, c, g, or t
  misc_feature (370)..(370): n is a, c, g, or t
  misc_feature (389)..(389): n is a, c, g, or t
tagggaaaataccatatcaaataataatttattgagtgaaaaagttttctattcattccatcatacaatagattgtgctaaggatcattttggaagaatgtgcagcattcagaagttgtatctcatcatgcagtcactcagcagcattttatctaaaagtacgtgcacagactcagacaattacaaactatttcagccatgatctatggtgattttccacacattgtacagtgaaagctcttcagcttgggaacaacttgtcaagggcagactgcatggcacatatatattaggttatttgcttggaaaaggacaagttaggaatatggaaaatatataggcnggcattcatggtaataccggnattccngagggattggtggtgtgcntataaatctttggg

SEQ ID NO: 458573 - DNA, 390 bp, Homo Sapiens
  misc_feature (309)..(309): n is a, c, g, or t
  misc_feature (346)..(346): n is a, c, g, or t
  misc_feature (370)..(370): n is a, c, g, or t
gctgaaaaagacatttaatttttgcatgaacactgaggaaaggcccaaagatccatctagagcaggtggggcaattttagaagcagatatataaaggcttgatggcccaatggctctcagatcagtcttagaaaaacaattcaggacctctattgccaatatgtgcactacctgaagatgccaccctattacaatgggagtacttacgtttttaggaacagctacaatctaaggcttttatatattctggacaagttttcacctctagtgaatgcctcaagttttacactgggagagccacctcccctntccaaggcacaggacatagtgtgtggggaggatgggnctgaaggtgaggtccaatgggggnctaaaaatgggttaccctgt

SEQ ID NO: 458574 - DNA, 305 bp, Homo Sapiens
acggttttgcagagtagatatttgcatattatattggaaattgaagcatagaattgaactctattaggtcatttaccctcacttgttctaataaaatgtttctttacaaaccacttcactccattaattatacattttatgcagcaacatttgagatcatcacagaattttcactgaagctgaaaattccaatgagataactctttagattttgttggataaaaggaggacactggaacctgacaatgaagcagcattgtaaatcttctactttgcattagaaggtgttttaaaccatgtctatt

SEQ ID NO: 458575 - DNA, 525 bp, Homo Sapiens
ggtctggacttcttcagtagtgctcttgtacatttcccttcagcatcacaaaatgtatagttgtctcttcttttgcgaccttaatcaagaagtttcaccacatggttctctgaagaagtctggatactgagggatgacacgatccctgggttcagcctgttcaccatctcaaagggatcggagttggcatttagctgaatgtggagcaagaatagacagactgctacgctgctcttctgttcaacagcctcatcacaaaggacaggttcaacttggtgcagggttttgtgcttgtcagaatagaatcctacaaaaacatagacaaatgtcatcatgaaagcagatatagagcctgtaaccttcatagaaagggctttggaaaaaaataagtcacaggttactgccttttgacatatccccacaaattggccatgaaagctgtttccatggtgattttacatccagccatgacctctaattctcttagctttccagattcatctttccatttactataaccttcaa

SEQ ID NO: 458576 - DNA, 422 bp, Homo Sapiens
  misc_feature (105)..(105): n is a, c, g, or t
attaaatttttttagactcaaagctctccacaattggaaagtagctcatactactcactatggcctacgagcccctctggtctggagcctgaccccaggtcagcncctcatctcccacccaccactcagccttcagcccctttgccactgccacgtgggcctttctggtgctctccagatgcccccacctcgttctgctacaggactttgcacttgatgggaagcctggcttggtgctctccttcaagacctttgtaagcttccattcaaatgccaagttttcagaagggcttccctgccacaccccattttcagaagagctcctgagtctcttggccccttgtggttgtttgtttttttttcacagttcttattaatttctaataagatttatacgtgcatgtttgcgtgcatgtgttaca

SEQ ID NO: 458577 - DNA, 608 bp, Homo Sapiens
  misc_feature (451)..(466): n is a, c, g, or t
  misc_feature (470)..(470): n is a, c, g, or t
  misc_feature (492)..(492): n is a, c, g, or t
  misc_feature (500)..(500): n is a, c, g, or t
  misc_feature (516)..(516): n is a, c, g, or t
  misc_feature (538)..(538): n is a, c, g, or t
  misc_feature (568)..(568): n is a, c, g, or t
  misc_feature (579)..(579): n is a, c, g, or t
  misc_feature (591)..(591): n is a, c, g, or t
gacttttgggcccattgcttattacataaaattgtttccagcagtagggtttaagacaaaacacaagtgaaataaaatgtacaagtttgttccatagaaacactgaaaacacggttatgtccttctacaattcagtaaaacaaacactgccacaaacaccctcaggttcacagtttagatttcattcattcaataattattttctaagtactttcattactggggatgcagtaatgaataataaggtccctgttttcttggagcctctgttccagcagtggggcaggggagacagacagcaaacaaaataaatcaatataccacgttagtagtcacatggttactgggtagggaaaggaaagcttctgcacacctaaaccccttaagagcaatttgaggctgctgcaaatatcacggcctcttttaggggaagataaaaactctaagtttnnnnnnnnnnnnnnnnaatnggagatgggggtcttggccatnttaccccngggggtggggtgatcntttgaacctccctggggccctnaaggtgatccccccctgtcttttgggcctnccccaaaggtnccttgaggattntaggggattagccacct

SEQ ID NO: 458578 - DNA, 522 bp, Homo Sapiens
  misc_feature (60)..(60): n is a, c, g, or t
  misc_feature (88)..(88): n is a, c, g, or t
  misc_feature (100)..(100): n is a, c, g, or t
agattaaacaacttggaactcagctgaaaacagtgaagataaggcaacagaaaaatgggnaggtggcccatgggtaaccaagtgcgancccaggcaaaanacccaaccccatgcagcaacacagctgtccccgaagcctccctgggccctctcagccactcccacaacctaagctcaggcacccgtcctcatccctgacacacccctgaaggtagcagcttctcagatactgctggagggcacatcagcctgaaccctcatggggtttatctgccattcggtttcaggactaaatagtgttgcccaacccacagggataagggatagtcccggctctgctactaatttgctatgtgactttagccaagtcacttaatctcctgggcctgtttccttatttgtagcaagagaggaatgggggagatgttcactgaaccccattccagctgcaaaagcctgtggttttaatccaatcctgctaggctatgatcatttaaacagcctgatgtctccaacttctgg

SEQ ID NO: 458579 - DNA, 329 bp, Homo Sapiens
agaatataaattcctcaaaggcttttcctacaaataaaattaaacgcatctaatagttacctccattttaaagcccttctaatgataaaaacaatttgaatacaaaacaattttttatcttgacgttgtaaagttgctttaattgttttcatgtgttttgctttattttctaaaagagcctcaagattgatttactttctcccagatttcttacctctagtaaaatggttacggtagtttgggatgccatttcgcatgtaccgtgtgcctaaaaaggctgctaactatttggagtgggtatgtctaaaagtagttgggttgaatgaaaa

SEQ ID NO: 458580 - DNA, 495 bp, Homo Sapiens
  misc_feature (393)..(393): n is a, c, g, or t
ttttttttatgacttttaaattcatctaatttttattaatgattatgataacatataaaattatgctcagcagtacaaaatagatccatttagctcatcagcgttttacacatttataaattttataaaatatgaataccaatttcacagcattttctgataatgcctcactagagaataaaatttctatttttgggaaaaaaccaacaacaacttttgaagctgacctgggtttgccatgtttatttcgggtctgtgggttatgcttatctctggattccagagtgaaggggaggtggggcagggcgtggggtgtccattaagggcacctctgtccttcctgcagggccaaatcctgccctggcttgtcctgtggtcaggggacaatgtccntgcttttacaaagtcaaggctgtgcccatagaaagccttgtaatcttttggtttctccgtttccttatgagtgatgcacaggctctgatgattgtcatcctc

SEQ ID NO: 458581 - DNA, 433 bp, Homo Sapiens
  misc_feature (41)..(101): n is a, c, g, or t
agtagagatggggtttcacccgtgttaagccacggatggtnnnnnnnnnnnnnnnnnnnnnnnnnnnnnnnnnnnnnnnnnnnnnnnnnnnnnnnnnnnnntgaaccaatgcgcctggccaaggccttaaaaattttaagaaaagttttccacaagctttcacaatattgtattacataaacactcaactgctttctttgtagcaccacactgtgatttgaaaacaacccagtgttttctaatggttgaaattgaggttgtatgcaatgaggataattttcatttagttgtgcctcattggacattttcccattgtggctattttaacattctgggactaggatttgttggaaatatggtcagttttcccactctatggactcttttggattatggaatcctctctggataattaaacagctggacttcaccc

SEQ ID NO: 458582 - DNA, 616 bp, Homo Sapiens
ggcatgtctacagggtgatgattttatttttttaaatgtggtttggaatctggagtctgagacctggacccaaatctcaccacagctttgtgctggctgagaccctgggaaggaaggtaacttcacagcggaacccctagccccacacctattatctaaagacgattgcatggcccccagaacagtggggactggaatttccgtatggcaggacctcatctgaataatacagtaggtgctcaatacgtgctattaccctcttccctttttggcagtagacagataagctttttctatgactgataccatttttagatgtgaaaacactgactcctagagagtaacatttcatcactagccttcaatggtaattcatacaattggaaatgcatggaaagccatatttttcacttccttctcctctcttgttaatcttatctcatattcatgggtggcccaaaacttttcatagctttgagcgctctgtcccaatatttttaagtacatggaacttgttagcaactttgatttttttattcaaaggaagtgccataacacttcaaatcatgtcaattccatgacactcatcttcaaaaaagatctttcagttcaaatc

SEQ ID NO: 458583 - DNA, 349 bp, Homo Sapiens
  misc_feature (309)..(309): n is a, c, g, or t
ttttttttaagtggcaaagtagtttatttattatgtttccttaaaggagattaagactcgactcctctcccagccggggcagcccgggaactcagcgcccccctccagtggtgcccagagcctcccagcgccatgtccatctctcttcctcttggcatccattgtggcactcagcccacctctgcctcatttcatgattgtgtgcttttgtagtttagaaacagctgcggcaagcatttaggtaaaggcctcaagcagacaacctacagggtgctccgtgtcagtgcaggtgctggggaagagaagctncggcacagttgcagaggtggccctggggggtggccggggc

SEQ ID NO: 458584 - DNA, 289 bp, Homo Sapiens
  misc_feature (168)..(168): n is a, c, g, or t
  misc_feature (180)..(180): n is a, c, g, or t
  misc_feature (232)..(232): n is a, c, g, or t
  misc_feature (239)..(239): n is a, c, g, or t
catggagaaaatatttattagatttcaaattatcacataatacagatattacacaattagtcattctagaaaaaaatagtttatattaatattcataaacactgaaaaatataggacttcattttgtgacataaaatataaaaaaactcaaaggtaaattcaccaaantaaaagtttaantaaacaaatcagttcacaataatatacaaaaggtttcacttttaaataaatngcttgtngtggcatgaggtgactagaaatgcacttacatttccttttgcatatttta

SEQ ID NO: 458585 - DNA, 453 bp, Homo Sapiens
  misc_feature (11)..(11): n is a, c, g, or t
  misc_feature (22)..(22): n is a, c, g, or t
cacggaaaaanccccctaaacncagcaggtcctcctaaacaggagatccaaaaccttaaattaaatgccccatacagaggtctgacccagaccctaggaggaactccctttcagggcaggatgaatagatggtttcctccctgggtgactgagggaagaagacactatgggtatcccagtaactaatagggaaacaaactcttgtagaaatgaagttaggaaaattgcctaataattggtctgctcaaatgtgtgagctgtttgtactcagccaagccttaaagtacttacagaaccaggaaggaatcatctataccaattctaagttaatttggactaaatgatgtcttattaattgcgaaggataattaaaatcccaaacacaaagttttcaacaaaagtaaaatttgctaaaagttaacagtgtaacatgtattcatcctaacttctaat

SEQ ID NO: 458586 - DNA, 473 bp, Homo Sapiens
atggagtcttcaaatttatttagtcaaatattagaacaagtcatttaattagcaaaggtaaatggctaattgagcttgaacggattaaaggcatcatatcctttcctctgccagggactaaacaagaacttaggaaattttaagattagtcagatactgtcgtctatggatagattcttatgccctaaaaacaaaacccttatacaagaagctcatgcaagactggaaaaaccccctcctcatttggtgattaccagaaatccaacaggtggaaaggttaaaacatctattagtttgaactgcccctgtcctagttttaccctccttaagcagccattccaccttgttgttcagtataaacaggggtgtagcctgaaagcatggaggccacagacaatcaaaaattctgtgataaccttcctatcaaaaattcttaacccagtaacccacggatggcccaaatgcattcagtc

SEQ ID NO: 458587 - DNA, 388 bp, Homo Sapiens
  misc_feature (25)..(25): n is a, c, g, or t
  misc_feature (30)..(30): n is a, c, g, or t
tgtgttccattttaaaaaagagaanaagcnaacgaatgccgcccctgtgaaaggggttggggttgcccatggagaagccgttcccaggtaaagaacagtcactacggaacagtggcatgcaacttgtcagcagaaaggctgcagcggccccagagcgatcataatttctgtccccactaatataaatacaaccacatttctgctggtctccagaaaaggctctgtccttttgtgggtgtacctttactttacagcagagcttcagcctgactatttgcatttaagtcaatgtatatttcaaatgcatgcatatttaaccgaaccctaatgacaatgctttgttgaaagccttttctcctcctatatagcatttctgttttcgggttgc

SEQ ID NO: 458588 - DNA, 1284 bp, Homo Sapiens
  misc_feature (28)..(28): n is a, c, g, or t
  misc_feature (48)..(48): n is a, c, g, or t
  misc_feature (77)..(77): n is a, c, g, or t
  misc_feature (82)..(82): n is a, c, g, or t
  misc_feature (472)..(529): n is a, c, g, or t
  misc_feature (1055)..(1055): n is a, c, g, or t
  misc_feature (1141)..(1141): n is a, c, g, or t
  misc_feature (1143)..(1143): n is a, c, g, or t
  misc_feature (1150)..(1150): n is a, c, g, or t
  misc_feature (1152)..(1152): n is a, c, g, or t
  misc_feature (1213)..(1213): n is a, c, g, or t
  misc_feature (1260)..(1260): n is a, c, g, or t
caagggagctacttaaaggggtaaaagnctaaggtaaggcgatttggnggaaagagcctttaatggtggctccaggnagggnatctaacccccaaccggtttcccctcccctgtctccttccaccgcaaaatcccaatttacccacttgcaaatatgaagctggaaaaaggtaaggacccagagttgaaaacattttcgctttaatactgaaaaaatatgccattgtaaaatcctcgaatagaattagtaagtttcacgtgcttcctcggttctcttttcctactttataagtaagatttataccagcacagaattgctaccataggatcgcagcctaagcattagagtgacattaattggtcatgcttaactgcctcaaaatcattttttaaataattacactgatactataatagaaatcatgggtacttattttacattcagatggaaggcattattggatatgtattnnnnnnnnnnnnnnnnnnnnnnnnnnnnnnnnnnnnnnnnnnnnnnnnnnnnnnnnnngaacccaaaacaacccctaaaaacttccctcaacaaaatacattgttaactcataaaatggactgatgactagccatgcaaatgtcctaaataaaacctttacatttttttcacagttaacttatgctctgaactgcctaccgatcacaaataatggcgaaatggcactttctgattatactgtattttgtttatagaaagtttgatacgatggaacttatcaggtaagagggtgggtgctgtgaacgagatgccgtctccagtcgcgggggcgggcagagtccctggagcgcgtggattccatgcgagccatgcagcactttttgttttttgtcagaagtcaaagttacttatttacaatacattcatgccttcgtgcaactgcccatccctgcgtagcaacagggagccatcacggggctaatccacaggggaaaaatagatatctatctctctatatagatgtggatatatgtatatatgtatagaaccgcggcatccaaccccacaggccccggggccgagnggcgagggcactttcagttcttccagcagggtcgtgctgggctttctgtcaaaaggggctctcagcaaagagcgagctggctgcgntntcccagntntccacagtctgctctttgtttcaaggagggagctaagtaaggggtcaggccctttcggttntgcgagctcacagttattttatcttacttatgcccatccaggggtgnatgggcgcggggtttttggggtac

SEQ ID NO: 458589 - DNA, 379 bp, Homo Sapiens
  misc_feature (335)..(335): n is a, c, g, or t
  misc_feature (337)..(337): n is a, c, g, or t
aggttttagaaagtgtaatccaagctaatttccaaaagaggttatttcttcccttactctaaaaaattttccatggctggagagttctggtaggaggaaaatattgtccaaacaaaatggattatgattctgagctgccacagttgcaactaggtgaaggcccaaacaagtagtagggcagccactaaaacagccgagattatcttgactaaagctatgctcaactactggctcaatgggaaccaatatttttggcttttacctctgacctaaacacttaaggttatcgtagtctttgttcctttcttagtaattacaatttttttcactcctgnangtcataagtggtcaaagtggcccatttatgacaacaagcaat

SEQ ID NO: 458590 - DNA, 404 bp, Homo Sapiens
catattcctcgtaagtatctgttatgaatatattcatttttaacgtggcatttaaaaggtaaagtgcttaacttaaaatgtttccatccctgggtgcccaggtaccccttcaagtaccaaattgtatttttggcagaagaaagaacagtttccttctcaaatccctggtccacatctcttcaagttccatagtttgtatcgaagccattcctaacagctgtatttgtttctattctaaaacccaagatccaattcaagacttcaacaaacggagggttttggggcagttgagtcaaggggtatcttggaggcagggattctgatagtaacttagtaatgacttctcccacatagtgacaataatcagaaaaccttgtgatacaggtaaaagtggaatatggctg

SEQ ID NO: 458591 - DNA, 677 bp, Homo Sapiens
  misc_feature (622)..(622): n is a, c, g, or t
  misc_feature (629)..(629): n is a, c, g, or t
ttagcttgtctattattgaaatagtttccaagaaattttagatattatcataacatctgggtctactcaaacacttattgtttgaaagacttatgtcttggacctatcaaaaactgactttatttattgcttagtgaaaatactagtgggatcaacaatgattttcttgaatgggcatgaatggagatgcccgcacagtaatgtagaaatgtttcatacagctattaaaatgtaactgacctccttagaggcagattagtaactgttcctactttgtatagctaagtgacagtcacttaacttacatgactttcttttttcacattgggtctctggtcctgtgtcttcacctcatttatagcacgtctccttgatttttggtagtatcaacttcccagtgatctgttcagttaagttcttctcccgttaaccaggaagtgcttattctctcatcacagtgggaagaatagcctattgtctttcattttgcctgagtgtattttactgtttgggctctgaaataaaaattatgaaatatggtgaggtcacatgttggtgctgccttgctgcataaaattctaggagggcaggttaggagacagttatgtatggcctttcgggnaaaattncaaagggtgggattacaagggtgttcctcaggcatgcccctatgggcc

SEQ ID NO: 458592 - DNA, 339 bp, Homo Sapiens
  misc_feature (301)..(301): n is a, c, g, or t
cccatatcggccaggatggtctcgatctcttgaccctgtgatccgaccaactcacccgggctcagtatatttttaaaacagagggggaaaacaccaaagtggcccaggttggagtgaaagcttttttcactgagatgggctcacagaccagcacacaacatgggagtcccagaggtcttcagaccctgggctgaaagttgctttcttctatgccaattcaaattttgtaaagttacaaggttgttcctgttacccaagtgggagatggtttaagtgccttattataaaatggtctgggttnggcgcatggttttttgctattattcccagcatttgagg

SEQ ID NO: 458593 - DNA, 428 bp, Homo Sapiens
  misc_feature (143)..(163): n is a, c, g, or t
  misc_feature (174)..(261): n is a, c, g, or t
  misc_feature (278)..(278): n is a, c, g, or t
gagacggggtcttgttctgtcacccaagtgcagtggcacattcgtggctcactgcagactcaacctcaaggttcaagtgaccctcctacctcagcctcctgagtagctgggactacaggcatgtgccaccacacctggctaannnnnnnnnnnnnnnnnnnnngtaaaggtggnnnnnnnnnnnnnnnnnnnnnnnnnnnnnnnnnnnnnnnnnnnnnnnnnnnnnnnnnnnnnnnnnnnnnnnnnnnnnnnnnnnnnnnnggcacaaaccatggcgncccagcccaggaccattttatataagggcactttaaggcatcttccacttggggtacagggacatctttgttacttttacaggattttgattgggcattaggaggaaaggcaggcttttcagccaggggttttgaaggaccttttggggg

SEQ ID NO: 458594 - DNA, 525 bp, Homo Sapiens
  misc_feature (18)..(18): n is a, c, g, or t
  misc_feature (54)..(54): n is a, c, g, or t
ctatgaagttggcaagcnttccctggccccaggttcaattgcccgggaaccggnaattgtccctggctggaggagggaaacagccagtggcccagcagtctgtgaaagaggctggggtagaatgaaggccagaccccaggccaattaaggtctgatgaaaatccgggccgtttttcacgaaacaggaggcgggcagccctgctgcggtggggatgctggctagatggagcatctggcaccgatcaattcccaggccaagaagtgagcctacatgtgggtgcaaatgaaatgccgaaggcccggggaccccaccccctctgtctttgccataatgaagtgccaactgggagccagctgggcaaaggggacatgttgccttgctccgtccactgtttggtaacaattacgagcattctttcagcaccaacaggaacagtaagctgggggagcaattctttgagccaccaggcgtgatcacgaaaggagggtttagatcaaagagggtatcagtaatgttcaacgacc

SEQ ID NO: 458595 - DNA, 407 bp, Homo Sapiens
  misc_feature (330)..(330): n is a, c, g, or t
  misc_feature (372)..(372): n is a, c, g, or t
  misc_feature (380)..(380): n is a, c, g, or t
  misc_feature (395)..(395): n is a, c, g, or t
gtcaatccacagaggtttatttcgccaaggttgagaacgagcccacgaaaacaaccacaagccacagaaacatctgtgagctgtgctttttccaaagggggtctggggcacggcaatatttaaaaaggcaagggcaagcaggagggaaaagacgggggagggacgcagtgaggcagatgctcgcattcttgtgaggctctgagtctcagtaaatctacattttacacgtgaagaaaggaagcacaggaaaagtcaattatgcatttgtctcagggatgatttctggtcttgtctttggtcctctctgtgagggtcacctggggtaatttnacatcgtcaggggtgagatccaaaaaaacttgttttcagggnctagtttntagggaggtgggatnttaggcctgaaa

SEQ ID NO: 458596 - DNA, 415 bp, Homo Sapiens
  misc_feature (42)..(42): n is a, c, g, or t
  misc_feature (44)..(44): n is a, c, g, or t
  misc_feature (54)..(54): n is a, c, g, or t
  misc_feature (58)..(59): n is a, c, g, or t
  misc_feature (66)..(66): n is a, c, g, or t
caccatggatgtggctctgctgcttttcctctgaggggagangngagtagcggncagnnatggctntcacactggagggtgcttccaagctcttgacttttgcttttggcccttgcctttgtggtaggtgggaatctgtcgccctggagacttcgggtctgatgtctctcacctaaatcttcacaagaccttctgcattccccacggaggaggtggtcctggcatggggcccatcggagtgaagaaacatctcgccccgtttttgcccaatcatcccgtcatttcactaaagcggaatgaggatgcctgtcctgtgggaaccgtcagtgcggccccatggggctccagttccatcttgcccatttcctgggcttatatcaagatgatgggaggcaagggtcttaaacaagccacg

SEQ ID NO: 458597 - DNA, 445 bp, Homo Sapiens
agttgaggcaaattagtttattgaagcaagcgaagaagatacagaagggcatgcatgctaaagaggtgatctgtaagataaagcaggctgctgcaaatcggaagcaaccatgcacttcagttggtatgtgcatttccttttgcccagagcttggtgttgaaatgtagcatctgcaattttctgagctattaattgccatagtaacaacagtcgattagtaaatagtcctgtgaaatcacaatttcaaagacaacagtacaatggagactgcccccccagcaggagtaaagctgccaccagcttttatttatttttaatagacaggtttgagaaaagagtactttttgtggggtagctcacactgacttatttggaacatctaaagtagttataatcgccagacggttgagaatggatcacaagatggaatttagcaaaccctagc

SEQ ID NO: 458598 - DNA, 432 bp, Homo Sapiens
ttttttaagccatctgctaaaactttattgataaaaccagtagcagcagttttacaaaattggaatgattttcagttttgatgaactatcatgaattcagttgcagcagacattttatacaaactggggctaatgcttctcctatgtttctgttttaaacaaaaagcaattagaatttatcctcatgcatttaaatatctaatacagaaatagtgtttagactgcataaaatatgctttccaacatcactgtgagactgaacatctgccttaagtattatttgcacaagaaaaacagtataattcttctaatcatgaatttattccttgtcacaggtaaagttttacattttctaacattttcagagggcatttctaacaaaaagtattgacattcaatatttcactggattgggtcttggtttaaacacaa

SEQ ID NO: 458599 - DNA, 542 bp, Homo Sapiens
  misc_feature (290)..(290): n is a, c, g, or t
ttttatgatgtttaatgacacagatcttcccaaagtaatccaaaccccaaaacatcacaaaattattcatactattatacactccaaaagcaaaatacttcaactgcaatccttgccccagcatgattcctcaaaattgagataactccttgagaaaacaaaagtaaaaataataataatttaaggattagagttaatagatgcaaaagtaaaggggaaaaaaagcgtaatttagtgtgaaaaccaaaaatgactttaaataagaatgggcatttaagatcttattaaangagttatgcttaaaccatttcaaaaaacactgaatattgcaatgtcatgggtgtatattttaaaacaataactgaaatggggataccaattccattagtggctgctttcctttaggtgcttacgtaagcagccctctcctgagacttatagcgtaaccttaatgtaacacaatattttcttacttttgatgactacttagaggtaacatcaaaacaacaaattgacaaccatagtttcagagagactgagaa

SEQ ID NO: 458600 - DNA, 474 bp, Homo Sapiens
  misc_feature (53)..(53): n is a, c, g, or t
tatttaatttttttcgggtagcctcttgaaactaagagtaggccccagaggcncccctgtaggtgacattttattactttgccaataacagactgaaggggcagatcctcacacagactttcctagggtaatgtagcaatgtactgtccttttcttgaagtatgagagacaaggtcaatgaaatgtgcttagaagcataatgggagtcagattctggtgcatgctactgacattttagggtctacccaagaaaaagtaattcataacctcccatatagtttaatttagtgattttgttaagttttacaaaattatttctcatttttcttggaattctactcttcattttacaaagccttaaattgagactcaaaaatcacatgacaaagtgcctgtagcttcaggaaaatacaactttttttcccttctggttaagtaaaataagaatttggagcaaaaatatcctaattcaga

SEQ ID NO: 458601 - DNA, 256 bp, Homo Sapiens
  misc_feature (23)..(23): n is a, c, g, or t
  misc_feature (49)..(49): n is a, c, g, or t
  misc_feature (54)..(54): n is a, c, g, or t
  misc_feature (68)..(68): n is a, c, g, or t
  misc_feature (123)..(123): n is a, c, g, or t
aggtcatgaagaagaatggcagnagtggactcaactcagtatgaagagnccaantgtttcactgtcgnaccaccctcctctactgcaagaagaccctgagggtgtaagctcttgattttgagnctgaaattaaggaatgccggagccaatcatcctgcctagctgtagaaatttcctggcttttgaatgggagggcagggaaaccagaagagaaaagaactcttcattttcctcccccaacctgttcctctcccac

SEQ ID NO: 458602 - DNA, 468 bp, Homo Sapiens
  misc_feature (400)..(400): n is a, c, g, or t
  misc_feature (418)..(418): n is a, c, g, or t
  misc_feature (446)..(446): n is a, c, g, or t
ttttttttggacatctcagatgtgactcttgctgccaggctagaatttaggctatgtgataattctcagctgtcctacaatgcctgcttcttgaaagaagtcggcactttctagaatagctaaataacctgggcttattttaaagaactatttgtagctcagattggttttcctatggctaaaataagtgcttcttgtgaaaattaaataaaacagttaattcaaagccttgatatatgttaccactaacaatcatactaaatatattttgaagtacaaagtttgacatgctctaggaatggacaacccaaatgtgtcttacaaaacacgttcctaacaagggtatggcttttacactacccatggcggaaactgtgtttgttttcctctctaaaaaacngggatgtgtcaaaatggntaaatattctaggttaagtgggcatggntcggttcccattttacccgttt

SEQ ID NO: 458603 - DNA, 322 bp, Homo Sapiens
  misc_feature (142)..(142): n is a, c, g, or t
cctatatagttcgcctgaagcaatcaaatgaagtcacctcaactccactcagggtggtacaccaaggtgcagccttgggttaccctcatttatcttaagatttaacgagataagtcagctcattctcatagaccttcctgancctttttccccttccattttgtagtagaagtttgtttaacttgaattctattttggattttgtgggtttggcatgaaacacaatgaaaacccataattctaccctgtcccgaacttcaattcctttgctgctcaccttcccataagcaggtaaccgatgtctttcatttaggaagccttg

SEQ ID NO: 458604 - DNA, 607 bp, Homo Sapiens
acataatcaaattttatttgacacataaaatgtttaagtgatgtgttttatactttgaaaataaattcatgcaccaatgttttaactcacatatatcatacagtgcaggatttatgaacatacataaaatcaaaatcataccatataaacgtttacaaataagtttttcatgacacacggacactattgctctttaaatatggttgtacatgtcatcattaatcgattcattgttcttccacatggttatttcaatgcaagatccgatcagcatgaagagtctagtacaagataggcagacatggttatcactctggcatcaccagtcacatggttacaggaaaacaggaattggggactgcataggggactctactgcggggcccaacaacctattagtggattgatgtaaggcattagtaaattggcatataaaaatagcttaatgagtgatctaatccatttagaatgctgaagcacttctgtggtaaatgttagtctattctacaattgaaaatgcctcattttaccttttctctaaactgacaaatgcaagtagccagtaactgtaggtctagaattttcgttcactgaccagaaggactaa

SEQ ID NO: 458605 - DNA, 522 bp, Homo Sapiens
gagttgtattttctaagtttatttttagttatttgtttttacagtcctctgcagcagggtttgctaaagtggatcaacagcaaagcccccaagtcagttcagcttctgacagtgaagacaagagactcaacaagtaacagaggaaactctggccccaggagccaggcaactgaccgcatctgcaggtgggaaccaaggccccaaactgcacagagcctcgggggcatgtttttcagagcaggcgaaattttggacacatgcggaacatcttatggtgtaaacagaggcactgctaaaacaagccaagatgagcgctgccagggtttcacacagtgtgctgctccaccagcctccattcacaatggcttacccatggaagaaaaacaccatcgccactggcagagggtctaaagttggcttgttatcctctccaaattcataatacaaaaagttagaagtggctaaaatgcaggcaacaataccaaaatatttttataaaaacaatggaaatgagaaagaagc

SEQ ID NO: 458606 - DNA, 312 bp, Homo Sapiens
ctttagtgttttcaggtgagattgcctaaatattaactcttttcttggcgatgcctgtttttcttatcgaaagattgaacggtatcaccagtaaaaatgagccaactggctattaatggttaatacagcccctccccccaagttcagcttcttttttcttctcctgtccccctcccaacatgttcctgtctcttttctctttttctcaagactatagttgttaggagtcgcttataagtcttataaaatattttgatatcaattacttcccatcaataactatatgtaattaaatttaaattattaagcttt

SEQ ID NO: 458607 - DNA, 649 bp, Homo Sapiens
  misc_feature (41)..(41): n is a, c, g, or t
  misc_feature (48)..(48): n is a, c, g, or t
  misc_feature (66)..(66): n is a, c, g, or t
  misc_feature (86)..(86): n is a, c, g, or t
  misc_feature (180)..(180): n is a, c, g, or t
tgcctgccatttccacaacagggaacccctaaagttgtcgngttaacnacctacctaaacatgttnccctcctgcaagacttggcnacgaacaaaaattagggtgggtccagttgggcccttttcccccaagacgcctactcccagctttgccttaacagggccctaagaaagaaagggncaatgggtgtgtttaaacagcaagacccaagaagcccaataaatatccaaagtctggtcctagaaatcctatcagcattttaaggaagggaaaggcctgaaactctacagttcagttttgctaatttgagctgcatctgtggagaagaggccccttctctccttgcaagataaacaatccgaggctttgaaaatgtacaggtgacgtggtccaaacaaaatatgtaactcatttacctttcagcaattaatgaaatatgctgacaagggggcaattagtagaatttggcagcttgatgagtaattaaaattctcttttgactttgagccagggtgtgtgacaacagtctgtacaaactggtgtccataccagcaggtgggaagagctgtgtctataaaaagccaatgtccaaggtcacagagttattagaactacgtggaatcaatttttcactgaagtagtccatttt

SEQ ID NO: 458608 - DNA, 476 bp, Homo Sapiens
ggccctagtgggaaacttccagggttcacctgtgtacccttaaacgaaggaacagcctcaggaattaaccccacaggctgctgggggcaggcttgctgcatttcactcacggagccctaaagatgtcagttaacaactacttaatatgtgcgctctgcagacttggaacgacaaaattagggtggtcagttggccttttcccaagacgctactccagctttgcttacagggcctaagaaagaaagggcaatgggtgtgtttaaacagcaagaccaagaagccaataaatatcaaagtctggtctagaaatctatcagcattttaaggaagggaaaggcctgaaactctacagttcagttttgctaatttgagctgcatctgtggaggagaggccccttctctccttgcaagataaacaatccgaggctttgaaaatgtacaggtgacgtggtccaaacaaaatatgtaactcattt

SEQ ID NO: 458609 - DNA, 479 bp, Homo Sapiens
  misc_feature (74)..(74): n is a, c, g, or t
  misc_feature (246)..(246): n is a, c, g, or t
  misc_feature (279)..(279): n is a, c, g, or t
  misc_feature (294)..(294): n is a, c, g, or t
  misc_feature (381)..(381): n is a, c, g, or t
  misc_feature (393)..(393): n is a, c, g, or t
  misc_feature (410)..(410): n is a, c, g, or t
  misc_feature (448)..(448): n is a, c, g, or t
  misc_feature (457)..(457): n is a, c, g, or t
ggaattcagattttttatttttggctcttaggaagtagtcagcaaatactgtataatccctagtagggaaccantgtcataaaatatattgacatttctgcaacaaagaatcacactaaaaggaacacatcataattacccatagcttcctatcagtgtaagttcaggtcaggtttggtttcaaatgggttatgaaaatacttttggttttcagagcattgggactttggaaatgaggacctgggntcatcctttattagggagaaatagccccagggngccacgtctcagcanttccatggggaacacaggtttctttgcccctcaaaattcccgttccctacccttctttgtcttcccttcccccaaaggaaactgggnccaaaaaagggncaggaacttgtattttngttattccatacatttgcggttgaattttaaatcattncggtaccantttctacattgggtttgggtag

SEQ ID NO: 458610 - DNA, 453 bp, Homo Sapiens
  misc_feature (47)..(47): n is a, c, g, or t
  misc_feature (79)..(79): n is a, c, g, or t
ccttaaaccccccgacctttgtgatcccacccgcctgggccctcccnaaagtgctgggattaacaggccgtaagcccancgtcccgggttgtttttgctcttttaatccctccccttcagcctcaaagagcatgttagaggtgagcacagggacaaaggggagcaggggcactgcaggcagaagaccagaacccatctaatcacaatgggcagcacctagtgcctccctctgacatcagggaggccggaaggtacattttcaaaaggcctcacaataacggaggaaagactggggaaagataatggatttccgagacatagtgctttggtgatgccaggtcccaggagagaaggcaatcagcctaaaacagccatgctcttaatactggaacaacagtaacagtgataagcaataaagtgatagttcagagcaaggggtctaaagccagactg

SEQ ID NO: 458611 - DNA, 431 bp, Homo Sapiens
  misc_feature (16)..(16): n is a, c, g, or t
gcccagaaagtgatgnaacccccggaaacccctcccattgcccccggggacacatttaaatttttaagggggaaaggccctaccataggaaatttccctattatcattttccccctaaatgaagttacatctctcaaactacccaaatcctaggaatattgaaacttagaaatgaagatagcggaaaatattttaaaaacagatctacagactatggtcaggatttcttggaaatatatttaaggtttccttttcatgacttggaaagaagagtactttggtttagtttcagctcatgttgttaaaagttggactattttctattactcatataaattgtctaatcagtaaaatatgctccagatattgtagcttgaaacacaatcctcccaacctcccctctttccatcttccattgactgtctcctttg

SEQ ID NO: 458612 - DNA, 368 bp, Homo Sapiens
gttttctgagttaaaataacacttttagatgagaaaatgcttgtatcatacagggctataatataaataaataaattgtatgtatgcaaaatttatcatattttctaccccttaaaaaattaagttagaaataagcttattttcttgcacatcaatatttttctgttggtaaagaggacacaatttctagtagattgttaataacatcaggaagatatttctttcgtcagaactaattgtgtgcttattcccatattctcagctcataactttctgttttgggctgctctctttattttacaattgtttcattgcaaactgcaagggcagtataggcccacactcagccactaggcccccagtccccg

SEQ ID NO: 458613 - DNA, 432 bp, Homo Sapiens
  misc_feature (318)..(318): n is a, c, g, or t
  misc_feature (387)..(387): n is a, c, g, or t
atacacatccaattttattaacattcacttataaattatctgcccttgtcatatattggaatcgtgttttttaggcaaatataacaatcctctactgcaggagagaaagtcttcttggtgatatgagaaatactggtgtgataatttcataaattattcaagtctgtggaaacactccagttcagagaagggtacctgggatttgttttcagctttctcgattttcacatgcacgttaggctatctggttttgatagtgcgtgttttcttctattaagtgagatagctttctcaataattatatcaggaaacagcagncagtgagtgactagaggggcctctactgggcctcaggcatttttctaaaaaaccgggaattaggctgtncaaattttgaggaatacaggaggcttcccacggcctcccccatcc

SEQ ID NO: 458614 - DNA, 450 bp, Homo Sapiens
  misc_feature (32)..(32): n is a, c, g, or t
  misc_feature (67)..(67): n is a, c, g, or t
ccgtggatgaagacaatgtagtaatagacacnttatactacccggcccttttaaaataacaaaatcnccccatatgggacaatgtggatgggatccttagaggacattatgcccaaataaaataaaccccaggcacagaaagacaaacattacatgatctcacttacaggtaaaatcttaagttgaactcctagaagtagagaacagaatgatggttatcagaggatgagggtggggtgctggggaaggtgggaaagagaatgggtagaaggctgcagctaaactcaaggaataaattttgagatctactgcacaacagggtgactacagtcaataatatatattgaaacagcaaatttcaaatgtattaccactgaaaaaaatgaaagatgttaattagcttgatctaataatttcacattatgtacctgcaaagcatcacactgtatt

SEQ ID NO: 458615 - DNA, 360 bp, Homo Sapiens
tttgcagtctctttaagtgctacgtttttcacatgtttgtgtttgcgctgatgagtttgctgttgaaaatggcccttaagcatactgctgaatcctaagtgcaagaaggctgggatgtgcctgaagaggaaatgtgtgtgttagataagctttgtgaaggcaggagttataatgctgttgcctagagagttcagagttaatgaatcaacgtatatattaaataaagtgtcctgaagcagaaacacacataagacaaggtatatattgatcagctgataaaaatattgtgaccagcagcctgtatttcctccaggagcaacgctttaggattcactcattcggagtttgtgcctcgtgcca

SEQ ID NO: 458616 - DNA, 435 bp, Homo Sapiens
  misc_feature (353)..(353): n is a, c, g, or t
  misc_feature (373)..(373): n is a, c, g, or t
  misc_feature (390)..(390): n is a, c, g, or t
  misc_feature (404)..(404): n is a, c, g, or t
  misc_feature (409)..(409): n is a, c, g, or t
  misc_feature (417)..(417): n is a, c, g, or t
ggctatttgtaaatgcttggttatttgactccaaaattgaataagtattggggaagaatccctcacctacttccaaatcccttacatatcaattttacacaaagcccctcaaacctttcagttccaatcactctgcaatttcatatacctccattattaaattcaatacatcattgcagagaaaagacaacggtgccaactgggtttggttggtgcctgcacacccacagtggcaactaagtgtaatctctaaatatgggactcaggtctggtgtttcattttttaatgaagggaaataggaagccctggccccctcactagaggatgctgccctgttgtatcagctacaaancacgggtcctgctccatttnggctgactgattatacngggggattcccttngctgntaggtttnatgcccatgatagcaaca

SEQ ID NO: 458617 - DNA, 436 bp, Homo Sapiens
  misc_feature (11)..(11): n is a, c, g, or t
  misc_feature (371)..(371): n is a, c, g, or t
  misc_feature (379)..(379): n is a, c, g, or t
  misc_feature (390)..(390): n is a, c, g, or t
  misc_feature (404)..(404): n is a, c, g, or t
ttttttttatntttcaatgtttttattgtgataaaatacacataaaattcaccatattaaccctttcgagtatacaattcagtagtattaagtacattcatactgctgtgcaaccatcaccgtaatccatctccaggactcatttcttcttcccaaactgaaaccttgtacacattacacagtaattccctctcgctgcccttcctgcaacccctgggcaaccatcattctactttctgtctcttattaattctggatggctggcccaaggctggggggtgcagtgggctatttcacagggcacaatcaggcattactggcaggccttggaactttcaggggccttcaaggcaattcctacttaccctcanggtttccnggggtagggcnggggggctttaccntacaaggggttttcaattcccttgaggggagg

SEQ ID NO: 458618 - DNA, 515 bp, Homo Sapiens
atgtttttcctttatgtttaatagttctgtgaacattgacaatatattacttttagtggtacacagttcttgagaaaatgtcttgatttttacattgccatttgtgatatttttagcagtccaccacaatatcatttttataataaaaataaaatatactcattgatgatagagaaaatattgttaaagacctcttgggacaggaaaaggctcagtcataaaatcagatgcttattcattttcagctgtgtcattttgactcattactttcaagaataactataatattgctagacagttcattacactgaggaagaactttccttgaacttcacatggagattgagtaaagctcttctatttgttttttgaagtactctctcagctcaggtctcttagcttttagtgttggtgtcagcaagccattttgaactgagaacatgtcagaatggatgtgaatggctttaacctgctcaaaagaatggagtccactttcttttcctaacctcaccata

SEQ ID NO: 458619 - DNA, 355 bp, Homo Sapiens
tataagcaacccaggctgggagacaaaaaaccactcaggcctggtctgaaaaaagcatctggtgattttcaagtgggcccctacctcctctatgactgtgggcacctgggacccctgaccacacagctcacactaagggagatttccctgccacctctctctcttccactcacacttctctgcttgtcctggtggtaggcagtggagatgactccaacagcccagctccaattggtagaagtacccctgggaatgaaggaaatagctgcttgctttttataggctgaagaggaaaagctttggaaagagcgaaaacttaatagaatctggaaacatttcgctgggggagtcaatg

SEQ ID NO: 458620 - DNA, 285 bp, Homo Sapiens
ctcctaattcagtcttacatgaaaccttaaagtagatgtaggcctgctctggttgaaactggaatgagaagtctggtagcccagcaaccccaaggccccctctgcatacagttcagaaaataacagatgggtgtgacccatcaccaccagaaaatcccaagtttttgaggtcccacccatagaggaggaggcctccaccctgctctgagcagcagggagggggctgcagagccagtacccgttccttagcatgtccaagtgctgtagacagagctgctgaggggg

SEQ ID NO: 458621 - DNA, 509 bp, Homo Sapiens
  misc_feature (250)..(351): n is a, c, g, or t
ttttattaataaattcaacaaagtatttattgaactttaaccatggcttgggcatttgttaaggatgagtggtttaatacaatgatgattcagacacggtctctacttccaaggaatctggcatctcaaataggtaagacacacataaaagtaataggtgatagcagtaagtgctgaaataagactgtcattcaagtgttgtgaatttgaagaagttgggaagatcaggaatgcaaatttcttccccctnnnnnnnnnnnnnnnnnnnnnnnnnnnnnnnnnnnnnnnnnnnnnnnnnnnnnnnnnnnnnnnnnnnnnnnnnnnnnnnnnnnnnnnnnnnnnnnnnnnnnngacaaaaataggacatattcatggaggaaagggaactaagtagaaatacacgtaggactggcaggcagtgagaggtatacatgaggccagtgctcatgaccagatcagtcagtcaccttggtgtacgtgttttcctccaaccatgctgaagcccggca

SEQ ID NO: 458622 - DNA, 511 bp, Homo Sapiens
  misc_feature (13)..(13): n is a, c, g, or t
  misc_feature (244)..(244): n is a, c, g, or t
  misc_feature (304)..(304): n is a, c, g, or t
ctgtgaaatacgncttttaaaacaatatttatttttcaaaagaattaaaaattacaatcccttagctgattagatgctctattatactttaataaaaatagtaaataaccccttcatttaaaaaaatcttatctcctgcaagaagtaataaaaatagtaaaatttgtaattttattatgggcttaaagtatatatcttgggaaacaatacgtttatgaaaaacagtggtttgggttctgatggncagttattaatcagtaacaccagtatgggagagaatgaatgtgttataggttatgaaggnctaacttggaaaaaaaggtttattctacaatagaacactggagaagtaaaagcaattaaaatgtaaacaaactgtaaacaagaaataccatccctctctctttacctgactagtaaatagtctatataaactacatagacatcaaaggttttatatatgtacacagccaacataatatcaaaatatattttattctggacctctttc

SEQ ID NO: 458623 - DNA, 537 bp, Homo Sapiens
ctattgaaatatttatactttattcaaggatatattcattttgaggctcatgagcaagagttggtaaaaattacagttcagtctatagtcttgagaaatttgctaatctcccagatcttaagcaaaaagaaaaaacaagcaaaccttttgcctggccctaaacacatctaaagctgcttggacaatcatcctagctgttgttctcatatgacttatagcagataagcagattaggtatataaaccataccactttttcaaaaatttccaatcatttagaaatagttactcatggaaataaattttgacttacaaatttcttggtgggtgggaaagcaaaattaagagaaggaaggtgtgtgttggagcagacggaatatagatttactcatatgggccctgcaacagaaagtgaagaaaaatggaaaagtcttagatatgtgagagtaatttatcttcttccatattttctgactcaagttggctagtgttgggtcaccaacactgtagaggcaccctctttcacatttcttgccta

SEQ ID NO: 458624 - DNA, 708 bp, Homo Sapiens
  misc_feature (613)..(613): n is a, c, g, or t
  misc_feature (663)..(663): n is a, c, g, or t
  misc_feature (669)..(669): n is a, c, g, or t
  misc_feature (688)..(688): n is a, c, g, or t
gcacaactctggtgtccttctatggagaaaacctcaagtaaagttttattctgcctttgaaaatgcttccaaaagtagaccctgtccccacacaggtcaagactacagagaaggctttgtagaaatgtgtcacctatgtacacctgctacttacacatttcctcttttggaaaaatgagatacttagaataacaagaaaattaagacatactggcctggtgccagcagatggcttttctatagacaaactaggttagtgtggaagatataggttaaaataaactatgctgttttatttatcttcccaacctgattggcagctagacttttttagggtctcatttaatggccctgtttttttcattattatatttaatgatagggcaggatttcgtatgcaagctcttgtttctcaggctgcctgcagaagaagtcgctataaattatctgttgtctacatggtacaaggcccattgactcatctgatgcttgttttgttaatttctttaatatttttatcacgggggcagtggggaggggcttggggcttttagccacagctgttttaaggacttctgatcctcctgcccctgcggaatagggtggggaagtncattgaatttttacactataggtaaatttggcattccccaccataggttngagttnttacgggaaaccattcccntttaaaggggttcccttggc

SEQ ID NO: 458625 - DNA, 430 bp, Homo Sapiens
ggccaaaaggggggtgaacagagaagccaaggaacagaagtggactatccattagttccaaattatggatgtcctatactcttagagtcagtgaagtcgaatcctgaagttataacaacttgcttgaggctttatttctatcaagcaagtgaatttaagtggcccttctaaagatgctttcatcttctcaagtcctttttgaagacaccttagcagttctgtatggagttcaatttaatcattcaatctttgtctgaaggtagcttattagctgtccagtaagagtatttaaatggtactacttgataatttagacttttctgaggtttctttcttcccaatatagtcttttagaaagtctcataggaccttttattagagtctaattaaatcaaactttgtcagaaggtagttttatcagctgtccagc

SEQ ID NO: 458626 - DNA, 477 bp, Homo Sapiens
  misc_feature (83)..(83): n is a, c, g, or t
aaggggtaagtgggccaaaaaggggggggtggaaccaagaagaaagccaaatggaaacaagaaagtgggacctaatccaattnaagttccaaaaattatggggatgtcctaataactccttaagaagtccagtgaaagtccgaatccctgaagttaataacaacttgccttgaggctttatttcctatcaagcaagtgaatttaagtggcccttctaaagatgctttcatcttctcaagtcctttttgaagacaccttagcagttctgtatggagttcaatttaatcattcaatctttgtctgaaggtagcttattagctgtccagtaagagtatttaaatggtactacttgataatttagacttttctgaggtttctttcttcccaatatagtcttttagaaagtctcataggaccttttattagagtctaattaaaatcaaactttgtcagaaaggtagttttatcagctgtcca

SEQ ID NO: 458627 - DNA, 429 bp, Homo Sapiens
  misc_feature (393)..(393): n is a, c, g, or t
caggatgtttgatttcaggagacgatacaggattaaatctaaggggcacatctcacactgaagagcaaaacacatcaataccaatctcctgagcattatgttcattgtggagattttttcatgaccagtgtttctcgaagtatgctcctacgctaggtaagtcttgaatttattaattactttgccagttagcaaaaataatgggtaacctctacactggaagccgagagaagatggcagatgatttagtttacaattatatatttaaagcttaacggattgcttttttcattttggtgtgcttgggaacacagccctcctacccctatccctgccgcttgttttccatcctgaggcaagtttggggagctggcagaggggagggtatggggncacttcttggcatcagggatgtggagtttttcttaa

SEQ ID NO: 458628 - DNA, 356 bp, Homo Sapiens
ataaagactatgaaaccgaataaagggacttacacgacagcctaagagttattactgtataaaatacaactaaatgaatattttcccatatgccttaattcctcactgatagaaattattcatataaaaacttcttggcatctcttctggtgcttctcttagtactagtaacagcaattaatcacaaaaattccacaactttgtggcattatgactaaaacataagcagaaaaacaaaataaaactccaggaggcagaaatacatcacaagctccatcataatacatgtttgtcttgctattaaaatgtaaactcttccaaaactttcccaaatgacttacattcatcaataagtg

SEQ ID NO: 458629 - DNA, 434 bp, Homo Sapiens
  misc_feature (13)..(13): n is a, c, g, or t
  misc_feature (27)..(27): n is a, c, g, or t
  misc_feature (55)..(55): n is a, c, g, or t
  misc_feature (62)..(62): n is a, c, g, or t
  misc_feature (68)..(68): n is a, c, g, or t
  misc_feature (73)..(73): n is a, c, g, or t
  misc_feature (75)..(76): n is a, c, g, or t
  misc_feature (82)..(82): n is a, c, g, or t
  misc_feature (108)..(108): n is a, c, g, or t
  misc_feature (130)..(130): n is a, c, g, or t
acccccagcaaanctgcctttcctggnaagctggaaggtttgtcctttggttaantgccttncaacantaaanannagcaangcccttttcccctgaaaatgcctganttttgggaagctgctgcccaantaaaagcgtcaacagcctcgcctaaacttcgttgtcctctctggttaatagcagagcccagagtcctgagtacttcctgctgggcccaggaggttgctgggagcaaaggtcactcatggtttgtagcagtttttcatctcttagtgattgcagagtctgaaccatggaaacttgcctggccagctggctcaggtaactctccaggtcactgacgccgtggctggtgaagtaactgtaatactggaaaacagtgacgacttccgaggacaggctggaggaaagcagaggctcagcctggtccaga

SEQ ID NO: 458630 - DNA, 503 bp, Homo Sapiens
  misc_feature (60)..(60): n is a, c, g, or t
  misc_feature (79)..(79): n is a, c, g, or t
  misc_feature (113)..(113): n is a, c, g, or t
aaaattcccaaaaggcaaggataagggaagagacccctcctgaacccaaaagtttaaaanccacaagacaaattaagangactgttccacatgggcaagtactacacattatncaatccccaaactgattttatgactcttgtcatagaaacccccaaaacatcagggagggtaagatattcccaaatggaccaatccacaaaaaggattcctgtgattcaactatccaatacttatggctatcaatttagtctggcttggggctgttttttacagggaggtggcctcccatggcgcacaatgtgtttttctaagctatccagaatggccacagcaatctgttggacatggggatcagtatgttcatgatctttgatgttgtataaatgctgcaatcctccttcttcaatcagcatgctgcaataccttgaaggattcttgctgcagacatgttgcatggcccaaactgcccatagctgaactcctggtgttgtgaaacagcc

SEQ ID NO: 458631 - DNA, 486 bp, Homo Sapiens
  misc_feature (41)..(41): n is a, c, g, or t
  misc_feature (67)..(67): n is a, c, g, or t
  misc_feature (144)..(144): n is a, c, g, or t
  misc_feature (374)..(374): n is a, c, g, or t
ttgtcaaacccaaaaaaatgaaacctcttttaaagtaaagncgtctcccccttaactggcaagtttnccctactttctaatcttaaaaaggaaatccaacacactcaaacaccgcaaaaaggtaaaacatctcaacccctaaantgtggctctggcaacttctggtccgcaacaaaagccatggttctaactagggtgggatttatgctccccgttcagtgaagggctgtggctgtttgcagggtgcaggctccctgcgttgactctcgcttcctgtcacacagtggtatcaccaccgtgacggacccttgacattaacaagtctgactgaaaaactgatgtgatctgcagccagtgaggggatgcgtggttgngtgctcgagtacctcggcagggtcaggagggtggcactgtggccaggcacctccgcggccccgagcgaggtgagcaagcctttcctgaagtttcccttccttccacaacatt

SEQ ID NO: 458632 - DNA, 526 bp, Homo Sapiens
agactgatataatttttgtactttatttactacaaacattgaatttttccttcaggcctcatagagaacagcactgacaacttccagaaacatatttgaaatgcctgacatagtgtacacagctgatgagaaatgttccgagtgtgctgtgacaaaaacgagggaaaagtcgacagggaaatcactaatccaaaatggaaagctctccaaagctccctgccacacatcccgcttctgattgaggggacccgtgggtcttgcacacctgcgtgggccactaatcctccaagggaccgcaggcctctgtgtccatgtcagttacacaggagtcaaaaatagactgttctctactccccaaactatgtaaggagggaaaaatgagatggaactgtaagaaaaacttgggtaaaagtcaaaatagtttaaataaatttaattttaattcctcactgtcgaaaccgacttaaatacattgaatttgttgtttttattctggcattgtttaccaggttataaagatgagatg

SEQ ID NO: 458633 - DNA, 462 bp, Homo Sapiens
  misc_feature (194)..(215): n is a, c, g, or t
  misc_feature (412)..(412): n is a, c, g, or t
  misc_feature (421)..(421): n is a, c, g, or t
  misc_feature (428)..(428): n is a, c, g, or t
  misc_feature (439)..(439): n is a, c, g, or t
ggtcacttgactggaattagaattctcttttgatgagtcttttttatattctgtctgggattgtatgtaaacttatctttcctttctaaagaacctcaacatgctaaaatttaaatgcagggttccaattcaaataaagcgtaaggaataaaaccgtttcccttttaaaaaatgtgtgaaattttaagtgggcnnnnnnnnnnnnnnnnnnnnnncctaagttacttttcaaagtgggaatacctttatacggacacgtgtaatcaaacatcattatttatatttacattctctttggggaaccatgggattctcagggccccaaagccaaggtgccccagggaccctggacccgaaagtgtgtggggtggcctattgagggggagccattgctatatttttaaaggccacngtatggccntttttgnccctaaccggnccaccgccaaattcaaggggttt

SEQ ID NO: 458634 - DNA, 487 bp, Homo Sapiens
catagtattaatgtattgtacgtgttttcaaatattttctcatatatgaaaagggccattccacagtgttctttgtaagctttccctcacatcattgttttggatgaggctttatgcttctcaaagcagtgagataacagataacacagaagccatgtgctggcacttctattcaggttggcatggcctcaaccattttgagtcaaatttctgtctagtctagtaggaccatttcctaaagttgtatccatactaggaaggcagatatgaagaaatgctgctatgctaccaatcagaataatgtaggctttggggtcctggggctggtaaagcctggggtatgatggctaaattgagctgttcttacccagatgaggcttatggtcatctgctctgtctccaaaggtaatcagccactgcacatgaggtttactacactgcacacgcatgtgtgttctctaggtaaatttaaatgatattttttggg

SEQ ID NO: 458635 - DNA, 505 bp, Homo Sapiens
  misc_feature (54)..(54): n is a, c, g, or t
  misc_feature (71)..(71): n is a, c, g, or t
aatatcggggtacattccactaaagtaccttttatagactgttatttcggttanatataagagtactaaangccttttttcccctatggcaggcaatcaaaaagtttgaaaaacatggatattgtccaaaggagttcctacacctttgggcttcaagaaccagtaagtattccctgagacaaaagttgttcagggaggcaaccttttaatctataaagggcattcaaaaagaaacttttataatcttctcttactattgtaacataaaagaaaggacatttttaacattgtaaaaatagaacagaataacaggctttatgtaaaactcactactttgtacttatttttctcccttccctgtctttcggaacccgaggacagaatcccagaggtaggaatggactcactgaaggtcactgagtcagctgtgacagaggtgacacagaacccttatgtcctggcttcactttccaagctctgctcctcagtaccctaaggggtccac

SEQ ID NO: 458636 - DNA, 490 bp, Homo Sapiens
aactgattcacagcttcaatgccatttatggacatttaaaatgcacacatatgcagaacaatgctttagcttttcgagcatatgtatcaaaacattaaaattggatgggtgcccctgggaaaaaggaaagtaggcaggggactgggaatgaagggaaagaaataaaactaaaagacaaaaggtttgcatagaccaatattgatgaagtgccacacactgaggagtgtgctgagctgcgtgaggtgcagagggaacctggaaaggagagagcaggagtatagaaaagtacagctcttgggaggctgaaggtcagatagtcaggtagcctggggtcaaatctgagctctgctgcttcccagctctttcaccttggacacgttcttccaagctccctcgcgtttctttttacgttcaaacaaggttacaaggtgttttacacaagcagatagcagaattgctcctgacacacagtgggtacatgatgacatta

SEQ ID NO: 458637 - DNA, 492 bp, Homo Sapiens
aaggccatggggtaaaagacttttgccctaaagaagaaagtgagcccattggagggttcctaaaccaggggactgacctggccaagatttgcacttcatggatcactcgggctgcctctaaagaaaatgaactagagcagagaggaaagtgggagcctagagggagaggcagaggacaagaggaaaaaaatcagagaatgggcctgtgcaaccctgtgttggttgagaggcagtacagtagaggggaaaagcactggctctgaaaccaaaccacccagctttgtgtcttggctttgccgcttactctacaaccttgcgctaatgacctaagttctcttggtttcctcatctctaaaataaggatatctgtctacctctcaagttatgtaagaattaaatgactaatatatatgaatagtttagaatggtgttcggcagtttggtgcacagtaacttctcattaaatgtcttggcccacgccacacagctatc

SEQ ID NO: 458638 - DNA, 391 bp, Homo Sapiens
gccggcagcaccctcaggaactccagcctgggtaccccttgcctcttccccgagactgtcaagatctcatccctgtgaggggtaggcctgctgattcagagggtcctcttcatttttgggaactcctttccaaagccatatttttgggaggcagagaggggcaggcttgggcaccccttctgccccccccactgagaactatgcaatggagtttcatgaaatggtccacatagtggggaagtagccaggaaatgagaaacttcctcccaccccagacatttttcctggtgggagctgaagcactgggcttccacaggcccctggcctccttgccctagcacactgggactggccccactctcccagctggactcctgcatgctcctcccct

SEQ ID NO: 458639 - DNA, 280 bp, Homo Sapiens
gaaattcaccaaacaaagtgatgtcttttattagggttaaattcagggttgtttgctgtcaggaagcctgggtttaagcctcctctaactaactatgtgtttctctgggtctcagtttcccgatctgtgaatcaggaagctggcgcagatgatatccaaggagggaatgtctcagggaccccctggcctgtctcattgggctgtaggatggaactcctcaaaccacactctttcatttctcctgggtccccattttccagaatacatcaccaaccatcca

SEQ ID NO: 458640 - DNA, 290 bp, Homo Sapiens
  misc_feature (192)..(192): n is a, c, g, or t
tccattttactttgaagatttgaaatgttcatacctgagcaaagtctacacaggagtaatggactgtttaacaagtttcccaaaacagcattttcctgctccttcgtatgtaggtgagacacttagctggaaagacatacaaatttagactctcgttgacattgtcgttttaaaaggaagttgctaaggcgntcaatctcaatattagtcttgtttacttcttcttaatgtcaaaattaacatttacaacatccaattataaaagtaatgctttatgtttatacactgct

SEQ ID NO: 458641 - DNA, 321 bp, Homo Sapiens
taaccctgttttaattgaattacttccttaatgattctatctcccaattcagtcagattctgaggtcttacaggttaggacttcaacatataaattttggggggacacaatgcaccccataataataggcaaaattgcatttgaaacagaaatttagacacatttcagaaaactaaaattatatttcttgtgcaccttagtagatagacatatggtgagccatcctttgcacttccatgtaactccacatatccacaatcaaaacaactcccaaggctccctagtgtgggatttggcccctttatgttcagtagcaacata

SEQ ID NO: 458642 - DNA, 363 bp, Homo Sapiens
  misc_feature (45)..(53): n is a, c, g, or t
  misc_feature (90)..(156): n is a, c, g, or t
caggctcaaggcagttagcacctacaagatttcctcttgcccttnnnnnnnnntcatttttaagactcccttttttaaaaggctacatcnnnnnnnnnnnnnnnnnnnnnnnnnnnnnnnnnnnnnnnnnnnnnnnnnnnnnnnnnnnnnnnnnnntcagattattattcctgtttgttcttacaagccattagtattcttttaaaacttactccctgagagatcccagactatgttaagagtgagcttgaagttattcttatttaaaaaggaaatctatattagctcatcacatttgatattattataactcttaaagtcagcagggtaaaatcaaattctaaggaatatagttttgagaat

SEQ ID NO: 458643 - DNA, 191 bp, Homo Sapiens
gatttaaaaatttttttattcaaatattaattttatcaaatgaaacaagaatctttgatgatactttgatgtaaaaaaatgtttcattcatgtgtttgcactttccatggtttaatttgtttagggtaaattttccaacctgaaatataaattatccctttgcttaatatactctttatttcttcagaaac

SEQ ID NO: 458644 - DNA, 414 bp, Homo Sapiens
  misc_feature (342)..(342): n is a, c, g, or t
  misc_feature (396)..(396): n is a, c, g, or t
cggctgcatcacatactatcattggactccaccgggatttgtttaaatattcttctatggttgaacattaagattattacagtttttttgttactacaaataatgctgttattaatatccttatgtccaaatctttgtgccctttattatttacttagactggattcctagaagtagaggtgttgggtcaaggggtctggaagttttgaaggcccttgaattcatatttccaacttactttctaggaagttcatattaaattatccccatttccaccagcagtgtatgacactgcctacttcaccacatggtacctaacagtggacattgtgttaaacaagnagagagaatgggtatctaatcagtgaccttgcttaaaagtcaatctggattgtnaaacccccaggagcccac

SEQ ID NO: 458645 - DNA, 453 bp, Homo Sapiens
cctgaaaagtcccgctggatgttccccttactggatccagaaacaggggacccttcctaacgaaaacagcccagagttcccttgaaatcaggcaggaagttcctttagaagacaggaagcccagagctattgataatatcccgaacgacagaggaaggaatttccttattagaaattctaaaataaaacaagtggggatttggttggatacccttagaagctacatttttctctcatccctaagatagatatctcaagtgtatatctgacacctcttggctttgacacggctctgcttctcaagtgaccatttgttttaagtctgttgtctagaattctttgtgggggctggacctctgaaaaagattctcactgcagaggctttaaatctgtgtttttttccactccctccgtcctgggatgtattcggtaggacatttcatttatatcagg

SEQ ID NO: 458646 - DNA, 458 bp, Homo Sapiens
  misc_feature (345)..(345): n is a, c, g, or t
  misc_feature (391)..(391): n is a, c, g, or t
aacagacttttgtgctgtagtaagaatgtcttagaagttgtgtcttcgagttcctcaaacaccggacagggctcccccagagctgcctcagcctttgatttggtccatattcagacacttcctgtcttgcatacactctgaggatgggccgcttctagctgccgcccgtctccctcttgccttcttgtctctaaatcagtacactcccaagtcactccatctgctatactaggtagagtgggagagccaaagcattttgggagtccatgttaaagtgcctggggaaaagaggatgtaaggagcagtggggagtttatataattaggcgaattcttttctcagganttcagtggggaaatgtatttcccgttggttaattatttacaaattntggggccccagggggagccgttttttggggaaataaggttttccattccaggcagttagttaagtta

SEQ ID NO: 458647 - DNA, 465 bp, Homo Sapiens
  misc_feature (103)..(123): n is a, c, g, or t
aagaatttagatgtgggggaaggaaagcgactgcccaacaggtttcatggaacacattaaattttgaaaaaataagtattttgtacttctattgcttcatgtnnnnnnnnnnnnnnnnnnnnntgcccactggagccacctgtatggatggagaagtgaggacaccatacagacagggcaaggacctgcaggcgtttcctgacgacagtccagagatggtgagagttcccacgtgtgtccacttctcttcacagaaagggactgtaagattctgggggaagatgccctacacatgtaaggtattaagaaaatcactgaaatacggtttccaaaaattgaacatgctctgggttacaaagagacatatttaattcctagaacctgttgatttctctaacaggggtagatgggagtttcaaaaaaattattaataaatgattgtgcttctaaagttgcagggtcaac

SEQ ID NO: 458648 - DNA, 504 bp, Homo Sapiens
  misc_feature (57)..(57): n is a, c, g, or t
  misc_feature (153)..(153): n is a, c, g, or t
actcgggcacttggttggttttaaacatccccatttaagaatccagaggccaaagtnacagtgcccttccccctttaagaagaatgatagctgtgtttgtagagaacgacataaacacgaggttgtctgctgaagaaaacactcttgtgctgnatgtggttttgaagcagcaaagactctgactaacagtaagggaagcatatttttcaagacagtaaatagcaaggggtacccttccccttaatgagcatgccccttgtctctgccatgcagggtccagtgggctggaacccacgcacaggctcctgaccccaccccacgttacctctactatgtaatcggactgtataagattgccaatagatcagacagggtgggactgtggcaatgtcctatcaacctggtacacattgctgaggataaggcatttgaccttactgatgtgggtgaaatataatttctgcatacttcaataacactatttgatatgaactcttctaagtc

SEQ ID NO: 458649 - DNA, 529 bp, Homo Sapiens
  misc_feature (300)..(313): n is a, c, g, or t
  misc_feature (340)..(340): n is a, c, g, or t
  misc_feature (409)..(409): n is a, c, g, or t
  misc_feature (455)..(455): n is a, c, g, or t
  misc_feature (470)..(470): n is a, c, g, or t
  misc_feature (495)..(495): n is a, c, g, or t
  misc_feature (514)..(514): n is a, c, g, or t
cactcctccccttcctcacacttatttttatccttgttcgtaatatcctacttggcttcccattttttatagcagtaatatctaattgattgctaaagactgcaatacacaaaggcataaagcaaagcacaagtgctctccgtggggagaacccggccggcagctggggatgcgtcccacagctcctcagcatgcacacacggtcacgtgatttctgacggcctcatcctgcaccatgcctcttgtatccgccattttctttcttgctcaactgtacagactgggcattcacttaatgcnnnnnnnnnnnnnnaagagagtctcactctgttgcccaggntgggagtgcaatggcacaatcttcagctcactggcaacctctggcctcctggggtttcagggcgatttntcctggccttcagcctcctggagtaggctgggaattaacagggtgncctgccaccaaggcnggggtaaatttttctcatttttaantaggggacaagggtttcancatgttgggccagtt

SEQ ID NO: 458650 - DNA, 420 bp, Homo Sapiens
  misc_feature (369)..(369): n is a, c, g, or t
  misc_feature (379)..(379): n is a, c, g, or t
cagcagtgcaaaaattttatttctgtttcccctccccaccactttacaagatgtaaaattttacttaatccaccgtattctctttttttaattatctgttatcagtcatgtcaaatgtgaggaaaaaaacactaatcaattaaaaatatccgtccctcttccccactgctacagcaaatttaggataaatctacagcattcacttactttagctggttctgatactgaggaatacttttttatttgagaatcaacacctaaagacttgggctaattgtacaggcatttgaatcatcactgataagtgttccaagagccacaaggaagtctaaaagtgggcttctagggtcttggtactacttccaaggnttgtggctanttaggtggacaaacattggggctttcccttgcaatgttatg

SEQ ID NO: 458651 - DNA, 508 bp, Homo Sapiens
  misc_feature (27)..(27): n is a, c, g, or t
  misc_feature (33)..(33): n is a, c, g, or t
  misc_feature (43)..(43): n is a, c, g, or t
  misc_feature (76)..(76): n is a, c, g, or t
ggattcccagtacacatgagttacacnttgtgnaaggaggtanccaggcattgttgaaaaatggatgcgagaggtncagctaggctcatttgccttgcctaaaataactcacgtctactcactagcttccccggtttatctgatcatttggagacctcaaaaaaatgacaaatgactgcaggttacagtctttgggctttctctgaaacaaatgaagccttggatgaggcaaagtccttaaagccaatgaatcctttaaataagattagcagggaaggaaagcaatggaattcatggccatctcccccaacattgccagactgagtaaagtgaatgaaccattcaatcaaacttctctgggcacactgtgggccaggtccttcagctgtgaaatagagacacaaagctgaatcagacacactccctgtctttcacaagtttttagactaatgtgagaaacagaaatggaaacacgtaactacaatgtgataagtaccatgatattgac

SEQ ID NO: 458652 - DNA, 397 bp, Homo Sapiens
caagcctaaggcctccattttgcttgcctaaaattaactccacgtcctaactccactaggcttcccaggtttatcctgatcatttgagacctcaaaaaaatgacaaatgactgccaggttacagtctttgggctttctctgaaacaaatgaagccttggatgaggcaaagtccttaaagccaatgaatcctttaaataagattagcagggaaggaaagcaatggaattcatggccatctcccccaacattgccagactgagtaaagtgaatgaaccattcaatcaaacttctctgggcacactgtgggccaggtccttcagctgtgaaatagagacacaaagctgaatcagacacactccctgtctttcacaagtttttagactaatgtgagaaaca

SEQ ID NO: 458653 - DNA, 543 bp, Homo Sapiens
  misc_feature (243)..(276): n is a, c, g, or t
  misc_feature (293)..(432): n is a, c, g, or t
ggtctgctatgtggaaaatagtttaaagggcaaggacggaaaattaagaaactgccttgattaggagaatagcaaagacaggccaagataaatcaattttgcagggggatatcaactgaacttggtggctgggtatttacatgtgaagagttaggggagaagaaggaattaacagatgattctttgggaaactctcaaagaagagcagtttggatgagagggtgataagtttggtgtttatcnnnnnnnnnnnnnnnnnnnnnnnnnnnnnnnnnnaagagacagggtcttannnnnnnnnnnnnnnnnnnnnnnnnnnnnnnnnnnnnnnnnnnnnnnnnnnnnnnnnnnnnnnnnnnnnnnnnnnnnnnnnnnnnnnnnnnnnnnnnnnnnnnnnnnnnnnnnnnnnnnnnnnnnnnnnnnnnnnnnnnnactgtttaatgtgatgaatctgaggtgcctatgggatgtaattcaagtggagaggtccagttggcagttggaaagatacgctgaagcctaagagagaggtctggcctggag

SEQ ID NO: 458654 - DNA, 460 bp, Homo Sapiens
ggtctttttgtcaaagtgtatccagaatgtcagaatttctagtagtaatatttaaatggttacttcatctgaaaggcagaggctaaaagtttttaaattagctgtgtggtgaggcagcataatacatcccactggttaagatgagagaggctagagttatatacagatcatttggatgggaattagttctacaaaaatcagctgaaatcatgaagacaaagagctgcttgacttcaaatgattgtgtgataagtaaacacagccttaatctctctttacattttacagtcctgacaactgtgtacacctagtctgcagtgaacggtctaaaggtgcaaaatatgtaacaaaaatacccaagtgtattcccagtttcccgagagatatgacctgaaacatgagactgtggactggactgggacaagaactaactaccactatcatagggctactgaacatg

SEQ ID NO: 458655 - DNA, 354 bp, Homo Sapiens
atagttccttgcctctggggacacagcagagtaaccttggacatgccacggaccctctctgagcctcagtttcctcacctgagcaatgagtcactgtgaggaggagaaactcggagtgcggccgggcttagtccttgcagtccccgcacaaaaatacttttatttccaggtgagtgtaacggttacgagtgtggactgtgccgctgactgcctctgggtttaatttatgttgagatgaggaaggatctggctgtgtttttctccttgaaccactgtgatgtaaagaaatctcagctctgggaaacagggagccgctggaagaggccgaatgtgcagagccagctcatttcccgc

SEQ ID NO: 458656 - DNA, 380 bp, Homo Sapiens
  misc_feature (95)..(95): n is a, c, g, or t
cattgtttacccaggttaataaagatgaagatggctccccaacagtcaaaacgtctgtccttcaaactcccatgaaaaagatttaaaagctgcgnattttattgcccttatccgatccttaccgaatttccgtggctctggacttcctcctacacgacagaagataaccgggccactgaagagaaactcattttacttgtgggccgcgtgtagtaaaatctgtgaccaccagggggaagcacagacctggtgctgctgtagacctggtcgctgggtgttcgcggcgggatttctccagccacagggtcctcccttccgctgccactgcagagcgttttctccttctaattcactgttagcgcgtaagcctggaccagcac

SEQ ID NO: 458657 - DNA, 448 bp, Homo Sapiens
  misc_feature (11)..(11): n is a, c, g, or t
  misc_feature (45)..(45): n is a, c, g, or t
attgaacttanaaattgccctcaccctgaacccaacttggcaaanggggaagatgacctggttgaggtctagttctggcttttgtgaatcgaaccgtgtgacgtagaacagcacagcatcaggccaggaaggcgcctgatgagaccgtgttctcagcctgagagcgcgctcaagggcaggtgggagatggagccttctcagagctcagccactggctcttgggctcccaggttcatccctcaaggagctggggacctgagggctcagggcccaccactggctgcctgggggaagtgctgccagtctggtgtggaaagggtccaagttagaggcctttgcctcaccccttccaccagcagggccattcagagaagtcttggctcaaaagaacgttgcccacaggctttcaagtaggtgagtggaccaaacccctgcatgcttttcaggc

SEQ ID NO: 458658 - DNA, 488 bp, Homo Sapiens
tgaaagacatccaagtatcctttgagcccctctctctgcccgaggagcaatcaactggattacacaaaactacccttccacaactaaaacaggtagaattggaacaggaattagttgtcattaatatactccgtaataaaataaagcttgttctgaaacccacaaggggtggtaagaagagactgtataaaagctactgggttctctagaaaatggatacagtatacagaatgtgagaagatacagaactcacactccagttataaaaatagacatggttctcagacaaaaagcaaatgagtacaaaagaattctccaaacgtgaactatttttaaaagatacatctatataaaacaacaagatgtcatctcagagctccaaagagtagtttgttgaaatggctgaaaaggggagatgaattggagacagataggtcaagaacccagaacagatgtgtcctactcttgtgtttggcagtgtacattgg

SEQ ID NO: 458659 - DNA, 444 bp, Homo Sapiens
  misc_feature (12)..(12): n is a, c, g, or t
atataaccaccntaccagagccagccaagatgggaccccaaaataatatggggtatattggggagagcattttaatccccggcttgtcagtattcccagtattttccctcccctgcctatgagaattaagtgttgaagtcagacagatctgggttcaaatcatggttctgtcacttaattggttatgttctgtgccttctctgagcttcaaacaattgaaaagaataacatttttaagctactgcaaagttgttggaaagagtaactaaaaagagtacatttagaaatcacatctgaatgggcacataataaacacttttttaattgtccaggttccatagatttagcccaaataacattatttttttcataaaaatcaaaatagaggggttttaaccaaaggtgcttagagtcacgcaactacacattttgcgacaatattat

SEQ ID NO: 458660 - DNA, 519 bp, Homo Sapiens
  misc_feature (423)..(423): n is a, c, g, or t
  misc_feature (433)..(433): n is a, c, g, or t
  misc_feature (449)..(449): n is a, c, g, or t
  misc_feature (470)..(470): n is a, c, g, or t
gtcatgctaggttctggaaatgcaacagcaaacaagacagacacaatccctcttggaggttactgtgagaaactctccaacatttactctagcaataactagagagtttactgtccattgggtcctcttcacacctgatagaaaaaataaaattcctcaccccatggaagtcatgaaatactccctgcacagatttgtgtgagcttgcttttctaaaaccactgctcaaaaatgctgcttagtttatctataaaccacggttataccccagtgaggtagggtaagtaatttattcataactaacatttatgcaggctctattttctaggccactgtgctgagtgcttttatgggacttatctcaccaaatccctttcaacaacttctatttcagtagggttcccttttattggatacaaaaantggaggcacnggtatattatgtggantgttcccagggttcacacggntggcggtggggaccgggggttttgaaccctggcatttggacacaggggt

SEQ ID NO: 458661 - DNA, 356 bp, Homo Sapiens
  misc_feature (23)..(23): n is a, c, g, or t
  misc_feature (52)..(52): n is a, c, g, or t
  misc_feature (92)..(92): n is a, c, g, or t
  misc_feature (95)..(95): n is a, c, g, or t
  misc_feature (97)..(97): n is a, c, g, or t
  misc_feature (106)..(106): n is a, c, g, or t
  misc_feature (161)..(161): n is a, c, g, or t
  misc_feature (250)..(250): n is a, c, g, or t
  misc_feature (269)..(269): n is a, c, g, or t
agctaaagaagatgtaaaaatanctaaaataatgttcatggtgaacccttantttgagaaatacatgttaaaaaaggaacagtatcctttanttncngggtgttanatttaaaaaagcaagtttggatttttacacctaatttactaggaaaatattttantctgtaattcatgttaagattatgtatggtttgcattttaaggggatttatgttaggttaattagttgtttctgtaaatcatttgtaantagcatagtgctttttacntcattgctgtatctttttttgaaaacactgttgttaacatctaattcagtatccttattggtacaaatctgtgtttggcaaaaaaaa

SEQ ID NO: 458662 - DNA, 869 bp, Homo Sapiens
  misc_feature (836)..(836): n is a, c, g, or t
tttttaatgaaaacaaatataacaataacatatagaatcatcattcaactatccataatataaaacacaataaaaccctatcctcacgtttcccaagcccacctggggatatgtagaactctgatgaaaggtttaattcagtaagatttgacgagatgtaaaaagcaaatttatttactgaacacatgggccattaaggtggcacaaattagcattctgagcgttttggcttctggtactcaagtcagacttccagatacattgataaagatggaacaggcaagtttgatgccaaggtggcatcactgtggctgaccaatgattcggaatctcacattggtgtgactagtgattatagttaagtcaatgctttgccaccccccagctttgttagtttttgtaaaatcaaattcaccatgtcaactgtacctccctccaatgcttgtggtaatgctctttcaaatgaggtattcttgttagcaggtaaaaccttatatgatcctttgccaagagattgattaaaattagataaaaccctggttatattttttaagccataagaatgtaagaggagaaaaatcgcatgaatatttttcctttattttttgcagggtcacaagcatgtagagcaaaccatagtctatttttaatttcaaaatagtgctcatgtttgtgaacattaatgccaaagttttcaataagcttggttgtcaaaagaacactgccttcaatttatagtcactaaatgcatgtggattaaaatatttttagatctcaaaactaaagttcaaattggctcatgttagtaaatagacatacttatcactcaatttatntcgacagtgtctgtttgtagttttattgtgaag

SEQ ID NO: 458663 - DNA, 539 bp, Homo Sapiens
aaagaacgcacactttcaattttattgaggccttcaacactatttaaaagaaaatgtaagaatttgacattctggagttattataacattagaaaatgagcataacattcactctgattttagccattaagggagattagtaaacagactgctacagtgttccatagttggactgtgcatccaaaacatttttttatctttaataaatggtacagtttttatgtagttttcgaatgtaagaagaaaggaatgctgaccaaaacttgatttcatcagcttcatgaaaaggactagtgtcattaacctgttgaacagaattggtttattaaaaaaatcatttccagtagtgtgaacctttacgagtctttaacatctaaatgttatgactccttgtaccttaagttttccagtctttcttatttatatcctctccaaggtacctctgggctcctttcctcttgctcaccgggaaccttagttttcctccaccggatgctttgttaaggtggcccacgttgcgggtccctggcaccgtcgtg

SEQ ID NO: 458664 - DNA, 204 bp, Homo Sapiens
gtcattaacatttatttcaattaaagaaatgtgaatccaggattaatgtaaggtgaaatattaaagtatctggcgaaagaaatgctattaagagtttaagtaaaatgtttgcggtaccagtgctatgtataacagacaaacattaacaaaattaaaaacacattctttttttgttttaaattgagatggagtcttgctctgtca

SEQ ID NO: 458665 - DNA, 332 bp, Homo Sapiens
catggatacacgggaagctataactatgggagctatggcaaccagcatcctcaccccatgcagagccagtatccggccctccctcatgacacagctatctctgggccactccactatgcctcttaccacaggagctctgcacagtacccttttaatagccccacttcccggatggaaccttgtttgatgagcagtactcccagactgcatcctaccccagtcactccccgctggccagaggtgccctcagccaacacgtgctacacaagcccgtctgtgcattctgcgaggtacggaaactctagtgacatgtatacacctctgacaacgcg

SEQ ID NO: 458666 - DNA, 618 bp, Homo Sapiens
  misc_feature (344)..(383): n is a, c, g, or t
  misc_feature (411)..(411): n is a, c, g, or t
  misc_feature (420)..(420): n is a, c, g, or t
  misc_feature (446)..(446): n is a, c, g, or t
  misc_feature (475)..(475): n is a, c, g, or t
  misc_feature (482)..(482): n is a, c, g, or t
  misc_feature (527)..(527): n is a, c, g, or t
  misc_feature (539)..(539): n is a, c, g, or t
  misc_feature (578)..(578): n is a, c, g, or t
  misc_feature (583)..(583): n is a, c, g, or t
  misc_feature (589)..(589): n is a, c, g, or t
atgcaacctcaagctaattttaactttgtggaatttctttcccctcaacaagtacccttttaatagccccacttcccggatggaaccttgtttgatgagcagtactcccagactgcatcctaccccagtcactccccgctggccagaggtgccctcagccaacacgtgctacacaagcccgtctgtgcattctgcgaggtacggaaactctagtgacatgtatacacctctgacaacgcgcaggaattctgaatatgagcacatgcaacactttcctggctttgcttacatcaacggagaggcctctacaggatgggctaaatgactgctatcataggcatccnnnnnnnnnnnnnnnnnnnnnnnnnnnnnnnnnnnnnnnnacccaacacccattcccccaggaaggantttattctnctattacattgttaactcatgggggntatttcctaagtggcccttttttcctaantggaacntgagggtgggggttcatgtggggggtggattaaactttagtttcnggaaacagggantttacttaaagttcatgggggtctgggttttctgttggnccagnccgganttgactgttttccgtagggggcctatctt

SEQ ID NO: 458667 - DNA, 350 bp, Homo Sapiens
  misc_feature (63)..(63): n is a, c, g, or t
  misc_feature (123)..(123): n is a, c, g, or t
ccccagggtctgggaaaccccaaaccttaaggcttggccctcccgggaggcctcccccctcanagctatgtgggatgcagttgcctttttacctgtgatgagaaactggtgaattgccaggantctggctctggcttcagtctggccctttccggggattagagggcattaaccctacttcctacagccaagcagctcttcctcatgactctactttctaactcggggggttgactgattgatttgaagaccgccttgttgatgaatgtgttgaaacttgctatcataatgtaaatgctccttaataaaataacaggacctggtgggttcagttgccttgcccacgtgtg

SEQ ID NO: 458668 - DNA, 735 bp, Homo Sapiens
  misc_feature (576)..(576): n is a, c, g, or t
ttttcttttagctaaacaaatctttaattcctactgtaaatatgcacataattaaaagacattttcctattacaggttgagtatccccaaatctgaaaggctgcaaaatctgaaactttctgagtgcctacatggtgctcaaaggagatgctcatttagagcattttggattttgggattggggatacttaaccagcaaatacaatgcaaatagtcaagcagagaatctcttttcagtcaatgaggggccacatattagaacacagtttgcactgtacctttactatgttatgttcagatacacagataccattgtgttaacagttgcctacagtatcagtacagtaacgtgccctccagtctagagcaacaggctacatacaccatatagcctaggtgtggaggaggctccaccacctgttttttaggtccatgtaggtacacatggtgttcacaggaaaaactgcctgacagcgcatttctcagaacacatccctgtggttaagccatgcttgactatattccaaaatccgaaaaccccccaagtttgaaacaattctggttctaaccatttcngatcgataaccaacttatagtgactatggatgactgaagcttactgtaaaaaaatatttttgctacttaagctatattgcctctaggttacgagttaagtgctttttagcaactgcagctgtagttgagacggtaggagactgcaaacattcacagaaa

SEQ ID NO: 458669 - DNA, 308 bp, Homo Sapiens
aaaataaatgcacctaatcttcgtgcatcactaggagaagcaatggaaagggaggatcagagatttggcaaactctttatggcaacgctacgacagctgtgcctacaaccttttggggcagatgcagctgggaaagccaacgtctccaggacaagtgccttagtggaagcccacaccgaacttgaacaagcccagcccagaaaggagaagctgctttcatgataaaatgctgtcatgagggacaagattctttcgaaagcttccagaagtacacatgattttcataacttcttaggtataaggagacc

SEQ ID NO: 458670 - DNA, 413 bp, Homo Sapiens
  misc_feature (77)..(77): n is a, c, g, or t
aaagatgagccaatgcctttcacaaaaaaccctggccttgaggagagaaggaagaaataccatagggggataggagnaggccaagagaagggaatgggatatttaaatgctaattttatagcatcttcacaaaaataaatgcctttcaattacatcccttggcctgtgcacttcagtgttcattatggcctcgccagggtcaggagcttcactaatccttgggcaattctcaacatgcacagtggcctgtagaggcaccaagcagtggcctggctcaggtcagacagcactaacttggggaagccaggatttctgaggccagggtgcttggggaggaactggagttcagcagtagggacagaaccttccacacagcaaagaacaaggcagttcgctccaaacgggtcttggct

SEQ ID NO: 458671 - DNA, 816 bp, Homo Sapiens
  misc_feature (784)..(784): n is a, c, g, or t
  misc_feature (797)..(797): n is a, c, g, or t
tacaaagtgacatctggtgctccctcagaaagaatgtggccccagaggcatgccagtggctttagactctctgggaggacatgtttgagagcaacagccccttccccatcttttcctttcttctcagcagttataaatctctctgcctgcagtaagtagagtgagtggctggtgaggaggtttgttgatgacactgacaatatctggtgactccctccagatgtgcactcagcagtgagctgggcagaggcgtgggaaggacgttggctgggagcagacggcctctgcaaatgaatctctagtttcctgcaacctggggagtgtccccatgagttttactttcctactttatgaagtgaacctgctttctttgggatttcatgtactcctaatgctttttctctccaggtatttctttcctgctacatattaggactcccaaggcaagagtgcacctttatttagacctgggagtaaagggaaagagttgcctgtctttcgtgtgttttcagctttggctctgtgggatcagttatgcctcattcctgaaaagggcctttttatccccccagaatgcttttgctttgccaataccaccttcctcagcctgccttttgggaaaggttgagaagctaaaaagtcaggtaaggagaagggcagagatgggacttcaggaacctgattttttaaattttaaagggcaaggctgggctggccactgggtggaggagttgatgcaggcagcccagcgtgtttcccagcagagggtttagtcttttgcccnaagaagttcaccncgtttattgagggttgcta

SEQ ID NO: 458672 - DNA, 332 bp, Homo Sapiens
aaaggaagcagctaaacctcaatcctaagcattttcaatgtgagaaatctaaatatttgattttctagtgaaacatacttaaactaaactatgtaagttcaaatttgtgcttttatacttttgtattgttcacttagtgcttttgtagtaaggggatgagttaccaagaactcacagactgcccaaaatatgacgactgtgcattcatataaaaaaagttcagtgagtctgaaatgagccatgggtgtatcttgataataaagtgctatttgggcaaagtaggaagtatgggcaggcctataaaaaaattcccattttcctaatgggttatt

SEQ ID NO: 458673 - DNA, 324 bp, Homo Sapiens
  misc_feature (292)..(292): n is a, c, g, or t
  misc_feature (312)..(312): n is a, c, g, or t
actagcatgtcatgtattttacatcaatattgcaaatttaatacaaaccacagtacaaaaaaatttgaaagcttcctaaaggcactgatgaaagcagtagagaaagttgcatttatagtgcataagttttaaaaattcaacaagttggtctaggtattgaaaacttttttcttccagtagaaactgcaaaaatataagttgtattgatctcctcccttccatcccattcccaccttatatttgactttaatactttttcaggctatataggggaaagctacataaacagggnaacatgaacctgtaattagnggctaacaatgg

SEQ ID NO: 458674 - DNA, 343 bp, Homo Sapiens
ctctgtagttatccataaacttatgtgtgtctggggggagaggcagatggtggttagggacaatgatattaccttacatacactagcgataaagagccttaagcattcaaaaacttgagtcttatgagaagatcaaagtcatattctgaacaataaaatgcttcaaagtttttatctgagtaccaccttctctggaagaacagagaaggtcagggtctacaaaatcaatgaaggccattcatacctgggttcagtcaggggccatggctaccatttttacgaacatgtgggaggaaatggcttcacaatccaatgaagatggccaattattttgttataagtt

SEQ ID NO: 458675 - DNA, 324 bp, Homo Sapiens
acatagcaatttaatttaatccgtggaaaatagaacaacctaaacagcattacccagcgatttgttcagtcattcactcaattttcaataaaaatttatcctaatgctttgcacagtggtttattaaaatctgtaacttggaaaaagtgaattctgatccagcaatactgctccttcccagggcatcatcattacctcaaataggttcatataattcagtaacttattgttcctaaaagggctttgagccaggcttaaaatgggaagtgaaaataaaatgggaaggggaaaatcgggggcaaaggttaaaaggctgagggttgg

SEQ ID NO: 458676 - DNA, 484 bp, Homo Sapiens
  misc_feature (123)..(123): n is a, c, g, or t
  misc_feature (222)..(222): n is a, c, g, or t
ccccaaaggaatggggtgccaaaaaaacccccgccgggtaaacccccaccaagttttaatttaaaacccccgccatccaaagttaagcccgccccttttgaaaataaacaaacaaaaaatacnaccgtatgtttggaaaatgtgaaatagtaatttttaataagcctgttaaagacatggcctagttgccatttgtaaataagtataatgttgcctttgaanttcttttgtggacatctttatttggaacataattgtctttagggttgatttgtatataagtaattggcctgtgattgtttcttttttggttggaagttatcattttgacattacttgtgattctgtgttcagcactattgtgatgtgttcaacctctgcactcgcttacacaataggatatgccaattgtgtgtggtgtaatgttattttgatttttttccatgttattgatgaaggatcatgcacctaacatggaaaaaaa

SEQ ID NO: 458677 - DNA, 479 bp, Homo Sapiens
  misc_feature (113)..(113): n is a, c, g, or t
  misc_feature (248)..(249): n is a, c, g, or t
  misc_feature (252)..(252): n is a, c, g, or t
acatacatgggggaccataataagccatgttagcatatccgtcacatttcatatctggtgtatcacccatccttcacttttattgtagaattttcggaaaaaattgaatgccnccacagtgtataggtatacaacaacagctaataagccaacggttaatacgagctgtttgccattgtgagttactgaggacaagatggttcttaatgtcttgaatcccatagcaatgtcgagaaggtgagcggcannaanaaagttgttatagtgtccaagaacagacatagtcatataccaggctaggtagaggaaggagttgtcagtgaaaacgactcctagtttccacatctgatacttcacatcaatggagttcagtacagctgataaggagctgtctttctttggcttcttcttttctctggcatcactgaagtccagagctgccttgtccatgccaagtaattcactgattctgtctcggc

SEQ ID NO: 458678 - DNA, 756 bp, Homo Sapiens
  misc_feature (616)..(616): n is a, c, g, or t
  misc_feature (668)..(668): n is a, c, g, or t
  misc_feature (718)..(718): n is a, c, g, or t
tttttttagcagatcccaaaggggaaacacaagtcattttattcagatgaggcactttcaatgtatgtgttttggggtgtgtgtatgtgtgtgcgcatggggaacagtgaggtggtgcaggataataaatactgtgagggtgaaggaacactcccccaagctggcaggagtatgtggcagcaatgtacagagcctcgggagtagagtccagggacagggaggtgggttcaaggctggcttggaggccaagggtgtcccccttagctcaagaagccaaagaaattggtggagcgggggggtgggcccatgagcatgggcatctggttcttgtgggtgatcttgattgtacagggcgtctgcatccagggttctccgtcaatttgcatgggaagggtttttgtggtgtggaaggtgatctcagagcacttggccagccgacgtccagcattcttgagcttggtatagatttggcccatctcaattgcaccctccagcccaaccacttgcagtctcttgtcacttaggtctggtacacaggttttcaggatatcagggtcggtgatgactttagctgtagcaccttaggccttgttgatcccattgatatccccatggngtctcctggtatcacccccagaagttggagccaccatgcatgcttaggatgnttagcactgcgatgccttctagggacaggttgcctagaatccagcgtttnccccagatcttaactgtcaaagactccttcagcttttt

SEQ ID NO: 458679 - DNA, 496 bp, Homo Sapiens
  misc_feature (425)..(425): n is a, c, g, or t
  misc_feature (460)..(460): n is a, c, g, or t
ggaatcatttctataaattgcttctttaagttttctctaaattttgcctctaggaaaaaattaaaactattcaatgacagctagctgtcacttggtgctaccccaaagctttccaatcttttatgtattttttgtgaatgaaactgttgctgtaggaaagtcaaggttcatgtaagagtatcgtggtgtaaatataatggtttcacagctgtttgaatttttcttttcctgtgccagatatagaatgcagtcaaccctttttcagtaacttatgttcaccagtctgtgcttttcttctcccagaaggcttttcttagtggttgtaaatgcaagaatcctgagccctgtgttgcaaaggtgggtggtctgtcagcactttctggcaaattgagttgatggatttaagataagcctttggggttccngtcagttttctgggccctgaggaagggttgggccncctttactctcagtattttgagtgtttttcaaatgt

SEQ ID NO: 458680 - DNA, 523 bp, Homo Sapiens
  misc_feature (13)..(13): n is a, c, g, or t
  misc_feature (46)..(46): n is a, c, g, or t
taaagttaggtgncacaatggtaagaccacagcattatttgtaatnaagaaaacagaaacaactgagattgccatcaacaggctaatggctaaatacaaagaaatcgtgcacaccactgaaaacaaggaaggagatcctcctatgtactgacatggaaaagacattaagtaactaaaagacagagcagaataggtaaatatattccttactttttaaaaaggtgggtatatattgatgtgtacacaaacatatattaatatcactgtgtctgaaaggatacacaccaaactgttactattacctctaggggttattcacttcttacattttctgaattgcatgaatctattacaataagcatgtattactttttttgtatttaaaataatgaatgagttcccttctgcactccatgtggcgggaagcaggggagacagagcacacggcttgctggaggcacagagccagtgtgtgactctgcagcaccagctgtctcccagttagtctcaaggtctagattga

SEQ ID NO: 458681 - DNA, 442 bp, Homo Sapiens
ctaacaagcctttaaagctccctccccttaagaagcttttgttgtctctcgaaggaagagacacctctgcccagccctaccgttcctgagtcgtctttcatctgggggagaaaaaaagatgtgaaagatggaacctgctgttctgtttcagcacagcaggccatgaagacagaaggattcggtgtggattcttcctcccagcaaagggtggtcccaggaatccaaggcccttgagaggtgggccaccctcgttcctctctgagtaggggagggggcttctgttctcagatgttgtttgaaaatctccgagtaatcttagaagaagacagatgtgaggtgcaagcaatcctttcctcaggggtgtcttcgccactcatggataaggtcgtgcttagccctcagaattgaatccaggctgacgggcagttgacacatttccagg

SEQ ID NO: 458682 - DNA, 345 bp, Homo Sapiens
  misc_feature (303)..(303): n is a, c, g, or t
atggaaagacatcttttaataattcattcttatttcacaaatattcagctgccaaaatttcatgagtctcacatttttaataaaaagacccaaagttccattaaataatggagaaaaaaacttctccaccatcttaatacactgacatgagatttttcaaattttccacgattaccacctatggtattttaaagatcttcattaaaaacataaaaaatgaaatggctagggatttctattcactatagttttttcaagggaaatgtaattactacgtaagtatttcctttattaaatttgganggttatataaccaacaggccaatatggaaggatttttcttta

SEQ ID NO: 458683 - DNA, 654 bp, Homo Sapiens
  misc_feature (414)..(414): n is a, c, g, or t
  misc_feature (436)..(436): n is a, c, g, or t
  misc_feature (471)..(471): n is a, c, g, or t
  misc_feature (514)..(514): n is a, c, g, or t
  misc_feature (592)..(592): n is a, c, g, or t
  misc_feature (622)..(622): n is a, c, g, or t
  misc_feature (634)..(634): n is a, c, g, or t
acaacaatgagaatctttatgcatatagctttgtgatcaatacaatccttcagaacaacaagagacaaacaaaggaatacaatgtcccaaacagctgcagtccacaggctgacattgctaactagatttagatcatctggaggcttttgtaagaggaactgaggtgcagaggcatcagaatgagttgattcccggcaaaagggctaagaggctacagacatatctaaaaatcaagaaaccactacttgttaagtacttctggtgtttgcatacagtgtccaatacatagggaagataggcaagtccatactggtctttgtacatgctgtgtggtagaggctactgcaggtttctttattttctaaagtagggcaaggctcataaattgaccaattcacattgtgattacttggnacaatgcatgcatgttattggnacacagagtgctttaataggaatctgttggatttncaaaattctgacaaggccatttttacctcagagggactattancctttcacttattcattcattcaacaggatacgtatcccaaactgtgtgttacctcatccatccccttctcgggaggnccaacccggggaaatagggttaggaggganagtttttcacanggggcacagcatggttttgt

SEQ ID NO: 458684 - DNA, 448 bp, Homo Sapiens
  misc_feature (15)..(15): n is a, c, g, or t
  misc_feature (21)..(21): n is a, c, g, or t
  misc_feature (57)..(57): n is a, c, g, or t
  misc_feature (63)..(63): n is a, c, g, or t
  misc_feature (90)..(90): n is a, c, g, or t
aaaaacccatgtccngggacnggtttttggagagtcccttaacccaaggaggccaantcccangacattattttaaagttggggtacgtncccacttaaagtagcctaaatttgaaattaaagagattaaccagtgaagatctaaattcctcattccttgacaaagctaccttgttttatcttttctttaaacctcaagtgttttaaaaaaattaatatcaaaatgtaaaataatatccacattatttaagttaaaatgatattaattgctatttgacatgaagcatcattgtatcatgagatattactaaaggtaactctgcagtcctcctccacctatgccaaatgaggaaggacactgattgtgatgcttctaatggcaatttcattttgctgacatcgaccttgaaagctagttaatgttgattggacttgtcatggaattcca

SEQ ID NO: 458685 - DNA, 490 bp, Homo Sapiens
ggtgtttgaggtctgtaggttccgtggtactttctgctgactccttagtggatgaaacagaagtttcacatttgtctttttctcttttcactctcagtcaccatgattcaaataaactaattctccttaagatcccactttattttttaactccaataaatgtaattatcagctgctgaattgtttgacatgtttagggggtaaaagctttcattttgttggcaatatagtcttccaccccctccccagttagggaaaaataataaaagatatgttaccccaaaattatactccctaaaacatactgttttctatctgtttctacctatttatttgcatatgtttaaacggtacaatgctttcttttactttctatttttctggcaactatggttcactatttaggcacccaaagttttcagactgaaactcaggccagtcacatcaacatttcttacagtttcttgagcacttgaagcttgtttgccac

SEQ ID NO: 458686 - DNA, 556 bp, Homo Sapiens
  misc_feature (30)..(30): n is a, c, g, or t
  misc_feature (407)..(407): n is a, c, g, or t
  misc_feature (490)..(490): n is a, c, g, or t
gaagggacatagtttgtgcccccggtcccnaagtcaaatattggactccctcacaaacagtaaagtatggccaattttgtgaatgccctttgaattcccactttacatggagtactattatttgtgaaatgtcctttaagatttttggtccttaaatttttgaagactgctttccccctttatctcccagaaaattgagaagaaataaactcctgcccactaacaatcctcagtccgtgaacaaaaccaacatgaacattcctaaacaagagtgtgtgttactctaagaagaaggctatagaatttatggaaatggcttatgtaacctgcaagactggagaacagaatgtgactggccttttctaatggtcctttaagatttaatgattaaagcaagagttttttanaattgactttgtggtctaaattcttgatactgtttataattctacaaaggacaaaaattgttacgtactataggcacttaagnaccctgaggaaaaataatacaatgtgtgtgtgtgagagagagagtgagttactgacattaagttcc

SEQ ID NO: 458687 - DNA, 567 bp, Homo Sapiens
  misc_feature (20)..(20): n is a, c, g, or t
  misc_feature (25)..(25): n is a, c, g, or t
  misc_feature (34)..(34): n is a, c, g, or t
  misc_feature (80)..(80): n is a, c, g, or t
  misc_feature (85)..(85): n is a, c, g, or t
  misc_feature (93)..(93): n is a, c, g, or t
  misc_feature (109)..(109): n is a, c, g, or t
ccccaaaccccataaccccnaaagncctaaaccnggaactggaaaataaatggggccatggttaagcccacagtaacaanggacnaaaaacanctctggcctaactaanaaaggtttatttcttggctcaacattgccttatcctatggtgggttgaactgtggttctgctcccacatcatcttcacccccagccagcagagcagggagcagtctctctggagcatcactggagtgaggaaagggtacattaacaaaaatacactatctcctgaagtatctgctgttatttcattgcccaaagcaagttccatggcaagggtgaaggcattggggctgggaagtgtaatccaccctcagggagaggcagctattatttatgtacaatagtctacaacaacccctttgcttagatgacctgcctagtctccacagacacttcagtgtgaccactctggcctaaggaacttgagaatctagtgttatcatggccagaagcatgagggctactctaaagcttacaatgctacagctgtcaccactacatctgttttattttattattctt

SEQ ID NO: 458688 - DNA, 564 bp, Homo Sapiens
  misc_feature (461)..(461): n is a, c, g, or t
  misc_feature (471)..(471): n is a, c, g, or t
ctttagctttggccagctgcacagttgaggaggctctgctggcctgattttggaaaaccaagccctgtttggtgaagctcctcaggtgacactgtctgaaacggagttctttggatttgttatttctaccactgtgccttcttgcgtcactgtgttttgatttgtggtcaacaaaacactttcaaatagccttaggtgagtaagcctgcaagtgacagcaagaaattctaccgaatgaaactcaagaggcagaaaatcactatcataccaatgggagctcatttgtcaattccttcctgtgcatccaaccatcacgatcttatttgacattcgcagtagccctaaggggcacggcacctgcattgctcccctttcataatgggaatatgttcagagggaaactaggcccctattcgacagggagaacttggatggggttaacaggggtagtatatcctccntaggccaaantcttttcaccaaggaagtttttatgggcaaacacttgttaggccagggcctgcatgtttgtggattatcctaggttagtatccgggttaaagg

SEQ ID NO: 458689 - DNA, 286 bp, Homo Sapiens
  misc_feature (274)..(274): n is a, c, g, or t
tgccacagatcacttccctctcagtcctttaaggattccatggcaatgagcatgtcctctctttggatacaaacaaaactcctgggagggggaattggagcctgttttgcttttaaaaagttgcaaaaagcctgaagaaagtgttgttttcttttccatattcattctcaggctaaatacagtataatgattgaatacacgttcacagatggggtggaaaactgacattaagtgccatgccatagaacactgacattaagtgctgtggcatagnacagtaggtatc

SEQ ID NO: 458690 - DNA, 324 bp, Homo Sapiens
  misc_feature (179)..(179): n is a, c, g, or t
  misc_feature (221)..(221): n is a, c, g, or t
ccctgggctcagacctttgtatgtgcagtgtgggaggctctggcaattggacctccagccaagagaaaaagtgaggccccagcaacatctggacacagcacagccctgcatcaggcaagttcgctcagaacagcaggagctgaaacctgagattctaatcaaccagagggaccaggtgnactccattctcagaacagtgcagtcaggaaataatgtcgganaaaaacacaacacattttttatttgtaaaatcaaaatgactgaaatatttgctgtttgtcccttagccacgtcagatccatctgaggtggttatgggtttttc

SEQ ID NO: 458691 - DNA, 316 bp, Homo Sapiens
aatcctggttgtgaaacaccctgtccagatgttgaataacagtttggatattagtcccctgccccaaatcctcactttgagaggtaatgcctcagcgttaaaggtgggtcttggtggaaggtgttttgatcaagggagaggatccctcattaattgatgctgtcctcacatcaaggcccatatttctgccatatacgttttggaaaactttttccagtgttaacaataaatactgggagttttattgaaatattaaatttatagaaactgctattattttaataacaagtctttaaacattgaaattaactttatt

SEQ ID NO: 458692 - DNA, 431 bp, Homo Sapiens
  misc_feature (23)..(23): n is a, c, g, or t
  misc_feature (31)..(31): n is a, c, g, or t
  misc_feature (45)..(45): n is a, c, g, or t
  misc_feature (58)..(58): n is a, c, g, or t
  misc_feature (74)..(74): n is a, c, g, or t
acaggcaattccaaaatagaaancaggcccntaaaagaaaaaganggcccaactttangaagaaatagctgttncccagaaatctgctctgggctcaatatacagtttggtccctacttgtcctgtgtgtctggcataagctggcattggggtcagaaccgtctgctcttcctcatcctggtccattgcagtcactaacccaaagtctccaaccttgaccacatcatccattgtaaagaatatgttggatggcttgaggtccctgtgcatcagtcctttactgtgaagaaactccactgcctctgcgatctgcaggaagatgtgcagacacacgctcctctctctctcctctatggtacatcgtccattcatccagtctttgaggttttcttttctgcacagctgcatttgaatgtaaagatacacctttg

SEQ ID NO: 458693 - DNA, 286 bp, Homo Sapiens
aaaaaagacatccctcaattttctcccatcacttctttgttagtacatctacagagtataatttaaagataaaaagagttaatgcgatagaatcagactcagcatatcctgatggtttagaatttcttttcttaccttggcctaacagattaactgatcaaagcagtttaatccataggaatatggattttgcctgcataataaaatccatgctatgttcttaaagaatattttgaacattacaacaaggactaatttgggttgaactttttagatttaaaaaaaa

SEQ ID NO: 458694 - DNA, 359 bp, Homo Sapiens
  misc_feature (296)..(296): n is a, c, g, or t
tccttcagtgctttttcaggactatgttatagaatacttatggggcatacgtgtaaatgaactgtcaaccttaaaatctaaacaaacagcttgtttgtggttcgtcctgaaatcctccctgctcacaaaacagccagctacttggttttctaaaagacgtaattttgcaggcagacttcgtagagccattctgtgcagaagaagggaagggagaagctgtttgttttacctgtagtatgaagatattctttgcgctgttagaactgagctcattaattctgcctgggcaataattncaaaggtttattttggtgtagatgggcgaatacagatgcatacatttatacgcagtacacgag

SEQ ID NO: 458695 - DNA, 406 bp, Homo Sapiens
  misc_feature (30)..(30): n is a, c, g, or t
  misc_feature (62)..(62): n is a, c, g, or t
  misc_feature (83)..(83): n is a, c, g, or t
  misc_feature (114)..(114): n is a, c, g, or t
  misc_feature (156)..(156): n is a, c, g, or t
cccccggagcccagtggaactgaagggttncaagagtcctccaaagtctggccctcaaaacngcaattcccaagacttaaccngtaaacttcctccccccaaccaaacacatcncctgtgttccatgtcctaactgggccactccctagttccccnggacataatttaaggtttcattccctcctttcatctctgttgcctgttgctctttaccatccatcaaaatctagcacaaatgcaatttctgtgaaatctttctaacccttcacaccagaagtaaccattctctcctcagaaatctcatagctctttaaatttatttcttattaattgttctcattctattttctattcatttaacagacattgttaggctttgctatagttctgttttcctttatttaaa

SEQ ID NO: 458696 - DNA, 358 bp, Homo Sapiens
aaagttttttcatagatgtaaaattgaagatggtggtgagggtctgaggatagttcacaagactgtttaacccatgcttagcttgaacctctgagccatagtgtcccctaatccctggcttgggctctgctgacaccaactgtaatgcagagaaatggggtggctttggggcctgggatggcctctgcaggctgtcctatcctgcctttccccatacgctcctgttgcaatcaaaagaaaacatagaaacaaatctctaaattaaatgttttatttgggaatcacagaatagcaatttggggcatacacacagactgaggtgggctttggtatgtctgaaaaagggaagcttgggagt

SEQ ID NO: 458697 - DNA, 538 bp, Homo Sapiens
  misc_feature (20)..(20): n is a, c, g, or t
  misc_feature (34)..(34): n is a, c, g, or t
  misc_feature (74)..(74): n is a, c, g, or t
tcttgggccttaaaaagggntccccaaattgttncaaaattggcccccaaaaaaatgggcccaaaaagctaccnaactggaaattctgcttccaaaaacttcaagaaaagttgtccccgggggaacctgcaaccttaacccgggcaaggtgtggtagctccccagaaagttttcccacggatgtctccctttaaatgcaaagcccacatttcctccatgtccctgcttccccagcttaggtccctaggtggaggaacaggggcaatgccttgaggtccagaacgctgctgttgagttctttgttctctgataaaaagccacaggatgaccccaagaaggatgaggaagatagtaaccaacaaagttgggacgataatcacttcatactgcttctcctggatgacacacaacttgtcactgagactgcattccaggagcatccgtgtcatgcccattgccacagggctgtccccttccctgctaggcccacagagaatgtcgacagcacagctgtgagtaattccgtgtccctcctctg

SEQ ID NO: 458698 - DNA, 388 bp, Homo Sapiens
aattgaaaatatactgtaacaacaacaacaaaaactgccatatactgaccatgtgaattatcacatatttcctacatactgggctcaagagaagatacagtacaatattttagctgccagtactgtcagtctaaaaagactgaaggcttagtgcattccttggaagacaaatttggcaaacaaaaacaaagattatttcctttgtttccttgagatgcagttaaataaaacagatatccccaaagtaatgaagactcatttcaagtaattactctgcttaccagttttatttacacagtaattgttatgagtggtttttagtgaattctttgtatttacattttatatacacatttatacttgaaaggtaaagaaactgtacaataat

SEQ ID NO: 458699 - DNA, 383 bp, Homo Sapiens
  misc_feature (307)..(307): n is a, c, g, or t
  misc_feature (331)..(331): n is a, c, g, or t
ccctgaggctccagcacgttgagagtagatcaaaagatcctttcagcagggtgccaatgcttagacgccatctgggagtctgggagccttccgcagacctgtcagtctcttccacgtactttattctcttaaaaactcagtctgtagtgtttcaagttcttagaaaacacaaagtcctcaggaaggcttagggagctgcctctgccctgtgcctcttcctgggcagctggacggaaccctgcctgcccaccccagggtttgcttccggctgcctgtgcctcttcccgggtagctggacggagtctgnctgcccgtccccagggttgttccnggctgcccgggctcttgtggacccagctgtgccagaggtgattctgctccag

SEQ ID NO: 458700 - DNA, 441 bp, Homo Sapiens
  misc_feature (22)..(22): n is a, c, g, or t
  misc_feature (35)..(35): n is a, c, g, or t
  misc_feature (66)..(66): n is a, c, g, or t
  misc_feature (78)..(78): n is a, c, g, or t
  misc_feature (93)..(93): n is a, c, g, or t
cccgggcccacggggggacccngcctcaacaaacngggacaaaattgtacccgatatgtagttagncaatatatacanccctatacattttgncaaaattgtagcaaagaatatgtagttagacaatacatacaattgtataacattttgacaaaattgtaacaatagtttgacaatatatacaattgtataacattttgacaaaattgtaacaatgatatgtagttagacaatatatacaattgtataacatttaatgttaaataattgcaactgtaaaatacgtatatgtgaaggggatctgaaaatcaactgaatcaaaatgtaaggattactgccactttaaaaatttgctcaaatttatgaatcttatttcactttttaaaatcatgcaaatcatctaagatgctgggacacattcctagccttcccctctgtgcc

SEQ ID NO: 458701 - DNA, 158 bp, Homo Sapiens
ttctatttaaaaatcaagttaacttttctagtctattttgatttttccgtaattttaggttttataatttaactttcccaccttatttaaccttgatttatatatttatacctatatcattttacaaagaatttaagaaggtatttagcattttatat

SEQ ID NO: 458702 - DNA, 446 bp, Homo Sapiens
acattatttatgaaacagtttatttataaaaacagtcataagaaagcagaaagcaacttccattagctatgtgagattttgaaagttctcgaaatcagcttatgtaagagactatttccaataataacagaaggctacaaaaatgtcagaccaaaatagtaggcagaaggtagaaaactaaaccctgagaataatagtcattaagaagaccttgatgtagacattgcatatgagcatggagattcaggaaggaaattctggatgactggtggctgacaactttcaaatataataaatagagataggacttcaaaagaacttcaacaggaatatatggattttatagtagcacctgggccttactttggattaaaatcgtttgttacaactaaagccagcttacatggttcgcattaggggtaaactgccataggccttcccgtccc

SEQ ID NO: 458703 - DNA, 323 bp, Homo Sapiens
aaaaagcatcaaccaactatgaactaattagattttatgtttttgtttaaaaagttaagtttattaaaagttatattagcgcaaaattgaactagtaaactccatttatttccctcctataatataaaaacaagatctatttgtttaaaatcagatacctaaaaaaatctttcaaaacttttaagcctgaaacaaatttttatggtcgagtctctaaaacccctgaaaatagaggtctgcaatagaaatgctgatacagtcaaaacccaagcagcaaaaagctgcctctgtaacacccctaattgctttgattgctatctctc

SEQ ID NO: 458704 - DNA, 520 bp, Homo Sapiens
  misc_feature (344)..(370): n is a, c, g, or t
  misc_feature (393)..(447): n is a, c, g, or t
  misc_feature (449)..(449): n is a, c, g, or t
  misc_feature (501)..(501): n is a, c, g, or t
ggctggtcccaatgttagtttattagtgattgatctgtaattattgggattatttattcaactctaaaattccaagatgaaaataatttatctctttcttttcaagggaaaaaaacccaaatgaatgcattttcagtttctccaggcctttgaactgcagcagaaaattcaaggatacagcctaggcctgggcaaatgcagccctgggtctttgggccagtttctgacaataatagttgagttttgggaatcacataagggtgaaaccagaaacgatcctaaggaaaggcttgacctttgttaacacctttagtttccaaagtcacagcagctggggtccctcnnnnnnnnnnnnnnnnnnnnnnnnnnngagacatagtctcactctgtcannnnnnnnnnnnnnnnnnnnnnnnnnnnnnnnnnnnnnnnnnnnnnnnnnnnnnngntcaagcaatcctcccatcttagcctcccgagtagctgggacaacaggtacgnaccaccacggccagctaat

SEQ ID NO: 458705 - DNA, 411 bp, Homo Sapiens
  misc_feature (302)..(302): n is a, c, g, or t
  misc_feature (372)..(372): n is a, c, g, or t
  misc_feature (379)..(379): n is a, c, g, or t
taaaaaaagaacatttgatccactttttggaaaaataattaaagtactgaaaatggcaagacagttattaattcattcaacaatcaattactgaaatctttttgtgtaccaggtactgtgctatgcatagcagatacggtcaagactagttgctccaggcagaaaacattatggaactaccatggaagggacacagacttatatacaaataatccgtcaactatttaaccacagtttctacaaatccaatcaccaaaaattcttcccacctcttcaatgcttcaatgtcactcctcccatcnaaaaataggcatccctagttccctctccttggatttaggccttatgatgcggttttgaccagtaggatgngggcttnggtggtgctgtgccagtttttggatttcggtt

SEQ ID NO: 458706 - DNA, 484 bp, Homo Sapiens
atcataaaatacaggatccattttaatgcacattcttgttggcttttatcaggaagacagtgtgagcctcctcaagatactgtttgtctcactcttgggggatgacagtatgatgtatatgatccatcatgttcatttccttcatgcattcttcgccctattgggataggcatgagatgatggtaatcatatgaaaactcaacatgattgtttattgctgaaggtttacttaagtctgtcaccatgacctgtatccattagtaatcctgcaggttcttaaagggacactgcattgatggaaacagctgcaacgatggaaagactaatcacgcaagtttcataaagaggatttgttgatgaggcctcaattttcaagtgcacaagcagaaagctctcacctgagccttctgtctgggtggcatagacaggtgtggtaatacctctggagttaaatttgcaggtccacagagtttaactctgttcc

SEQ ID NO: 458707 - DNA, 442 bp, Homo Sapiens
  misc_feature (66)..(66): n is a, c, g, or t
  misc_feature (72)..(72): n is a, c, g, or t
  misc_feature (75)..(85): n is a, c, g, or t
cccaaagtccccggagggtgtgcaagtgctgaacattttgggggcaactatttttacaagtctttnggaaanggnnnnnnnnnnnccaagtcacaaagttccttaaagaaaactggggttcctaatgaaatcaatttcccagtcacaacacacttacgagtttcctataaggtttgtgggtttgtataatgtttacaggtttttataacgcttcagagtagaggacagggacttagaaaaaaatcactctctactgtgactacatcctcaaccattttatttctgcttaaaaaaggacatacaacgtttgtagaggtctgggctcttggcaggagttctttcactcttctgccaaagcatttctccaaaccccacagagcagagatgcacgaattctcactgattctcacaatcaaacaccatgtcccatctgctactgtct

SEQ ID NO: 458708 - DNA, 266 bp, Homo Sapiens
gaatttatttcctacaggaaattttgttagaagttatgttaatatgctaatgacttaagagtttctccctatctttttgaaaatcgacaagaactgttttagtcctcatatgatactggttgttgagactttttgaggaatgttttgagtagttttcttggttgtgtggattgtttggaattatgtggtagcttagaagcatggtaaagatgcttttaatttgcgtatttttatatagtaatgtctaacatggaattatctttaca

SEQ ID NO: 458709 - DNA, 630 bp, Homo Sapiens
  misc_feature (584)..(584): n is a, c, g, or t
  misc_feature (605)..(605): n is a, c, g, or t
  misc_feature (615)..(615): n is a, c, g, or t
ctcttgttagcatttttttgttttaataacatagtttttggttttcaattttgtccttttggaacatttctgcacattagaaaatgtcatcgctattctttttacaaaagagcagttttcctgaagcctaggggttcaaaaaatacaacacaacacttccaagtcaaataccaattgcatgctaacaatgagcattgtgaacagagtaacctaattctaggccatttccaaccatcattcaggattaaagagttaggaaggataaattaccacataatcataatctataaaaatactggcccagattgcactaaaaaactctcaataaataaatattggacatttgctttatgaaagtcagtggagatgtgctcttcagaaatcatgtccatagtttcagcctgctttttacaaatcacacatacagagtctaacagatgacaaaggttatagaacaggaaagaatacaacttgatagaaaaacgtctttgacatggtatgctataaaggatgccactaatattgttgagttgcttatgttgcagttccaaggcatctaagagtccaactgttttaggcaagtngtgtactgaattgatggccanccctaggacnccttgaagggcacat

SEQ ID NO: 458710 - DNA, 186 bp, Homo Sapiens
cctaactgcaggaacagcatacataaaaacgctcgggtcctgaagcaattctttaagcacagcaaacgttgagttcttttggctttcactccatgtttataaaaggcaatgccaccatcataatgtttctcaataattcctatcacttctaagcattttcatgtattaatctcaatatattttaat

SEQ ID NO: 458711 - DNA, 529 bp, Homo Sapiens
  misc_feature (431)..(431): n is a, c, g, or t
  misc_feature (441)..(462): n is a, c, g, or t
  misc_feature (479)..(479): n is a, c, g, or t
  misc_feature (499)..(499): n is a, c, g, or t
  misc_feature (511)..(511): n is a, c, g, or t
tgtgtatacacactctgtacatttttcttttctcctgtaatatagtcttgtcaccttagagcttgtttatggaagattcaagaaaactataaaatacttaaagatatataaatttaaaaaaacatagctgcaggtctttggtcccagggctgtgctttaactttaaccaatattttcttctgttttgctgcatttgaaaggtaacagtggagctagggctgggcattttacatccagggcttttaattgattagaattctgccaataggtggattttacaaaaccacaggacaacctctggaaagattctgaggacccttttgaggacaggaggctctttaaggtactttcttgccaggggagcagcactgcatgtgtggatgggttgtttgccatctgttgatccagggaactacttcagctacttggcntttggattannnnnnnnnnnnnnnnnnnnnnaactcggggaacacaangggggggaatattattcttncccggtggtttntaaacattttttttcttt

SEQ ID NO: 458712 - DNA, 418 bp, Homo Sapiens
acaagttcaacaagcatttattgagcccctgctgtgtgcctgctgtgtgacacccctgcagtgcctgcgccactgccccctccttcaggaagccactctctgccccccaaagggctctgcccctctgggcacctgactggcttgtgggtgccagccattcagtggccagtggcatgtgtctcctggcatcgcagctgtgcccagcagggctcatgtgatgatggcaagagtccggggctgctgtcccaaagtcactctgtgcagccctgtgcattcccttgggcctgccctggccccatttccaaggccatgggacccaggcagcgatgggcaggacaggcctggcatctcccacgcaggctgactgagttcacggcacacaggccagggttctgggggcaccactctggtggtcttg

SEQ ID NO: 458713 - DNA, 646 bp, Homo Sapiens
  misc_feature (124)..(124): n is a, c, g, or t
gctctcatttacttgaagttatattttttctaatttattgacacttatttttgtttaggcatgcctacattttaaaaaattggtgattagttttggaatttaaaacttctagaacccctcaccnaagttttcctattaaaacccttagtataaaagatttctgtgatccttataagtaatggaaactcctactactttccacagctttttaattatatttttgaaataatggtcagatgtacccacctgataaagaaaatataatatgatctggtttcccaaaattgaaacatggttaataaaaataaaaaattgcatttaccaaaaatagcctggaaaattaaaaacaatggtgaattcctacgttctaaagggaagcaaaaaactgcatagtaagtaagttcaaattgaaattttggaaatttttgtcctgtgccccatgctgtttattaattaccatattttaaaaacaacaactatgttacaaagaagaggatttatcatccactttcttcttccttcaggtcagcttagctttcttcttagcaggtcctttatgccctttggcctttcttcttaaattccgcctgtctaccacaggcacttccacttctatttcctctgagctgctatccacagctttttc

SEQ ID NO: 458714 - DNA, 391 bp, Homo Sapiens
  misc_feature (356)..(356): n is a, c, g, or t
  misc_feature (371)..(371): n is a, c, g, or t
acttagtattagcatttgttgaaaaaataaatggccaaagtgctttaattttcatttagaatgaaataatctggcttacctttgactaattaaagaaaatatagggtaatacaattgttcaaaatctaacacaaataggagcgtttactatttttgtctgctttaagattttaacttgatcgaaaataccaacatccccaaacaaaatttactgacctgacatcagcttactatagactgaatacactttcaacatcagtccttagctacctcaaataatgacacaaagtcttagtttcttttgcataagggtcaagatcaagctatttttaaaacaatttaaatgggtctcagancattctccaacttangtgccaaatttgagtacaca

SEQ ID NO: 458715 - DNA, 480 bp, Homo Sapiens
  misc_feature (16)..(16): n is a, c, g, or t
  misc_feature (59)..(59): n is a, c, g, or t
  misc_feature (128)..(128): n is a, c, g, or t
ttgttcccaaattttncagccggttccaagttctctttcattttgaaccattgtggtcnattaagaacaccgtgaactgctgacccatgaagccgtccctcttcctgcacaccccagcatggctcctntatcgccagtattggccacatgaaggtcaacaccatccacatgggccacacaagcagtggctccagaaaatgccactcgaagcaccaggtagttgagaaaagaattaggatcaccaacttgcgcctccaaggagatgtcattatcaagcctcttgaaggcattaattagagcctccttaacatcaatatcagtcgactcaccagtgttgaggtctataagctcttgccagtaagtcctcaagctgttaaagtacaatttggatgcctccttactaaagtaatcattggggtgcttgtgccactggagaatgggtagcagtgcccggccggtctccactgcattttcaatctc

SEQ ID NO: 458716 - DNA, 135 bp, Homo Sapiens
taaaacacaggcacagaactgggtgattagctgtagaggacaaggaaagtggctgacagatcaccgggtgcagtggctcatgcctgtaatcccacactttgggaggctcaggcgggtgggatcatcggaggtcag

SEQ ID NO: 458717 - DNA, 593 bp, Homo Sapiens
  misc_feature (432)..(432): n is a, c, g, or t
  misc_feature (472)..(472): n is a, c, g, or t
  misc_feature (512)..(512): n is a, c, g, or t
  misc_feature (522)..(522): n is a, c, g, or t
  misc_feature (534)..(534): n is a, c, g, or t
  misc_feature (575)..(575): n is a, c, g, or t
aaataaagtccctatccattacttgcttcacataactttttttatgtgaaatagtgttttattgaattaagttccatatctgagttttttagataacatattgattttaaaatctgagtgttataattcttcaaacaaataaagtttgtcttggagaccttcaaattagcttttcctttttgcaatagctgttcatagtttcaagttgagtcgaaaccatgtgggactggcacagtgtgggatgaagtatatctttatagtgatgcaacaacatctaaaattgcaaggaacagttacccaaaaactggggattttctaaaggcatcaagtagtgggtacccagacttcatagggggttatgtaggaggaaggccacattaggaggacaggcccttcaccggacttaccccctatttgtattttgttgtggcngggcctttggggccgggaaatgggggccccaggggagggntttttcccaaaattaccggctttgggtgggggggtaggcntgcccagggnaattgggtgggnaggggccttttttccccacccctggccacccctggttggtnttctgccccgttgagtgt

SEQ ID NO: 458718 - DNA, 110 bp, Homo Sapiens
ttttttttaaataaagtgcttttaaattcaaatatatgttgccctaaagaaaactgaaatatactttaaccctgaaatctcccgtatcttgacacacacattttaaccgg

SEQ ID NO: 458719 - DNA, 515 bp, Homo Sapiens
cagctggagggacagagggcccaatcttgagatgtgaacagtggagggggaccagatttgtgtagaaagatcacaaatttgggtctgggtaagtttttgaggtgctgtagagacacatgacttccaccccgccccacaccaggagaactgtcaaacaggcagatggctataggggtttggagcatggaagagagagggcccggctggagatagtacatctgggagttttcagcacatagatggcacctgaccccatggcagtggctccggtcagccaggaagaaggtcctgagaggagagggcagccgaggacaaggctgtgaggaacactcacagtgaaaggcgcttaacagaaggggagccagcagagggcccagaggagcactaggagtgcggaagcattctttcagccgagggctctgtccttgtgtgtccgcctgttatccagcatgggagagcagacttttccttctgtgtcttaggctcctgaggcccttgccccccagccttgacac

SEQ ID NO: 458720 - DNA, 382 bp, Homo Sapiens
  misc_feature (168)..(168): n is a, c, g, or t
atgggggaaacagtgacattcattcatcagataatgacacacacacaactaattacacgttgtgatagatagccatgaaggaaaataacagagtgcaatgataacttcatcaccccacttttcttaatggcatttatcaaagtttgaaccttgtttacatttttcttnccctttatcaccctctcaggccagatggtaagctccttcagaacagggcctccttgctccatcccaagaagtgaaactgtaggtgcccaagagatcaataatgttggggcagacttgatgctcaacgggcatctaacctaggctgggggaggggcgcatctgggggaagtttccctcaggcagtcacatttgagctgagggtcttaaggacaca

SEQ ID NO: 458721 - DNA, 466 bp, Homo Sapiens
  misc_feature (57)..(57): n is a, c, g, or t
  misc_feature (76)..(76): n is a, c, g, or t
aaaaactcctcaatttccctcactgttctgtgtccccccgaaggaacaaggaacagncgggttcagctgggctgcnacgcagaagacatcccacgcgctgcaagggagtggaggtagacctgcccacgtctgtgtgggtgtcgccagccagcgatccgagtaaatgatgacaaagaagtctttgatctccgggcttggaccactggccaccttcagaaatatgttcccgtggttccccggggcccacattctgggtctcacagatgacgttcgggttgctgcagcgaacatggactggggggtcctcaccaagcattcccaccggagcacctggaaatgtgtgccagggcggcaggcggatggccttcttcaggaaggagagctccgggtgatagaagcggaagacctggtccaccacgtggggctgcagctccacagtcaggcagagcacggcgatgggcttgcc

SEQ ID NO: 458722 - DNA, 493 bp, Homo Sapiens
  misc_feature (360)..(360): n is a, c, g, or t
  misc_feature (421)..(421): n is a, c, g, or t
cttttcccgtaactgaggaaacaagacacatatttcttaaacaatgataaatacaatctgaatgtataatggtgtcaagtttgataacctgttgtatccattctacaataaggagacacccaccaaacagatattcccatcggccttttggggaatgttctctggaaagctcttaatagatgaccttctaagtgctagaggcaatgttaggatgctgaagacttataggacaaaaacgtttcattctgccgataaacttggagtatggaaaatatcaagttaaccaactaggctacatgctacaacagagtagggcagagcgtgtttctgggctacacccagatctaggttctaaaaatnaatttcctaaagggagggtacttctggaatctaacctctgaagggtattacaaattttatncccagcaaaggcaaggctagatgtgtaggtgggaacaactggtatattaaggcccactcataataattttag

SEQ ID NO: 458723 - DNA, 667 bp, Homo Sapiens
ttttttttaaaaaccgaaaatcttatttattatatattttattgaaaactggttagcaacagataaattacaatagagcctggatataaaaatgagagaagaatgcagacttacaagcttatagagaaagtcaaaaaggagcaagtttttgaaatcagattttatgatacggaaaaaaaatttcctttttttgccaacaggattatttcgaataataaatctgccagtgccaatcagaaacaccatttccacaatatttgcatgcccctagttgcctattttatacatatcgactccttgagctaggggtattcgtgtctctaaaaggaaaacgagtgtattgtataggttaatatgttttctgtttatgggcacaattcattctcaacttctgtaatgtctcaggaataattcataatattgaacagctggtgacaagtaacatacaaaaattatatcctacaatttccgtatgttctgaacacggtcttatcaatagctgatagaacatttagtagctagtcagctacgggactttccaacctagaaggcctcctcctccctaccattcagtattgtatatctcagggccttttaatcatttccctgcatcttggtacctgaaggacacagcaaacatatattcactgaaaatctgaaatgactt

SEQ ID NO: 458724 - DNA, 430 bp, Homo Sapiens
aactggttgaggctgctcctttgattttatgtcgtgtaaagtctttgttccccagccccacccctgcctcctcccatcgggaaaccccccatgggagtcatcagtgggcgggagtcggtgcctgctccagtccagccctgccttgggagatgctggaggaccctgtcgccctgaaggcctgtttgctgcacatctgcctgcagagccaaacctcagggcccggtgcagtgtccagcctggtatctggcatcccagtagcttccatgttctgtgtatgtgtgtggtgtgccccttcctcccactgtttgaattcactgaaaagccataaagggggcctcctgctggagatttgacctcccttggctcctcccaggagcccccatgtctctccaactggctccccacagaccacttctgaagggctcacctg

SEQ ID NO: 458725 - DNA, 534 bp, Homo Sapiens
cttatggaacactatgtatttacacgtactctttcatggaaggaaaactgagatggggaagatctcagggcagagactccatattgcaacatggggatcatgcactccccacagattcagataaacttgaagaataagcagaaccaccccaaggactcagggcacatttgcccccaaccacctccagggctcttccttccggccaggctccaaccagaaagcaaagtcatagctatgccctgtgccccatccccaaaactaatgggcccaagatagggggccagggatgaaggtttacaggagttcagatgttagggggaagccctgatttgctgcagaaagcagttctgatttctcatgggaatcaggaatcaggcaaaggtctggccccaagcccatccaggctcagagagaacagatactaaaatccaagtaatcactcatactcaaagagaactcagaggctgggatggtcttccaggcccagtgacccccagcatctcagtggtcactccgttccagtgatcacttata

SEQ ID NO: 458726 - DNA, 484 bp, Homo Sapiens
  misc_feature (12)..(12): n is a, c, g, or t
  misc_feature (26)..(26): n is a, c, g, or t
ttgtaccaaggnacattgccacgganggtaagtgttacctttccacactgaggcctaaggtgagaatgaaacacaagttaccccaaccagaagttatttaggtccaggcatttagaagaacgtgcctgaacaagattgggcttatccagttaataacttttgccatggattagtaggaactagattgaagctagagttcaatatagttgaagtataggagagggcagaggcaggtgctgagagctgccaaactgggctacttcaaaatttcaaaaacaatggatcttaaatgaaatgaccttagtgggtgaaaatgaattagattcaggaaaggatattaagctgaaatcaaggtttgcagaccagataagtctggattgcttgcttttccagggagtatttaccctaagagtctttaaatagccaaatggttttacaaatatttgattcagaaaattgtgattttctcatatagctttccacg

SEQ ID NO: 458727 - DNA, 198 bp, Homo Sapiens
aagtgacaccttggccttgtgggcatttcttcacttatcttacccaaaagtgcctttgggcccagccactgactgatttaaaacccagaaatgtggttttaaacaatgtggtcgtggtgaattcaggtgatttttattttctatttggtagtatttttcagatttcccacaaagaacatgtattgtctttgtaatttg

SEQ ID NO: 458728 - DNA, 480 bp, Homo Sapiens
  misc_feature (426)..(426): n is a, c, g, or t
  misc_feature (453)..(453): n is a, c, g, or t
ccattccattgttcattcttctttcttgaaatcccaaaccttctattaacatttcttttcagttatacactgaactttactgtagcctttcttctagagtaacaaatgttctttgttttccttcctctaaagatgtctttatgtttccttcattcccaaagaatatttttgtggaatataagattcagagttggcagttgttttcttttagacttcagagatgtatctctctgttctgtacattattgtttaatataagaaacctactaccattcaaataatcattccctattttacaatgcatcagttctgtcaagcttcattcaaagtgtttttcattgtctctaggtgttcagaagtttgggctgtggatgtgcgtgggcatggggaagtttttgggggtgtattctatttgggccgctcccnggggtgcttgccccaggctttttgganccgtaggggttatggccctttggcaaa

SEQ ID NO: 458729 - DNA, 425 bp, Homo Sapiens
ggggagactcttgatcttatcattcaaggctttctgttgctcaatgttatattaaaaacaatgaatttccatactaatttcaaagtcaattcctaagatactgtttcatcccattgtgaacaccaccaaggtcagttatatgtttttcagaatacttgaagtacgagaaaaacagaaatatatagctctggctacattaaatatcttttgccactttctgagatctttcgtaactctaagagaaacatggcatttccattaacgaaaataggagctttttgaataggattgttcaaaattagatacaaatgttctcagctaaaggtctcacatattcagaagtttgggtgccttttgtgatagctcttgtatcatttgataatattgatttttttgaaaaaggcaggctatttacaaggcaaaga

SEQ ID NO: 458730 - DNA, 578 bp, Homo Sapiens
  misc_feature (515)..(515): n is a, c, g, or t
  misc_feature (543)..(543): n is a, c, g, or t
  misc_feature (551)..(551): n is a, c, g, or t
ggcttctgacccccagaagtcctaccttttcccctgctcagtccttatctattttaggcatttagggaaaacaccctaatcagctgctggtggctgagatccaagagaaactcagcttcctctttagtgggtgcatcagggttggggctccttaggagcacctggcatatggcagccccccaaacaccttttcagggggtagtttgcatcgtcttccccttcttgcttctggctgcaaagtggttcctatcacctctcctcacacccttaagttctcaaggttactatgggctactcctgttgcggtttaggtttggttgttgacttgggccagaggttgccagtttgtggatgtgtgtgtgggctgcccatggcctggaggctggcacccacccatgttggttgtgggcaagtgttttctggactgattaagggcaaaaacgagcagggatttttcacatttggccttaactgttcacaggggcctcagctgggttgtctgctcttttcttccngggtcaattttcccagccttagttcccntaggaaanttttttccaaagtgttgggataacagg

SEQ ID NO: 458731 - DNA, 349 bp, Homo Sapiens
aaaaacaacaacccttttaaaaaataacccttacggggtaaaaaatttaattccattgtatcctcctaggaagctggacccacccaggaggcagtcattctgtggggtcctcaggcaatgtcttgtctacaacactgtctgtcctagcttggcaggaactagttgtctcattctttgctattattttcctagtgagacagtactttgaagagggcagagagaaatccccaaagaggcagcgtccctcattggtggggccatgtggtccctctctttgggaagagaggtagagtctttcacagcatcagttgtcttaagaatgcatttgtggccaggtgtggtggctcat

SEQ ID NO: 458732 - DNA, 484 bp, Homo Sapiens
  misc_feature (73)..(106): n is a, c, g, or t
  misc_feature (457)..(457): n is a, c, g, or t
  misc_feature (473)..(473): n is a, c, g, or t
ttttttttgtagagacaaggtctcaccatattgcccaggccagtctcttaactcccgggctcaagcaatcctnnnnnnnnnnnnnnnnnnnnnnnnnnnnnnnnnngcatgagccaccacacctggccacaaatgcattcttaagacaactgatgctgtgaaagactctacctctcttcccaaagagagggaccacatggccccaccaatgagggacgctgcctctttggggatttctctctgccctcttcaaagtactgtctcactaggaaaataataggcaaagaatgaggacaactagttcctgccaagctaggacagacagtgttgtaggacaaggacattggcctggaggaccccacaggaatggactggccttcctgggtgggtccagtttccttaggaggattacaatggaaattaaatttttattacccagttaagggttaattttttnaaagggttgttgattnttcaggggcag

SEQ ID NO: 458733 - DNA, 482 bp, Homo Sapiens
  misc_feature (11)..(11): n is a, c, g, or t
  misc_feature (69)..(69): n is a, c, g, or t
  misc_feature (106)..(106): n is a, c, g, or t
caaattcaaangggggaaccccttcaaaagtgaaaaagtgcccttttggtccggtttaagggaatgggnaaaaagcttccttcaatggggtgaactcccttcctangactctgcccccattgaacagcaatggatctggaatcgcccccctttttcaagacgtccgtcttccagaggctgctcccctttgcaaaacactgttttaacataaatgggtaagtctcccatgagggctgcccatatcctcccaactatactgaagcctaagccatctggtcctcgctctagtgtaatagacttacattgaggaggtcctaaatcatcctgaaatatactgcttgacgtcagcccagtgaaagaaagactggaacttgcaggctcctgctgatgacctgtgaccacactcacgtctcctccagcaaccacctgcatttcaatggagccagatgcatttttcagtaggttaactgcttgggtgtgag

SEQ ID NO: 458734 - DNA, 795 bp, Homo Sapiens
attttttcactggactgacgtcaagcagtatatttcaggatgatttaggacctcctcaatgtaagtctattacactagagcgaggaccagatggcttaggcttcagtatagttggaggatatggcagccctcatggagacttacccatttatgttaaaacagtgtttgcaaagggagcagcctctgaagacggacgtctgaaaaggggcgatcagatcattgctgtcaatgggcagagtctagaaggagtcacccatgaagaagctgttgccatccttaaacggacaaaaggcactgtcactttgatggttctctcttgaattggctgccagaattgaaccaacccaacccctagctcacctcctactgtaaagagaatgcactggtcctgacaatttttatgctgtgttcagccgggtcttcaaaactgtaggggggaaataacacttaagtttctttttctcatctagaaatgctttccttactgacaacctaacatcatttttcttttcttcttgcattttgtgaacttaaagagaaggaatatttgtgtaggtgaatctcgtttttatttgtggagatatctaatgttttgtagtcacatgggcaagaattattacatgctaagctggttagtataaagaaagataattctaaagttaaccaaagaaaatggcttcagtaaattaggatgaaaaatgaaaatataaaataaagaagaaaatctcggggagtttagaaaaaatgcctcaatttggcaatctacctcctctccccaccccaaactaaaaaaaa

SEQ ID NO: 458735 - DNA, 435 bp, Homo Sapiens
tttttaaagatctgttgtttaaaggttaaaatctctgtaaaacctaaaaatgttttaaaatttgctgaaaatgcaacaaattctcaattaaaatttatttaaaataataccctccactgatgttacttttaccccctgaaaaacttcggaggagcattaacaaaagatttaaactactgtgcaaaatttcttcacgaaaagtgtttaaaggctggtgcaaaatgggaagcaaattctaaacaattttggcttcttggaaacaaaaaccgctgtgtctgaaaagagtaatcatcggggtgactccgggaagggccagcttcatcttttccggcggcaggtgcgcttgtgtccgcgtgccagtgctcctgctggcacttgatggagcagtaggatgtgttccagcagcagtggtacatggcctcctcctcacagttg

SEQ ID NO: 458736 - DNA, 332 bp, Homo Sapiens
  misc_feature (70)..(221): n is a, c, g, or t
tggatccatgcctttttgtgttacatccagaggagtctttgccttaacatgagatgacaaaggttttctnnnnnnnnnnnnnnnnnnnnnnnnnnnnnnnnnnnnnnnnnnnnnnnnnnnnnnnnnnnnnnnnnnnnnnnnnnnnnnnnnnnnnnnnnnnnnnnnnnnnnnnnnnnnnnnnnnnnnnnnnnnnnnnnnnnnnnnnnnnnnnnnnnnnnnnnactttgctaaagtcacttagttctagtagctttttttgcagatttaaccagactttctacatagacaatcatatcttctgtgaataaacatggttttatttcttcatgtct

SEQ ID NO: 458737 - DNA, 930 bp, Homo Sapiens
aaatcgtttcttttcattgccagattttaaaagtgttcttttctctggtgatataagggttccatgcaggggtaaagttatatttgtgggtgattcacttaaaaaatctccatatcatccctaaactggagcaaagaagtggaatgaataaaggagaattatttcacacaacctatgtgctgcagatggctgtatattaaaatcaagttgtgagtgtaatattcccttttcctgatacatcattattcagttgactgcttagagtaaccctttcttatgtatgtttcttgttctggagttttattttcttgcatttgttccacaaccgtttattcaacacctttacgtctaacatgtgtttatgtctaacactcaaagaaggagtgccttcctggatatatggttacagaattatttcaggaagtcaattgcatttgcatatagagggattttcctgcaggcctttaactttagaatttactttgtgcctcgtgttaggctttgttattggaatagacgggaattttcatgtggaaatcacgggctgcagagaaggaggcgagtgagtgacaggctccttcacggtgatacggccctgctgcaggagtggaagggacttctccagtgaggtcctcttcatctgaaacttgacggataggcaagagtgtgctaggtgggataaagtttgaaggtccttagtaacacaggaggacagagtgcgtcacacagctggggacgagggagtgatgtgtggagagatgcctggaggggcacatgggggcagctgtgaccaaggccctgaactgcagttaagggtcggacctcagccttctcttcatccaaaacagatccctgcgtttggaaactgtgaaaaccttttcccatcagagatctgagcaggtcatatttcatgagatttgttcaaatcca

SEQ ID NO: 458738 - DNA, 111 bp, Homo Sapiens
tgcccggcctggatttgaacaaatctcatgaaatatgacctgctcagatctctgatggggaaaaggttttcacagtttccaaacgcagggatctgttttggatgaagagaa

SEQ ID NO: 458739 - DNA, 356 bp, Homo Sapiens
  misc_feature (319)..(319): n is a, c, g, or t
  misc_feature (326)..(326): n is a, c, g, or t
  misc_feature (331)..(331): n is a, c, g, or t
gactttgaaaatattttatttgaatagtaaatagttatacagttgaaacagttctattgaagctttctataaatagctaacaattaagaaaataatgtatgtagaaaagagattgcatttaaaagtaagagctgtcggttgtacaagggccctggggacccttgaagcagaataaatgataggttgtctgtaattcactcagataggtataaaagttaaaactttaagcagatccctttagaaaaaggctctcttctaaaacgcacagtgggaatgtcaagagtggcagggtggggagggggcagcgcgcccaaaaaantctgcantcaantaatatcataatcttcataattaat

SEQ ID NO: 458740 - DNA, 420 bp, Homo Sapiens
  misc_feature (15)..(15): n is a, c, g, or t
  misc_feature (31)..(31): n is a, c, g, or t
  misc_feature (49)..(49): n is a, c, g, or t
  misc_feature (76)..(76): n is a, c, g, or t
ccaaggggtaaaaanccaaaatttttggttngggaagagaccggaacanttataaaaaaaggtccccatggaagtnaaatttataaaaattataaactgtaagaaaccaaaggaaacactgaaaacagtacattttactcctttttaagatacatggttgaatttgaagagtagattcagtttttgtcattttggttatcaataattactgtacatcaaataattactgtatatggaaaaactctgaaagaccataggatcttatctaggattatggtgtttattacttcccttttacaagttttcaatttagtatattcctttgcaatctagttaaaggttctaattcagactctatggtattctttagaaattgaaatactggtacactgtggcaactgttatttgtgtactgatttc

SEQ ID NO: 458741 - DNA, 534 bp, Homo Sapiens
ttttttttactaacacaatattttgtatttacagtattctgaacagtgcttaaacctgcactggttatataaaagacactcccccacgctacctcccaccccaggctgacagcatgcttagttctctcatttacaccacactgcaataacataaagaggggcttactattaatccaggttttactacaaagcgacccgttatttctctgtcaaacacttgcaagagtgccaagtgtctgtcatccaattcaagggattaagtcttcttttatagtctgatacttgtaccaatttataaaaatacagatatagtttcttagagttgggtcacagtctatattttggcttggattcaggcagcagaggttgactatgacagctggcaggaaactgaggggagaatacatcctcccccttcagtcaccacatctcagttgccatagtgattaatccttaattgaaggctgtctttgtacatttcttttcagaaaattttaagtaaacttaagttgaaaacgtgcagttgactgagaa

SEQ ID NO: 458742 - DNA, 449 bp, Homo Sapiens
tggacccctaaacccatgccaagccttgtgcagtgccttggtgttaagatggtgccgtgtggccccctgtggatggagatcctacctctggtatgtaggcaccaactctggatccgtgcaggatggttatcccagaatccagagcaagggagcagcctgcgtggaatattatgtgagggcagtgccgggtgcggaggacacgttgcagctcccgagccaatagatgccaggttgtgccaggagctcacacacagcaggctccaggggcggtgctgggtcatctccaccaccaaaaggacaaaatgaaaagtctgaatggaggttaacaggctcgattaatattgaactgactttcccgccacacctggatcattctgtgggtctgcagcaatatatttatcacacttcacagatgagctggcaggggtcaatctgccaatgacactggc

SEQ ID NO: 458743 - DNA, 512 bp, Homo Sapiens
  misc_feature (41)..(41): n is a, c, g, or t
  misc_feature (54)..(54): n is a, c, g, or t
  misc_feature (64)..(64): n is a, c, g, or t
aagagcctgcccacggggctcgccctctagcccagagtgantataatagtaaanaggggccacnggaccctatgtcccagaaagagttttcctttttcccagcaaaacataataaaacaaaatcctaaaatatatattgtcttacacttgagagaaaatatatgaacccataagaagctaattattggattttttaaaaaacagacttagagaaaatgcagtcataaggacttcacgtgagtctttgagtagaattcaaccatttaagtactccccactcattggacacctatgcacgtaggcactgttagtgctggagtaacaaaggcatgacctgcatcctgctcttggggagacctggcccttagacatgagcacatgtatagaggtaactcatgcaggatgataaggctggtggagagatgcaaaccgagcacacaggaaccggcaatcaatcaaacagcctttagctggttgtgggaagaccacgttagcaaacagatgctgaagtc

SEQ ID NO: 458744 - DNA, 210 bp, Homo Sapiens
  misc_feature (94)..(94): n is a, c, g, or t
tctcttttacctcttctcttcttccctccttcctacagctatgccctcttccctcctttctcttgtccccaaccagggcattagaaatgcattnccagttacactgatctgatcactgcatattgtatgcatgcatcaaaatatcacatgtaccccagaaatatgtaaattactgcatatcaataaaaagaaatgtagcttctttgcctc

SEQ ID NO: 458745 - DNA, 382 bp, Homo Sapiens
  misc_feature (38)..(38): n is a, c, g, or t
  misc_feature (58)..(58): n is a, c, g, or t
  misc_feature (72)..(72): n is a, c, g, or t
  misc_feature (107)..(107): n is a, c, g, or t
  misc_feature (310)..(310): n is a, c, g, or t
  misc_feature (358)..(358): n is a, c, g, or t
  misc_feature (365)..(365): n is a, c, g, or t
ccacccattccccacatggggaaaaaaatcctattacnatgtttaaaatgtaaactgntttcagcaacaagnacatcattgaaaagagcaatttctttgagttaaantagttgtcacttaactgtgtgtcttctgcaaagtgttttccccaaatctacacataattcttatgctccaagaataacaagaacaagaaaatgctgtctctaacagtgtcctctgtcagctccatatgtctaaatctgacacgttggcatgagccccactccatacccctgctcaagtcactgagattatgcctagtaaagtnaaaatctgttcccgtatttgccatctatagtaaataggctaaatgtgnacaaatnaaatacagcaaatactc

SEQ ID NO: 458746 - DNA, 515 bp, Homo Sapiens
ttttttttaaacggaacaaatattcattgggtctttactgggtagtaggattaccaatgactttcaccttttcagtctcttctacaactaaacactatgaggagagtcatctgttccacgctgtatcttgagcattttgtctagtccctggtatataacaggggatctgtacctattgatcaatatttacgtgaatggtcccaaccctcatagtgaaattcaacttctccacaaccaaaaagctattattccttcaactcctgacccaaatgccatcctttcagaagttcttttcaggtcaatgtgggcaatttaatccttttccttctcctaacattttgtactgttctcctgactttcttcttaccctaccctgcgttgtaccagagggctttgcaggctgttaagtgttcatattattgtttacctgatagagttcatgagaccattggagatattttgttcagtttaattcttcacttgtaattgtcaaatacatttatttcactccataa

SEQ ID NO: 458747 - DNA, 442 bp, Homo Sapiens
  misc_feature (286)..(286): n is a, c, g, or t
  misc_feature (387)..(387): n is a, c, g, or t
  misc_feature (406)..(406): n is a, c, g, or t
caccagggtacaaaatgaaagacctagaaggcatttcttctaattccattggccagaactaggttatatatccattcttgcctttagagagactaagaacgtgaatgtcacacagatgggatctcacaaaggaagtgggtggcatggattcttgtttaggtaactagtgatatctgtcagtagtgtcagtatagtataagtatgggctttggggccaacttcctaagtttgagtactggcttatccatttcttgagtaattatttaacttattgggcttttacttncctcatatataaaatgagggataaaacagtttctcccttcaattcatgtcagctatctttattataaaatatttggggtataatttataaaggtaaaaccnctgccattgtttcataacnggaatggaaggtttggaatctccccgaaggtaattc

SEQ ID NO: 458748 - DNA, 629 bp, Homo Sapiens
agtgagaaacaatttatttttctgatttataagcatattttacatattctggtcaatacatcaaatgtataatgtggaagttcccttaagaataccaagaccacacatgttaaactcagctacatgttgtattaggctattagacaaatgtcacttttaatatcacaacacatacatgtactttttttcattgacagaggaacatgcctttcaaaaatattttattgggtgaaactttcttattctcaggaaaacttttggttctttaatataatttattatgctctttaaaattctgtttgataaaagcattgggtatattataaatacctgtaaagaaaatatagtttaaaatttcaagggaaatagtatataagttttctctttgacattttcacaaaaatccacacagggcactagggaaggactggacaaaactgttttatatctggaatattatactccaggttggaaacattcaatatgattttatttaaatattaaagcttcttgagagtgaacctttggctacaacccaatgagttggctggggttttaacccagaaaatattttgttaggaagaatcaaaagaaagatttatacatctagcactagattgggaatggaa

SEQ ID NO: 458749 - DNA, 319 bp, Homo Sapiens
ctggactcagctcacgacctccaacccagaaccagactttgtagctcacctgcacacagggccctggggccttccatagaagcaaaggttcctctcctccaggcgtcccacagaggttccctgatacccacacatcttttggagcagaaggcggtgtctggaaggacaaaatggggctccactcgccccacaaatcctcttctttctccatccggcagcggccatacactttgtagccagtggctagctccaaatcttggatctcaacaggggtcaggggtatggtcttcagctccggttccagcagggtccaggccgc

SEQ ID NO: 458750 - DNA, 535 bp, Homo Sapiens
  misc_feature (34)..(34): n is a, c, g, or t
gttgtaccctgtgtatggaccttccctttttccngcctaataatcccatcaatatgtaaatttacccatcccatgttgggctggagtaccccagttaccaggaggtgcagggaagcagaggtgaacccttgatgcaaaaaggggtgaggactgtaagtgagcctatttcaatgctctcttgaggtcttcccgaaatcagaattctgatggcataaagataatggcagaagccacaggagttatgctccttgaagagcagctgataaaacacacacaaatgacatcagcccttccgagaaagagagctgctttcaggctgggctttatgattcaggccggctcatgtggacacacgccacgaagaaacagaagccaaggatactgtgcctgtgatcattagtgtttacatgaattaactttatgctagtatttcccaagctttatttagtcatgtgacttcatgacttgggccatttctgcctaccagttgggtggtagtaacctgggtggttacttatcatttttatttatctcg

SEQ ID NO: 458751 - DNA, 540 bp, Homo Sapiens
  misc_feature (87)..(87): n is a, c, g, or t
  misc_feature (442)..(442): n is a, c, g, or t
tgaggctgagaacattgttaacaagtggaagaagctggggcttggaccctagtcccgtctgaactcccagggccatccctcatcttnctctgccacacagccaggaagcaggaatcccagatcccaggcatttcggggaaattgtaaccgaagctttcttcttgttatgcccctatcttttcttttaaaataatttgtgaagcctaaaataagtattaagtggttaaaattagatttaccagacaatgagactgatatgtcagttagcttgcaaagtaaccctgggtctatcagacctcaggttggaagttgctagaaacatatgaggaaatgtttcagagattacagcatatcggagatcgcttaattggctccacttctcagaaggagaaatctgaccaaagtcatacagcagaaaaggaacaaaggccccgattcaaancctgggacgtgccctcccagtccagggctcattctaggcatcactctgcttctcaagaggcgtaaaaccggggagtgaaaccaggcagctattttcag

SEQ ID NO: 458752 - DNA, 471 bp, Homo Sapiens
atagcatcataggaaactttgcaacttctgctgctttattgaaggatgatttttagtctctaagctgtgtcaagttgttattctttattgtgaaaggacaggaaggggaggggagggaacaggaataaagaaatctgtaaaaacagatgcctgattaaatccctgacctaataaagtccctcgcctgtactcggtgtctcccaccttacaaagcaatttactttaagcttggatgaatccaggtccttacggcaatcctgggaaggagacaccccatttcacaacccagacacccagggcctagtgaagccgggcttatgggcctgggagcctatggcattccaagggcgcagaactgcaacgtgacccagtattcagattctctgtccactctctctcctatgcccacttcacctcagcaggggcctcctgggggaagggccgaggaacctggggtttttgaaggccggg

SEQ ID NO: 458753 - DNA, 353 bp, Homo Sapiens
  misc_feature (254)..(254): n is a, c, g, or t
  misc_feature (283)..(283): n is a, c, g, or t
  misc_feature (310)..(310): n is a, c, g, or t
ccagtgtaagacaatttttaagctttatttttatgaaacatttcagattccctcatatcacagcacatcaataagcagtatgtacatagactgacttttatagtacgtgtcatgtcccaaattcccaatcctaggtaagatatcaagttacaaagtacaagtgccgataattaaactataggtagtatattaaacaaaaatgagtttttaggcaattatgtgaaataaggctttaaccaaaggcaaggacttantgccacaagggtgtcttttttccccaagngtaattaattcatttcaagcccatggnttccaggctcaggtaacagttttatattcttggaggccaaaca

SEQ ID NO: 458754 - DNA, 311 bp, Homo Sapiens
  misc_feature (22)..(22): n is a, c, g, or t
cccggggacaaagggctctcgnctcaagaaggtttaagcagcaaagatacagctgctgttggtcagcgctggtgggcaggagggcagcccctcgttttcctgagagagagcaggaatgaggccaggcagagtggctgggctcccagtgcagggcacggcaggggctccattcagtgcccacttggctgccccatgctctctgtggccagtgctggctaggagggacccagggactcgggagggtggtggcagttctgacaacatctgtctgtcctgtgacagcacagctgctccccaggcaggctctgcat

SEQ ID NO: 458755 - DNA, 296 bp, Homo Sapiens
  misc_feature (130)..(130): n is a, c, g, or t
aatgaaatgcatcagacaaacatctacaaacaaacatgaatacatgggcatacaaaagcacgtggacaagttttctgtacagtttatgtctcagatacttctatgtatacataagaaccactcagggggnaaaaaaaagatttccctctccagctccctgaatttctgaaagttgactgacccataaaatgttaaaatatttcatttttatataaaatatctacaaaaatagataacatttacaaaaaccagacagtatttccagttttccttagtaaccgttaacgcagtcccct

SEQ ID NO: 458756 - DNA, 550 bp, Homo Sapiens
  misc_feature (19)..(19): n is a, c, g, or t
  misc_feature (31)..(31): n is a, c, g, or t
  misc_feature (42)..(42): n is a, c, g, or t
  misc_feature (71)..(71): n is a, c, g, or t
  misc_feature (104)..(104): n is a, c, g, or t
  misc_feature (172)..(172): n is a, c, g, or t
aaaactgtcaaaatcaacngaaaaacccggntgccggcaacngaataacataaaaccacgtgttttgaatnaaaggggaaaacccctgtgtctttttgccacgntcctgcaagtaacgcccacggcaagaaaccagacacacccaggtggaagaggtgcgggcgcataatantcctttaccaagggagtgttttctgccactacttacaggtttctttgtagccaatccaattctaatagtagcttttcctttgtgaccacttcctagaattatagttctccttttctgtttagcagttttggatggttccttcactgatggagaagttatccactggtactctgatttggcactccttccattctggaggacttttttgataactgctttcatcatagaatgatcaatgagtggattttttcttatatccagaacgaccagagttgtattggtttcaagggcctctagcaaagcctttgctccttcattggtgaggccgcactgttgcaggtcaagagctctcagccataaatcctcactgagagagtc

SEQ ID NO: 458757 - DNA, 391 bp, Homo Sapiens
  misc_feature (29)..(29): n is a, c, g, or t
  misc_feature (48)..(48): n is a, c, g, or t
  misc_feature (105)..(105): n is a, c, g, or t
  misc_feature (110)..(110): n is a, c, g, or t
ggttttcccccaaaatggccacaaggtanaacatttggtaggtatccngagagggcctttttttaaaatccccacaaaaccttaattttcctataaagtattttnagtgnatagtcttgtgtgctttctttgcttggttttaaaataaaggtccaactttctagctttttatgtgaggaaaaataggttatttattatcaggctagactgatgcattttgtaagccagaaaaggttgttacaacttaaagcttatcttcctgtcctcttctcttcaagtatatttcatagaatagattcttaaactaaaactacttcatttcacattgactttcctgaaccaactactttgacctaattgctagaaagagttcctttttacaagatctgac

SEQ ID NO: 458758 - DNA, 146 bp, Homo Sapiens
cctggctcattttgggtagatttttaattaattaaggtcaatttaaccaaataatgaatatctacatagcctctcattccctggcccaagagctagtgacggtatttcccattacacaaataaaaatgtaaacaaaatttcaaagg

SEQ ID NO: 458759 - DNA, 292 bp, Homo Sapiens
  misc_feature (201)..(201): n is a, c, g, or t
  misc_feature (267)..(267): n is a, c, g, or t
atgtttcctattatatcacaatatcacagcaccagtgtgaaaaatagaatgtcatagtggaaaagtcatgaattttggagtcaaacagagtcaggttagaatcctaacatttacgggctgtttgaccttgagctacttatatgaccttctgagccttcttttcctcgtctataaaataaggatggcaattcctgctttgcngagattcctgtgaagatcacagaaaaaggttgtatcgttttctggcacatggtaagggaataaagnaaggattgtcaataaattgtggcta

SEQ ID NO: 458760 - DNA, 478 bp, Homo Sapiens
  misc_feature (383)..(383): n is a, c, g, or t
  misc_feature (398)..(398): n is a, c, g, or t
  misc_feature (464)..(464): n is a, c, g, or t
ttttttttaaaatatagaactttattttggttactgaggtttttgttactgttggttcacagaaaagtcatttcttagaaaatagtaacggcagcattttttacagcgactcacattggggccaccaaacaagtgcaaaggacagtgccagggatagaagaggccagtactcttgtgcccagtgttctcagggagaacccagtgctcctgggctccctctaccccgtcccatcccacccaacagaggcagcacctagggccaatagaaccaggcacgcagccaagtgcacgacagtacccccaggcaggctggtgaaggccccacaggaaaggccgagtgggaggggatttttcaggttgagctggccctgcatccagccctnttcctcagggcagtnggggtttgacctcacctgggttttgggatttggacatatttcacagttacggttcagtaaagttcntctgggagttgggc

SEQ ID NO: 458761 - DNA, 286 bp, Homo Sapiens
attccccatgatcaattgacagaggaagggaagactagagcctggttcacaaatggttctgcacgatatgcaggcaccacccaaaagtggacagctgcagcactacagcccctttctaggacatccccgaaggacagcagttaaggaaaatcttcccagagagcagaacttcgagcagtgcatctggtcatgcactttgcatggaagaagaaatggccagatgtgtgattatatactgattcatgggaggtagccaatgatttggctggatggatggtcagggact

SEQ ID NO: 458762 - DNA, 441 bp, Homo Sapiens
  misc_feature (12)..(12): n is a, c, g, or t
  misc_feature (29)..(29): n is a, c, g, or t
  misc_feature (41)..(41): n is a, c, g, or t
  misc_feature (52)..(52): n is a, c, g, or t
  misc_feature (59)..(59): n is a, c, g, or t
  misc_feature (111)..(111): n is a, c, g, or t
tttgaattaacnagcaacgggcttccaancccgcggggccnttaaagttgtncttgttnagaagccaaaagtaggttggcggcccatcggcggccctttcaaccagggttnaacgtcctgtcgggctgagctggtttggggacaggtacgtctctgttgaccacccacgggtgtttgagcacttgcattgccgtcaggcgctgatgagggtccacgtggagcatcttggacacgacgtctttagctgcgtcagatatcgagtcccagtttcccccagaaagggcatacttcccactgccgatccgcgccagaatctcctcaggggtatcgtctggcccatttgcaaaaggggtaaatcctgccagcatggtgtacaacaggatccccaaactccagatgtcacacgccgcatcatagccttgacgcttcaggacctccgcc

SEQ ID NO: 458763 - DNA, 212 bp, Homo Sapiens
  misc_feature (96)..(96): n is a, c, g, or t
caaagtgtggtgtgaactagtggatgtcagttataactacagtggaaagagaaagctggcctccccagtctgtatccccaacccttggccattttnctgcttcagccacatgttatgagagaggctgcaggtatgtctttccagcacattcactccatttattacggtaaggctgttggcgcgatttggagtccctgactagcagggcttgc

SEQ ID NO: 458764 - DNA, 253 bp, Homo Sapiens
gctgagactgacttttttattgacaaaaattatatatattcatcctgtacaacatgttgttctgaaatatgtatacactgtggaacagttaaacagataattaacatatgcgttacctcacatacattttttgtggtgagaaaacttaaaatctactcttttagcaattttcaagaataccaagaatacttttttaaaaaaacattaatagcaagaccatgaaagtaaaaatatacgctgttatatatttcat

SEQ ID NO: 458765 - DNA, 328 bp, Homo Sapiens
  misc_feature (22)..(22): n is a, c, g, or t
atacaatgttaatgggaaatanccatgaaaattgacccacaattaatacatttacaaagcatcacatatgtgatgtttacagaatgactggtcctcagcagcataatcacatgaatctttgctgaaaatggtagtttttctaaaaactttcaaggagggctctggagagttccatgtggtctggaaagccttgaaaagaggctgaagtctcctttcttccagtgatgagatgtatagcttatatctcaagtacatgttgtctctacttgtcttttcatctgtttggtgaagaatctagactctgtcatttcaaagggttgtccagctc

SEQ ID NO: 458766 - DNA, 544 bp, Homo Sapiens
  misc_feature (16)..(16): n is a, c, g, or t
  misc_feature (27)..(27): n is a, c, g, or t
  misc_feature (72)..(72): n is a, c, g, or t
  misc_feature (151)..(151): n is a, c, g, or t
aagaggggaatggagngggggcacaangtgggttgcacgtgtgccagaggcccttgaagacacccctgaagncctggcctgctggctcccgggacccataactggagagatggcctgtgtgcccagtcacatcaccacaatgactgctttnatgtcatcattaatttcactaatattatttctgttaatatttattatacaataagggtgtctctgggtgaggaaaatttttctccagaaaatattttaaatgcacgtttggattctatcagttttctctaaggcaaggcacagaggctcagagctctccatcaaatgtgctctcacaagcctaaaaactttgagggtgaatatggcactgagattggccttcttcccatttcacagatggaaaagtgaagatcccaaagatggcctgcatcagaccaccatcaagccaaaatcaggcctcaggggtctcaggtcttctggtccatgagaccaccctgtgccaatgaacagtgcatttgatacagaaagcaggcttggaaagatctaattctac

SEQ ID NO: 458767 - DNA, 488 bp, Homo Sapiens
acaaaaaatttttggtatttattttcatatgcacttctctataaagagaatatataactttcatatggttattttaaaaagattaaaaactaaaataatattaaaggtttacaggtcatttatatgtgtaacccattagcaagtcaccaggcaatcctcagaaatgggggggaagttgagacccccaatggcattgttttttagcatccaaagcacaaagggacttgcaagaatcactgagtgaccagagctctgtagctcacccaacattcctgtgcaagggggtcacaccacgactgagctaaaacttactgttttattccagagtccaaatcacatgagataaaacttacttcttgaatatgcaacattagagaaaactgaagttattcagttattcaacttgaagttctcatgtaatagttgtggccataacaaagtgggtgaactaaagttttaaaattagaaaaaagcagtcttgaacatat

SEQ ID NO: 458768 - DNA, 343 bp, Homo Sapiens
cctaccccatcatactactgtatttacccaactataaaagcctcacctgatgtgaagccctttcagacaccattcagcctttctcaactcaggtttcttatctgaactgcaacacaggaaattgtttgagtgactgtcttctcgattctccaaagatagtacataacctggatcatcctatgttcttgggaaagaaagtgatccattacatgcaatggatgctgcggggcagtaggacttaatttctcaggaaagcctggctgagaaacatgccacagtaatccagtacacctacaaattatgaacacatcaaattgttcttaccacacacacacacaattcc

SEQ ID NO: 458769 - DNA, 516 bp, Homo Sapiens
  misc_feature (25)..(25): n is a, c, g, or t
aaaaaacccaaaatgggccccgggnccccggaacaactactaagtcaactccttgggggttccaaatttcctccatcaatgatgttaagcccctaggtgggtgtgaaggaataaagaataaataagagctgatggcacttgcctggaatgctgctggaagagggccaagataggggtgaatcaagaggccagcccaccccactgtctgcgtttcctcctttgttcagcttgtgtgttttgggaccagttgcttgaaatatgggccattatgcttttcttgccctactcttcatgaaaagtgaagtcaggtggcccatgcctaataagtgaaaggtgtggtgacttaaatagtaagacaatgagggtcatgattatcttgtgtctccatgaatctaccacttatcacagtgcctgacagtccacaatttgagcctcttcattgggttaaacattgccctctgcaggctactgttctaaaatgttaattctcctagaagaggtaatattaaatccttt

SEQ ID NO: 458770 - DNA, 444 bp, Homo Sapiens
tttaatgtgggaaatattttaatagaagaattaatatcatctggcttcagttttcaacaacattgttgactagatagcccaaagactctcttgctacaaaatatgtggattgcttcataaaatgtaacagacatctcctgaaatgcttggctgagcttgcaagaaagggaaaaaaatctacatggaccaaaatagggggactgagaccaagaaatataagcatgagatgtgctgtgactaaccccagaaggtatgggaagggaggcatattgcttgtttgtcctgacctgggatcctgggttaggagaagtggggaactgtctctgaggaatttattaactacttgagttgggactttggaacttcaaaacatctggcatgtttacaaggaaccttcaaaccaaggaaatttaacaaaaggttgggtctcccttcaggtggata

SEQ ID NO: 458771 - DNA, 391 bp, Homo Sapiens
tcctccataaagccctcccctctgggtaagccctcctgagcttggtgagaagcgccacactcatcctggggttactttcccaaggagaaggtatttttaaatagaaacgagaagtaattataaagaaatgactgcctggcaacagaaatctaaatcccaagccccaagttggtgacagttgtagcatgaacatctggtgattctataattaaaacattgacacctcaccgtcgctcggctccctgcagccccacagaaaacctggtgtaactttgctcttctttacggggggaaaaaaagttattttcttccctttcttctctgttcagacataacatcatcaacatagctctttaaatatctgtgccgggaagctatatttagctactat

SEQ ID NO: 458772 - DNA, 203 bp, Homo Sapiens
  misc_feature (124)..(124): n is a, c, g, or t
  misc_feature (173)..(173): n is a, c, g, or t
cacagcaattcatctttgcttttattaataatttcaacgtatgttttgagcactttacaatgtaggaaatgctttcatagacattatttcctatgattctcacaaaaccttcactgaaaaaaangacttcaaggtcacttgccctatgtttataaaataatcgctttaaatangcagttaggggtccaaaaattcttacaatc

SEQ ID NO: 458773 - DNA, 428 bp, Homo Sapiens
  misc_feature (137)..(168): n is a, c, g, or t
  misc_feature (185)..(361): n is a, c, g, or t
attttataacccattattttaaaacagtaaacactttttaaacatctaagaattattgttataaaacaatatttaattttttaaaatataaaataattgaattattgtctttctctaagctatttagagaacactannnnnnnnnnnnnnnnnnnnnnnnnnnnnnnnagacggagtgtccgtcnnnnnnnnnnnnnnnnnnnnnnnnnnnnnnnnnnnnnnnnnnnnnnnnnnnnnnnnnnnnnnnnnnnnnnnnnnnnnnnnnnnnnnnnnnnnnnnnnnnnnnnnnnnnnnnnnnnnnnnnnnnnnnnnnnnnnnnnnnnnnnnnnnnnnnnnnnnnnnnnnnnnnnnnnnnnnnnnntagccactttctttgttaaatttaactgttattttaagttcagggggtacatgtgcggggtttgtta

SEQ ID NO: 458774 - DNA, 301 bp, Homo Sapiens
ttttttttgcaacagctaatcaaaatattttaataagcataagaattccacattaaaacacagaactgagattcctacctcagttatttttgcatctaatccattatacttgatactactttgcattaaaatgataaatgcaacaatttcttgtatgttatagaaataatatatacataaaataaaatatgaatatgtcactcttaatagagatacctcagtaatttcttaaaattgcttttttaggtacttaagcattgcctatatgcatttaaatgtctgaaagtagtgttttctaaca

SEQ ID NO: 458775 - DNA, 435 bp, Homo Sapiens
  misc_feature (43)..(43): n is a, c, g, or t
aagaaaaccaaaaaagcaatgtttttcctgacctgtttgaaanaaggggcccccaaattttccattttgtagtgggtcctgaaaattatgtagccagtcctgcctggtgagccacctaccctcttgggcatttagttgtctatcagtaaactagatcattaacactgcgcctgcccctcctgctcacgggcacgttaggaacatgcgcttggataaaatccaagccagagatttagaaaccagtgtgtggtgccagctctcagccttggaaccacaagcccatttttcttaaaaagggatctggactggcatccaaagagatttcagtcccctcatgtaggtttaaccaccatgggcaaggcagtctctctcccaggtattcctctcacctaggtgctctgctctagaaatgaagtctaaaagcagacccccatc

SEQ ID NO: 458776 - DNA, 195 bp, Homo Sapiens
ggtgcatcttacctttatcttctcatttgctgcagattcttacatgtgtatgtgatgaaatttggatgtgataggtttgcatattggatgctactttgtcgtgcacttgtacactataaacagttttcttgaaactgcaaaagggccaaatgaatgtggatgattctcatcaggagagttgcggaaatttgtggg

SEQ ID NO: 458777 - DNA, 342 bp, Homo Sapiens
  misc_feature (301)..(301): n is a, c, g, or t
tcagaggctcgccttctctttgctccctagccatcacactacactgggatgagacacaacaagcacccaaatgacacagtgaccatttcttttggtcactgaggttcacgagatgggctgtttttctttttcaatcgaggagctgaaatcctaccagccacctaacaattaacaaccccaaccctgtccacggttaaaatcaacgaaaaaagcaaggccaacttcttgtataacttccttcatacgggaaaaacatcaagttcaacgtgtgttaatcaagtgtcaggtcaatgtaccacgnaaatatatttgatgttttttgctaaggccaatactaaactg

SEQ ID NO: 458778 - DNA, 289 bp, Homo Sapiens
aatgatcaatcctgttgacagttttcccgtccatcttccagaagaactcactactcaaccaactgcctggtattcagctgtgactgtgaggatggataactatatttccttaagaaatagcaggaaggtatctcatccaagcagaaaataagaccaacagttgtccaggtctcagtggttctgcatttcttcctaaaagagaaatatgtctctaaacatctctttcccgcctcatggggttgggggaagcaatatgctcagaaaaattttaactactccaggcagctga

SEQ ID NO: 458779 - DNA, 519 bp, Homo Sapiens
  misc_feature (479)..(479): n is a, c, g, or t
  misc_feature (484)..(484): n is a, c, g, or t
gatatgtaaagtttttgtcaacctcccaatatctagcatacttttcagctaaacccagtacgcagcgtccattcttcctatttcaatctataccatataactcagaataattttcataatatttacttttcccatgttacacatagtacttttatattcagaatactccagtgatgtctctcttccttaagggtgacttctatattcatgagcctagcatacagggctctctatagtagacctatttctgaaacgtcatctctagtctctagagtagatctctctcctaaccccacaaattgtctaaacaataaccttcctttgaagccaaggtcaaaagacacattctttaatgggctgaaacttctatatttgtttcttaggcgttgattcctaaatcaacatgagggaaactatggacagtcatttaggcactctcaaaatataggcggaccctctttattctttgttattaaccntaacngtggaacggggtcttcttacggtattggaaaacac

SEQ ID NO: 458780 - DNA, 445 bp, Homo Sapiens
ttttttttagtcacattttgtagtgaccagtcagcctcctagagtgggagggaatctgaccactacatgagatttcttttctttactgtacacatatgctctcccaagttccatatattttcttctatttctatgtgatgtagataaaacataatgctttgtatctctgaaataagatagcatttgtttcaaattaacacacattttgataataaaaaattatcaatgagttgtgttaaaaagatactgtgtcccgatataaacagatgggcatataatctaaaacaaattatcattacaactttttattgtgaaaacaagggccaaataaatgtaacatgtattatccttaaataaaccattttgaggtaggctaaatggacatataggccattatttttcagtttctttaggccgtataataggactaggtatttttacctac

SEQ ID NO: 458781 - DNA, 417 bp, Homo Sapiens
  misc_feature (16)..(16): n is a, c, g, or t
  misc_feature (30)..(30): n is a, c, g, or t
ttaataatgtttacanggtgacttgttgtngaattctgttcattttacttaagtttgaaattttctgtaataaaaatttgtaagaggttccaggggaataagcacagggagaaatgtgtggatattgaacttggcattatatcatttgattgtcaactttaaaaataaaaggtaaaataaatataaagctttttaacttttttcccaaaaataattaagtaggggaaaggggggtattgaaaactggctgagagatttaggaggaactaggaaataaaccacttgcctaaaacaaacgtaataggaaataggctaaattccaaaataattaatacgggaatttaattgcagcagttttcaaactgttaaatagccccagaaaaaatggggtaggagggttttgtctccctaatttgg

SEQ ID NO: 458782 - DNA, 448 bp, Homo Sapiens
  misc_feature (413)..(413): n is a, c, g, or t
  misc_feature (422)..(422): n is a, c, g, or t
  misc_feature (427)..(427): n is a, c, g, or t
ttttttttccacatttaagtttatttgccatgaaagggaaagaacatacatgagggtttttaaaagttactactgtggtaacaaaacaacattatcctcttaaccatttttcctcttaaccatttaaatttatcctcttaaccattttttcagtgtacagtacggtagtgttaagtatattcacatggttgcaacagatctctagaacatttttacccggaaacactaaaactctataccactaaatactaactccctctcctaccagcccttgataaccacctttctactgtctgtgtctatggattttggactgctatggaatacatcatagggagtgggaatcctataggtatttatccttttggtcactgggctttcttccacttcgggcattaatatccctcaggggntccatcccnggtgnggtatggtggacatgggtttt

SEQ ID NO: 458783 - DNA, 493 bp, Homo Sapiens
  misc_feature (353)..(353): n is a, c, g, or t
  misc_feature (385)..(385): n is a, c, g, or t
gctttattcatgtgttagtcaagatcgagtgaagtaagaataaaacactctagataaattgaacaggaaaggatcgaatatagggaattacctgcttacacactgttcgagaaatttgggagtcaaagtcaaggatacttttgttggtatcaagaactcagaaagtgcagcaaaggcaagaaatgactacctaatatcttagcaacctagaacacttaatggggtcattctcaggaagatgcttggaaggcaccaacaaaacactacatatatattaatgcccaaacgtccgactccagctgctgccagtgaataatgtcttctctttctcttcccctaccagggtttctgtncagtgatggtcattgggcaggaatatggaatngcaaacccttacttgcttaaggaggagctggggaaatgttttcccggacttttcaggccctagtggattactgggggaggagttttggaaggggcaagggacaggatt

SEQ ID NO: 458784 - DNA, 493 bp, Homo Sapiens
ttttttttagcatttgattagctctgattttgtgtccagcttggttgaagagcactactgggaccttgcttttcgccctctaataatttacagcatgtgagaacccagagaggtgactccttcggcatgaagcaattgaacaaagaaagacaatcattagcctaattcatgaatggggcaatttacaacaggtgtaaattcaagataagcattctgggaatgcgggagatggcaagtgtctataaatgatcaggggagggatctggggagaatagcagatttcttatgccatcagctttgctccagtgaatctaggcaggtgattagagaaagaggagaatgtttaaaatgtcaagatacagagcaatttggcaaggggcaggggtgaagaagacagtgatgaagagaagagaagggaaaaggcgttctaggcaggagatgagactctggaaaaggagcctgcagtgaagaagctgacagacaggctgctctc

SEQ ID NO: 458785 - DNA, 477 bp, Homo Sapiens
ttggagcggtagaagattcattatgaagagtgaaaggacaaagcttccgcagtgtggaaggggacccgggcaggttgccgtgtttgtgttttaagctaagtgttattacaaaagattcagaagttaagaattttaaagttttactttttatgtagcctaagtgtgtttataaagtctacagtgatgtacaataatgtcccttcatattcagtcaccactcagagcaacttccagtcccgcaagtgcccaatataggtgtaccaatttttcttttatattgcatttttactgtaccttttctatgcttcactatgtttaggaaacacaaatacttaccattgtgttaatcactcttatagtattcagtatatagtattctcttataggtaacatggccatacaagtttgtaggcctagggagcaacaggccataccatataggcgttggggtattagggggctataccacctaggtct

SEQ ID NO: 458786 - DNA, 435 bp, Homo Sapiens
  misc_feature (32)..(32): n is a, c, g, or t
  misc_feature (55)..(55): n is a, c, g, or t
  misc_feature (162)..(162): n is a, c, g, or t
gaaaaacagggaacgaaacgccctgggtttcnggccccctctgcccccccgcggnaactctgtggtcacccggaagctggaacgaagctcgggccctggccgcaagtggccctcgctcggatgtcccctctccagacctaagggataacggtgaccaccccnagacgccgtcgtctgcagggaccttcaggggttcgggggaggaccttggaggctctcagactaccgggcgttgggcggaagtggccagttgtgatagtgttaccaggagattggcaaataggtcctactcccacgattctcttttttcaacggaagacaagaaaaggtgtgagcgacggatctctgcaaatgcagggtggagttagcattggtcttttctgcggccgatttacctaccaggtagagacacgagggaaatagagcgtcctttcc

SEQ ID NO: 458787 - DNA, 202 bp, Homo Sapiens
gaatatacaatagagcatatttaaagtagtagtcttgctttaggtaaaacactttcttgaaaccagaggcatttgaaacaataaaacccggctctaatggggatgctctgtgtggatagaaagctactaaaaacactcaggtttattctgatgtgagcagcgattgtgtgcagttcctcccccaatctcaacattgcttagg

SEQ ID NO: 458788 - DNA, 310 bp, Homo Sapiens
catcctctgctttattagttgtgatttaggaaatagaatggccctgtttacacagctgtaacatgtcagggcctgtagtacattattggcttgaggcctccgagttgccgtccattctcagcagaatcaatctgaacttgaaaacattccctctaggaaacatgcacatatctactagcataaagcacttcttgcacaactgaaaacagtattcacttgaggtaagttgcaagttcaccttccaaaaatcagccctgacttgtcattgctctcagcatgttcacgatgggagcagagggctacaaatgcc

SEQ ID NO: 458789 - DNA, 194 bp, Homo Sapiens
gaagtataaacttttcttttgccacaaaattaatttgaaacatatcctaagctttttggtaagtcattggacttcatatttgaactggtgatagggttgtatgtaaccaaacgttgagatgatgcagtgagctgtgtttaattataactcattattgtaattaatcttacattgtagaacttgacgtctcgttt

SEQ ID NO: 458790 - DNA, 329 bp, Homo Sapiens
gttaagaggcagagttatatttagcgttgagaacaatttcattgattatactataccggaattgaatggaagaaaaacactaattcctgaaagaaataaatttaaatgcaggaagacctagaaactagaaaaacaaagtacgttggattgttttacagtttagaagtttctggccccacagttctagaggctgactgactggggcaggttgtagagaaacttctggacaggttgttaacatctgacacagtgagtgagaaaaaatccagcacagtcactgggcaggtttaagaagaagtggcagcctcgggagatgaaagactcccagg

SEQ ID NO: 458791 - DNA, 305 bp, Homo Sapiens
gctattaaaaaaggtaccggataattgaaaccagattggatttgagcctgtgttgatggaagtacacatgggatgtgggctgaagtgttcaatctaatttttctttccatcagctaatttttaaagtattaagcaagtagattctgacactaacagggaagatttaaattctcttgagagactggaggtgttaaataattttctggtagtgcacattttacatcttaaatcttcctcactctcccacctcatctcaatgtacctgaagctctgggaatgttcttttgtacttctcaggaacagcc

SEQ ID NO: 458792 - DNA, 381 bp, Homo Sapiens
  misc_feature (346)..(346): n is a, c, g, or t
gaaataatttatattttgattgaagcatggtgagaacttttatagaaaatcctatttttaaaaatttttctttcctttatcacagattacaatggctaatctacatgaatgactatttttcttctattgacaactccttctgcaaaattatttttatttattttcttgagttatagatttagggggtacaaatgcagctttgttacatggacatattgtgcatggcgaagtctgggaggaaatcttccgcatacacctattcaggaaacactaggatttcaccctaatttaaatcaccattctctaacagggtcaggaattttaaataaaaactgattacaaccancatcatcattctaacttttaaacaaaagcatgtaa

SEQ ID NO: 458793 - DNA, 448 bp, Homo Sapiens
caatttataaagaaaacagatttattttggcttatgagtccaaaggctgaggagtccaagatcagggagcccatctgatgagggcctcatgctgcttcaactcatggtggaaagcagatggtgaactgaggagggcaaagagaacagaacacaagaagcatcctcacttcataacaacccactcttgtgagaattcatccattcctgcaagagcgaatccattccagaactaactgagcctcatgagaaagcctttaatccatctcaatgacctaatcacctcttaaaggcaccacctaccaacacaatcaaactggggactcaggcctcagcatgagttttgggtgaggacaaaccatatccaaaccataggcagggaagtttaaaaaaagcgagtgggcggaactccagttgggaaacgaaaatttttagacctttacctttaatg

SEQ ID NO: 458794 - DNA, 235 bp, Homo Sapiens
  misc_feature (221)..(221): n is a, c, g, or t
aatttgtcaagaaaagaggttcattttgactcgcatttctgcaggctgtacaggaagcatggcgtcatcatagccttcttgtgagggctcaggaagcttccattcatggcagaaggcaaaagaggagctggcatcacatggcgagtgagagagcaagcaagaaaaggagaagctgccaggctcttttaaataaccagatctcatgtgaactcacagacagngagaactcactcat

SEQ ID NO: 458795 - DNA, 488 bp, Homo Sapiens
aacatgtgtcaaaagattttattaaactaattcaatttgttagggaaatggtaagatgttacaactggttaagaggagcattaaaagtgcagacatatattcaggccatcaagaatgaggaaatgaatttgctaaattgatgcaacatcaatcaatagccagggcctgtcattcacagacaatcactccaccacacgcacacatacattcctacggtttgtccacaacttccagagctgaagagtagctcaaggacatcaaagggcagaggcccctaggaagggctgagccacaatgaagcagtgctccttcactcccgatttccatggctaccaccgtttttctctggcaaatcagagacggatttttaaagactgagtaaatctataaaagcgattaatcacagaagttcaatgtctgataaattattccaaaagtgttcctgggcactgagactcaccaagcatacattctgaaatcaaattcta

SEQ ID NO: 458796 - DNA, 445 bp, Homo Sapiens
  misc_feature (339)..(339): n is a, c, g, or t
  misc_feature (424)..(424): n is a, c, g, or t
ctgcaaattgattctttttcacatctatttccttgtcttgtaacttttaccctttaccttttatgagatgcagaaaaaccctctcggctttgcattagcacccgtgacagatcctgttgatccaccactgatttttagcctgaactgggatggacactccacaggagctcaggctctcctcctcctgtttccatcttgctccttcccaccttggagccttcgccagcaccatggatgtcccctcagccttcatgcaaatattccccagggtatccagaagttactgctcagggaacacttgcaggcagacaagctctccagcctcctgtccttcagggnacaaatttggggagggcattctgtaggaccttgctcaggagggtcccaggagggaattcacaccagttggccttcaattattgtnttttgctggctggggtttctt

SEQ ID NO: 458797 - DNA, 395 bp, Homo Sapiens
  misc_feature (375)..(375): n is a, c, g, or t
agagcagatttgtaaattgataaatttatttggtaagaaattattcacttcattcgcttcactccatagagaattctttgcagagaaatgttatgaacaagagaacaaagcctgtctctcaccaaagagcacctagagtaagagtttacaatgatgtatctggattatctaattcatcaaagtttatttccttttcaaaaacaactgctgtgtcagtctgggagttccctatttcatgttttctaattattacaataaatagtcttcaaaatagaaggataaaatggctggctttaggaagtaacagttatttttcaacaccataccctttgtctgggaaaatccattgtgttggtaatactggggggggtatcnttacctttggtttttggcag

SEQ ID NO: 458798 - DNA, 675 bp, Homo Sapiens
  misc_feature (469)..(479): n is a, c, g, or t
tctagtccaatttatgtggggtttttttagcttgtgcatatggtgtcttatctaagaatccattccaaataaaaagtcttgaagattaacctttatgttttattctaagagttgtatagcttaacctcttatatttaggtcattgatcattttgagttaatttttaagtatagtgtgaagtgcggatctaacttcattatgttgcatatgtatacatatttgcccagcattatttgctgaagagactatgctttctccattaagcaatcttggatccttcttgaaaatcaagtgactttagatgtatgagtttctttatggactctaaattctattccattactatagcttggtagtaagtttcgaaatggggaagtgggagccatccatcatgttcctttaaaaaagaaagattttgtctatttgcctccattacaattacatatgaatttatgaattgatttctgcnnnnnnnnnnnggctgtttggattttgatagtgattgcagtaaaactgtagattggtttgggtagtactgtcatcacaaaaatgtgaagtcttccaatccatgaatgcctagacaataagcgaattcagcatgatcataggatacatgatcaggataccaaaattaatttatatatattatactagcaatgaacacacggaaatcaa

SEQ ID NO: 458799 - DNA, 315 bp, Homo Sapiens
ccaaaatattaacaatttaaagcgttttcaccattttaagtgttgatgaggatgtagagcaatgggaactcttctccattgttagtgggatgagacacttaacaaccactctggcaaatttgtctggcggtttcttataaagttaatcatacactaaccatatatatttcctataaagttaatcatacactaattgctatataattcagcaattccattataggtatttacccaagagaaatgaaaacatggccataaaaacacttgtaaacaaatgttcacaatagcttcattcataattatcccaaactggaa

SEQ ID NO: 458800 - DNA, 430 bp, Homo Sapiens
  misc_feature (247)..(340): n is a, c, g, or t
  misc_feature (395)..(395): n is a, c, g, or t
  misc_feature (406)..(406): n is a, c, g, or t
gtcccaatgcacaaactttttttggaaatgttggaggccaaggtctgactaaaagctccctgggccttcccatccttcatgttgaaaaagggaaaataaacccaagagtgatgtcgaagaaacttagagtttagttaacaacatcaaaaatcaacagactgcactgataatttagcagcaagactatgaagcagctttcagattcctccataggttcctgatgagtttctttctactttctccatcnnnnnnnnnnnnnnnnnnnnnnnnnnnnnnnnnnnnnnnnnnnnnnnnnnnnnnnnnnnnnnnnnnnnnnnnnnnnnnnnnnnnnnnnnnnnnnctagttcctattctcctttattttcttcccgtctggcctggccttctttcttttnctttacctacnctcattcctctcttttctcatcct

SEQ ID NO: 458801 - DNA, 448 bp, Homo Sapiens
attttttgtaccagctttccccacttttccagcccatttaattaaatatgggaatttaacttactcaagccaatagttgaaagggaaggtgccatattatccacggatgccaatttatgttgtgtgcccagtcctggtccccaaacatcaatttcttaacatgagctccagtttacctaaatgttcactgacacaaaggatgagattacacctacagtgactctgagtagtcacatatataagcactgcacatgagatatagatccgtagaattgtcaggagtgcacctctctacttgggaggtacaattgccatatgatttctagctgccatggtggttaggaatgtgatactgcctgtttgcaaagtcacagaccttgcctcagaaggagctgtgagccagtattcatttaagaggcaataaggcaaatgccagaattaaaaaaaa

SEQ ID NO: 458802 - DNA, 577 bp, Homo Sapiens
  misc_feature (38)..(38): n is a, c, g, or t
aatggcccaaaagttcccaagggccccctcaagctctnaaataaacctgtgcccctgtctttgaacttcttcctccccgggtcaaccttgaaccccttccaagttccatgaaggtccatctgcaagcaaaacttgcggcaagccgtgaggggcactgggtccaccaaaccccatcatgtgcagggccccaggaacggcctgaagtccctggccaggctcaggagagagaagccctggtttctggggggaacgtctatggactggaggagggtcttgtggttcgcatagagtgggatgcgcctgtccaccacctgccatcggatggaggcccccgagtcgcaggcgtgcaggttagagttcagcctgttcagctccacgtcattctggtcctggaagtggacgctgacggccaccgtctcgatccaggcattgtccgtgttcctcgggtcatccatgtagcctttgtacacctccatgccgcacttcagcaagttttcaaaagacggccagtgctcctgccggaggttccgcttcagcttccgaggtagcatctcccctgggctcccgggagctccca

SEQ ID NO: 458803 - DNA, 501 bp, Homo Sapiens
  misc_feature (329)..(403): n is a, c, g, or t
  misc_feature (411)..(411): n is a, c, g, or t
  misc_feature (427)..(427): n is a, c, g, or t
  misc_feature (463)..(463): n is a, c, g, or t
ttttttttagcacaaatactgtttattaaaatgtcaaggtttcatgtttacattttcttatatcaagtacaatggtatatatacttttttttgagataattattctagattccaggctttcttctagatgtaagttcctaaagcttatagtttacattgatatctagacatatatcttaaacagtctccaaattttctttaattaatcaaagtatgttaatgtcacttgggaattctacatgggaaaagccaacaaaataactaaaacttgactaatgaaggatcagcgtcactaataaaagtctggcaactgtaggtattagggttgnnnnnnnnnnnnnnnnnnnnnnnnnnnnnnnnnnnnnnnnnnnnnnnnnnnnnnnnnnnnnnnnnnnnnnnnnnntatatagntttattaaatggttcngccttttatcccacttgggctggtccaacggggganttttccatatttttaaggccggaccttccggccaaaaa

SEQ ID NO: 458804 - DNA, 503 bp, Homo Sapiens
  misc_feature (319)..(319): n is a, c, g, or t
  misc_feature (451)..(451): n is a, c, g, or t
  misc_feature (476)..(476): n is a, c, g, or t
ttttttttgtctggaaaagatttttaataaaaatataacttatgttagtgtcgtgtgttttttaagtgaatattttaatatgtttaatttctatgttagtaaatagcagtagtaaacaacagtgagcaaaagcttttaggtgtcctcagtacattttaagagagtgcaagcgtcctgtgaccaagaagtttgagaactggtgcccaccaggttcatctcacaagttcagtattttaaattccacacaaaaggtagaggaaatagctgaattcgcttcagctgcgcatacatttcacgattatttaaaagtttagagggnctagggcgcggtgggctcacacccgggaatcttcaggcacttcgggtaggctgagccggggtgggtccacttgagggtcaggggttcccggaccagccttgacccacatggcgggaaacccgtttttacttnaaattacgggattaaggccgggctnggtggccgcttgcccgttatttcccag

SEQ ID NO: 458805 - DNA, 318 bp, Homo Sapiens
  misc_feature (120)..(120): n is a, c, g, or t
  misc_feature (122)..(122): n is a, c, g, or t
gttcaagtgaaccaatggaatgcaaagaactttccaggactgtcacatctctaaaagtaccctgcagtcataaaataaaatcgatatgtatatatgtatttcctgggtcattcagtgctnangttacatgcactcctacttagacaggtggcttcttaagaacatgatgggagtacaccaggtgcaaatatttctacttttgtagcctgctgagaaggaggcataacacagtccacaattgcaatctctctctagtcagccattccacagggactcaacaacaaaagccgcacgtggttatgggatggcagcaaaggg

SEQ ID NO: 458806 - DNA, 570 bp, Homo Sapiens
  misc_feature (81)..(81): n is a, c, g, or t
  misc_feature (116)..(116): n is a, c, g, or t
aaaaaggacccccaagaagccatcagaaggaaaataaaaaagcaaagggaaaacaagaaaacatcctccggaaaggtttgntccttgaataacctgtttaacaaattcaaaaaagntaactaaaaccctgaaatagtgccaataatagtctgtggtcacctctttaaaattaagcttttggttccacagtagtccccctcatcccatgagggtttcaagaagcgccccctcccgccgaccatgtggacgtcagaaaccgtggatggtgctgaaccccgtatatgctatgctttttcctgcccatacgtgccacacagcttggacatgctggacaaaggaatgactcacatcccgggctggacacagcaggacgaccagacttcatcatggtactacccagaagagtatgcaatctgaaacttacaaattgtttatttctggaatttctcatctaatattttcagatcacagttgactgtgggtaattaaaacctaggaaagtggaagcatgggtaagggggggtactgtgtaacacagaacatgttccagtacttcacaaaggagcaata

SEQ ID NO: 458807 - DNA, 343 bp, Homo Sapiens
cactttgaattccaaaaccaaaattaacagagcttttacataacctcttcccctattacatctgtatacctgtctttcacattgaaacgtttggttcctcaggacacaggggataataaaattagaatgcttcatagcattgttttatttcatctcatattacacaagcaacagtctcaaaataacaacaccatatcacctatgatgactaacacaatttaaaatgattgttgtatatgatctccatttctccctcatatgtagaaagttgtgctacatctgcattttcagaacatatagatattacattgtctttccctgataaccctcatttagtcttatt

SEQ ID NO: 458808 - DNA, 466 bp, Homo Sapiens
caaaataaatgtgtggtttaatgagttatactaagtcaaaaagcctcagaaccactaccaggttaagaaataaaactttaccaaccatctaaaaccaccaaggcatcagtcccatcacagccccttcccttcccacacaggtaatcactcctgacttttatagtaatgacattccagcttttaaaaacagctctaacatccatgtttaccaaatataattaggattgtattatttttaaactttgacatttcttttaagtctctttttatccatagatttttctctctaccttttatgttccttatacattatttgctgaaggatccaaggatatatttgaactggaacttgttggcctgcatacacatggtgcagcatgttcctctgtcctctgggtttcctgccaattggtaagtagacccaaagacttgatcagactcaggtttgatctccttgaaagactgc

SEQ ID NO: 458809 - DNA, 464 bp, Homo Sapiens
  misc_feature (224)..(236): n is a, c, g, or t
  misc_feature (439)..(439): n is a, c, g, or t
tggcacgagggttgttttgagtgggtttcttgttccttttttcatttaaaaccttctttgttgactggctccaggcttgtttgcctaaattcttaggtagtttacacaagttctagaatcttttagaactttaactccattggaagcaaacctaactaatcggagtttgagatcctggttggtttcaataggtattctggaattctggcagaacacctaaagannnnnnnnnnnnnagaaggttttagatacattatcttacacaaactgtgacctaatggcaataattacctcaaatgtggggcattcatcctgggttttagccttttttgaaatcatgtagccagcttgatcttgggaattttaaaggactatggaattctctgtgggggctggaaaataaatggatttactttcataccccccggtccatcgttgncttaaggtggaattcctggaaaata

SEQ ID NO: 458810 - DNA, 371 bp, Homo Sapiens
  misc_feature (359)..(359): n is a, c, g, or t
ggtttgcggaaattaaaaattaaataacatggttataccagctagattttgcatcatccagaatgggtgaaaaatatgaacatatttttatatgtcaaaatcagaagtcactctagaaatggatatgaatagtctttaactagaatatcagagtttcacaaagctttcatctctgtagctgcgatatagccaaatttgcatttcgaggactgttccagagtatagttttgtaaggcctggaaaatgaggaacttgattttcatcatcctggaactgggtctttggaacagtgtgcccaaggggtgatccagcattaaatattatggctctaagtgtctcttggattatagggggccatngggttaaatatg

SEQ ID NO: 458811 - DNA, 265 bp, Homo Sapiens
tcatgttccaccatgctgagaatttttaacagggctgtggagtaacagaacttgatggaaaattggcatctgtgtagaatgattctaaagctttcagacaaatggcagaatcctagggtaaaaatatcacctttattttctttcatgaactctatcagtggaatatatttagctgaatttctacttaagagcaggcaagacgaaaaaaatgaaggccactgagaattgtgtcaattactctaacttttctgttattattattatt

SEQ ID NO: 458812 - DNA, 758 bp, Homo Sapiens
  misc_feature (717)..(717): n is a, c, g, or t
  misc_feature (731)..(731): n is a, c, g, or t
ggtctatcccatgccatgccaatgtgaattgctttgcttcagtaacaatcagaagaccagtccaacagaaaataacttgtcataattccaccttagattctagacctctcatacctgcagtgtacagaatatgtacatgttccaatggaattcactatttttggctttagtgtcaaagagattggttctacaaggttcatctgatttcccataacaagtaaattttataatcctatgattctaaattcaatccccaatatagattctaagcatcaaatcaaaatcacagacaaaggggaactggtcgagaggggtcttagttatttcaaatccatgaccaaagtgtccaaagacatgaaactcttatacctgctgagcatttcactttactatacaaaatgtcagctacccagttgcatcctgtgacatgatcagactgtcaatgtggaccagtggccaggagcatatttatgggccatttctgttcatcattctttacagagcattgaggtttcccactgaaacagcttctttagtcagacgtctatagattttacataaatttacatttaaatgcattaagttagatggcccaattgagcatctgaatgaatatagtgggggttggtggtggtgcaaattctgctgggctttatgttatggttttcttcgtgttttttcttgggtttgtctgggcttcttctgggcaagtgcccntaaaaagactgggnacactgtattaaagtccttggccttgg

SEQ ID NO: 458813 - DNA, 604 bp, Homo Sapiens
  misc_feature (29)..(29): n is a, c, g, or t
  misc_feature (34)..(34): n is a, c, g, or t
  misc_feature (41)..(41): n is a, c, g, or t
  misc_feature (52)..(52): n is a, c, g, or t
  misc_feature (95)..(95): n is a, c, g, or t
aggtctgttacaaaaccaccccaacaggntatgntgagacncgttgcctccnccggaataacaacgccttaattccgtgcgctgaaacgtcacanagtcagaaagacccagaaagagaccctggtgcttcctgtggtatcttcctttagtacgggtctcctttacattcagccggtttccattagaaaaaagaatttccaaagtatttcattaacaaaattgagaaaatgcgtatttaaacattgacatccttatgaaagagtaatttcttacataaatgtagcattttcacctatgttacctcatttaatcttcagaactaatcttaagttgcaatttcacaattttatagacaaggaaatggaaactcatagatgttaattcactcgttccgggccacggaggtgtactttttagagcatagtcttatttaatggtcttgactctaagtccaaaacagaggcctccactttgctgagcaccaaaagatcgggagatgagtcagtgtgtgagtcccaagaggaagagaatctgcgggtccttagcagttaaggaagcgtcatgaaacatttcttgaagaatggataggatttaaatagtttag

SEQ ID NO: 458814 - DNA, 523 bp, Homo Sapiens
  misc_feature (430)..(430): n is a, c, g, or t
  misc_feature (448)..(448): n is a, c, g, or t
  misc_feature (472)..(472): n is a, c, g, or t
ccctttttatagatgtatttttgttttttacaaaccaaatagcagaggttgattattagtacagtagtttggggttttttctcatcattaaccacttagttactataaatgtgttttaactcacggggaaaaagtccagcataccgtaaaacctgagtcccacccagccagctcggaatggaaggcttccaaggcccgggaggcgcggctctgtcaagttgctgattcgggagatagcagtgaatcggggttccaccacgcccccagaatactattcacagcagctttgtcattgaccgttctcccttttgggacgagatctgaaacaaagcttccaatcacttccgatcctaataggcgttacctctcttagggtaggggtttaaggatttttagtcaatttcaactcaagtaggttacctagggaacnttttagggtttaacccantagttattattgcggtttcagttnaaagtgatagatttttcgaggtttttgtggttccacggtccggtaggggaa

SEQ ID NO: 458815 - DNA, 364 bp, Homo Sapiens
aagaaatactgggaaggaattccagcgtggaaacactagtcagggtgtatgtatgaagcaaagggaggaggttctattactaaaagacaggagaaaatgggcactcagagtcatctctgctcaggactagctaacaatttataggctcaatgtgaaatgtaaatgtggaggactcttgttataaaactattcagaatttcaaggtggcagccatggagcattaaaccaagtgtagggcccttgtaagtgtggagccctgtatgactgtgtaggacccacacccatgaacctggccctgtctctgctacattgtgtcatttagaaatctgaattgatgtccgttttagtggctgcataatatttc

SEQ ID NO: 458816 - DNA, 518 bp, Homo Sapiens
  misc_feature (50)..(50): n is a, c, g, or t
  misc_feature (211)..(211): n is a, c, g, or t
  misc_feature (213)..(213): n is a, c, g, or t
ctcaacaaaaaccctgcctaagtgctttccatgaaacttccccatcgaanccctcaacaacgtcaactggaaaagaggcattgccgtctgcattttaacttgtgaggaagctgaagactggaagggctccatcatttgtagaacagcaaggcagtagtccagctgggatcctcagccaggcagccccaggcctaacaggcactggcccacncnccactccggttgctcccagggccacttagaagtttcaagtcctccccagcttcccaaggccaactgcaaggagtttctcaatcccttcccaggtgtccccatcactaaaggatgtgtccgtctgcagcttagttgtacgtctgtttttctccccaggctggatgccttgaagataagaatcatcttgagtccctaatgcttagcacagagctgtactcaggagggttaattgaattaattaatggtcagcaaaatgaatgagtggatgaatgaatatcacacattcaagtgatcacatttcctgt

SEQ ID NO: 458817 - DNA, 467 bp, Homo Sapiens
  misc_feature (398)..(398): n is a, c, g, or t
  misc_feature (457)..(457): n is a, c, g, or t
ccctctgttttagtaaccacagggaaacatggcggcacggggtaagtggtagaaatatctattatatttaggaaccatatcacgaacttagcctgtgtttaaaccgtagcctctcccttttaataaacagatcacaaatatggcaagtggcattgcctctcagatcacaaatcgagcacacggctaagctgtgcaatgtgacatttgttagattcaattatacatcctgggcctcatctttttaaatttatttgttgcttatgaaattttaattagctaaagaaaaacaaacactttataggaaacaaggtaacagagggccataaaggcacattaaaccaccagccccataggaaggcactttaaaaagatagggtaggggatccacatcttggggnagtttacagggttcaagggcaggggaaaactgttagggagggaacacacccgaccccantaggatttgg

SEQ ID NO: 458818 - DNA, 310 bp, Homo Sapiens
  misc_feature (270)..(270): n is a, c, g, or t
aaacatttaggtaacaattacagcataataaattataattgccatcatcttccagctatgcaatgccttctatgcaaacacaaagaaaaggcaattacacaaaactgtaaaacccattttcaggtaggttctgcagcctagattcaaataatctatattattctcacataaacactgtattgtgcctcacatatatatatccctactatgccatgtggaaactacctagccaaataactaggggtttgttaatcacaggcttgggatggncccccagtgggttagtttttaggggggtgccgggaatgcc

SEQ ID NO: 458819 - DNA, 292 bp, Homo Sapiens
  misc_feature (211)..(211): n is a, c, g, or t
ggagtaactgaaactttgtttgattgtgttacactgcagtccacacaagaattctgggaagtatcaccgacatttagatctgaacttaattcctgtggcttagagattttatcagctatacaaggtgaagcagatttaattttaattgcatgtcccctattcaaaagtgtgttcccatcaaaactttttggtccctcttggagagggaccntcttaatctcaaaacttaaatttcgttccaattttttatctatctgttcaattgttgattcatttttccctggaagttctg

SEQ ID NO: 458820 - DNA, 390 bp, Homo Sapiens
  misc_feature (57)..(57): n is a, c, g, or t
  misc_feature (77)..(77): n is a, c, g, or t
caaaaaagaattccttcctggaaatcaagatccgccaacgaaatttttccgtttaangttgtgaagaaacacccaanaattccatcctcctatgcctttcttttcccaaagtacatggccaggtttgaattactttgcatatatcaactctttcgcatacagtatatgtttcccaggtgggaaaaggcagggatatttgaaaaaggcaggttctagaggaaaagacaaagatacatgaaactgaaccctgctgtgcaggatgcagcaaggtccatgggcacagaagctggcatgcttgggaatgtacaaaactgacaaagggctcagaaacttgtgagtagtgggggcaggggcggcacaggccaggccagtatttaggaaacgtcaggg

SEQ ID NO: 458821 - DNA, 452 bp, Homo Sapiens
  misc_feature (55)..(55): n is a, c, g, or t
  misc_feature (325)..(325): n is a, c, g, or t
  misc_feature (421)..(421): n is a, c, g, or t
ctaggaagaaatctttaatttctattcagctttaaagagtttgagagcgtttttncccctctgttaacaaacgagttcaagtacatgccttcatattataaaagtacctgaaattgcctagaatagcagcatgcatagcttgttagtatttacatatatttacatagggaaacaagagaaagatctacagttatttacagtctacataggggaagagaaaggcagcctaattgtatttcctaaaatacagtagatgagtagtcagcacatgcatatttagataatatttgcatgatagaatgcaaactttgaaaaagacataccnttgtaactttctatgctaaggtgttgcataatcaaggttaatttttgtttgtttctagtctatggggcatcaagtgctttaaaatgctcactaacncccgagggcaggtttttttcccccgggcatt

SEQ ID NO: 458822 - DNA, 410 bp, Homo Sapiens
  misc_feature (171)..(171): n is a, c, g, or t
  misc_feature (265)..(265): n is a, c, g, or t
  misc_feature (281)..(281): n is a, c, g, or t
  misc_feature (360)..(360): n is a, c, g, or t
aagctcttgatttatactttattttctgtctttatatgtaacacatactaatcaaagggaaaaaactaaaaatacagatttatacccaaatggataacggttatataatcattcttactccaaaaagaactgtattaggtataaacaattataaacttctgataaataggncatattctataaatactaatttgttatatacaacacataatcttctacaaatactagttttatgttattacttttcaaaatatttcaaactagnttatttttttccttgngcttcaattttctcatttgtaatttaggggacttacccatttttataggatttactaggaaattaagttttttttgtcngacaaggaatgtccaaatcagggcacacgggggatttattccccttaaaa

SEQ ID NO: 458823 - DNA, 416 bp, Homo Sapiens
  misc_feature (369)..(369): n is a, c, g, or t
  misc_feature (387)..(387): n is a, c, g, or t
  misc_feature (405)..(405): n is a, c, g, or t
ataaagttttcagacaacatccagaagaaattttatgtaatagttaaggtcaacagatacgattccaacaacacacataactcaactgaagtgaaaacaatatgaatagctgtgactggtgtcacatgtggatgataatgacaactcagtcatgtctgccacctggccaacatcagttatacaaagtcattgattttaagattcattgattgtaaaagatttcaatgacattaaaatgtgtaggaaatgtgcatcttaggaattgttaaacaataagtagtacttttgcctctgaggaattgggaagttgcagtaataaagtaaggatgctaaggcatgttaaatgtttttaataaatacatggttttncaagagtttattacatgnttggaggggtttaggatncattcctctgg

SEQ ID NO: 458824 - DNA, 351 bp, Homo Sapiens
  misc_feature (312)..(312): n is a, c, g, or t
gccagacaatttttaattaaaatctgcacactttgggtattataagactctagatcttacttaaattttctgtgttagttggctttgtttgattttgctccagcagatgaagatagtgaggtgccatttcatttcggcaagttgggggtagatgttcaggttccccacttgtcctccatttacactacagatggggcagcttcttgattccccgggctgggtgggaatcctgactctccactccacctccactgacatgtctctgggctgaggaagctactgcttcccatgtaggcctctacttaatacccnggggtgctgggggttggggtgcataggtaggagaaaggg

SEQ ID NO: 458825 - DNA, 495 bp, Homo Sapiens
  misc_feature (16)..(16): n is a, c, g, or t
  misc_feature (26)..(26): n is a, c, g, or t
  misc_feature (41)..(41): n is a, c, g, or t
  misc_feature (50)..(50): n is a, c, g, or t
  misc_feature (66)..(66): n is a, c, g, or t
  misc_feature (78)..(78): n is a, c, g, or t
  misc_feature (90)..(90): n is a, c, g, or t
  misc_feature (180)..(180): n is a, c, g, or t
  misc_feature (197)..(197): n is a, c, g, or t
  misc_feature (211)..(211): n is a, c, g, or t
accccggctaggcccncccgggccanaggtggtgggcaagnaccgtgggnctaaaaatcaaatgtnacaatagatctnaggcctcctaanaacaacttccagagggctgaacacttcctgaagtaaacaaaggatttccacccacccaagttccctttccctaagatgcgagcgtttagnagacttattggcttgtntcctattgaacatncagttagataacagaggtccaggaaatgaagtggaatttgatatattaactaggaagcagcaaaggaaaccaggcttgtgttttatttgttattatttccctaatatcctcaattatgtgactctcccatcagtggatctgatctgctgcacatgtgacattgttgtccctgctgttctggacactggggagacagggccagggcaccaggaatcatgtttgtttgtttttttctttgtccacaagctgtcccaggctctctatcttctctgctacatctccac

SEQ ID NO: 458826 - DNA, 489 bp, Homo Sapiens
  misc_feature (394)..(394): n is a, c, g, or t
ttttttttatatttctcgtggtttataagtttctgaatttccaaatttgccactggtattttaacctacctacaatgttgactctacgtaaaattgatttttacatgtcaggaataagatgaggatcaacgaacaaatgcacagtctgtcttttctatagttcaatagtccatctttgaatagcacataatggaatgtcagaagtggttttttaataatgtatgtttacacttcattgatttataacaatcatggctatggttcttgggtagaggagaatgttttatactggaatgacatacatatgtaggtaaaatatgatagatctatatattttagcacatctacatttaacacaaaagcaaaagtgcctcaatccattgaaggtcagctntttcagtcttttaaaggaacaaagcattctgtctccttgcttagtactgagaaccctgtccaccttagagtttaactgacaggtccaagttagca

SEQ ID NO: 458827 - DNA, 530 bp, Homo Sapiens
  misc_feature (53)..(53): n is a, c, g, or t
  misc_feature (64)..(64): n is a, c, g, or t
  misc_feature (110)..(110): n is a, c, g, or t
  misc_feature (198)..(198): n is a, c, g, or t
actccgaactgttgaaatatgtgcacgatgtcccacatgtacgtatttattangggaccccagnattgctggtatgaacttattgcccatcctgcacagctttgtcaagngtacaagactgtaattaatccacaattgtttccaagatactttgccttaactaaacattttggtctgttgagaatagaacaacttgantccaaccctgagcatggcaagggcaaaggactgtcgtgggaagcaggggagaggatggtgaggtctcagtttgcctagaggtaagagagttaagagaaagctttgatgccacgcagctgtggagcccagggctgatgccaccttaggcatggtctttgtggaataacttactggacatccataatactaatatccattgctgctttatgcaagtggcatggagtcaacatacccagataacccaggaaaagtatgtcacttgtaaataacccacgactctatgctgaagtcagcaaacctatgcccatgggccaaacctaacctcttgcctg

SEQ ID NO: 458828 - DNA, 438 bp, Homo Sapiens
  misc_feature (417)..(417): n is a, c, g, or t
  misc_feature (427)..(427): n is a, c, g, or t
gaagggaagtatgtctttatttaagaattccgactgataaaacaatgtatccaggggaactaacataggatccccatacacaagcaattctaacagttccaggaacttggtgaaatgacaatgtgcccatcacccagtctgatacagtgtttcacctactcaagatgccaggaattgtaagaagcacagtcactggcactctcggtacacccaaaaaaaccacagccagttccggaagtgccatcagatgatgcatcccaacttgagatgctcaagtaggacaaaaagtggccttgattcaagtgacaacgccatttcatatcctaagccttattttcactacttcttactcttcagatttatggaggggccagtatttgtcacccatattgtatcactgcaaattcaggggtaaantagcacagcnttatgggcaac

SEQ ID NO: 458829 - DNA, 616 bp, Homo Sapiens
  misc_feature (29)..(30): n is a, c, g, or t
  misc_feature (32)..(32): n is a, c, g, or t
  misc_feature (77)..(77): n is a, c, g, or t
  misc_feature (116)..(116): n is a, c, g, or t
  misc_feature (144)..(144): n is a, c, g, or t
  misc_feature (569)..(569): n is a, c, g, or t
ggcgttgcctgcagaactttagaccctgnngncatagagggaatggcgttcctttctaaaaggaactgaaacactgnccctctccccattgccccacaaccttactctaaatttgngtagagaaaagctcctaaagtgaccttncgggtgggaagggcagcagtacacatgaccccatccttttctttgtttttaccccctggctgccaccactgccatgtcacagctgctttctctggctggagtgtaggctgtaccccatttccttggctcccattaaaaatcaacaacattctaatgattagggaacaacagaaggggaacagtcataggatatacgagcagtataaagatacgtttgcaatcagtgactactcagggtgacacccttgccctaaagcaggagtcccccctacctggggtccatggactccctgaaattgtatgcaaaatgttgtttgtacatgtgtgtctgtatgtctctgtgggggaggttttatgggcttttgtcagatttttcaaggccttaacaaagttaaagggaccactggccctggaggttactgcantgagggccaagttagggatgggcattcactctgtgggccagctttcc

SEQ ID NO: 458830 - DNA, 428 bp, Homo Sapiens
  misc_feature (20)..(20): n is a, c, g, or t
  misc_feature (45)..(45): n is a, c, g, or t
  misc_feature (67)..(67): n is a, c, g, or t
  misc_feature (72)..(72): n is a, c, g, or t
  misc_feature (78)..(163): n is a, c, g, or t
ctggcgccccccactgggantaatgccaaagatactcctccctcncctagagtcctgtaccctgaanccaancctgcnnnnnnnnnnnnnnnnnnnnnnnnnnnnnnnnnnnnnnnnnnnnnnnnnnnnnnnnnnnnnnnnnnnnnnnnnnnnnnnnnnnnnntgcccttcccacagtgggaaaaaaacaggatttagagcctgaaagcaaattcaaatctgtctgattccaaagtccatgctcctagcacacaattcaaaagagtaactaaattgaatgttgttgtagtctggaggccaaatcatgaatggtgttaaagtgtaatatctctgtacgcagcctgaatgccactatcattttaaattgaactgaatgatgctgaagtggattttgtttattgcaatgcgttttgcattgctccttaggc

SEQ ID NO: 458831 - DNA, 541 bp, Homo Sapiens
  misc_feature (228)..(261): n is a, c, g, or t
aaaattttgcaattctgattttaatctcatatattaaagtacacttctaagcatttatttggatagttatccacactctgtgcattagaaataacccagaagcatattaaaaatacacacgttgaaggcccacgtccataaattctgggcccaggcgtctgttctgttagcatatgtgatgttggaaaactactagtccagtgtctctcagacttcaaaatgcctagnnnnnnnnnnnnnnnnnnnnnnnnnnnnnnnnnntctaagtcagtcagtctgaggtgagtgcctgagattcggcgatcccgatcctaatgagctcccaagacgaggtagctgctgctggtgcatacatcacaccaatagcaaggcctgggcaccacacccagatgcagacgctcaccagctggcagctgggtccacactggagggcagggaaaataatcagactctttaggactgggcttccaacactaaaacatgaaatgattaacaacggactttacatacataatctcagttcatccacacatatacacac

SEQ ID NO: 458832 - DNA, 408 bp, Homo Sapiens
  misc_feature (299)..(299): n is a, c, g, or t
  misc_feature (327)..(328): n is a, c, g, or t
  misc_feature (397)..(397): n is a, c, g, or t
tagtgagaggttaatttcaaaaggttttgaaagagttctgtatctttataactagtaaagatccctcaggctctattttttcaatataacatagctggattgaggattttaatttttgtttaagggacaatttttgttgatgggtttgccttctgccatgaagctccaatttgaaatacttatgaaaatacttaacacatgttactaattaccctacagattattaaattcaagaacagttacaattcaagattacatcactataatttacttcctacttcctacatgttacatagttnccttgctttgacttccttgctttccacnntcttcattaaaaatttttttaactggagtctttaatcaaagggcaaaagtattcgtaagactgaatganaaacaaaaaaa

SEQ ID NO: 458833 - DNA, 423 bp, Homo Sapiens
  misc_feature (16)..(16): n is a, c, g, or t
aaaattgtcaaatgtnaagttgggcactgtggcccattccttccctaatactcttcccctgacttcccagaagagaaaccccaggaactaggtctccccagagtcccccttttatatgtgaagtcccactcccaggactcccaggaaacttgcaaggctgaagaaagagaggcagttagtcataggagacagttcagtcagatgtgtgagccaaggccagtgtatggtttagcagcagtggacagtcaggctctgtgaatcactcttcccaagctgcaggctgacagaggctgagatcctttccagacgtcttggcttctgggcaagttctggagaatctctcgcttcaatattgaattgtataacaacagtacaaggtcactgacgcagcctcaagttgtctcaaagtgaggcggtgtcccc

SEQ ID NO: 458834 - DNA, 462 bp, Homo Sapiens
  misc_feature (47)..(47): n is a, c, g, or t
ctggcttaagcctttagttgccctagaaaagctaacattactgtcanttttggtaaaggcaagaaaatttgtttaaatttaaaacctctcaatctttttttaaagcactcactgaaaaatgaccgagacagccagtcgccgttgaggaatcctctgttgtcaacatcgagacccctggttttcgggaaacccaatggcacgtacctcttttcattgttgctttcccctgcataccactgcagtggcgggaggcaccagggttgccctcatccctcttcttgtagcagccttgtcttttcccttcgtccaatgaattatccccaaactcactgcctttagaggacagaagtgctcctagtgggggtgttgctgggtggctgccccttgcccccaccaccaagttccttcctcctgtttgctgtttcacgggtcctcttagagcagaagtcccccagttaccac

SEQ ID NO: 458835 - DNA, 548 bp, Homo Sapiens
  misc_feature (515)..(515): n is a, c, g, or t
  misc_feature (521)..(521): n is a, c, g, or t
gcttaaggattataagaatagcagtaattggaagcttttcaaagaatgttggaaacaaggacagcctgcagtggtttctggtgtgcataagaaaatgaacattagcctatggaaggcggaatcaattagtcttgattttggagaccaccaagctgatctcctgaactgcaaagatagcatcatttcaaatgccaatgttaaggaattctgggatggttttgaagaagtttcaaaacggcagaaaaacaagagtggagaaacagttgttttaaaattgaaagattggccttcaggagaagacttcaagactatgatgccagcaagatacgaagatcttttaaaaagtctgccattgccagaatattgtaatccagaaggaaaattcaatttggcctctcatttgccagggattttttgtacgtcctgatctagggacccagggttgtgcagtgcctatgggaattctccaaggaaattttgagggaagaaggtttgggatggacatttttaagggnaaaggntttgaagggactccaagttgaaatacc

SEQ ID NO: 458836 - DNA, 433 bp, Homo Sapiens
  misc_feature (374)..(374): n is a, c, g, or t
  misc_feature (384)..(384): n is a, c, g, or t
  misc_feature (420)..(420): n is a, c, g, or t
atgagcccccacacctggacacaaaatacattatatactctaaagtataggattactttaagagaaggaaactaaaagtatgatggcttactttctaatccataacttcacagttttcccttcctgcagctttcacagaaaaaaccaggtgcctggtactgggtccttctctctgccaagcaggagtaaggcggcagagccaaccctgcatctgcagttagaagctctccatgacgacaggacgcagcttctcacccaactgtttgcagccttctcctttccacctactgattgactcctgagctgaagcctggtgttatgcctgtttgcatgtaagttttgccatggagttgagaacagttgagtaaaagctntgcttttttnaaagcttgttgcagaaaaggattcaaaaactttttngaaaaggctttct

SEQ ID NO: 458837 - DNA, 313 bp, Homo Sapiens
ccatgatttatcttcaacattctttatcctaccgattaaaatatctttcttacacttatgatctatgttagcatggtaagtgaaatccattaacttagggcctgattttacaaaacagatctggcaagcttgtctcaattcatgggttccttcgaggggatgtcttggagtcactgatgaagatggtttggtaactgcacttccaaaaaagtttccaaagtcatttctagggctgacttgaaattcccagggaaattctctgaaggcaaacaaactacctgggtccattcatctgcaagaaaaataaggaagg

SEQ ID NO: 458838 - DNA, 502 bp, Homo Sapiens
  misc_feature (20)..(20): n is a, c, g, or t
  misc_feature (25)..(25): n is a, c, g, or t
  misc_feature (57)..(57): n is a, c, g, or t
  misc_feature (62)..(62): n is a, c, g, or t
  misc_feature (286)..(305): n is a, c, g, or t
  misc_feature (344)..(380): n is a, c, g, or t
  misc_feature (468)..(468): n is a, c, g, or t
  misc_feature (470)..(470): n is a, c, g, or t
gcttctaaccctttttccgnccccnaccttctctgagggcagttccttccgcagcangtggnacacccattcctgctttcccccaaagtttcctgccacccattgtggggaaaagctgccctctctggaggacttcctgaccagcagatggctcacttttctccccaagtaggaggtgctgggagcttctgacatatgggcccctctaatcccaagttgctaaaagaattcaaaactgaggctgcagggcaaaagtgttcaagaacaaagggaaaaacactaaagnnnnnnnnnnnnnnnnnnnntccatcgcttcagtctagtttacttcccccacccacccnnnnnnnnnnnnnnnnnnnnnnnnnnnnnnnnnnnnnaccttttgatcttatctttctctgctaggtgcctagaaagttgagtcagagtctgctggactgccccctgctgtggctttctaccctntnctggtgcggcagacaagccaatgcgctcatac

SEQ ID NO: 458839 - DNA, 309 bp, Homo Sapiens
  misc_feature (127)..(127): n is a, c, g, or t
  misc_feature (226)..(234): n is a, c, g, or t
agaggtttttgttttgttttgtcttgtttctttctcaatactatttttccctcctctcatagctttccagaggaaggaaattgagtaagataattgaataaatgaatgaatacatgtacagcatttnctgatactaagtaaatacaaagtaaattttattgttgtcattttttattttactgttgagggtatggaagacatcatctgttgccagtacaagagctgnnnnnnnnnccttcatacatagtcacataaccctaattttgttccagtggcaatgtgctcagggaagatgagcttattccataa

SEQ ID NO: 458840 - DNA, 268 bp, Homo Sapiens
  misc_feature (45)..(45): n is a, c, g, or t
  misc_feature (143)..(143): n is a, c, g, or t
  misc_feature (193)..(193): n is a, c, g, or t
  misc_feature (254)..(254): n is a, c, g, or t
gaaaaataatggctttattattgtttttgtaaatatatacatganctccttcccaaatttcaaatagataataaacatttactatactgtattcataggatattgtcagcacaaatgaatggcataattaggggaagtaagancaaatatcataccattgattatcattagtcaaattatgaaagcacatcantaaaaataagtgtttaaaataattccattgtataatgttatttaaatctgtaacatatttngttgtaatctaaaa

SEQ ID NO: 458841 - DNA, 254 bp, Homo Sapiens
accatagcagtgctataattttaaagtacttcaaagccaatttattctcttaattagcttcattattcttgtctttgtgtgtggattacctaaactctccttccagagctactttaatgattatattcaaccaaagcactctaaaatttagagtataaattgtcttatatttcaaattagaaaagttcaaatgaagtttaattgtgttattttataaaaccttctaaaattattaaatggaggatataatctat

SEQ ID NO: 458842 - DNA, 330 bp, Homo Sapiens
acatgtaaattatactttattaaagaaaacaacaaataccaagtatctattaaaacatctttggacactttaaaagagcaaatagtgatcaacagaagtaaagcatatcactaagaaatcatttccttttttggcaagggaatttcaaagacagacgacacctgctgttatgaattttaaagacctcttttgttgaattcaggttaattccattctgcaagaccacaggggggaaactatggaaataggatatactgaaactctacggtataccaggctctttgcaatagctggatgtttataaggtggcaaatttgaatcaatttgaca

SEQ ID NO: 458843 - DNA, 504 bp, Homo Sapiens
  misc_feature (23)..(23): n is a, c, g, or t
  misc_feature (66)..(66): n is a, c, g, or t
aaggcccccaaaaatggtaaccnattaaatgggtgaacccaaccttgtccaaaacccatagttttnattggaaaagttgtccctggataaagaactggtggggacatcccctcaaacatcccaggactcatgggaagaggtaacagaaatagaaggacgacccattttttgagattcaaaggagctagaactggactcccagttgtgcatgtgtgctatcaggtattcgcggtatatctccaataggccttgaaactacaagttctacttgtggttcaggtttggattctagaatgatgttgtacacttcctcaaatgtggctccttgcagtagtcttccattccattctaatacttcatcacctggtctaagatgtcctacagtatcagctaaacttcctttttttactttagtaataaatgcacaaagccgacctgattcagtcatctttcctcctacaaccttcaagccaagcattgctcctgaatctcgaggtacacttc

SEQ ID NO: 458844 - DNA, 482 bp, Homo Sapiens
  misc_feature (389)..(416): n is a, c, g, or t
  misc_feature (433)..(433): n is a, c, g, or t
  misc_feature (440)..(440): n is a, c, g, or t
acgtctgtgcaggtggacggcagcgagggggcttatttcacttgcttctcagtgcaacttgataggagaatccagcatcttaaagttgcatatgtgtagcactaatgtttctttttaaatagttgggggaaaatgacctagaaaaccaaattgcagtttggtagccaaaattaactcttggtttatttgtcctttgtgtgtgaaaagtcctactattccgtgcgtcagacttcctcacagaactgttgactggttttggttcttagtactattgagatctttcgcgtcgatcccaacggccttagcgggcggcagactgggaataacaccttacacctttctgggcctggcattttctgtaggactttcactcttcaaggggagggagnnnnnnnnnnnnnnnnnnnnnnnnnnnnggcacaccatatggcantaggggntttggggaaacttctggcaggactgcaaatgggcccagggga

SEQ ID NO: 458845 - DNA, 527 bp, Homo Sapiens
  misc_feature (19)..(19): n is a, c, g, or t
aaatagcctttccagtttnccgttagcaaaaacggagagattaaaaagaaaaatcctagcactggccaataaggtgaggcctcaagggatatactgtgatttatccatccaaggactttattcctccttggcccactttgccagtcatgcttagaagtttccagaatccctagtgcatatggtgtgcaaaagtcaaaacgtaagaaaagaaaactcctcccttgagagtgaagtctacagaaatgcaggccagaaaggtgtaaggtgttattccagtctgccgccgctaaggccgttgggatcgacgcgaaagatctcaatagtactaagaaccaaaaccagtcaacagttctgtgaggaagtctgacgcacggaatagtaggacttttcacacacaaaggacaaataaaccaagagttaattttggctaccaaactgcaatttggttttctagggcattttccccccaacttattttaaaaaggaaacctttagtgctacacatatgccacttttaagatgctgga

SEQ ID NO: 458846 - DNA, 500 bp, Homo Sapiens
  misc_feature (33)..(33): n is a, c, g, or t
  misc_feature (83)..(83): n is a, c, g, or t
  misc_feature (88)..(88): n is a, c, g, or t
tgtccaagtccaccacaaaaaaatcccctaacnggacctgggaatttaattttttaaaacccaatccttttgggaaaataganccccnggatccaaacttaaatgtgggcctacccctggaaatgccatggctttcctcccatgtcccactcctaatttcctttgccaggttccgtataaattttgtaagtaggctttgtaaatcaaactgtggactaaatatcctggtgcgactctcaaattgctctctcaaattgcaggcacaaagtcttggaagttctgttgggcagaaacaaactggaccaacattttgcgtttctgttatcatccaacttcctatatgcagtcaatctgataacaaacaagctaatgagctcacactagaattagaaattataaaacatttggttttccaggggaactgggaatggttttgtaattaatgtgtcagaaggaaaactgaagcaaagaagttttcaattgcaccatatatgacagac

SEQ ID NO: 458847 - DNA, 391 bp, Homo Sapiens
  misc_feature (140)..(345): n is a, c, g, or t
  misc_feature (350)..(350): n is a, c, g, or t
  misc_feature (365)..(365): n is a, c, g, or t
caatttcatttcatttattttattgtaccaaactaccaggaccattaatttaatctacagctaaatctattattctttcatgttagaaattcaacaagaaaatttttccctaatgaaacctcacatttcaagcataaggnnnnnnnnnnnnnnnnnnnnnnnnnnnnnnnnnnnnnnnnnnnnnnnnnnnnnnnnnnnnnnnnnnnnnnnnnnnnnnnnnnnnnnnnnnnnnnnnnnnnnnnnnnnnnnnnnnnnnnnnnnnnnnnnnnnnnnnnnnnnnnnnnnnnnnnnnnnnnnnnnnnnnnnnnnnnnnnnnnnnnnnnnnnnnnnnnnnnnnnnnnnnnntaggnttcaacctggggganggcagagctttgcagttgagcttgag

SEQ ID NO: 458848 - DNA, 521 bp, Homo Sapiens
ctaccacgtggcattatacaaagccaagatttcacaacatttttgaaaattccaaatgacttacatgtttacaaggaccaaaaactttttgatattttaaaataagctttatcctttttaaccaccatgcagcatgctgtgccatcatgatggaagcctgatggctaatgtgaaataatgttggcatgtcatttaaaaggttaacagacatgaaaattgggaagtttaatattgtttaatacaaataaaattgtttttgaaagaaaggcatctgtgttgagcgtggcttgcttgaaaacttctcctgtctatcatctctgaacattattttgctcctcttgactttactcaaggggcctaatcctacagtgattcagggaggtttgaggaaagcagggactcatgaggactaaaaattaggaaactacataatcctgccaagcaatgggacacctctaaggctaccacctcacctaaaacttcattgaatcagaaaattagctgaactttccacaccagtc

SEQ ID NO: 458849 - DNA, 435 bp, Homo Sapiens
  misc_feature (193)..(204): n is a, c, g, or t
  misc_feature (239)..(239): n is a, c, g, or t
  misc_feature (279)..(279): n is a, c, g, or t
  misc_feature (377)..(389): n is a, c, g, or t
  misc_feature (404)..(404): n is a, c, g, or t
  misc_feature (421)..(421): n is a, c, g, or t
ttttttttccataatttctatgttttattttgactatctttaatgccaatccttcacaaatttgttacatacttctccgtagctcaagcagagattaacattttaaagtcatttaaagaataatcagcattataaataagtaatagaatgatattttacatttgtatagaaccttgaagtgtaaaatattccnnnnnnnnnnnngagtacagagtctcactctgtttcccagggctggnagtgcagtaggtgtgatcatgggctcactgtaggcctcgnacctcccggggctcagggtgatcctcctgttctcaggcttcctgaggtaggctgggggaccacagggccattacatcaccacggcctaggctaatggnnnnnnnnnnnnngtaggtggacagggnctgttgtttgccccagnccggggccttggaa

SEQ ID NO: 458850 - DNA, 258 bp, Homo Sapiens
tctaaatgcacaaaaggagatttatacatatggatgttgattcaactcttccctctctccacccagagcaaccaggcatgagctcatcctcaaagctgggcacacggggccactgtcccaggatgctgggtgcttggccctgtaaaggatgaggaaaggaacagcttttcattgcagacagtggggtccgataaggctgttctggccactagatggtggttgtgtttatcgaagactactggatgcctgccaaatatc

SEQ ID NO: 458851 - DNA, 461 bp, Homo Sapiens
  misc_feature (233)..(233): n is a, c, g, or t
  misc_feature (247)..(247): n is a, c, g, or t
  misc_feature (280)..(280): n is a, c, g, or t
  misc_feature (420)..(420): n is a, c, g, or t
  misc_feature (444)..(444): n is a, c, g, or t
agaatattgggcatctcccaatacattttaatgttttccattgaattggtctatgaatttcaactttcctggctagtttcctgcttaaaatccaattattgattttcttattaattaatcattatagaaaccattaaaaattatggcagtgtgataagttttaaagtccttgttaagcaaatgcactaatgtttaacctcagtatggtaacaaccattattttaaggactggnaactacagctcagnaagattttatttggtatagcaaaggaaaaaagnaacaaggctaaaggcataaaatctatgtgataggccaactgtatttaatagtgggcataatcacaggatctggaaagtgggatgactgaggctcctaacccactgggtttttccaacatcttctgaggacagaatcaccngagggggccttttaaaaaatggcnttgctcagcccagcccc

SEQ ID NO: 458852 - DNA, 448 bp, Homo Sapiens
  misc_feature (15)..(15): n is a, c, g, or t
  misc_feature (116)..(116): n is a, c, g, or t
  misc_feature (123)..(123): n is a, c, g, or t
gtcaagcatgtaatnggtaaattcctacaagtctgtttaatgtagcaaataatttcaattagcaagaagtacatagtttacatgtctgatctgcctcccccaaacctgtgaatacnaagtgcnatatatgttcaattatacagtgacaaatttttattcctttcagagaaatagttcacataaaccttaaaatgatatgttattagcacattctatttaaaataataaactgacatgacatgttagtacatagtcaggatgtatcaatcttaagagaattattttatgggcaacaagttcacattgtaatgagacagaagtaaactcctgatcaacagtgccatgctatttaacacagaataatacacaatttgtctttagactgtgaaggaagtaactgttctttaccaatgagatacaatctccaaatcaataaacagttaagatt

SEQ ID NO: 458853 - DNA, 351 bp, Homo Sapiens
agcattttgcagagaggcacagttttcacaataatattggttatcaccagtaagaatctctggagccaaaaaataatttagtaagtcagttactgaaggtgtggtttcacctcctggtttctgaggtacatctttattaacaagaatcttgttagattcgttagggacagaagtgttttcagaacagtaaaactcattaggaggactgcctatggttttttcattcacaagtgagtcacagatgaaggcagctgttgttggattataaactactggttcttctgaaggaccgggtacagaggcttgcattagaccaccatcttgtatactgggtgatgatggctggatcca

SEQ ID NO: 458854 - DNA, 569 bp, Homo Sapiens
  misc_feature (444)..(444): n is a, c, g, or t
  misc_feature (450)..(450): n is a, c, g, or t
  misc_feature (540)..(540): n is a, c, g, or t
  misc_feature (558)..(558): n is a, c, g, or t
aagtattaagaattgcatgaggttgacatcagagagttttcacacagtctttggacagagctacacaaaggtactttttaagcctcagtcagtggcatacagaggcccacagctctgcttacacatggtggcatgaacagccccggcttcagatccctgagtagcacaatgcaatcaagagcagctaattctcaccctttggcatctctttttgcttgagtattcagctggtagcagccagcaaggattgtttattaaagattttattttggccctgcagtgttgggttatatgcagactgtcacctgattttggtttatcgttttgtttgccctcatcaggtccttgagtttagagatactttttgagctttaaaataaggcaagtccatgagtgggtctcaatgaccagggctgtgttttatttcctcctttcctcagagtncctggntttgctcctaggaggtgcatgggacctgttggatgatgatggggatgacaaaggcaattagggcagataccacggttttcatgcttaggncccaccagggatggtctnggtacacacct

SEQ ID NO: 458855 - DNA, 314 bp, Homo Sapiens
aattatttattaaggttctactatatgccaggcactgttcccagtcctgggaatagagcagaacatacaatagaccaagacctcgctgtcccagaactttcattccactggaggaagacagacatcaacaaatacacaaaaggtcaaatgctgatcactgctgtgggacaaatgaagcaaggaaagggagacagcgagggctggggcaatggaaaaaggactctccccttcagaaccctgcaggaagtgaggttcaatccatgctggtaccggggggtggggagagagccctgaaagatggaacagctagtgca

SEQ ID NO: 458856 - DNA, 580 bp, Homo Sapiens
  misc_feature (71)..(71): n is a, c, g, or t
  misc_feature (80)..(80): n is a, c, g, or t
attatggccagacactccctggcatagtttttggagtaggctgtacatcttggtcagatggaaggaactgnccaccaacnagtgccaaacagaggagcctgaaactagagctgttacgaataattctccaagtatttagactaaacccttttgtgaagatggagcatgaagcaaattatttggaattaagccacaagaccaaaataaaagatcattttcacatttgtattgattcattattagacacactttatcagaaaggtttttactggaacatcctgatgtgagatggtcctaagattaacaggcagcagccatccatactctctctctctgtgtgttgagtattagaaccataggcccacatagctgattgccactcagatattccttaggcacttcaaatggaataagttcccaattgtattcaccgaggtatgttccttttccttttcctatagtctctaacagtcaagagaacttggaagttcagccttggttggcttctcagtttccctcaactctctctgtctctcagattcctgagcccaaccctagactttctgaattcaaatctttg

SEQ ID NO: 458857 - DNA, 536 bp, Homo Sapiens
  misc_feature (361)..(361): n is a, c, g, or t
ttttttttgctatttctcccattttacatttcttttcaattaacaaagaaggtgccatccttcaagagtgagacgtgacaggtgtactaattcatttgttccctggtacgctttgtaccagttctcttaccctttcacaatgtggcacttcattaccactgagctcagcattggatcagacaggagaaatggtatccaacaggagaatgaaaaaagtatggaaccagaaaatgccttggactcctcttcaaattttgttttgtagttattctgttgggaagtaaattcacgaaaaatttaagtatctttcctgttaaccactaactctgatatcttctccaaatttttcatgagggtgttnttgattgccattttgcagccaggaatgacaataaaaatacccttttaattcactacatttgatatgcacataattcctttagtgtgaaacctactagtaagtagttcaatttgccatttctaaaggagtagtgagaaactgggtgatcgaatacatttcttataaggacctggca

SEQ ID NO: 458858 - DNA, 388 bp, Homo Sapiens
tattttgaaaacagggttaaatacaccatagtccaaaatatgtatgttaccttacatgtgtacaaaaacatggtagttgtgttttttccctaacattatcctaattgcccttcctaatttcaaaattaataaattttcaatgcacacaaattggaaaacaccggaaagtatttccaatgtcaaactacatttatcccaataccagtttattagcactgtctcatgaagaaagtcaagtgatgacagttctgatccataaagacatttactatgttggctcatctctcaggcgcccatctctactatttctacaagttacaaacagcatttcactcatataacaaaggtggaggtataaactgatatcacatctttatttacttttttg

SEQ ID NO: 458859 - DNA, 424 bp, Homo Sapiens
  misc_feature (121)..(121): n is a, c, g, or t
  misc_feature (264)..(264): n is a, c, g, or t
  misc_feature (367)..(367): n is a, c, g, or t
ttttttttgtatagagagagtttctttcactctgttgcccaggccagtcttgaactcctgggcttaaagcagtccacccacctcagcctcccaaactgctaggattacgggcgtgagcacncatgcccagccaaaattaagattaataaccctatgaagttggtaaagttttcatccccattttgtcctggtatccactacaactgcattacatcacgtttgaaactcatactctaaaatgccatccttcctgcctcttatccntggaaaacacaaagggaaccactgagttcacaaagactaggattgttacttatcaatacccgttatccaaggtaactcagtaggctaccacattagcctgggntgcaggggtgcgcggcctattagttcccaggctacttgagaggcttgaagcagaggg

SEQ ID NO: 458860 - DNA, 341 bp, Homo Sapiens
gcaattttagcatagaaaggagtctttgagtatgtacagttttgaaaattctctttgagataattgatttcatattctgtggctttcaacctccatttacctcttgtcattccaacatctttatagagaaataaaaacccaatttctctttcaccatttagtttgattatcatctggattttcactcaagatgcagctcctaagattattgttatgttaaattcataaactccttcacctttaataattaaggaaacaataccagtgttgataaagatattacaaggggtaatttcatgcaataaacatgtaccgtaagttttcttccacatattttggga

SEQ ID NO: 458861 - DNA, 482 bp, Homo Sapiens
  misc_feature (225)..(225): n is a, c, g, or t
  misc_feature (383)..(383): n is a, c, g, or t
  misc_feature (435)..(435): n is a, c, g, or t
  misc_feature (457)..(457): n is a, c, g, or t
acatgataagattatcttttattagagatcttatattacatattcccaaaaagatataaaatcttccaagagaaaatatcaaaacctgttgattccaaggtgaacaaaatgatcaaaatgaaagcaaacattttcttccagacaaaggaatatcaaaacacttcggcacaagtacaacaaaggcatgggaagatcatgataatgttttacatcacattttacagncattttattttaatcagtatttgtagaaaacaaggatgctgagttcttgaacactgcagtcacaaactcaaactaaaatttccaaaaaaagggaaaggaaaacactggaactacttgggtcaactggaacatctgtaattaattaaatgttaacgganacctaaccaattaaatatggccactggggttcacaactggaagtgtatgggntttttagtgtgttgcccggggnctttaatttttttaattcggttttg

SEQ ID NO: 458862 - DNA, 388 bp, Homo Sapiens
  misc_feature (92)..(100): n is a, c, g, or t
  misc_feature (131)..(172): n is a, c, g, or t
  misc_feature (194)..(194): n is a, c, g, or t
cttgaaccccggaattttaaggctgcaagtaaagctgtgatcatgcccacaacattcccacctgggccaacagagcaagacaatttctcctnnnnnnnnntaaggcaggcagggtggctccatgccctctnnnnnnnnnnnnnnnnnnnnnnnnnnnnnnnnnnnnnnnnnngtcccaggagttcaagacccancctgggcaacaatagtgagactccatcgctacaaaaaattttacaaaaattagccaggtgtgttaacgtgcctatagttgcagctacttgggaggctgaggtgggaagatcacttgaacccgggaggtcgaggctgcagtaagctgtgattgcgcactgcactcagcctgcatgacacagagaccctgtctgtg

SEQ ID NO: 458863 - DNA, 456 bp, Homo Sapiens
  misc_feature (425)..(425): n is a, c, g, or t
  misc_feature (438)..(438): n is a, c, g, or t
actggtttttcgaagctttatcaacatttcaaatattttattattgcatcaccagaactataacagtgagaaaaggtatagttgtttctaggcatgttaacgaagcaggtgtttcctttgtgtcctatctttgcattaattttaaataaccttcaccacagctacagttttttttctgggctctatcagctttaatgcaacggcagaagcttaagcaactggtcatgagaggtcaagtggtttacttctgtatcccttccatgtacaagagacatccatttgattctcaagagagccaaataggtcagcctcttcagcgattctaaaagatttcaagagcagaggcaggaagtagactgggaatttagttcaattcatttctgaggttgccctaaggtagggcaagtttaaattaactttgtttnctatggaaaaccnttgggaactggttaaact

SEQ ID NO: 458864 - DNA, 369 bp, Homo Sapiens
  misc_feature (359)..(359): n is a, c, g, or t
aggaagaatgtgtttaatatagtatggtatattccttaattacaattattttattattccttacagaaaacatacaaataaaagtccttaaaagaataacctcatttaaatgtaaagcatcatactattctagatgtctgccagtgtatactacattactaatcaaccactacttactctgaaattgaggtaacacagcctgaggcaacaaaatgctctgacaattactgaaacgtttatctcctttcacaaagcaaatcaaaagcaatgacattacacaacaaaataagcaatttaagttttaagaaaagcggtacatgatacagaaatagactgccaaaaatgaaatttgccagtantataaatttc

SEQ ID NO: 458865 - DNA, 492 bp, Homo Sapiens
  misc_feature (53)..(53): n is a, c, g, or t
  misc_feature (58)..(58): n is a, c, g, or t
  misc_feature (481)..(481): n is a, c, g, or t
aaaacggggcaagggccaaaaagtgccattttccaaaaactcccaaaagttgnaggcnaagccgaattgcccaggaactacactgtgagtaagcaaggggttcaagcccagcattaatcccatgcctgcaggtgggggcattccctcccgtccagcctgacagaatgggcaaaggtcatgattgttttcatcctaacctgaaccaagaggtccttctccccaacatccagagtcctccagcccatcctctgcacacacaagttacactcaacagtggagcatccttcagaacacgatatctgagtcagctatgatccctgcaggtaaggggcctggagatggcagcagggggtcagctctgcgcacccctctggagctcagagggcttctaggagacttgcagcctcctggtcttagccaagagctggcccaaggactcagggtctgggttctgctcaatccagctccccattggccagcncccaagcccgg

SEQ ID NO: 458866 - DNA, 323 bp, Homo Sapiens
  misc_feature (297)..(297): n is a, c, g, or t
  misc_feature (309)..(309): n is a, c, g, or t
gccttcagctagagtttattgagagtccccttgggcagacctgggggataggggaagccccgcaagcaccatggcccctcagaggccagccgccggggccagagttgtgtctcatcagcaccaaggagagggccaggccaggcatggaggaccccctgggagtttgtgttgatggaacttgggggaggcagggctgaaaagggacctatggcaggtaaactggcgaccaagagttccccaaccccctgcccccagaaaccaagggcccctttgccagagtccacctgcctgcctcgngggccccacctnacaccaggaacagc

SEQ ID NO: 458867 - DNA, 479 bp, Homo Sapiens
  misc_feature (29)..(29): n is a, c, g, or t
  misc_feature (34)..(34): n is a, c, g, or t
  misc_feature (42)..(42): n is a, c, g, or t
  misc_feature (62)..(62): n is a, c, g, or t
  misc_feature (71)..(71): n is a, c, g, or t
  misc_feature (114)..(114): n is a, c, g, or t
  misc_feature (123)..(123): n is a, c, g, or t
  misc_feature (127)..(127): n is a, c, g, or t
tggccattcccagtgtagcagctgggtgntttcnatcctttnaactccttagagcgggagantgtggcctnaggtaatggacataaaattggcccacgtagaaaatcaatctcnaaatagacnaatnaatctcaaattttgcaacccaaactgtctcaaataattcattgggtgttaaccctgacattgttaccagtgactgaaatatccatgttaccacattgtccagaagtaactgacaacatctgtgtccagtatggtcttcctgttgaattatttgatgacttctatttgcaaaattttatttgttcctgacattgaaaccccaatttaccttaccaacagtctatcatttgtcttgaggtagtgttataataaagaattcagcaagacaatagaacatcataatgtttgcaaaatgtgcttcaaatgccaccatgaaatccgtatttatttagacggtagatgacccaatgttg

SEQ ID NO: 458868 - DNA, 514 bp, Homo Sapiens
  misc_feature (47)..(47): n is a, c, g, or t
  misc_feature (367)..(367): n is a, c, g, or t
  misc_feature (492)..(492): n is a, c, g, or t
  misc_feature (502)..(502): n is a, c, g, or t
catgagggagacaggcaaacctgtgtgggttgggggtgtcttccttngtaatagaaggtctcgtggtggggcatgctgtctttcgtttgaggggatgatgggcctccagttggtggcgaatcttttgaaacttgtttttagcattcccaaatttttttagagaaaaattcagaaagtacagttgcctttggcgtttcatagtcaatatacaagcgagacacaagtattctccatggatgatttttgtgttgtcatggaatgaaagaaaaataccagtgggtctttactggccataatattttcgttttctcagttggcacatagctctttcgtgaattcacttctttccatcccctctctctacttntaaatattttatggggcagtaagctcacaatatgtgctagcacggctgcttctctccagggggtcaggaggggttaataatgaggtgcgtaacagtgactctgtaaaaacccttttcaggttaanaatggcctgnttttattgaatc

SEQ ID NO: 458869 - DNA, 445 bp, Homo Sapiens
  misc_feature (151)..(151): n is a, c, g, or t
ttttttttgaataacattttgcctaaagccgcacgttaaggtacatggttaacttcttggtctctatttagccctatttgtttaaaaaccagtgaaacatagcgaaaggggaaatttcaaaggctccttccctttctccctcccggggagnaaggaactagagtcaagcgcggtcccaagaaggcatctgctgaagctctgttgctgctgtgtactaagaatcagcgtcctatgcacaatgaaggtggagctcatggaggggagcatctcggcacacagagatatagtccttcaggggttctgcttggggctttcagtgaggctgggagcttcttgaggggaaggcccctggcccaactgttcccttctaccccaaagctaagcttctgcacccacgacaggcacgcatggctttgggtttttgacccaggcaccagtttgccac

SEQ ID NO: 458870 - DNA, 541 bp, Homo Sapiens
  misc_feature (448)..(448): n is a, c, g, or t
aattagcattctagataacacaagggccatgattcactaaaattccaagctactgtaattttatggcatttatttgcaaatgttctttgtatctcattttatctgtagcagtccccactagtctaccttaaccatcttatagctctggtaaattaaaacttacgtagactttatacaagatccattggccgtattaaacctcccccactcttagggcttagggcggaagggacgaaggcagggctgataggacttttaaaaggataaaaggagtgggggcaagggaggcggaaaatacaggctcttgcagataccctccgcgctgccctccacacccagcccactgctctacaaaggtatgaatgggaatgggcttttctaggaaaagggcttccaaggaacattaaaggaattcctttccctggggaggccccgtgggagggcttgnagccagcctttggaatttggggctttattttcttcaaaattcccttttgattcttgggcattttttcgtccaaacatgggtaccatgtttagg

SEQ ID NO: 458871 - DNA, 345 bp, Homo Sapiens
acaaggtagacacaaaagcattttgcagtactttattgaaaaatgtcggtggtatctcctagtaatcaaacctacacctttcaagaatcacggtttaattacaagactcatgaacataaaaaaataataccctcggcttatttcctgtgcacacactcacaaggagctgtgaatgaggtatagctgagtgcgtggagaggcgggcacatcccttcctaccatccagccccttcgctgcatgacccacggtcctaaatttgcaaattgtgactcttaccatgaggcccactgacagacaccctgtagggattgtgtcaggtcctcactaagtgacacagggttggc

SEQ ID NO: 458872 - DNA, 917 bp, Homo Sapiens
  misc_feature (15)..(15): n is a, c, g, or t
  misc_feature (26)..(26): n is a, c, g, or t
  misc_feature (35)..(35): n is a, c, g, or t
  misc_feature (93)..(93): n is a, c, g, or t
  misc_feature (132)..(132): n is a, c, g, or t
aaccgccgggaacangctccgtgcantcacgaaanggcattgctcctcgctgcaacgcggcggcaagcgggccccagcaggtggacgaaaaangttgaatcctttcccagaaaatcgcggttttatttgcanttgcctcctcaaaaagctgggagtaaaatgtgccttgttggttttgaagaattgtggttcccttcgatgttattgccttgttttctttttagttgaagatagcagtttaatggactgaaggagaagaaatgacaaccgagactcaaatatactgaggagtttcatcacttcttctcgattgagactaggagaagcatcagcagctgcagcggcgtcaccactcttaggctggccaaattcttctataagctccttctggataagctggaatgcgtgctcagttctcaccattatatcaagagccccagatagtgttttcaactttccaacattgctattctgactggtcatctgaaattcagcaaatgctactctctctagctgtactctaagcagttcgcagggagcatctttcagcagctgaaacagctttgcggccttgctgtaatgaagatctgccagcacccggtgttgtttcctaaggtgttcatcaccaacctgattcctcagacagctgtggtacatggaggccagcctgtgatggatggttgcagctcgatactgacaaaggggctgtcgagcagacactgaatccacatcgcagtattttagggacttcatcatggcctcactgacttctttctcaatctgctcctgagcttttctagataacggagcataatcttgctgtagagttgccatagtaaagtaagtagtggacaattcccagttcactgaatcccaaacagctgggtgtatgtctcgtgttcccaatgaccttagcg

SEQ ID NO: 458873 - DNA, 382 bp, Homo Sapiens
  misc_feature (114)..(159): n is a, c, g, or t
tagagaaggatttttaactgtttaaaagcaattgattccagttattgatctcttttctagacctgtgcacaatttggatttaataatctgtcttatgtaaattaaatgtggtgnnnnnnnnnnnnnnnnnnnnnnnnnnnnnnnnnnnnnnnnnnnnnngaggtgggatcttcctgtattgcccaggctggacttgaactgggctcatgtgatcctgcctcattctcccaagtaggacaggattatagggcacaggccactgtacctgggctctaaatgtacacttttataactgctagtttgggagtttttctctcattgaggaggattgctttgtaatggcttcccaatgttaaggaatttttttgtacttttcttatcc

SEQ ID NO: 458874 - DNA, 545 bp, Homo Sapiens
gctagagatgggattttgctatattgcccagggtgatctcaaaggatcctcccaaagctctggcattacaggggtgagctatcacatttggcccacatttattgggcacttaacaatgtgcctggcaaagtgctaaccacttgatatgcattatctcacagaatcttcagaccaaacctatgatgtaagtactgttcacagtatagataagaaaattaaagaaacttgcccaaggccacaaagccactaaggggtgaaccatgattcaaacttaggtttgtctgtcttcagaagttaacttcctaaccactgaatcatatttcatctgttccactaaatacatttttctgggggcttagcaatgccagtttatttacctaggattattcaacaaacgagtggtaataccggggcttcaaactcaggccatcaacactaggtcagtgggatctttcatcaccttacactgccccacaataaccccaacagtaaccctgtatacagtcagctgtattcacaggccagacacaagaggaaaaaggaga

SEQ ID NO: 458875 - DNA, 450 bp, Homo Sapiens
  misc_feature (212)..(212): n is a, c, g, or t
aaatccttgaatgaattttaaaaatgaatgtgtatcactagtgccctgattcttaatctgatcagtaactgcttgatgactgaatcaatcgctgatggagggaacaattatgcctcattcactgccgtaacatgggaaccttgcatacagcaggtgcttaataaatgctgggcacatgaacagatgaagagggcttggttcctcccaattcncccagggccaagccctgttgctggcatgcagtaggcactccattaatgctgcctgtgtgcacgtgattgcttagcaagagctggctggacaccaccccacacgagagccctctgtggcctgccaaggggcccagaggtggccctgatgtcctcagtaagcacgtggagcctgggccaccgatggctgctttggcatctggctgctacccctcagagtcatcccggacagcactagttc

SEQ ID NO: 458876 - DNA, 510 bp, Homo Sapiens
ataactgtgagcacacagcaaagtttgagggatacgagtcaccacagttccctgttttcccctccttggacagattttaagccatatgaaatagtaattaagaggacaatgacacatagactctcctatttggttcccttttaattttttcccacagtttgtgttccccaaattcaggaaactgtaaatactattggaagcttggaaatgttgaggaacatgactattacttaaatgatttctaaagagggtgtatattgtattctaatgaaaccattaatgaagacaaatatatctaaaatttcttgagaatcttgacgtatgcaatctatgtttaactaggaattacaagcttcaattgacattatctttgttcctgtcttatacttggatttcaacaaacatgtatttttaaaatttacttttatcttaaaagtttttctttagagtttgcaggataaatctgacaccaaactagaagatcctggactacaatgagtgacagaagag

SEQ ID NO: 458877 - DNA, 544 bp, Homo Sapiens
tactttttccctgtaacattcctgtcacataatctagctgccacattcagtgcagtagagaaatgatgacgaagacaggagcagatgtttgttgtaacttactatgagccaccttttaagtatttcccatgtatcaactttcttaatccttacaatgactctaagagtccttttactctcctcattaagagatgaggaaattgagccacagagatgttaagtaatttcttcaaggtcacacagccagcgaagggcagagcttttaatcactaagccgtttgcaatgattctttcatttctaggtgatattgttagggaaaatgttttaagcttcatctgggaatctgccttcaagtgcctgtgatccgctgggtcctaattatcatcatttcagaacaaaataagcacgttactctaaatggaaatggttgcaaccctggatcagagatttacgtccttgcttataaagaaggtgaacatgcccccagtgtttttggtcagtttctctctctctcaggcagcatagtgagaaattaagatcctg

SEQ ID NO: 458878 - DNA, 303 bp, Homo Sapiens
  misc_feature (13)..(13): n is a, c, g, or t
  misc_feature (26)..(26): n is a, c, g, or t
  misc_feature (46)..(46): n is a, c, g, or t
  misc_feature (49)..(49): n is a, c, g, or t
  misc_feature (68)..(68): n is a, c, g, or t
  misc_feature (158)..(158): n is a, c, g, or t
  misc_feature (176)..(176): n is a, c, g, or t
  misc_feature (215)..(215): n is a, c, g, or t
  misc_feature (264)..(264): n is a, c, g, or t
  misc_feature (274)..(274): n is a, c, g, or t
ggtagagatgggntagtcgtccaggngctggcaagagacacggtgnttncccaagccttgggccaaanagggagtagctttggaagcggaaacacctagatgccttcctatgatgcttggttctggggcaggtgatgaagagcagcagaggagatggngaaaccccagagaagganttggggtcaagaggatttttggaggcagcaaggtttggntttaggcaaagacgtggaaagaaactctcagctgagaggtccttagaanccatctactntctgcttcttcatttgactgatgcctggg

SEQ ID NO: 458879 - DNA, 512 bp, Homo Sapiens
  misc_feature (47)..(47): n is a, c, g, or t
  misc_feature (460)..(460): n is a, c, g, or t
  misc_feature (466)..(466): n is a, c, g, or t
  misc_feature (474)..(474): n is a, c, g, or t
  misc_feature (483)..(483): n is a, c, g, or t
agagaatatttcatcttcttaaaggaacatcactaaatgttgttgtncttaataactccaaattttatcacattggaacaaccgaagaatatttgttttactttacctcagataacagtttaaagtcagagctcggcttacagtccataacttttagtatctttccagatataccagaatgctctggcaaaacatcctgtatcattcaaagcatactggattcaagatgttctgtggcacctggctcagttgtggagtattccagattggggcctgatgtttcagttggggaaaactgcattattagtggttcttacatcctaacaaaagctgccctccccgcacattcttttgtatgttccttaagctttaaagatggaatagatgcttaaaagtatggcaactatgggcatttgggagtgcaaggacaacttggaaaaggagtgtggaaaacattgtncaggtnataaaagntacttccantctttgggggtccgtttcccgtccaggct

SEQ ID NO: 458880 - DNA, 540 bp, Homo Sapiens
  misc_feature (364)..(364): n is a, c, g, or t
  misc_feature (428)..(428): n is a, c, g, or t
gggattttgagaatggacttaactttcctggaatccaatgctcctggagatttatgacttttccagccatcagccagctatctagagaagatttttgtttttcttttgcaacagtttcttcagtcaactcattcactttcaaataggagcagcactttgaaatcctttttcttcactgtggattaaaaacatccaagaagccatctctgtcaagcagaattgtcatctgtggtaataagtgaccatgtcctaaatacctttttcttagtgaggagttggtcattgtctttggcatctgcaacccctgttcaggcatgtgacctgctaaagaaatacagcctacactaccttgactactgggganaatgatacttcgtaaaatgtaataaggcaacctgttccttggcctttatcttatgttttccaantattactgtatctgttattggtctactattgacaggatggattcttcttaccgccttggatcttcaactaaatatggaattaggggtcatgcctggaaatctgaactgccgt

SEQ ID NO: 458881 - DNA, 531 bp, Homo Sapiens
  misc_feature (478)..(478): n is a, c, g, or t
  misc_feature (504)..(504): n is a, c, g, or t
ggattttgagaatggacttaactttcctggaatccaatgctcctggagatttatgactttcccagccatcagccagctatctagagaagatttttgtttttcttttgcaacagtttcttcagtcaactcattcactttcaaataggagcagcactttgaaatcctttttcttcactgtggattaaaaacatccaagaagccatctctgtcaagcagaattgtcatctgtgggtaataagtgaccatgtcctaaatacctttttcttaggtgagggagttgggtcattgtctttgggcatctgcaacccctgtttcagggcatgtggaccctgcttaaaggaaatacagccctacactaccttgactacttggggggaaaatggatactttcggttaaaatgttaattaggggcaacctgtttccctggggcccttaatcttaatggttttttccccaccatttactggtatccgggtnattgggggctaactatttacaggggnggattctttctttcccccccattggag

SEQ ID NO: 458882 - DNA, 533 bp, Homo Sapiens
  misc_feature (25)..(25): n is a, c, g, or t
  misc_feature (38)..(38): n is a, c, g, or t
  misc_feature (66)..(66): n is a, c, g, or t
  misc_feature (514)..(514): n is a, c, g, or t
cctgaaataggctcccttatcccangaccccacagcanggatatgaaaacccttgcctgaaattgnaacattgttgagtggaggcctaaattctcctcattaacataaaaaaggaaagagataatggatctacttagttggaataagacaaaaaataaggcctttattattccctagtgacaggtatccaaggtggaaaaaatctgggtgcatgcatggttatctggacggtgagtttcattctctaggctgtactataaaccatatctccatagccaatgcagacttcgtaaattgacccgtttcaataattcaaagtggtagtatacagctactacccttgacaattggggttaaggagagatacttcaattcccagaaaagcccagagatgagataacactgccatggtgaaatggttcatctgagattaagcacatgtaatactgaaaagaggatagattactaagtgaatcagagagggactagatctcagaactaatttcctatcctnacaggtattcatcattcac

SEQ ID NO: 458883 - DNA, 329 bp, Homo Sapiens
  misc_feature (184)..(184): n is a, c, g, or t
catcagcaatgcttccagtgaacaacaggctattcattgttacgttttcagggagtcaaaaattatacatggtttttcagcttcacagagggtcagcaccccctaatctacattgttcaaggaccaactgtacttgtagataaagctaagctttctggaaataaaagttttttaaaaaattaanagctaatattatagatgttttgctacccaatatgtgctcaacaaacgtctgctcataaatgatgaagtcaaatggggaatagacagctgccgtctctaagtctctggtagattgtttgtaacatagccacaattctctccctaaa

SEQ ID NO: 458884 - DNA, 299 bp, Homo Sapiens
gacaagtacattatttaaaaatgcccacccactaaatattacattcctaacttttcccaatacacaaatatgcttgaacttttaaaagcttgtttttggtcgtgcttggtttggaatgtgaatgactaaaactacctttagcaatttcccaaagtgtaagttcaaatgtacagagaatttttttcctgaatgcccaacacaatatgcagttttacaacacataccagattcttagattcatttggtgaaggaagcctctgaattaaaacttttaaatatttctgatttgcaaccagacg

SEQ ID NO: 458885 - DNA, 573 bp, Homo Sapiens
ttttttttaaaagtataaataaacagttaacagtttattgtatcagaaaataatttaggaaaatgaaaataaaaccagttttggtatacatgggtgagggggcgggggaataaagttctaaaacattcaatgcaaaacctgtgaaaaaagaggccatgtggctgttgctgtttaatttcttgtcctgtggttcagcttcaggtttgtgaatttctagttccatgggtgagctgaggaggaggggggacaatgggctccatctttaaataaatgcaatgagacctgggtgaattcaagggttatttgaacgcactagggagcatccacacggacctgggtccttctatttctcagatctgtgactcttaggacagatgccccatgggggaaaatccagtcaatagtttgggatgttttcactgagtatcctgtttattccataccaatgcccagatacggccaatggccaatgcttgatgttgtggaagtccaacatccaaattggttgaccaccttttccacttaatcgtagacactctaatgatcaatgggaagttttagtgcatgacaagt

SEQ ID NO: 458886 - DNA, 369 bp, Homo Sapiens
  misc_feature (112)..(112): n is a, c, g, or t
cacccaaatactgcaaaacattcattgatctgaataacctcacagatgcacttatcttactcccataaattatgtgcagacttaacttgtgagtttaaactccagagacagnaagcctgctccagagaagaaaaggacaaattctgggtttgtccagctgatgcaaaaaagttcctcctgcctccagtctacatttttgcatggtgaatcccttaattcatctttccagaacctactcagagaaaaggagcccacaccatgtattttaaaactggcaaggaagggttgctatggtgttcatagctgtcattcagagactggtctaagataagcgttgaacacactgccgaatcattccttggcactttg

SEQ ID NO: 458887 - DNA, 422 bp, Homo Sapiens
  misc_feature (112)..(112): n is a, c, g, or t
cctggtgaataaatgaaacatgggtggatttgaatagaactggaagagttggccctctcggtcagggcaggagttgagcaggaagctgggccctctgcagggtggccagagnctgtgagaggtggggtagggagtggtgggttccgaaggatggaaaaagaactctgactgcagttccaacccatctcaggctctgagagctaaacagcattcccacgggccccctctggccctgctcccagacatggcttgtgtttgctttggacttttccatgcatccgtttacatctccagatcccacatatgggaggctcagctcttcagggctggcttgggaaacggaaacaggtaacaacggcacagggggccctgctggctttttgctgggagattcaggaaagggacattttgatttcagaagg

SEQ ID NO: 458888 - DNA, 469 bp, Homo Sapiens
  misc_feature (35)..(35): n is a, c, g, or t
  misc_feature (40)..(40): n is a, c, g, or t
attttccgggaaaaacagagttccaccttggaatnacaantccccacctggttaaaatccacaattccacccttatagttaattaacttatgttccaaagatagtcctttccctggctatataatttcattttcttaaaaagcaaaacactttcagtagaaaaaatttacatatgaaagtcaaaaacaattatttcagcaaaaatggaaatcaaccaccgtatcttttcttgagttcttcgacagaactatccttcaatcctgacttgtctatgtgattaaataatgcacgtgcaatctttttctctgtttctgacataaacatcactgccatatcaaacctttttagttcagaaagtctttgtaagatttcaaagatgagtaatggcttttctttctcaatgtaaaagtcatgcagaattttaacgatctggttgaatacatctggatccagatttttctgaaacaac

SEQ ID NO: 458889 - DNA, 488 bp, Homo Sapiens
  misc_feature (20)..(20): n is a, c, g, or t
  misc_feature (54)..(54): n is a, c, g, or t
agaaacatctaacccattcnctctaagctcgctggaatacaatccaatttgtangcccccctaagaaacccctagtatgtaggagtcagacagagatggactggatacttcagccagagttcaggatggtgctggcttccatattcttgctaaatcagtttccctaagtcaagtctataacgtcctgtggacaatcattcccattttctctattacactggtcttttcctgctcctggaagatgactatctcctttcccatctccaacttcttcttatctcttgaagctgattggaattggtgccctgttgttccacatggaattgatatttgcttagtatttattttagagcccttgtttctttccttactacttctaatttctctacattctgtttactcagaatagactacacacaaaaatatatgatttaactctataggtgaacaaactcccaagttcaagatgttagttactattggtcaac

SEQ ID NO: 458890 - DNA, 689 bp, Homo Sapiens
aagaaaatgcaaagccttggccaactctcagaaaatattattctaattgctgagacaaattttatgctatgagctaattattgaaatattaagttgctaaaaccattgagtagagagaaatgaatatattgtctcatcactgactaattccaccaactagcacctttcttacctaaggctggttttaaatcaacacgcatccaactcccatctactgagtcttaactctttttcaaattagcatgctcagtattttttgaggtaaagagaggtattagattaagtggagcaaggcttatattcatcatttcactattttattcagtgactatttgagcacctatggcatacagaaataactacagcaggacaaaattcttgttttcatggagattataagagggaaactagagagtcgttttccctctactagaaggaaacagatagtgaacaaaacagcatctaatattccatggagtgttaaaatgttgtgaagaaaaacaaagcctgtaatggaaaagggggttctcctctgttttagacagtgttgtctgtgatgtcctcttggatacagtgacacatgagaaacacctggttcagaaaaggctagtgtgcccagaacagagagctaggagttccacttgctgaggtcaagcaagcagcaggggccagccagctcctgcagcatc

SEQ ID NO: 458891 - DNA, 418 bp, Homo Sapiens
  misc_feature (246)..(255): n is a, c, g, or t
  misc_feature (302)..(302): n is a, c, g, or t
ttttttaatctttagatgtgtatattttacatttgttagggaacacagagtatagtctacagcattgtgtacatttcattacctgtcatcttttagcttaaaataataaatgtttcgcaagtgccacccccttcaaaaacatctcatgttctttcctactgtggatgactgagatggtgtgaatatttattgatttgtttaaatgtgtcaaccattatatggtacctgtaacccaagactaaaagnnnnnnnnnnaatggggttctggcaaatggaatataaaaattgggttatccattttnattatttatttttgaggacagaggtctcattctgttccccggggctgggagtgcagtgggccggggattatcgggctcactggccaacctctgcctcccggggttcagggcgattc

SEQ ID NO: 458892 - DNA, 570 bp, Homo Sapiens
  misc_feature (25)..(26): n is a, c, g, or t
  misc_feature (513)..(513): n is a, c, g, or t
tttattacttgaaatcttggcaggnncttaatagggaacatacatacagctatgtaactgtgaataattgtatatatctctagttaagaatgagggaatggggaggtttgctttctaaacaagtgcattctgaaattgacttaaaaatttttagtgtgggtcctaaagtttagagatgggcaaggaggtctctaatccaccgcttcccgcttgagaagggaggggtatcaaaattgagccccaagctgtttgttccagtgtaccaagcactgactttatgcctttggcctgggagatggcagaagtgaaagctggccatctgcaaaaagcagataagtgagtttgaaccttttgcattttgttagctcagtcagtcctcatcgtggtcctgaggcataggtactgttgtaccaaggtcacttatctaacaaaataacccttcatgtattttaaatttatttgacaagtcttgcagacaatccttattctaaccagctattttccttaattgcntacagcttgacctaccagtatttccggagttaaccagccaattgcaaaggtttgacc

SEQ ID NO: 458893 - DNA, 504 bp, Homo Sapiens
  misc_feature (353)..(353): n is a, c, g, or t
  misc_feature (449)..(449): n is a, c, g, or t
gattgacaactttcacactttattaaaatctacttttttctgagattcaaagagctacatttttggttagtgtatgtctactataccttttttcatcctttcaacatcttttgtcacattttaggtgatgctcttgtaaacagtgtattgctagacctaaaaatccaagcttacaactcgtcctttacctgatacatttattccatttactttcatttggatttttaaaaatgttaacttaatacgtctctttcagatgtccctgctttttagttaattgtgttttctactctcctaaagacttgattttaatttttaggttaactgaaccgtttttaaagagggttttaggnctcatagcaaaattgggtgggaatttcccctactggccccagccaggggattggcttctggactggcagcattagggtttccagtggggattgagntgccgcacacaaggggcttccacccccagcagatatggggaagggaatcccctag

SEQ ID NO: 458894 - DNA, 453 bp, Homo Sapiens
  misc_feature (77)..(77): n is a, c, g, or t
  misc_feature (92)..(260): n is a, c, g, or t
  misc_feature (280)..(331): n is a, c, g, or t
ggcctggcctatactgggaaaaacattaatccctgtccttaaaaaaatcccagataggcccaagcaatgtggcctcnacgtctgtaatcccnnnnnnnnnnnnnnnnnnnnnnnnnnnnnnnnnnnnnnnnnnnnnnnnnnnnnnnnnnnnnnnnnnnnnnnnnnnnnnnnnnnnnnnnnnnnnnnnnnnnnnnnnnnnnnnnnnnnnnnnnnnnnnnnnnnnnnnnnnnnnnnnnnnnnnnnnnnnnnnnnnnnnnnnnggcttgagcttaggaggcgnnnnnnnnnnnnnnnnnnnnnnnnnnnnnnnnnnnnnnnnnnnnnnnnnnnnttaaataaataaataacccagataaagcctatatattcacctgcaggaataactatggtacagttagcaaggcaagaaaccacaactttttggttaaaggattcttttgggggaaattcttg

SEQ ID NO: 458895 - DNA, 226 bp, Homo Sapiens
ttttttttatcttaggaaaacatgaatctcagggtcacagctttattgtatagattttttaacacagccatattacaaacattgtcagggaacatttacaagaataaataagatggacttgcaggtgtaaaaagattacacttcactgtaatgtacagtcaaaaaatatatctgatattcattgacctgacattatttaccttctgcttttctgagctaggaattg

SEQ ID NO: 458896 - DNA, 608 bp, Homo Sapiens
agtataaatataggttttaatattttctctctacattctatggacaacctccatgcctttgcacatgctgatccctcctcctggaattcctttcctacttgtcctcatgtacaattttctgctcgtccttcaaggggcagcttgcaagcctccctttagacacctctacaggtacagccgaccatgccctacctccatggcactgccaggggacccttataggcctctgtctttaaacctgtaatggtatattaatccttggtgtttgaatgtctctctctcccctgccagctcaagaacctgttgagaggagcacctagcataagacctggcttgtgacaggtttgtaataagtacattgatgatgcagtgagttgaatagtggagtgagtgaagaggaggtggtcaaaatatctaacaacccatatagtggctaggtgggggatggtggtgtgaggttcaagggcatggcaccagcatctgcttgaccatctggtgaaggctttcatgacagaaggggagagggccaagaagtacatgcagaagagaccgcaaggcaagctaagctcacctttatgatgagctgctcttgtgagaactaaatgcct

SEQ ID NO: 458897 - DNA, 341 bp, Homo Sapiens
gttgttgttttgaaacaactttttcctttttttcctgataacactactcaccctgaaatccctcacagaggaattgattacagggagagaataccaggaataaatgtggaactgagttatgtacacaaagctctgtcagtttgaaatgacgtgcccagagttcatccacactcaccagggtgagctctgggctccaaaacagagttaaagtaaacagcattacattctgcaaatatgactctagattctagaaatactaactgtgatagcttctcagttatccttttgttttcttcttgggggaatagtaggcaaagcagcagtgggtttccatcttaaac

SEQ ID NO: 458898 - DNA, 510 bp, Homo Sapiens
ggtttgagggggaatgctggagaaaacatcaacattgagttgacatttgttttgctgaagtatagctaccatccactatcatgaatttttgtttcattacaaatgatagaaaagccagattctcaaaataaagtataattctttgtattaaataaatgtttataaatgtttatgaagctcattacattatcttttttaaaaaagtaaaaattttagaacatatgacgcttttcataattaatgcttttgatatagatttgaggaaagagtctccagtttgcagttctgaaaatgtaattttcaaattaaatttcattggcatttgagggtgacaccttcctctataatttcattaccagattgtagggattcccttaactaggcatggccccttttacatgagtgaatgtgatgatttataaagaagagaagctaatacaggaggattactggaaggttgcgaagctatgatgacaatagatccctttaaattattttagctttgttcta

SEQ ID NO: 458899 - DNA, 424 bp, Homo Sapiens
cacctttaccatacgctgctttgttttcttcacaacactcactactttcctcaattatgtcatttatttgcttactgtctatccctcatacaaatataatctttagacagtatattagttatctattgctgcataacaaattacatcaaaacttggcagcttcaaacaacaactatgtatgatgggtaagtcaggaatacaagagtagttgggctggtggtctggctcagcgtctctcaggagactatggtcaagctatggggcatggctgcagtcatctgaaggttaacggggctgggagggatgctctgttcacccacatgggctgttgggcaaggatgcctgcagttcctgccagggtgaaccttttcacaggggctgtctggaacacatgggccagctggactttttccccaggaggaca

SEQ ID NO: 458900 - DNA, 436 bp, Homo Sapiens
ccctccccctagaaaggaatccagaatcctggcttttaaaggaggactaagatatgtagttttacagaaatcccacctgctgcctctgacattttgtgagttcctcaataatcttgcatctcccacttccagatttgatctttcttaggttctttatattaatatatataacatctatttcacatcccattcattgacagctcatccactcatatattcattcaacaaagtcactgagtgctcactgtcctcaagtctgaccagaagcctggatcacaaggacagcagcatattccttgccagctgggatctatgacacagaggggagagagaggaacagcagaaaggttttggcctcctcttcatgaagacttcatctcctcagaggacagcttaaggctttttcttttgtggggagcataaatgccacctgtac

SEQ ID NO: 458901 - DNA, 355 bp, Homo Sapiens
  misc_feature (287)..(313): n is a, c, g, or t
  misc_feature (342)..(342): n is a, c, g, or t
ttagttactgttggtaatctcttactgtgcctaatttataaattaaactttagatatgtatgtacaggaaaaaatgtagtatatagtatcgtatatatgtacaggaaaaaaacgtactatctgtggtttcaggtatccactgcgggtcttcgaacgtacccccctcaggtgagaggggactgctgtacaaagaatataggaaggcctctagactacatccattccttcctcaacaggaggaaaattcctgggtacagtttaacgtaaggcttcactgatcactgttnnnnnnnnnnnnnnnnnnnnnnnnnnnaggacagagtctcactcttgcccagggtnggagtgcagtggc

SEQ ID NO: 458902 - DNA, 387 bp, Homo Sapiens
  misc_feature (323)..(323): n is a, c, g, or t
  misc_feature (332)..(332): n is a, c, g, or t
  misc_feature (338)..(338): n is a, c, g, or t
  misc_feature (345)..(345): n is a, c, g, or t
ttttttttcctgctcatctttgattttattaatatttgattgacaaataataattgtattatattgatggagtacaatgtgatgttctgatacatgtatacaatgtggaaggattaaatcaagctaattaacatatccatcacctcgctcccttatcctccttctttgtggtgagacatctgaaatcagccttgttattgtgatttaaatttaatcatcctggtgactgtctagagtgacagcacattgtggttttactctacagttccttgaggagcaatgacattgaatacattttcacttaccttatttgcccattgggngggccttcntgtttnaggacgngcccgaaagggttttttcccccttaaaaattgaatttttttt

SEQ ID NO: 458903 - DNA, 304 bp, Homo Sapiens
  misc_feature (57)..(57): n is a, c, g, or t
  misc_feature (238)..(238): n is a, c, g, or t
  misc_feature (241)..(241): n is a, c, g, or t
  misc_feature (260)..(260): n is a, c, g, or t
agtctcagggacaagcaaagccctctacactggggacagtagaccggaaaaagacanaagcggctgtgaccaacaggggaaaggctgggaactgggggaggatgggtggctggcatccttctcctttcagcctgctggacatcctggaggtggagacagctgcctgaagaagattgctccagggcttggcctgggagtgaaagggcaccccaaatgaaaggccacccccctcccctcncancagccagccagcctaacanacatctgggttctgcaggacacaggctcagcaacagtccagtcc

SEQ ID NO: 458904 - DNA, 150 bp, Homo Sapiens
ttttctttttataataatctgtaatagatctttcacctgaattgataggcagagggttaaatatctgcaggagtagcaaggaacagatatgtaactaatattgggatatttaggagactttaaggcaatctaatggcatgttgtaaaatg

SEQ ID NO: 458905 - DNA, 513 bp, Homo Sapiens
  misc_feature (27)..(27): n is a, c, g, or t
  misc_feature (36)..(36): n is a, c, g, or t
tccactggaaaaaaaagaaggaccacncaagccagntggccccaaaaataaaaataacggagaatcaggaaatctggggaaggtggttttcgggaacaccccacgtgccagtgtggtggagtgggaaagaatacaggccagacctcccaggtcagagataggcggtttcactttcctactttgccgtttactatttctacatccatgaacaactcagccacacttcccatgtctccgtttcccatccataaagtgtagaaatgttgtacaggttgcaggtaacgtatctaaaaattgcctagtctattgcttggcacacagtgtttaataaagaatagctattatcttcatggtttgctgaatgtgtaacctttcaaggtactttagttttttcagacaacacatggaaagaagcccagtcagaagacttgacttcagtgagattaaggaacccagcagctttcctttgacacttaattggttattttacccccttatcctggtacatttcct

SEQ ID NO: 458906 - DNA, 345 bp, Homo Sapiens
ataatgcataagtgtacaaagttcaacatgtaacaaatataaagatgccaaagggtaaataaagcgatgcaaatttacataacaaagccatttgataaatgccactatcagctattactatatattccatcctataatctcataaatcaaagcttttaactgcctagactcatatgtgactgtattctttccaacatgcattctttcttcttccaggggttgttcaataacagcaggtatgtttctgccatgaagttcacagtgttctagaaactgggacacattcttgaataacactatcacggtggcatggattgtgtgttttgacatgttttctaacagggc

SEQ ID NO: 458907 - DNA, 504 bp, Homo Sapiens
ggccttggaaaggccctccacagatcttgaataccccccaggaacgtgaacactctcccactgaagaaatttggaaagttgtgtttactactatttatttattaccacgaacgctcttcactcacccacttgagtgggggttcccaactaccttgtcacgtggccttgggtacagagacacagcctaatgcaaaaatggccaaacacaagggcgcaggaaaacagacaggggaaacagtctaggagacaagcttggaggagacaggactcagaaagcatggcagagcgtctttcgatcaagggtcccttcagctaccacctttggcatggccgctgcccagcaatgcactcagcttgggccaaaacacctttatctcaaaggagaaagtcagacgcagagggcatagaggcagccatcccgagtcaggctgcagggctggccaggttcctcggtatctacgtgcttgcatgtggagatacaccagcccccttggcccacacagc

SEQ ID NO: 458908 - DNA, 536 bp, Homo Sapiens
tttattcagagcagcagttctggggaaagcaccggagattaaaatcaactaggaccttcccagctgcccacccaacgtgggaccaaagagggaatggtgagggcttggaaaggcctcacagatcttgataccccccggacgtgacactctccactgagaaatttggaagttgtgttactactattattattaccacgacgctcttcactcaccacttgagtgggggttccaactaccttgtcacgtggccttgggtacagagacacagcctaatgcaaaaatggccaaacacaagggcgcaggaaaacagacaggggaaacagtctaggagacaagcttggaggagacaggactcagaaagcatggcagagcgtctttcgatcaagggtcccttcagctaccaccttcggcatggccgctgcccagcaatgcactcagcttgggccaaaacacctttatctcaaaggagaaagtcagacgcagagggcatagaggcagccatcccgagtcaggctgcagggcggccaggttcctcg

SEQ ID NO: 458909 - DNA, 365 bp, Homo Sapiens
  misc_feature (306)..(306): n is a, c, g, or t
  misc_feature (351)..(351): n is a, c, g, or t
tgagttccactttacacgataatgaaaaaactcaatgaggactccatcagccaagcgttttatatggcagatgagctgctacaaatctgttgtgtgctcgccgcgtgactcagctaatgctaccggggttggagcgcacaccgagcccagccaccttttccatacctgggcagagggaagggagtggaaggaccagaagggagtaagattcaggaaaggaacagtttattgaaaggacccagagcccaacctagggaaggccagtggccccattcctgaaatctctcatcttgggtccacagcatnttgtgggagtcctgaggggccacggggacagggaagggcatcccngcttttgggttttt

SEQ ID NO: 458910 - DNA, 446 bp, Homo Sapiens
  misc_feature (280)..(280): n is a, c, g, or t
  misc_feature (398)..(398): n is a, c, g, or t
  misc_feature (410)..(410): n is a, c, g, or t
ttttttttgcagcttgttcaggttctgtttattatgttctcacagccttgtttatagtaaaggtgaatgacatgattccactttacacgataatgaaaaaactcaatgaggactccatcagccaagcggtttatatggcagatgagctgctacaaatctgttgtgtgctcgccgcgtgactcagctaatgctaccggggttggagcgcacaccgagcccagccaccttttccatacctgggcagagggaagggagtggaaggaccagaagggagtaagantcaggaaaggaacagtttattgaaaggacccagagcccaacctagggaaggccagtggccccattcctggaaattttcttcatctttgggtccacaggcatcttgtgggagttcctgnaggagggccacngggggacagggaagggcttccctgttttttgggttt

SEQ ID NO: 458911 - DNA, 184 bp, Homo Sapiens
caaaagcaggatttgttctaagtctaggttcacaaaggtattcatttctataaatatcaacttaagactgtgagaaatgatgtattctttttcacacgaatatgttcaaggtaagtaactaaaaatgtacgcttttattgactaaatggaaagctggcctataatagtcaaattgatgaacatt

SEQ ID NO: 458912 - DNA, 351 bp, Homo Sapiens
tccacattcaagtgttacatcttggctgtgctaataggagctggagcctgtcccatatttttccctccccgtttcctttggggttaaaataaaatgattgaggttggttgtacactgccattgaattcaagaactttcataagaagtgtataacatcagctgtgaatgctgaaaagcttttcaagccacagtcacaatatgcctgccctcttagcagatgctggtagcggtagtctagcacaactggtactgtccctcacagagcttaggcttctggggagtattgtaccatgaacaccactgtcccagaaagtgcccgggccactaaggatcacaaaccctacttgtcct

SEQ ID NO: 458913 - DNA, 512 bp, Homo Sapiens
  misc_feature (17)..(17): n is a, c, g, or t
  misc_feature (34)..(34): n is a, c, g, or t
  misc_feature (41)..(41): n is a, c, g, or t
  misc_feature (53)..(53): n is a, c, g, or t
gggtctcggctcctgangccccccgggctgggantgccaanggcctaatccangggccataattaatggtgccacctaataacagtccttgaaactccctgaaactcaaagtggatccctcttgccctcaagccttccgggaagtagctgggggctacacacacatgcccactgtgcccagacttacatattgttcatttaaactgacttcctcattaactagaagtctgactcaacttctctgcatctgagtcttctcattcatacaatgaggatgatcataggattgctgtgaggatgaaataaaattaaataaggtaacatacgtatgctccttggcatacagcagacactcactaacgattcactgttacgcttatttcctctatgaggcttaggttccccgtgtgcagggattaagaattctctgctcctagtcccaagtcttgcacacagtaggtgatgaagaaatgttttaatgaatgaatgatggtggtatgatctgtgttatg

SEQ ID NO: 458914 - DNA, 449 bp, Homo Sapiens
  misc_feature (40)..(40): n is a, c, g, or t
  misc_feature (63)..(63): n is a, c, g, or t
  misc_feature (69)..(69): n is a, c, g, or t
ggaacccgggatttgaaatagcccacctggagggcaaatnccctgaagggagtagtcccaacngatccnactttgcaagacacctatctgccctattacccataagaggaaccagcccttactccctaagaagtaaattcttacctcactggctattttaagtcaatgacattatcaaataatacagacagagaatatctgaacccatgcattcaatcaacaagttagtattatttgaacatttattgctttataaattagaagcagcatctagatcataaatgaatcgcagactgctcaacctctaaagatctttagcctaaatgcaaaaacaccattgacatgtgcagtcccatgcagataaagtgcttttaaatgttccttgatgaagaagcattttagcagaatgttaaatgcatccttttaaaggaccaagtccaagccaagat

SEQ ID NO: 458915 - DNA, 605 bp, Homo Sapiens
  misc_feature (452)..(554): n is a, c, g, or t
tgcattattaccacatttgttcaatgttcctgtggaagaattttattttcactcaatcccactttgggtagaatataactgttttcttataatttgtgaattttgagaaaacttctttccatgaataatgacgaattgttaaactttagcaaactttataaaacacttacacccactcaattgtacagccattttattaactccaaacacccattcaagcaactgagtaggcattcctgcaatacagaattgaacattcaaaaccaagggcacatggacaattcatataattttgataatctgaaggcacagtcacataattataggtagagacaattccatgaaaaggccattataagtctttgatacagaagggaatgaacactgattgaatacctatgcacttataacttggtatcattcaatgctcacaataaccctacaaagttggnnnnnnnnnnnnnnnnnnnnnnnnnnnnnnnnnnnnnnnnnnnnnnnnnnnnnnnnnnnnnnnnnnnnnnnnnnnnnnnnnnnnnnnnnnnnnnnnnnnnnnntgtattattttctctatgccactttgcctttatcctcgtgccaaaactggg

SEQ ID NO: 458916 - DNA, 464 bp, Homo Sapiens
  misc_feature (60)..(60): n is a, c, g, or t
  misc_feature (355)..(355): n is a, c, g, or t
actgacttcagggatctgggccaggagtgtggtggacattggacaaagaggccattttgntgcgggaggacactctgatctcgaagcctgccataaaggtagcaaatagactcttgggattcccctcttctgtgcacatcgttgaatgaagagagtctttttgcacaaacttcacttgaaattgtgccactgatgataaacggaatgagagccaaaaaagtttagttggagacagttgtaaattcaatttggagtttatttaattgacttttctattcacgttggggcacatgccaactccctggtttcttcctgggctggtgttttggggcagcaggcttcattttccttttcntagcttcataggaatattgtgagctcaccatgctgtggaggttgggaaagagcagagtcttggctgccctgctttctccttaggactcttcacttttctcaccacatct

SEQ ID NO: 458917 - DNA, 307 bp, Homo Sapiens
  misc_feature (85)..(85): n is a, c, g, or t
ggcttgttttttaaataaaccaaagtcaaaaacaaactgagagtgtgtcctccacagctcttcctactctcctaggcttgcccgngtgccctcccacccagcgcctctgctggaccacggtgcagttcgctccagaaggtgggccagggccggggaggtgcgcacacacccctggcatgctgggctgcctgctggagggtgctgctgctccgtggagggcagcaggcccaggaaggggtttcctctgctcgcctaagttacagcacaatactatgtggacgtttcattgaaaattttacttgaaaaa

SEQ ID NO: 458918 - DNA, 521 bp, Homo Sapiens
  misc_feature (497)..(497): n is a, c, g, or t
ttcaggcgagccccacacagaaggggccccaccgccgacaggtgtagatcaagagactcccgagataggcccctgcagggcgctggtcccccggcctccctgaccatggctcacagacttccagcgctgagtgaggcagctcgaagcctctcagccgaatctgttccctgggcctcactccacagtttctgaggggatctctactttaagtctagcctcaatcctcccgttgagctttctgtctttcttgttatgcttagcagaaagatacatgatctctggtgctgtttcaccgaagcaaggaggtgggtcggcggaactgagcgccctgcgccctcttgaaatgaccccccattcctgttcgccagaaacttttccctcccgttgccatggagagagacggccgctgcctcccgtcgccatagcaacatgcgggtaccgcggaccgcaggattgcggagctcggaaagtcttgcagttcgcatcgcccgcctgtncttggggtcttctacctccgaagc

SEQ ID NO: 458919 - DNA, 500 bp, Homo Sapiens
  misc_feature (51)..(51): n is a, c, g, or t
  misc_feature (413)..(413): n is a, c, g, or t
  misc_feature (425)..(425): n is a, c, g, or t
acaagaatcaaaaaaactcccgaagaataaggcccctgcaaggccgctggnacccccggccctcccctgaaccatggcctcaacaagacttcccagcgcctgaagtgaaggcaagctcgaaagcctctcaagccgaatctgttccctgggcctcactccacagtttctgaggggatctcctactttaagtctagcctcaatccctcccgttgagctttctgtctttcttgttatgcttagcagaaaagatacatgatctctggtgctgtttcaccgaagcaaggaggtgggtcggcggaactggagccctgcgccctcttgaaatgaccccccattcctgttcgccagaaacttttccctcccgttgccatggagagagacggccgctgcctcccgtcgccatagcaacaatngggtaccgcggnacgcaggattgcggagctcggaaagtcttgcagttcgcatcgcccgcctgtcttggggtcttctacctccgaagc

SEQ ID NO: 458920 - DNA, 473 bp, Homo Sapiens
  misc_feature (396)..(396): n is a, c, g, or t
  misc_feature (411)..(411): n is a, c, g, or t
  misc_feature (431)..(431): n is a, c, g, or t
  misc_feature (450)..(450): n is a, c, g, or t
gtttatcatgccaggactgggtaactttattcaagactttgacaaaatgatccccaaagtaatataaatgtagacactttaaaaagtccagatgtgaaatttcaagaaaactttgaattcagtccaaagtcagtattaagtcaaaagttgaaccaattctacaaatcataaatactattttccttcttaagttcatatattttctgagatagattaccaacttagttttctttgatattggtatttggaataattttaacatgatttaacatctttaagttctaaatctatacttatcctggaatatcttattatagttaaaaatataaatccagaactggacaactcttccttacggaggatttccaatattaaatgtaggaagggttgaggganataggagaatcaccntttggggcaccacagtagtnaccgccacaggcaaggttntgccatgggttagtaaatggggc

SEQ ID NO: 458921 - DNA, 395 bp, Homo Sapiens
  misc_feature (52)..(52): n is a, c, g, or t
cctataatttaatagtatacctataaaataattacattatacttatagcttntcttcatttataaacaaaacaaaaaaattaaatacaatttgagccattataaggtaaactttgtacatacgataaccccagaaggagcttcacactgcagcatatcatattgctttcattgctacacccacaattgggttcgaagagagtgtgctcgtgtttgcattctgtaagttcttagcttaatccctcccctatctgtgtgggttccatgttaataaaatgataggggttggctctgcagctggtcagagactctcctccactcacctcccaatccacccctagcctccattacaatcacgtaaatttccttccttcacagcttttctgctgcatgttc

SEQ ID NO: 458922 - DNA, 507 bp, Homo Sapiens
ttttttttaggctgctctgcctatgaagtaggcattctttattcctttactttcttaataaacttgctttcacttaaaaaattttcattgcattattgatgacttggtcttattgttatcattcatgcagacattaataatcagtggtgataggtcaatcattaaataagccttctgggaatatatacattctaagttgttcacacaatagcaaaagtcattttcattgactttataacttaaaaatcatctggccaatttcaaaaacaagtgagttagaatacgttagcagtgaaatattctgtcccatttaataaactaagatgaattatttcctaggaagttgagtttaattcctttgaagcctacacagtggatcaaccatgtgcagtttgattgtggattttattttttattgattacggagttttcttaaatggcagattaagtcaattaatagaaaaatggagatgctataaactaagaaatatttaaattaagaaatgt

SEQ ID NO: 458923 - DNA, 366 bp, Homo Sapiens
ccagagtgagtcacgttatggcccacatgatggctcagatggctctctgcctgagaagctctgagtcctcatgcagactggacgcccctccgtagctgctcatcaacttcctttccccaagtccagcccccagggcttgcccactgagctcctgaaccaaggcaaacttgcgctggggacggcgccgctgtgtggtttcccttgccaaggcttccctggctgcctccactttctcgtggaggcttcctgaaggtggcatctgtatttttgtgaagggacttggtaccaggcttggagatgaacatgttaattctctggccctggacatcagatctgtgatatagtttctcaatttcctgctctgaa

SEQ ID NO: 458924 - DNA, 400 bp, Homo Sapiens
  misc_feature (363)..(363): n is a, c, g, or t
  misc_feature (375)..(375): n is a, c, g, or t
gttatctatatttgtacactttatttaaaaacaaataatacacttagagccaccaaagatggatatcttaattagcttatccataccctgaatttacataagaaacttcttgcaccacaaaaattagcatttggattaatttacattaattgatgtaactaaaatttaaaatacctgaagatcaaacaatctggcccagggctcaccagctggaggactgggtgtggagagaaagggttatttaggaatctgaattgatgacaccctgtggtcagctctagtcaactgaacttgagaaaacataaagtaaccagcagatttcaatcttaaaaagaagtggttcctcctaaaaaaggtcttagntccatagagttngggattagggtaggggggtacccat

SEQ ID NO: 458925 - DNA, 542 bp, Homo Sapiens
  misc_feature (18)..(18): n is a, c, g, or t
  misc_feature (24)..(24): n is a, c, g, or t
  misc_feature (36)..(36): n is a, c, g, or t
  misc_feature (57)..(57): n is a, c, g, or t
  misc_feature (82)..(82): n is a, c, g, or t
  misc_feature (92)..(92): n is a, c, g, or t
  misc_feature (120)..(120): n is a, c, g, or t
  misc_feature (439)..(489): n is a, c, g, or t
  misc_feature (492)..(493): n is a, c, g, or t
  misc_feature (500)..(500): n is a, c, g, or t
aaagcctttccggaaatnaagtanccccaaatttanggtggtaaattggtccccaanccctcgggaactcaaacaggtaccngattattttnaaaaccaaccatggatggtttaaaaaantaaaaaacaattatttgggggaagagacccttaaaataatatttttgggcccgtttttaccctgtaatgtaaatatcaaaggaagcctaatgattggacatactctgcttgagttaccctcaactgactaaaaaggctaaaaagaaatgtaaaagtccgttgtatccataaggtagcaatcacatttgtttatccaattgtcccagggaatttttctctggctggattcaagttcctgtgatataataatttggtctattccatgattaatggcatttaatattttggaaagatctttgagatcaaattgaacacattnnnnnnnnnnnnnnnnnnnnnnnnnnnnnnnnnnnnnnnnnnnnnnnnnnnganntataggnacatacagaaatacatccaggacatggacacagaattcctgc

SEQ ID NO: 458926 - DNA, 612 bp, Homo Sapiens
  misc_feature (533)..(533): n is a, c, g, or t
  misc_feature (553)..(553): n is a, c, g, or t
attttcttgcagggagagtgtaaataatctggaagaaatactgcagtctatcacagatcccaaagatagtttcatcatttgtatttttacaaatacttactggatactattcctttctgtgaggcaagaacaaccagctgtcattctctaaaaattttcagatattaagcacatattcacctctgaactttaatgttttttctacatcagcattattcagaatctcatccaggaactatttgctaacaatctgcaatgagataagaagattatgccaggaagtaaatcaacacactgcttccttcaccacgaaagccttgctacaaaaaatcaaatggcagcagtactgaacagtgcacttactgatgtagttgggttaacattttgggctttaagctccttatcttgtccatgggacagggtaccggaattactctgggactggacagaggtcggacaaactttggctcttgagtgggccactgtttctgccagccaaagtgggtttttaccccttaggacccttccaattnttggatttttagggacctgnaaggtgtctttaggaccccctctaggtcccaggtcccggggttcacagccgagggatcc

SEQ ID NO: 458927 - DNA, 341 bp, Homo Sapiens
  misc_feature (219)..(219): n is a, c, g, or t
gctatagaatgctgttaaagaaggtataaaataaatgccccagttttggaaaaaatttaggagccttattttaaaagtaacaggtattctggaatcctggcatggagttggaaaaaaatatactaatttttaaattggaacttttttgtaactcagacattgctgacccctaaaaaagaggggatacacttgtaaattttattttcatcccaggcaggngttaagtaacttcccgttcttatagagaggcaagatcatcttgaaaagtgttatagacatagaatgttggttacgcccacagaatcaattgcatttggaaggcagaggaacagttaactgag

SEQ ID NO: 458928 - DNA, 350 bp, Homo Sapiens
  misc_feature (117)..(117): n is a, c, g, or t
aaacaacttggtctggtttatatcattttaacaagttttttggaaatgtaaaagaaaaaagtaaagctccatttttgtgaattgcattgtttctaaaggaagtattttgagtatttncatctgtttgtattgtttcgactatgatatcagatatccagtgtgtccattctggcagtggttttgagttacttcatggaacttggacatacaccaccaggtcctttatgtgttgttctcctgggagacttctttttttaaatgccagggctacttctgctttaccttagtggtatcagcacattgtaaattacgttaaaacacacaactcactgtgatctatgggagtgata

SEQ ID NO: 458929 - DNA, 433 bp, Homo Sapiens
  misc_feature (20)..(20): n is a, c, g, or t
  misc_feature (44)..(44): n is a, c, g, or t
ccccggaaaggtcaggtaanactaagaagcagccctatccaaanaaaaatcctgtaacgcttttaaatccttatcattatgggtaggagttacaatatgtttcttcttttccacactctcttatttaatcacagaaccaccatcattcattaagaagatagaaaataccactactgttttgaaaagttctgccacctttcagagtaccgtggcaggttctcctcctatttctataacctggctaaaggatgatcagattcttgatgaagatgataatgtctatatttcatttgtggacagtgtggccacacttcaaatcagaagtgtggataatggacacagtgggagatatacctgtcaagccaagaatgagtcaggagttgagaggtgttatgctttccttttagtacaaggtttgtaagctattctcttt

SEQ ID NO: 458930 - DNA, 535 bp, Homo Sapiens
gacagtcaaaggttggcaaattttatttccacttatcaagaacttacaaaatatttttgtttcatttctaaattttcacctttattgctaagttataaaataaaacttcctattttcttttgcttgttttttctttcacctcagaacccccttactttgtggaaaagccacagtcacaagatgtcaatcccaacacaagggtacagttaaaggctcttgtgggtggcactgcacccatgacaataaagtggtttaaagataacaaagagttacactcaggagcagcccgctcagtttggaaggatgacacctctaccagtctagagctctttgcagccaaagctaccgattctggaacctacatttgccaactaagcaatgatgttggcacagcaaccagcaaagccactctctttgtaaaaggtctggtctctacatctcctcactttcttgcttgtctagattttcttgcctggggtgggccggggcgggggacgcttaagacagcagttttgcccagtgacctgtttttaaa

SEQ ID NO: 458931 - DNA, 450 bp, Homo Sapiens
  misc_feature (392)..(392): n is a, c, g, or t
  misc_feature (432)..(432): n is a, c, g, or t
gacagtcaaaggttggcaaattttatttccacttatcaagaacttacaaaatatttttgtttcatttctaaattttcacctttattgctaagttataaaataaaacttcctattttcttttgcttgttttttctttcacctcagaacccccttactttgtggaaaagccacagtcacaagatgtcaatcccaacacaagggtacagttaaaggctcttgtgggtgggcactgcacccatggacaataaagtgggtttaaaggtaacaaaggggttacactcagggaggcaggcccgctcagtttgggaagggatggacacctctaccagtctagggggctctttggcaggccaaggcttaccgtttctggggaacctacattttgccaactnagggcaatggtgttggggcacagcaaccggcaaaggccanttttttggtaaaggttgg

SEQ ID NO: 458932 - DNA, 571 bp, Homo Sapiens
  misc_feature (22)..(22): n is a, c, g, or t
  misc_feature (41)..(41): n is a, c, g, or t
  misc_feature (59)..(59): n is a, c, g, or t
accaatgccgtgcctccttccnattccagtagttttccaangattgggaatcctggaantttggacagtggcccacttaaagagccccaacctagttgccttccacaatgttgtaaaatccaaagaacttaactggggccattgggcaaccctacccaaaaagcgaagccagtaaaggcaggcccaaacacatgtctgtagttacagattcagctgtgtacgagcaactgctaaatcttcgggttaggctctatttgttttactatgaaggcagtttttgcagcggtgagtctagtatacttcagagaggtgatttctatataaaaagtcaggactgtccccaaacataaccattgaatcctgtattagtaaccctatcacaccaaatctggactcagattcctccataagagctcaccatgggattacttcactatgtgatgggcgccattaactctcctggtctcctttgatgtagcctattaacatgaagagggcttgcacagaaagccagcaggcttataatggttgagttaaaaggtggggcatgtctcccatgctcagcttttct

SEQ ID NO: 458933 - DNA, 468 bp, Homo Sapiens
  misc_feature (22)..(22): n is a, c, g, or t
  misc_feature (157)..(157): n is a, c, g, or t
caccttaattgatctgtgaaanttccttcgaaaatggaaagaatctcaagctccatcaactgcgaaaggcaatgcccaggattaggaagtccatccagaatgcaagcctgcaaagcctcagtgtactcctcaatgtctgcagggcccaccccagagnagaggcccctgggtgaccagccggtgaggagcttcaagaggaaggattcaccatcaccacctggatcctgtgtgcagcttttgtcacagcggtggcgagcacagtttctgcctcctggggagatggggtgtgaagctcacagcacctgcgtgtggctgggcccaacattaacagcgctgcaagagctcacctccatttataggaagtgggaaggacccaaggactggccgatgacaccacaggaggcagaaggcacatcgggggttgggggtagcctatggccaacctaccctgtccctctaacaacctac

SEQ ID NO: 458934 - DNA, 379 bp, Homo Sapiens
ctcccaactggcggacttttaaggatgctatccacgctccctgctcctggttccatcacgggccccgaacagccgcaggtgtgtgaaggcaggctgggaaacacttctgagtcagacccacctctctggttcaaccagaggctcctttctctccttgataacaatccaaattgtgattgttttatagaaccgccttttacaacagaatcatctccccacataccattttccctgatgctgcctgacaatccttgtctcccagggatgtgggcacacagccacatgctgctctacctcccacccgccctgaggacttcgggtggatgctggggacttttgccggccaggcaaccagaaaaggggcgcatgaggggtacat

SEQ ID NO: 458935 - DNA, 533 bp, Homo Sapiens
  misc_feature (325)..(325): n is a, c, g, or t
  misc_feature (439)..(439): n is a, c, g, or t
  misc_feature (479)..(479): n is a, c, g, or t
cacgttttacatgtacagagtttatttgttgtttttacttaaaaagatacccaactgaaatattactaatgattaaaaacaaattcagagttaattacaaattcagttgaaacaaaatttcagtttggattaaatttacactgtgaattacaatgaagtgtcactcaattgcaaaatgatttccattcatacagcattttgtttttcataaattttgacctctgaccaaagaaaacacagctttttggggtaacattcatgaaaacattgaagcctataatataaatttttattaccactttcaataggtcattaatataaaaangttaaccaattttaaaccaccaaaggtttaggctggggggagagccccctcggggggattccggggtccaggctggtggaaccccctggctcaccggcaggcggcgggtgcacngggggggaggtgcggtggatgcggtccacccccggggggngcgctcctcatgctctggcaggtctgcgggcagggccagttttcaaatcaacct

SEQ ID NO: 458936 - DNA, 971 bp, Homo Sapiens
  misc_feature (60)..(61): n is a, c, g, or t
  misc_feature (136)..(136): n is a, c, g, or t
  misc_feature (140)..(140): n is a, c, g, or t
  misc_feature (199)..(199): n is a, c, g, or t
  misc_feature (832)..(832): n is a, c, g, or t
  misc_feature (911)..(911): n is a, c, g, or t
  misc_feature (933)..(933): n is a, c, g, or t
  misc_feature (942)..(942): n is a, c, g, or t
  misc_feature (956)..(956): n is a, c, g, or t
gttatgaggcagcatatggtagtgcttacggagaaaatccatgcagcagtgaaccatagnngcttctcttcaaatgggctaattgagagcatggagttaagaggagaatcagctttcagtggcattcctaataggncagnggatgacccagacatttacagaccaaattccttcctttagtaatcactgtggaacacangaacaggaagaagaaagccatgcttaagaatggtgcttctcagctctgcttaaatgctgcagttttaatgcagttgtcaacaagtagaacctcagtttgctaactgaagtgttttattagtattttactctagtggtgtaattgtaatgtagaacagttgtgtggtagtgtgaaccgtatgaacctaagtagtttggaagaaaaagtagggtttttgtatactagcttttgtatttgaattaattatcattccagctttttatatactatatttcatttatgaagaaattgattttcttttgggagtcacttttaatctgtaattttaaaatacaagtctgaatatttatagttgattcttaactgtgcataaacctagatataccattatcccttttatacctaaggaagggcatgctaataattaccactgtccaaagagggcaaaggtgttggatttttgtatatgaagttaagcctcagtggagtctcatttgttagtttttagtggtaactaagggtaaactcagggttccctgagctatatgcacactcagacctctttgctttaccagtggtgtttgtgagttgctcagtagtaaaaactgggcccttacctgacagagccctggnttttgacctggcttcagccctgtgtgttaatcctctaggtaggcccaatttaactactctggggggttggccagggttnccaggaggaattgcaggtaggnacctttttngcccacttaatctngtggttttttacttt

SEQ ID NO: 458937 - DNA, 500 bp, Homo Sapiens
  misc_feature (384)..(384): n is a, c, g, or t
  misc_feature (394)..(394): n is a, c, g, or t
  misc_feature (467)..(467): n is a, c, g, or t
  misc_feature (489)..(489): n is a, c, g, or t
tggagttttgccatgttgcccaggtcggtctcaaactccttggactcaagcaatccacctgtctcagcctcccaaagggctagggtacaggcatgcgacaccgcacttggctaggaataataatattttaaaacaacaacaacaacaatgtaaagttttcattctctggaaatccaattataaattccaagcatgggaaaaaaatgactcataacaaggagaaaagtcacttagtaaaaacagatccagacatgacagaagtaataaaataagccaacaaaaacattaaacagctattacagatatgctgtaaatgtatatgaggatagaggaaagcatgaacctgatcaagagtgacataaaaagcccaatttgaaattatgngatgggaatncaatattttccatgaaaaatgtactgggtggtttgcagcagtttgatctgcaaaaaaagttctgtgacttgangcatagcaaaggaactacttcnaagtgagccag

SEQ ID NO: 458938 - DNA, 323 bp, Homo Sapiens
  misc_feature (282)..(282): n is a, c, g, or t
  misc_feature (301)..(301): n is a, c, g, or t
aattagagtatattatactttcaaactggatacactagaaattggcaatgcaacataagatgcaaaggaatataccagttactgtcaaaatgaccctgtacagcctcgtaatgcaaaaagctttatacaatacaaattttcagtaatgtacacaaaccttgacagtatgatcatctgaacataatatgaagagttaaaaaaaggttagaagaaaggaaagtgctgaggaaccctaactgcattactatatgggaaaaataaggctagttttcattgagggantggcataggtggacaacanttgaaggttaggttgggtaggg

SEQ ID NO: 458939 - DNA, 382 bp, Homo Sapiens
aaagttcgtaaattaatgtaataggaggcagggtaacatctgttctgtagtacccaacagaggggatttggatatttgagaagaggctctgcacatagtaaagtcagcctaggaacatgtgagcagtatttacagtgaaaaggtccccatctctaactatacacatctgctccaagacagctgaggctggcggttgcagacccgactgaagggaaagccccttccgaggaagtggcctgctaacaaatcaaaatggagccatctgcccttcccactgcatgcgctccaccagccacctattcgtgctcaccagctggcagcctgccctgggccccggcatgtgcctgcccccagtgggcaggggccattggacaaagccact

SEQ ID NO: 458940 - DNA, 580 bp, Homo Sapiens
  misc_feature (53)..(53): n is a, c, g, or t
  misc_feature (77)..(77): n is a, c, g, or t
  misc_feature (91)..(91): n is a, c, g, or t
  misc_feature (270)..(270): n is a, c, g, or t
ctggaaaacaatcttttcccctgcttgactttccaagaaggatgaagaactgntgaacaaagctttgcacttcgggntgaaacagttgggncgttcagaaccggcattcttctctgaaggcttcaaatttgggaggccactggaggtggaggtaaggcaattatctgaagacttcactgctgctccccaaagtcccagggatgggaagaggagaagtcgccacatttggatcggacagaacctctaaactgatcacatctgttcttctcnctcagagagcgagtgagaggctgatggctgggcttgccttcctccagccacagctcttcgtagggaagttctgactttcccgggatgcctgctgattcttcactagcttctgggaaaaggtagtcgctcccactatctccagagtcctgatagggcaggatgtcatgaggaaagggagcccaatctccccccaggtccctgcaaccatgaaggttcacctcactgttgccatggagattgttgccatacacacagaccgagagtcggtggaaggactgggtgagctcatcgcgggcgtagctgagcgaat

SEQ ID NO: 458941 - DNA, 461 bp, Homo Sapiens
  misc_feature (30)..(30): n is a, c, g, or t
  misc_feature (59)..(59): n is a, c, g, or t
tcaaattattgcccaaggatccgtggtccncctactgccctctgtgcccccgttccaanggtgagatactatccttcactcctatcaagaaagtcaaataaattaaggccacagaactgggagatgtgcagtctcctcacagccattatcgggaaaattaaagtttaatcctaattcatgttgtaatgtgagagcccctgaacttccggccagcttacccagcaggatagagttgtgtttagcacccttcagaagttcttaaattgatcaatgatctgtataaatgaaagccttcaggtgatgacatttgtgcagtgggtactcctttgccacactcggcctaaggatgtggaatttaagttggcagagtaaaggggatgaaaaaattaggcctgcaaagcctaaatgagggagggggataaggaagggtgggaagattatgctttcagtcttgtttcata

SEQ ID NO: 458942 - DNA, 381 bp, Homo Sapiens
  misc_feature (175)..(298): n is a, c, g, or t
  misc_feature (352)..(352): n is a, c, g, or t
atgttctttaatttaaaattttaataaaatttaattttgatagagaatatttaagactttgcaatcagaaggttaaataatccaagttcaaatacatttacttatgtatgatcttaagctaactttcccaaaccccaacttctgtgatgtcctactaccatagggccaaaagtcnnnnnnnnnnnnnnnnnnnnnnnnnnnnnnnnnnnnnnnnnnnnnnnnnnnnnnnnnnnnnnnnnnnnnnnnnnnnnnnnnnnnnnnnnnnnnnnnnnnnnnnnnnnnnnnnnnnnnnnnnnnnacaggataaatgggataaagggaaatgtgggtattacatattacattaatgggnttattaccccagtctttttaaaatggtgg

SEQ ID NO: 458943 - DNA, 394 bp, Homo Sapiens
  misc_feature (223)..(223): n is a, c, g, or t
actggtccgccatagtttccagggtgtccctgaacctcagtcccccacgacttttttcctccctaaaaatcgcctctactttttgatagttgagagacttaaatcctataaaatagtatatatgaaaatggctaatgattatgcagtttgatattgaacacctcacccaaaagttgtccagttcttgaagagcctaacttgctcacagcaggatgggggtttntctgcatagcagaggtgactgttcatttggaagatgccgtttgtgaaacagctgttagctgtgagaaccttggtgctacacaggtttgtcatcaccatgccagttatcaattctgaatccaacttctattccttccagatacattaaggaaacttgaaagagtgtgataag

SEQ ID NO: 458944 - DNA, 279 bp, Homo Sapiens
  misc_feature (194)..(194): n is a, c, g, or t
  misc_feature (196)..(228): n is a, c, g, or t
  misc_feature (231)..(231): n is a, c, g, or t
accattatgtatggttatttacattatacattatatgccatttaataacatttaaagtgttataaagatgcaattttaaattacaagtggatttgtgacaagataattgaatccacaatttatgtcaacagagttggaaattgttgaggcatgtttctaaacttttaaaataggtcttcatttgagtagatttncnnnnnnnnnnnnnnnnnnnnnnnnnnnnnnnnnccntgagacagggtttcactcccgtcatccagactggagtgcagtggtgtg

SEQ ID NO: 458945 - DNA, 454 bp, Homo Sapiens
ttttttttacatactagatttattaaagtgaccataagtgccgaagcggttttctaatggaaagcagactggattcacaacacagaagcagaattggtggaacaggctttcgggaactttcttcccctggtcacacggcagatcggtccccaaggacaggtgctcagccaggacttttgctttaagaaggatttgtctggagaaaggactagagagaaatccagctcagatgtattgctcattcctcttcagaaggactgggtgggaatggagcaggggctagaggaatctggaagctaattcttttaggctttttccaacagagggaagcagagggacttctgggtctggaagttgggagcttacggaggcgacagtggcaggcagctgggctcttgttcggggctcccggaaggtttgcaggggtttgagcccagagtgagagccacaggtt

SEQ ID NO: 458946 - DNA, 454 bp, Homo Sapiens
  misc_feature (420)..(420): n is a, c, g, or t
aatcaatcatagtttttttgtattccgtgtttacaacacttctagaaattttagcattacatttttaaaaggggaatgagaaaaataggcacttagaacatttttatactatctaacaaaaataatagttcaaataaatcccagtagcttcatcataaaagtaggctgacttctctcacttaatgctgggtattccaatttttctgccagtaacaacagaactgtgtttacatattacaggatgagtatgatattagtgatagtcttatcactatttttaaaaatatatcttcccttaggctgaccctaatactgaagggacttcgggactttctgaagggtggtaacttaaagggggttttaaaaccatgctggggtctggcccttttaaattaacctcttaggggaataccgtgtggnccccccattattccgtttaaggcctttaggggtt

SEQ ID NO: 458947 - DNA, 466 bp, Homo Sapiens
ataacaacaataacaataatatttattgtttgctttgtgccaggtactctactgctttacataaattatctcattctgtcacatctaacggcaactaagtatacgcttacatctgctagtggcacctaaaataaggatattgttggtcatctttaaagaaatgtcttaacataccaaagaagtggaatcaatagaataaaatatttaagtcttacaaagcgtacgacactaaagtaatataggataccactaaatttatatttctatgtatggaaagtaaagctattcctggtacatggtgctgaccttctttttatcctatttcttacacctttctcaaattcctattaaaccacagcttcgaatatgtcaaataaataaatttgatccatacattcagttaaatccttcaactatgtagtaatacctaaagtgagtattatgttgctgcattaatgccaaaaaa

SEQ ID NO: 458948 - DNA, 475 bp, Homo Sapiens
  misc_feature (14)..(14): n is a, c, g, or t
  misc_feature (437)..(437): n is a, c, g, or t
aagccttggcaagnaggaaagaagatagctctctgactgctttggatagtctcctacgcaccattttgtcaggtgggagatttggaatacacatgcaggacgttagactgttgggacagccattttccaacaaccaaggggccaaaatatctgcaatatagtaacagccttaataatacatccatttttcgttttatacagctgttctcagctatgtcctcagtgtttcatcgcatttatattcatagctattttcaaacacgaccttttaattgtttttgaagtatttctaaaccccttctttccaccttactcctccatcattgtgataatcttcccaagttgtattaggccattgccccagggcttccatgggtctgtcagggaatattcgttacaaagcagagcaaggaggcagtatgtctctggaggtgggntttacagtgggcagttattttacaaggggttttgtgga

SEQ ID NO: 458949 - DNA, 448 bp, Homo Sapiens
  misc_feature (358)..(358): n is a, c, g, or t
  misc_feature (404)..(404): n is a, c, g, or t
  misc_feature (420)..(420): n is a, c, g, or t
  misc_feature (432)..(432): n is a, c, g, or t
cctatagtttttgtaatttgtactaaaatgatgaatttagacttgaaattatattaaaatgaaattaaaattcacttctacctatagggcattttcagagtgtgcatgtaaagagcaaagtgtccatctgcagatctgccatcaccactctctccactctaaggaaacagctcatgcttactaggttttagagaacaactaatccaatggagaagcaacaccagatttccttcagtttgtgccagtttgcaagttaaaggtcaaagggcaaagacatagaacaggactcttcaaggaaaattttcacagaagacaatgtttaagttgttgttaatggacagtcaataggatcaattanttcaagtttcaagggcaaggctggttcatttgttttccaaaaggcnaatcccctccaaaggntgggcttttcancacaaggcccattgtt

SEQ ID NO: 458950 - DNA, 346 bp, Homo Sapiens
  misc_feature (129)..(130): n is a, c, g, or t
gcctgaaacttcctttctctccttttccacattccagttcttgtccatcctttgagattttcctcagcaggactttcactttcacagccttccctgaattctcaagccaaggcatgtgccttgcacgtnncctgttccctgacagcctacgtgcaaaagccttgtgggcactttccacgctgttataaaggacagcacttgtctaggtccccccactgcactgagaaccccttcaaggaacatctgatttgttgctggatgttcaacatttagagcaaggtctgacttaggagtctgctgaaggaatcgtggacttgggaagtgtcatcaacgtgggctccactga

SEQ ID NO: 458951 - DNA, 531 bp, Homo Sapiens
  misc_feature (102)..(102): n is a, c, g, or t
  misc_feature (146)..(146): n is a, c, g, or t
  misc_feature (287)..(327): n is a, c, g, or t
cttgagacacctctggcaaaggatgcagaagttaaaataacttgagcctagggtcaaggaaataaggtctcggaagttaatgaaaagagacatgtgtggganaagaagtccattcccaagagaggtgcctccccatctaaagaaancctggcactaagatctgccaaatggaatgggaggcagctaaataactactcagcccagttcctccctgcgcaggacccatggaggatagccagtcttaagctaagcctatcaggccgtgttcttgagattcgcctgaagcnnnnnnnnnnnnnnnnnnnnnnnnnnnnnnnnnnnnnnnnncgcaatctaaaaagttcaggttttcttgttttcttccttagaaaggtcttcccagagacacacaaaacagcagtgtcgttgagctagccactgtccactgtctaggacagatacccacaatatttgaatctatgctttgaccaggatacctgattttgccaaatctcagaccactaaagagtgaggacttggggtttggtttct

SEQ ID NO: 458952 - DNA, 437 bp, Homo Sapiens
  misc_feature (29)..(29): n is a, c, g, or t
  misc_feature (46)..(46): n is a, c, g, or t
  misc_feature (57)..(57): n is a, c, g, or t
  misc_feature (63)..(63): n is a, c, g, or t
  misc_feature (88)..(88): n is a, c, g, or t
  misc_feature (112)..(112): n is a, c, g, or t
  misc_feature (172)..(172): n is a, c, g, or t
aaggaaacaatggtgaaccgtccaacaangttgaacactcgtgaancaaactgggcncgtggntgtggtaaaaggaatccctctccgncctctgtggctccccccacttggncaaagaggaggggtgcatgccgccaggctgggggcccaatccctgcagggggaaaggggnaagtccctcattttcccttggaagagaagaggtgggcagaggacctcgagctatgcgagagcatcctccagaagccctgaaacctccagctgggtacttccattcattttgctttccctctctcaaaaagagaatccctggcaaccagtgctaaacatggcctatcagtgggaccctcctagtgattcactagcgccatttggggaacaaaatagcatttcactctctcaataaaaaaatcatctggctgaagatggtggctcat

SEQ ID NO: 458953 - DNA, 435 bp, Homo Sapiens
ccaacccatttaaaatgggggagccacccccgatgatatccaccattggaacaaagaacctataccagacctataattggggatggtttgccagagagccccagggagaggccctcacagaacatgcctgtggtgatgagtgttggttgggcataaaaactgtatgtgttaaaataatgattattaaaattattttttaaaaaactaatgactaaactaagaaagctgataaaggcatagtcatacacagaatggtcaattattatttcaattcctgtaacctttttaatggttgaaaaatgattttgagtaatatttccagctgttactatcttgtgatacacctgttcctggtacaccagttaggaagctctggttttctgaatgaaacagtcaagtgaatgagaattctaatattgtgtgctatgataaagg

SEQ ID NO: 458954 - DNA, 415 bp, Homo Sapiens
  misc_feature (15)..(15): n is a, c, g, or t
  misc_feature (21)..(21): n is a, c, g, or t
  misc_feature (40)..(40): n is a, c, g, or t
  misc_feature (48)..(48): n is a, c, g, or t
  misc_feature (54)..(54): n is a, c, g, or t
  misc_feature (80)..(80): n is a, c, g, or t
ctttcttaattcccntggaantcccagggctctcgtgggntaaacttnatccanaaatcctgctgactgtggtgctggtnggggttaacgctgaggtcagtcctaggaccccgagctcccttgctttcccccagggatgggagcagacggtaagcaggcaggctgttacgggacctggtcccaatacagccctgcctgccccagcacacgcaggtgcccacaggtgcacacgcacaggcagaggggcagcagcagggccgtctcccgccgtgggccggccatggctctgaggctgctccagcatctcccagtccactatgagcaggcctctcagcatctgcagagcccctgactactccagagaccagaggccaggcgccccacccagccccgaggccactgccgccctggctcc

SEQ ID NO: 458955 - DNA, 411 bp, Homo Sapiens
  misc_feature (12)..(12): n is a, c, g, or t
  misc_feature (27)..(27): n is a, c, g, or t
gttggcacaaancctaagaaaatccanggaatactctggaggggctgctgatgcctgagaaagtgttgatgaaatcattatcccacaatagacagtggctcaagaaatgcaaattgagtcaagttgaagcagataaacaagcctcgcctaatttgcagtagcccacatataccctgggagtctggcggtcagcaaagatgctttgttttctgtctttcaaaccctgacatatttatagagacagcaaacacaccactccatcaacaggactgatacattctttcccacacttcaggctgtattgcaggctttcctgtggcccactatggcccctaggtcttcttcagtcatttctgtaacaaaccagcattttgcccatcatacctgaaatgtttagttagagaccctcag

SEQ ID NO: 458956 - DNA, 437 bp, Homo Sapiens
  misc_feature (16)..(16): n is a, c, g, or t
  misc_feature (43)..(43): n is a, c, g, or t
  misc_feature (48)..(48): n is a, c, g, or t
  misc_feature (54)..(54): n is a, c, g, or t
  misc_feature (136)..(136): n is a, c, g, or t
  misc_feature (157)..(157): n is a, c, g, or t
  misc_feature (169)..(169): n is a, c, g, or t
gccagccaccccccancaattttttagaatttccccccttggnaattncgcccncccttttgtcttctgtccaccaggccttctcctcccagctggaacacaaaccctccttttgacgggaaaaaattgctgttanggcttcacagtagtgcttttnccctttccactnggatttgcattttaacctgcatttcgaagatttttatacatgttttctatttccgacaatgccaggaggcttcattgacgttgtagtctgtgttaataaacttgtgtatcactctgctctgatcttttaggaattaacttgcaaatgaaatgaatatgttgggactttggcataatttgaatatagcattgtgtgagttgtgattgtctcttcctaattgtgctgtaataacctgtgtatgagaataaaatgatttccaccatcagga

SEQ ID NO: 458957 - DNA, 401 bp, Homo Sapiens
  misc_feature (60)..(60): n is a, c, g, or t
  misc_feature (342)..(342): n is a, c, g, or t
atgtagaatgaaaacttttttctggaaccctaaaagtgtcgtgggtcctgggggctacgnctcctgtgcctcctgggggtcagtctgctcactccaccgtacattcgggattactcgccgcagcacggtttgggagagccagaactgggcaaagccacttgttgcagggataatcagggcatctgtgatggagttctttgaggcgttacaaagccaactagctgtgcttgtattagggtggagagatgttgaaagataaatccacaggttaaaataaaccccgaccctgagctcactttatcgttattcgatcctaggggtcgatctgggagcatcaagggnagaagattcctgaaaggtttccacatccgggatctgcttctcctccattgttttcagga

SEQ ID NO: 458958 - DNA, 579 bp, Homo Sapiens
  misc_feature (258)..(258): n is a, c, g, or t
  misc_feature (261)..(261): n is a, c, g, or t
  misc_feature (493)..(493): n is a, c, g, or t
  misc_feature (504)..(504): n is a, c, g, or t
  misc_feature (530)..(530): n is a, c, g, or t
  misc_feature (559)..(559): n is a, c, g, or t
cagcatcagtcatggacttaaccttcttttgttaatgagaccttagaaatgtaaaaatgatacactcttctttaaaataattgtagtcagtacacataactcttaccatctttaaccattttctaagtgtacagttcagtgacattaaatatattcacatttttgtacagccatcgccaccttccaacctccagaattcttcatgttgcaaaactgaaacactgcacccatgaagcggggactcccctgcccctggcngcntctttctgtctctgagtcccactactctaagtacctcatacaatatttgtcctttgtgactggcttacttcactgagcatagtgtcctcagggttcctccatgctgtagctgtgacagggagccccctcctgtttaaaggctgggataaacattccacttgtatggcaggacggccacattttggatccatggggaatggcccgttttgtggggaggggacacactgtttgntttcccccctngtgggctgttgtggggtaatggtcgntgtgaggcatggggtgtgcaggcatgggntttgaggaccctgttttttt

SEQ ID NO: 458959 - DNA, 529 bp, Homo Sapiens
cctcttaactgtttaatgcctccccacaatcgtctttgctatgtgtgttatgtgtagaattctgtctttgagttcatggtatgtgtgtgagggtaccggggtatatggagtgagtaacaaagctgttactaatgtaagaccacatggtctcactgagctttgctctctccctttctggtctcctcataaaataggggttatgggaaaaggcagtgagaagatttcagagttggttctgagtgaccgtgaaatcacctcatcactccctaaatatcagtgtttttagacctgttgatcaagtccagtttctcaagggacatttagcccaagcagctcaactaccatacaaacagggctgtatcagaacaatgttgtgataccccacacacttgctatgtgacatttatgaaaattaaggccccatatctacttcgttgtgtgatgattttgatgtgcctgacattaccccaacctcctcgccttatttagaatatcagtttttctaatttattcccaaacttttagaaaa

SEQ ID NO: 458960 - DNA, 414 bp, Homo Sapiens
  misc_feature (272)..(323): n is a, c, g, or t
  misc_feature (355)..(355): n is a, c, g, or t
  misc_feature (383)..(383): n is a, c, g, or t
agaccagaaatttattgtctcatagttcttgaggccagaaatctgaaatcaagctgtggcagagcatgctccctctgaaggagctggggaagggtctgttccacctgcttctggcttctggtagcctcaggcatcccttagctggcagacgcatcaccccaatcctgcccccatcaggtggctgtttgcacattgccttctaggtatgtctgtctttgtggccaaatcttcgttttctgttttttttctcaaacagggtctcgctttatcannnnnnnnnnnnnnnnnnnnnnnnnnnnnnnnnnnnnnnnnnnnnnnnnnnnttggggtcaggcaatccttccacctcagcctntcagggtagctggggaccacaggcacgnggccacccacatttgggctaatctttgttat

SEQ ID NO: 458961 - DNA, 408 bp, Homo Sapiens
  misc_feature (202)..(239): n is a, c, g, or t
  misc_feature (333)..(333): n is a, c, g, or t
ggaagagatagtatattcttttaatgtactacaaaacctcccaaaaggccttgccttagcattacactcctaaggaatagaatttaacaatgtctgctaaattaaaatattaattagacaattataggggataatcaaaggaaacaactttgtagtacttttagtagcagaacttatcaaattgttaataccagaaagacannnnnnnnnnnnnnnnnnnnnnnnnnnnnnnnnnnnnncagtggaaaactttgcatgtatgttgcctgttttcagtatgtatgtcagaaatcaaaaaagtctgataaatgttgccacttgaaaaaaatatcngaaagtcttatttttacacaggatatactatacaaattaatgatgtagggtactttagctactgtataggggaaa

SEQ ID NO: 458962 - DNA, 207 bp, Homo Sapiens
agtgtgttttgggaacaggttgagagcatagcatgctcatattatatattcattttaccacttagatttgaattgaggcatctcttagaataggttttattttgtgcataccctcagaggacattgtccctctcatagaaacagatattcaaacatgtaatctgctattttattttaaggtaatagatttttatgattactgtttgg

SEQ ID NO: 458963 - DNA, 460 bp, Homo Sapiens
  misc_feature (21)..(21): n is a, c, g, or t
  misc_feature (33)..(33): n is a, c, g, or t
  misc_feature (347)..(347): n is a, c, g, or t
ttttaaaaagaactaatttgntttcaagactancttcaaatcctcacaaaaagacattatcttggaggtctatcttgattcaaactctggacttatccacatttgtaacttctcctgagtactgggatagctctgagggacagctccccaggtggccttgtaccaacacagactcccctctttcttgcttgtagctctctagaataactgtagaatgtgctggaagtgcaacatctgagacagggactggccagaacagccagggctctattccaatctcccgtagaaatgggatgccttccaatgctttagttccttaaagccctgaacaggatgccttctgcggnccctctgctgcagtgcaagtagggcacatgcagataagattccatcttccctgggcagctttcctgagccttgggggatgcagcttgccctgacttctaggtttctattgtcc

SEQ ID NO: 458964 - DNA, 440 bp, Homo Sapiens
ttaaataacaaacaggtatggatcccttaagcagctggccaacttggggaaacaattatgaccattcagtcccttcccacaagccgagggacccaagcatgtctgttcatctcccatgtccctaatcgccctcccaggaccatgaccacaggtataaacctgccctttctgagacagaaacacggagtgaaatttacaaagcaccacctgcttgatataaatcccactcctggagaacagatccaccaactctggatgatgtttgctattctggcttccatgacccagggtaaaatttgtattatcgccccaagtataaacatctgtaggatcagtattcttgaatactacatgagttggtctatccttcattacaagatccaaagctgacaagccttctttatcttgaatatacagactaacaccatgcttcaatagag

SEQ ID NO: 458965 - DNA, 407 bp, Homo Sapiens
  misc_feature (367)..(367): n is a, c, g, or t
tttacaagatttaggtttgctcttctgcctctcactaactgtttgagcttgattacttttgtaaacttcaaatgcagacttctggttatcatcttcatggaaattcactttattcaaatgagaattcagagttccctgatattcttctgggtttttgtttaagtgtattcttggtttgaagccatgagttaaaaagtcacaagtatctgtgtatataaattgtaaaaggtattcaaacatgtcaggatgaaccttctctaccacaaagagatggcaccctggcagaatcttcatctttctggtaaatatctgtaaattctgaagtattaccatctgaaaagaaacaatttctgaaaaaaatcaggantgcactgccaaaatatatttatgtggcaggggaaggagtc

SEQ ID NO: 458966 - DNA, 129 bp, Homo Sapiens
cgccaatctaatgcctgtttttgaaacattctatgcaactagtctattttctattttattgttcagattttaccacatttctaatcaggctgccaaataaatttttagaaaagaaagttataagcccag

SEQ ID NO: 458967 - DNA, 354 bp, Homo Sapiens
  misc_feature (167)..(167): n is a, c, g, or t
  misc_feature (341)..(341): n is a, c, g, or t
ctgctgccccttttcattttgtcatattcatagtaggaaaggtttgttttggtcaaaacaaaaagccgttctttgtaattatttggtgacattttcttcttttgctgtgatcttttgagaagaagttcttctagaatagattttgtatccatattatcatctttcanccactgattagcggcagcatctttcttttttccaaaacaaaaaagttgtttccattgtataaaagtcaattaattattacagaaaattcaaactgtcagaaaaatggaaagaaacatatctgaaattctactatctggagatgaccactgttcacattgtgatgtatgttcatnccgggcacctcca

SEQ ID NO: 458968 - DNA, 312 bp, Homo Sapiens
  misc_feature (211)..(211): n is a, c, g, or t
  misc_feature (261)..(261): n is a, c, g, or t
ttttaaggaaagtagcaaggcataatgtaatttagctagtttttaatagtgttctctgtattgtctattatttagaaatgaacaaggcaggaaacaaaagattcccttgaaatttagatcaaattagtaattttgtttatgctgctcctgatataacactttccagcctatagcagaagcacattttcagactgcaatatagagactgtgntcatgtgtaaagactgagcagaactggaaaattacttattggatattcantcttttctttatattgtcattgtcacaacaattaaatatactaccaagtac

SEQ ID NO: 458969 - DNA, 346 bp, Homo Sapiens
  misc_feature (53)..(53): n is a, c, g, or t
  misc_feature (162)..(210): n is a, c, g, or t
  misc_feature (232)..(272): n is a, c, g, or t
  misc_feature (290)..(304): n is a, c, g, or t
gaaaaaattaagagttttgctgttaactccttaagagggctttaaagcctttnatattaagtgccatacaacttcagatgccttctgaatactgaacacaagtgtaatattatagttcattaaatgtcttaggaatcgtgtggagtgaatgcaaggaaaggnnnnnnnnnnnnnnnnnnnnnnnnnnnnnnnnnnnnnnnnnnnnnnnnnctacctttctagctaaaaggtnnnnnnnnnnnnnnnnnnnnnnnnnnnnnnnnnnnnnnnnntagccaacttaacaaagnnnnnnnnnnnnnnnggtttctaaaatgggagatcatagttttcaccttcctagagt

SEQ ID NO: 458970 - DNA, 379 bp, Homo Sapiens
  misc_feature (84)..(84): n is a, c, g, or t
taataatgccgtcctttttacggtctataagcacatgaaaatactgttaaaaaataacccttggagcaaaggtgtaaacataanccccaatgatttaagttgatccatatgtaactagggtcatgttgatgcacctaatgagctttgatttatacgagaatcacttattacataaacaaattattactgtgaaaatcaatttggctggtacatgctactaatttcaggcatattggtgggcctgagcctcagcagatgaatgccaattgtcctgagcacacaggcattatagtctctcattttctaagtgacaaaataagaattataaaaatgtttagaatccatgttaaaatatggactttagatactctgaatgcca

SEQ ID NO: 458971 - DNA, 434 bp, Homo Sapiens
ttttttttcttcattgggaatagcttgtcagggcctaatgatttatttaaatggagggatttttataggcctagaatattaggatcctttattaacttttacattccatggataaacaagagacagcatgttgagtttcctagggaacacaaaatctcctttttaaatcacatattcagtttaaaacttaaagcacttcataagcattatttatgcccaacaaataaattgtcttctcatacttatcaattgcttactttattaaaacattttggggagaacatatgtaaaggagtagtttggagcacttacccaattctcagggtgtcacttactttcattacaaaggaatgacacgggcaacctgctggggcggaggcattcacttctttccttccgggcacttttcctccattcatggcagtccttgcagg

SEQ ID NO: 458972 - DNA, 560 bp, Homo Sapiens
  misc_feature (88)..(88): n is a, c, g, or t
  misc_feature (463)..(463): n is a, c, g, or t
catgaaatcaatattttattcagtgtcaaagcatcttaactgaattgtgtaagtaattttgtctgtaattttagaagtaacatttgtngaaaatatcaatattatcagttgtgctactagaaatattgaaggggttaattctgaatttattcatttatgcagttatctatatccacttaggtacaaaacttttgtaagaaagataacacttttattgcattataatttcatattttacaggagtcataatgcaaacttataaggataaatatatacatgatgctaccaaatggcaatgtaaccactaagagatttaaaacataaaactagaatttaacaagcaaaatacttaatatggcttttaatggaaaataactgtttagaaatgatttgttattgccccattctagtcattccccatcaagtgaacataaaattatgatctccatttaaaatggtacangttatctaagccaactttgtacttttttgctacttttttgtagcatgtatgcagtatgatttctggacttccttaaatatacatacatatatacata

SEQ ID NO: 458973 - DNA, 370 bp, Homo Sapiens
aaatgaatttaatctctctctagaaacagtgcactgattttacaaatgtccacatttggttttcagtttaccaagatgatgccagtatagctagtgagatgcagcaccccatcctcagccccctcgcctctggaagagacaccagactgcaaagggcaccgcgtacagaagctaacggaacttgaatgacaagacaaaaagagcagaatcagttagtgtgacacaacattctaacatgcctgattcttacatcaaatatggtaactttggggttggtagggggagacaaacaaggagaatccacttgggaacaatttgatgaagtttgcaaatcagcactttacccccaaattaacaacagcttgtatgg

SEQ ID NO: 458974 - DNA, 312 bp, Homo Sapiens
  misc_feature (286)..(286): n is a, c, g, or t
  misc_feature (302)..(302): n is a, c, g, or t
accagtgattttatgcaatagctgaagaaaattttctgaagattaagctgtgaaatgtatcaaccctcatctaatttttgtagtacaaaatgacatcctgattccttttaaaaattcacgtttgtaatttatttttctgcatgtattgatcaaataagcctaaaccaaatatgtgcaataaaactgagcctttagatagtatctagtgcattgttaaaaaagattatttctagatatttatgatgtttttgtttacgtagaaatcatgaattcaaatctgtttganagatgactggcacgangcttgggcgg

SEQ ID NO: 458975 - DNA, 442 bp, Homo Sapiens
gcaggtgccccacctgttaggagcctccccacactgaaaggctgcctccctcctttcccaaaaaagaaatccggagtgtattggcccttttctacagaagtccaagggaaatgactcagggagaatcctagcagaggttgaatccaatgctctgatttatactgtgtctcggtggccacctccgatggatgtgtcatctcagacctgttgcagccggagcctcaagtccaatatcagatgaagctgaacccacaattcggccaccgcctccttccagagtttcagatggccaggtgggcagaggcgggcagtgcagagaccccagacgtgccggccctgtcctccctaccttctcaagattaggaaggggtgctggaggggacaggggcagcttgggagtggtgaggaagctcctagattcggggctcatcccctggggcct

SEQ ID NO: 458976 - DNA, 338 bp, Homo Sapiens
tgacctctttgaatggtatatttgagaggatgttcatttcattggttaaccatggactactctgtccacgtagtaagaacatgcaccagtttttacctattatcatggtagtatcatctgccaaaatttcaaggcattcattttattctttgaacaactcttcaccatggtgtggacatgaattttcatatgtgttacttgactagaagtataaatggtttactatagatatccaaaaaccttgagatttgctcataggaaatgaatattgtgatgaatcctgggctctagagtcagacttgcttgggtttaaattcttgctctaacacttactgttt

SEQ ID NO: 458977 - DNA, 409 bp, Homo Sapiens
  misc_feature (38)..(38): n is a, c, g, or t
  misc_feature (377)..(377): n is a, c, g, or t
  misc_feature (381)..(381): n is a, c, g, or t
gggaactgccccaaaaaccctttggaagggtaaaaatnattatggcccaaagtggtaaacataggtgcagcaggttttgttaatagaccgtacagactccaccttgttcagctcgttaaataatccaacactagtctgttatcaaggattatatttgcccatacagtctagggattcttgtattcccttttaatgcctgacctgtgctggtggctaatgattctagggtttgagtcgaattcttcagggttgactcgtggtaggcaaagtcacatcagggggctaagattgtcctattactaccctgattcctcccagaattaatcctattgctcattatcttctgatgttcttaggtcttatggggttatagacgncgcncctggagggggaagggtggtcaacatac

SEQ ID NO: 458978 - DNA, 504 bp, Homo Sapiens
ttttttttgatttaaatgttagatttattgatacatgcttttaaaaatggtagcttttaaactgtaatcaatacatttgcattttcctaaaaaaagaagacatttattcagagaaaactgtggtatcatgcaggaaaagcagaaaaaaattgcctaagtgtgatcccacatacttgtcagttggatattgcaagagaggatgagtaaatggttgaactcactggaattacacaaatcttatcacatctatacacaatcatccaaatattcgaggatttagcaatgtatactaagatggccatgcaaacttgtgagttgtagctttgcaatttggggacatatgatacctattttacattcatagtgtaaatcatattcatatgatacctattttacattcataatataaattatattcatatcatatctattttataattcataatattaatttcattatatctgttaatcacatacttagaattacagatatgaattatttct

SEQ ID NO: 458979 - DNA, 435 bp, Homo Sapiens
ttttgaatagtcactctgcaattggggagggtcgcaagattaccttgttcaacaatttgttagaagaactcacagaatgtggcaaagctggtatcctcaccatcacagtttattatagcgaaatgataccgattaaaatcagcaacaagaaagaaaaggtgcttagggtaggatctctgggagcctgggtgtagaacttccagttctctcccagtgggtcacgcagagtgggctcattcctcgcagcaaaaacctgcgatcgcatgcacagagtactgctaactggggaaacccctctgggagcttggcatgcagaattcctacggaagggttgctcccacgggtcaggggcttgacccaccttgcaaggcttgaccttcaaccttttaggttccttcccggaggtggagttcaatgtttggggtgggattcaag

SEQ ID NO: 458980 - DNA, 488 bp, Homo Sapiens
  misc_feature (37)..(37): n is a, c, g, or t
  misc_feature (50)..(50): n is a, c, g, or t
ggcaattccctttccttaagacctgtcaaacttttangtggcctaactancataactgatgttccctccttcaagctttcccaaagttctggcaaaatcctaaataattaaaacccaggttaatcatctggaaaacacaactttgatttttagtcgttctccattgtgtcctgagtaaagaccaaacttcttagtttggcttacgagatctgtgatctggcctcttcagtcttcttagttcgggcttctctcttgcgttcagatagattatattccagccaacctggactcaacacacctgcatgctcactatgtttgttcctgcttctgagtctgcttacctggtcctgtatgtttagaatgcccagcctcaccatgtctgcctgttaaaggccttcctatcctctaagtcccattttaagcctttctggcagtgataatctgtgttatagtaatctcattttaagttgtatttttctgattattac

SEQ ID NO: 458981 - DNA, 467 bp, Homo Sapiens
  misc_feature (431)..(431): n is a, c, g, or t
  misc_feature (437)..(437): n is a, c, g, or t
cctaaaagcatttcagcatttcaaaaagtaatttttgttagaaaagaagtatgtttagattctttcccagtcttgtttctaataggcaagtaaacattttcttcattatatacaatctataacaacagtgcctttgcccagctcaaagataaagtgatttgagcaagacaaaatgttggacattaagaaacagttccctgggcataatcagaatgctaaaattatttttaaaaaaacttgtctacttattatggggtacataatctaattggtggtatgttagagtaaatgggtacataggcaagttgtgggtgtaaactggtttcatgtaatgtttgggagcttaaggacaaaattggggccctccagctcaggggctataccatagggtaggagcctcttcttaaggctgggcttcccgatatggctcntccttncttcacttaattctgcaagtttttccgggg

SEQ ID NO: 458982 - DNA, 694 bp, Homo Sapiens
  misc_feature (21)..(21): n is a, c, g, or t
  misc_feature (45)..(45): n is a, c, g, or t
  misc_feature (52)..(52): n is a, c, g, or t
  misc_feature (184)..(184): n is a, c, g, or t
  misc_feature (649)..(649): n is a, c, g, or t
  misc_feature (661)..(661): n is a, c, g, or t
aaaaagctctctctgcccccnataaaagtgggaatccagaaaaanagggctncaagcttctttaatcctccttccagtgcccataaatactgtcacagcaaaaaaggccttcagtgtctgctggccagaaacatctgccccaggcacaaatgggccacaagggcagggtactggttaggggccngcagtggaaaagccagacaggttctcaccaggggcctgcagagtggccttcactctggaggacgcctgaattacaagtatcaaaaagaacccgcctttttgggcttcttcttttccttgcttagccctgcactaaggggcagtcttgctggacggtgccctgccacgttgcggcagcccagatggccgcactgccaaccacagcacggcttccccatgggcgccagagggagactgagcaaggagggtctgcgtggaggatgcacactggaggcaatctgtgacaggccccaattcacgacaaatttagttcccaagactgaaccaaatacagaatgcttttacatttttcaccaagtctaccaagttgaatagtaatgaatgaaacttgtacatgaatgaaaaggccccaaagacgctcacggcaatccttgaaagttataaaggaacattttcttacaggtgnaaaattgtgaanaaatacccaatgtctgcctcccgggtgctcaac

SEQ ID NO: 458983 - DNA, 487 bp, Homo Sapiens
  misc_feature (477)..(477): n is a, c, g, or t
tacagctgtgaagaaatacctgagtctgagcaatttataaagaacaaaggggtttaatgggctgacagttccacatggctgcaggggcctcacaatcatggcagaaggggaagcaaagctatccctcttcacatggcagcaacaagaagtgctgacccaaaggggaaaagccccttataaaaccatcagatcatgagaactcactcactgtcatgagaacagcatggcggtaaccaccaccatgattcagtcacctcccactgggtccctcccacgacatgtaggtattacaggaactacaattcaagatgagatctgggtggggacacagccaaaccatatcagtgcccatccacattgggtcatggttatctcagtgtcttccagaaacacccttcatagatatgcccagaaattcgtgtttgaccagctatgtgtgttgtcttaatccattcaagtaggtgtctaaaatttaantgttcaggat

SEQ ID NO: 458984 - DNA, 412 bp, Homo Sapiens
  misc_feature (215)..(215): n is a, c, g, or t
  misc_feature (349)..(349): n is a, c, g, or t
  misc_feature (396)..(396): n is a, c, g, or t
cacaggtttgtcttttaatcagcatccatgaaaattcattaaaaggtctgatacgaaaagcaccaggctaacaaatcagtcctgaattcaattttacaaaaacaccctctcctcttccatctcatccctaatattcctacgttatctcgaggtgcagagaaatataaaagggatccttgacataaaaacgtattaaaaagccaccatgagtagantgtacggtaacagcgtctgactcggccggcagacaggaaacctacagaaccaccatgccagggctttgtgtgagcaggcgggcactccacatgggcacgtgtgtgagcaggcaggcactccacatgggcacgtntgaggcaggcgggcactccacatgggcacgtgtgtgagcaggcgggnactccacaatgggcac

SEQ ID NO: 458985 - DNA, 625 bp, Homo Sapiens
  misc_feature (41)..(41): n is a, c, g, or t
tcaaatatgcaaaggaaggagcatcgatttgaaaaacaganaaattatagtatctccaaacacagttaacacccaagtatctcctggccaggtctggcctctcctcacagatgtgtgctaaatttgtctgtgacacttcaattccagtttctgctgctaaaacataatacagcaaagcttcatgccatgaaccttccaggtaggcattgaggcctttgcggatgacatggcccaagtagccatttttctcagctacatgttttgcccatacaacagctttctcaggatctctagggaatgtctccaggttgcctgtgatttcgtagagagaacaccacaaggtcccttccatgtgtccaccttgcgcagccttatggaaatattcaccagctaaagtttgattccttccaggaactccagggaagatgccatccaaatgcaggactccaagattgtatgacgcatctgggttccccatttcttctgcttttaaccagtactttgctgctttggcgtaatttttcttgaatttgtggtaataccatcccaggccattgactgcctgatgcaatcccttggaagctgctttcttcatcagctctaaggcaagccgtctgttcttttt

SEQ ID NO: 458986 - DNA, 325 bp, Homo Sapiens
  misc_feature (130)..(130): n is a, c, g, or t
  misc_feature (145)..(173): n is a, c, g, or t
caattgtataaaaataattttatttactactgtaaataaagtagtgcaaagagtagtttggacccacaatattgcattactgatttattcactaccttagcagcatgtagtatacagacattctgctctncctcttcctctctannnnnnnnnnnnnnnnnnnnnnnnnnnnntatccctgtacagactcacgcaggcatgaggggtagggatgaaactataagctagaggcttacttgctgcatattcagttgctgccagtctattctaacgtgtaattcatggagaagactacagttaagtactaagaatcttctaaatgtaa

SEQ ID NO: 458987 - DNA, 670 bp, Homo Sapiens
  misc_feature (56)..(56): n is a, c, g, or t
  misc_feature (67)..(67): n is a, c, g, or t
cccaagagaataccaagacaagcaggctgttccctggaaaaaatctaatgcaaggngggctagtttnagcaaattcactgcctcctcccatgcacgtggtagagagtaccagtatcaacatggccctgttttctgctaaaaccagattttgaggaatcagagacccccaacactactcactcagtagctagcagccccttcctttcaactgggagtgttattagaatgaaaagtaattagttagaagggcatacatctcagtggcatgagcattgtggaatatcctttcctaggcacatttgtccactaagggaacagcctcagaaactggtacagcaatgggtgagatgagatcctggagagagaacacagccatcccctatagaaaggcacagcttttgggcttctctggcctgaatgccttctggggtatttccatatgcaacagcccagagtcatagccttgggcaaccacacataggaggtttccttcttcactttcaggacacatacattcacttttcacaccacttgggggatgggaaattacctacaagagttgaaggttcaaggggccttccccagggattttcatttctttattcaggtttccttcctgaccagtttggccaaccattggccagctatggggcttattcttcatttgttt

SEQ ID NO: 458988 - DNA, 434 bp, Homo Sapiens
  misc_feature (329)..(329): n is a, c, g, or t
  misc_feature (360)..(360): n is a, c, g, or t
  misc_feature (390)..(390): n is a, c, g, or t
  misc_feature (418)..(418): n is a, c, g, or t
caaaaggagcatttactaggaaactaaagggcaaccaaacagaatgcaagagaacagaggcagagttgcaaatgggctgagggagttcaaatttataaccagcctctgctcacagctgtactggctaggcaaagctttccagacacaaagccacctgcctgccatgtgggatagtactctttgcctgcttgcccctacaaagccaccttctatttcataccaataagccagttgcatcctcattagtatcccaaggctgctgggctctctgggcagggaagcttctgaggtggggggaacagtagggcacagctgcctcagggatcttncaacccggggttccatttgccaagggacatnttcaggaattttttggggatttgctggccncgatattctttttgggggccagttttgnttttttttcgggggcc

SEQ ID NO: 458989 - DNA, 331 bp, Homo Sapiens
  misc_feature (282)..(282): n is a, c, g, or t
  misc_feature (295)..(295): n is a, c, g, or t
  misc_feature (307)..(307): n is a, c, g, or t
ataggagtgagccaccacgcccggctacgagttgggttttaacagaagaggaccttgaatgctgaagcttcacagggcggccaaactaactcgctgatttttgcaagaccacagtgtaaaggtcggatgtccacctgaagaaggggtgggtgcaactctctgggtgctgcacacaccatgaccagcctgggcatgcagcaccccagctcccatccattcacactggttgcctttgtgagggtccattttgagagggcttttcagaggcctttttaatgaganaaaaaaatagctnttctacaaagancctaagatacatacactcctattt

SEQ ID NO: 458990 - DNA, 270 bp, Homo Sapiens
aaaatgttcttaatatttggcataatgcatagtttgccttaattagaaactctttgataaaagtaatgtacttttcaaagtgatttaaaaaactgtcaggttgtagttttttatttacttgacttccattctattcctccctatgctctttccctatttttccaattttatctttcactactaaaaacctaaaagtgaaggtactactcttcttcttcactttaatgtcaaatataaaggtactccactaataacatatgggctactatt

SEQ ID NO: 458991 - DNA, 477 bp, Homo Sapiens
aatttccttggtccaaagtttaagtttacaaagaacatgagtggcctcgaatcagatgactcttcaactccaaaacactcccttactgagagtacttttataaaaacacacaacaaaagtctacctctctccaccctccacaaattgcaaaagtgaacatctgaaatgtggccactgtagcttttccctcaaaagcaatcatggaaggtgagctgaatcaatccatcttcatatccacttcctccaatctaaaggaatagctgaaggacgcagctaatggatgagcttaccagcaaaatacattacatgagaaatatgctaatgtaggctagaggggtaggactgttaggggcaggagggaaaaggacaattcacagaactagtggctttttcaaaggaaactggggcatttttgatcatggagactggtgctcacctaccatgaaggacatgcacagttagtcactacttaaccac

SEQ ID NO: 458992 - DNA, 356 bp, Homo Sapiens
  misc_feature (109)..(109): n is a, c, g, or t
acagcaaacacctcaggggtaaaatgcctgaagttccagagcacgcaccctttaaaatgtgactgacgggcattccccatgggaaggcaaacagtgcaccctcaattgnctgaaaggttgtgggctatttaaatgcatttgaattcactcctaagttattcacacacgagcagggcgaacatctcggcaaggagcatacacttggtgcactcagaggacagggatggaattggaatgtagggcacagttatttaggacaagactgtttcctatgattaacttacaagatgtaattcacccggggtctcattaaagctcacagcagttacctatgaggctcaaaccaaggattgaca

SEQ ID NO: 458993 - DNA, 646 bp, Homo Sapiens
  misc_feature (410)..(501): n is a, c, g, or t
aagtgactttaaaatttaaaaacccagaattttaggtacttttgtattatgaggaactcactatactaggaagcaacttatgagtgtgtaaatatttgatctagcagcaactttccactgatcctggcaggtgacagctctcagtgaacagcgctcatcacctaaagtgagaggctgtctattctcattgtgaatgtccctcagagtcactaggagccattgggcaggccaggaacttactgcctacttcctcgtctgtcaggtggaggtgttgacacaaggccttgaacccttcaacaaataagacaacagccacatggtgcctgtaagtattgtaagaatcggcggttgtggcatttcattttgtctgatctgggacccgccgtgggtttccctttgaactgaacatnnnnnnnnnnnnnnnnnnnnnnnnnnnnnnnnnnnnnnnnnnnnnnnnnnnnnnnnnnnnnnnnnnnnnnnnnnnnnnnnnnnnnnnnnnnntgtgcagtcttgctgcagattatagataatgtacataatatgcacatcaccgcccaacagataatagatattattattattactgttattattagctgatcatagtttaggttataaccatttccaaaagaatttcctttgtaag

SEQ ID NO: 458994 - DNA, 292 bp, Homo Sapiens
cgtatatttagataagtgtttaaagcatcttcctagccacctgattgaggtgcttcaaatactaacttacccccagaacaagattgaagttaaattacacagcacacatccattacacagtttatatttgaagtattttaaagtaaattattgcataataagtaacagcaataaattctcccatcttttgcattactttttttaaaatctgattgaaatggactattggcctctatctattctgtgcattgaacacttaaaggcatgatggggctgggttccgtggcttaca

SEQ ID NO: 458995 - DNA, 354 bp, Homo Sapiens
  misc_feature (247)..(247): n is a, c, g, or t
ccaaagtctcatttgccttaaacaaatctttgctctaaaattgcacattcctccttgaatttgatcccttaaattattaccctactttattctcttaaaataaaataaataacttgtagcttttcccccgagattagctggccagacatgcagcgtgacaaacctgtgttggtttttgctgatggaatctagaaaagtttttgtacaaatctgccccttccttactgcgtcacagagttctacagtngttttaagaggtcccatggggtccttaatatgatacatacatgcacatgtatgtatatatatgtgcacatatatatcatggagatatggctttcattatgttattat

SEQ ID NO: 458996 - DNA, 347 bp, Homo Sapiens
gaatccatgtgaggttgcccgatacacagcagagaagaaaaatattttagaaaccaagagtgattcccatcttctcactcaaaagaagaagtgctaagcatctctagacttcctgagttgtggatctgctgctccttatctaaggtcaggctccacacaatccagactcttccaacaatcactggatggccggtgcctcctgcagcagtctttcaagctttctttttttaaattgcatttcataacaggaaacactttatattgtgacccagtatacacagtaaatagaatatttagctgaaacagtatttcaggaaccaatacttaaccattttatatgctctatt

SEQ ID NO: 458997 - DNA, 395 bp, Homo Sapiens
  misc_feature (273)..(273): n is a, c, g, or t
  misc_feature (340)..(340): n is a, c, g, or t
  misc_feature (367)..(367): n is a, c, g, or t
gaaaatgccataatgctttaaaaaaagaactaatctgtaattctaaagtaaaaaattttttaaatgacatggaaaaatttacaaaagaggaaatataaagtagaaaaaggtttcaataaaagaaacatgagtgaggtttgtaatagagtaggattctgcatcttctcaatgtgctggccttgctttttggatagtcctgaaaacaaatactactttagaccaattatgacagtggggagaaaagtttgctgtaacagccagagtggccaaaanttgacagtacaggattacaagattccaaatttttaaccgacaaatcctagcttgattagggttgccntttaacatagggtttatttccaaagtntactttcaagggacttgggggggtggat

SEQ ID NO: 458998 - DNA, 479 bp, Homo Sapiens
  misc_feature (51)..(51): n is a, c, g, or t
cttgccgggaaaactgcctgaccccggttttggtttaaccaaaaagaaaanaattgcacctgccatgaaaatttttttatgggacatccctaatcacttgcccttcactaggaggatcatccctccatttcaacggcatcatgcagagtgctggataagctatcattaaggtttgtcaggtacagtcctatatcttctaaaatcttgggggccaatttttgaccacagctaaataaaatctctccttcagagatgggtttatctaaagtttcagtttcagtgacagtaacactcaatgtgctctccagtgttgatgaatcagaacctggcatctgtgagggggaaggggccttggtgccggcaggaaatggcataaagggaactggctctggaggtggaggctgagcagggaaatccatactctctggttcttcatccttagccacagacattacaatagctcttggatgaagttcttc

SEQ ID NO: 458999 - DNA, 873 bp, Homo Sapiens
  misc_feature (190)..(206): n is a, c, g, or t
  misc_feature (507)..(542): n is a, c, g, or t
  misc_feature (627)..(627): n is a, c, g, or t
  misc_feature (798)..(798): n is a, c, g, or t
  misc_feature (854)..(854): n is a, c, g, or t
agacagtttcttgtttatataatatatttacaagcaaatacatgtaagaatatgtgacataccatacatttgaattcctccccaccccattttaaataatttcaacaactgcatagttcacacactattttgcacatggcttttttcactttaacagtgcatctcaaagattattccatatcaataaacnnnnnnnnnnnnnnnnngtaatacatagtattccattgtactgatgtaccatcactttaaaaccagtctattattgataggacatttgattttttctatttggctgttataaaaatgttagaatggaataaccttggggctacataattttataaatacatacagataattacacctatagattaaatgcctagatgtcaaaagccatgccctttcactactctatgctatctcaggattctaagaaacaactcacaatcagacttataatgacttatacttattttatttaaaaactttaaatacccaaattatgcnnnnnnnnnnnnnnnnnnnnnnnnnnnnnnnnnnnncagaatatgctcaaaaaccaaacagtctgagagagggttttaagccaaggtaaaatgactttaaaaccagtggcataaacactgntgctgggctgtcctcttcccggttcagaaggtatctgcccccgaagattccatgtcctcctggcattggtgctgagactcagagactgagagcagtcctcgagggttcactgacggcagcatcactgacatcttggcaggggggcatctgtgaagccggagagtggcacgntttcccactgcacaaaggagaagctcatcagcccacatgcgtacccgggtattcgngcctatgcctgcgaatata

SEQ ID NO: 459000 - DNA, 470 bp, Homo Sapiens
  misc_feature (32)..(32): n is a, c, g, or t
atgtggggcctgaacgggtgggaacgcaggangaacactggcaagccactgcccgcggacttgtatctcttgtccttcccatgatttgtttcatcttaaagagccaatgtctctgccttgagcttctttaactgaatagaaacaccaaaactttttggcttctactcggaccatgttttcaggctggtctccaaagagagggatccccaccatgggcacaccatgctggatggcctccattatgctattctgcccgccgtgggtgacaaacagacggatgcttgggtgagccaggaggtcactctgaggaagccagtccacaattttcacatttgcagccaggtggacatctttgggccaatgagaacactgacacttccatatcaccccttggggtaggtgagcaaaggcattgttcatctccttgaagatttccggattctgacaggtgttcaccatggagcccaagg

SEQ ID NO: 459001 - DNA, 688 bp, Homo Sapiens
  misc_feature (653)..(653): n is a, c, g, or t
taattccttgccaatcatacgctgctttttggtgtgtgtttcttttaattctgattactaacactttaagggatgctgccttcctgtggttacattttctgaactattttatgagattagttattcttgatttaggatataccatgggccagccatcaggctaaggagtttatattttatcaataattctcagaaaaaatttcctcaataatttgtgtcatttccatctcacaaatgaggatattgaggttctaaaaggtggtggtactgaaaactcgaaaatgtacctctgtttctcatttccaaaatctgaggttgcacctgtgtttctcatttccaaagcctgaggatgcacctctgttcctcgtctccaaagcccgaggtcccacttctgttcctcatctccaaagcctgaggttgcacctctgtttctcgtctccaaagcctgaggttgcctgcaagtctcttgaggattttttggtgtaaacaggttgagtttctggataggtgggcatattggcagctgaatatgtgggttttgagtgtgaaatacaggttcttagctatgacccagcaatcttctacttgttctgtgctcttccacataaattgcttttcttgattgtattttcataggagcatttctgagggtnggaggcagggagcattgtaaggagacatgttcagt

SEQ ID NO: 459002 - DNA, 513 bp, Homo Sapiens
ggctaagccctatatggagctgggagatgtaaagacatataatgtcccagggatgcaatcgcacctgccccaagaaggcatgcacctcaaccaactttctcaactttgcctatcatgcttcgatctaaatcaaattgtgtttgtttcacagggtggaaatagaggacttgtgtgaggaggtgccactgtgattgagtcaacaatggagcaaatgaagcgctaaaagggtaatagcattttcctcaaattatacgatcatcattggaaacccagcattttgacaaagtgttcaaacatcagagaatggagttagtatcacgtagttgagagccatggtattgggccttacagtctgatttctgaaagccttataatgagggtggagtgaatatacattccattctttggctgtatttttgttccacaaagcctgcaattttcagtcacttgaaaatgtaattatagataatgtttgcatcagtagcaagaatacaataagcacacagggcatga

SEQ ID NO: 459003 - DNA, 575 bp, Homo Sapiens
tatggcactgactggtagcccaactgaatcctgaatcaggttgtggtggcctgtcatctgcacccacacacactcagccgcagtgaggactgaatcaggttgtggaggcctgtcatctgccccccacccacatagccgcagtggggactgaatcaggttgtggtggcctgtcatctgacccctccacacacagccacagtgaggactgaatcaggttgttgtgacctatcatctgagcccacaaacagccgcagtgaggggactggtgtgaaaagagtcggcatttccctttaagaagctgttggtgggaggcaggagggaggtgctgccctgcaggccccatctaacagttggtcattcccatggggcgcctgttacagttctgtgattagtgcccagtcctggtccctgagaacagcgcccagtcctggtccctgagaatggtgtttgtgtccttttactcctccctctgggcttttgtcattctccatgttctttttccttcagtgcctgggttgccgttgaacaactttccctgcctttttcttatggtcaatagggtattcaatggcttc

SEQ ID NO: 459004 - DNA, 495 bp, Homo Sapiens
  misc_feature (378)..(378): n is a, c, g, or t
  misc_feature (447)..(447): n is a, c, g, or t
atggaccaactctggcccaccacctgtttctcagaagaaaattttattggaactcagccacacttactcatttacatgttgtccttgactgcctttgtgtccagtgtcagaactgagtagctgcagcggaggttgtgcctctgggctttaatatcacaaacagagcagcttataagcaacagaaacttacttctcacagttttggaggctgggaagtccaagatcaaggtgtcaacatatttagggtctagggaaggtctgcttcttggttaatagaaagcacctttcactgtgtcttcacatggtagaaggggagagctctggtatcttcaggcccttataagggcacttaatcccattcatgagcgctccaccctncacgacctaatcacctccaaaaggccccattttcataataccatcaatttaagttttcattatatggantttgatgggggatataggcccatagtagggttctatggttccccgaaa

SEQ ID NO: 459005 - DNA, 348 bp, Homo Sapiens
  misc_feature (175)..(175): n is a, c, g, or t
  misc_feature (329)..(329): n is a, c, g, or t
gtcattcttaaagagatttaattatttgaagtgcataaaaggggagggtacatttaaacctctgctatatcacaaactgctgtttttgttgttgttttattaaagacccaccagttttactcatcttcaggtttatggctatagaatgtggggaaaacaaaaattggcaacagantaggaaaaggtaagcaaaagtctggtcaccagaatgtcttctccactgcagaacagacccctttaaaaaagaaaagcaaggaaaatagctatgggctatccacagccagtaatgatagctacagttaggaaagaaatgagaaaggaaaccaggnggcagagtctgggaattca

SEQ ID NO: 459006 - DNA, 276 bp, Homo Sapiens
  misc_feature (173)..(173): n is a, c, g, or t
aggcagctgaagcggtcacaataaggattcccttagggaaattcggaagtaactccgtttacccttacaaagttcttgtttcctttagaattcttacaagtatggcttcttttccactggcctcctggggggagttcttggcagatgagcttgctcgttgttttgcattgaanaaataccatagatgtccagtaagcaagagcaaccagttgattaaaacaaggttggcagtaatgtctgtgaactgaaaccataaaaggtttgtttgactttttc

SEQ ID NO: 459007 - DNA, 162 bp, Homo Sapiens
gtgtgtgaaattaagattaaaatggataagtagtttacaagtatctagtccacactcaattactgttaccttaggtcttttaataaatatatactgattcctgagttccttgagcaaagactctgaattattcaaattgtttttagcactttaagttttcag

SEQ ID NO: 459008 - DNA, 428 bp, Homo Sapiens
  misc_feature (23)..(23): n is a, c, g, or t
tgggtccctttctgaaggccaancagcacacagtcctgtttccctggtgcccccctccttcccaggaagggttgaagttgggggaacagtatttgcaagtactggccccaggagcccctgtcatcctgggtggggctggaattcccagtgggctgtggagtggcagcagggccgatgccgttgacaccgcaggcatggtgttcccctccagcgtccccctgtgggagcggcccttggtgaggccagcagggctcccatggatcagctgtcctgctgctgctctcagtcttctttgagccctgcctctgagggtcatttttctgcaccaagacttcactgctccatttgccttttaatttatcagtgtcgtcttcatcttacttgcagctgttgacttcattgacatagccaggagagggcacttgaac

SEQ ID NO: 459009 - DNA, 507 bp, Homo Sapiens
  misc_feature (65)..(65): n is a, c, g, or t
  misc_feature (89)..(89): n is a, c, g, or t
  misc_feature (131)..(131): n is a, c, g, or t
  misc_feature (145)..(145): n is a, c, g, or t
acctcaccccaccgtttctttaacaaacatcttggttccaattacctccccagtcattggaaaantccctttaaatatcacatagtgtnaaatatacttgcactttaattggagaattaaaggctgttccnaaaaagcaaatttngaattcactctgtgttgggttgaaatttgtaaaccacagctcagaaccagtctgtgaactccgcaagatgtcggtggcttatagagagaggtggctagggaaggcgatgatccgcggatgggtggggaactgaggaggccaagtcagctttgccaggccaccatgtgccgccaggagctgggcagcctgaggagagcaaagatgggccgggagcctccacctcaactgacaggagactgctcaccacatgccctccgagttcccacaggagaatgcacgtgcgctgggcaaggtgccaccctcggctcgggacggcagccttggcgtctggctacgggcgccgctttcacaggggtggctgg

SEQ ID NO: 459010 - DNA, 511 bp, Homo Sapiens
  misc_feature (20)..(20): n is a, c, g, or t
  misc_feature (53)..(53): n is a, c, g, or t
  misc_feature (127)..(127): n is a, c, g, or t
ccccctccctaaaaaggaanccatttaaaggtcctttttaggaaattcaaatncctggtggatgaaggaaaacccccttggcaaggcaaaggaattaaaggggaatttcctttacccctaaataatnggcaccctacccagaaccctcaacaccttaccttaatgccttccttttagaagtcaggaatgaggtatgggtgttatgagtgttcattatcactgccttcctaaaacacttctgttggcacttcccacactagaagtcatagaaaggaaaaaaaaggaaagagactgctgcctcttcccaggatgtagagaagcaggcattctcattcactacttgtataactccaacctttaagaatggcaatttggagatatatgtatcttaaaaatggacatatttcctgacccttcaactccacttctatacgcatatcctaagaaaataattcgggctatgtacatacatgtaacaggatactgtctctactactatctaatcagaaac

SEQ ID NO: 459011 - DNA, 449 bp, Homo Sapiens
  misc_feature (17)..(17): n is a, c, g, or t
  misc_feature (40)..(40): n is a, c, g, or t
  misc_feature (49)..(49): n is a, c, g, or t
  misc_feature (54)..(54): n is a, c, g, or t
tacctgttggatgaaanaaaaactccttaggcaagcaaangaataaaangggantttcttaacctaaaaaataggcacctaccagaaacctccaacaccttacttaatgcttcttttagaagtcaggaatgaggtatgggtgttatgagtgttcattatcactgcttctaaaacacttctgttggcacttccacactagaagtcatagaaaggaaaaaaaaggaaagagactgctgcctcttccaggatgtagagaagcaggcattctcattcactacttgtataactccaacctttaagaatggcaatttggagatatatgtatcttaaaaatggacatatttcctgacccttcaactccacttctatacgcatatcctaagaaaataattcgggctatgtacatacatgtaacaggatactgtctctactactatctaatcagaaac

SEQ ID NO: 459012 - DNA, 558 bp, Homo Sapiens
aggagttagacatttatttttaacaattaaccactgaattcattttcagaaataggcctgaattgcttgttaatttcattacaggaagtaactctaaaagccaattccacttccaaactataattaccatcatctgaatttaacagggaaagacatcttccaagacttcttttgggtggatgcttagttttagaatagccaactttaccctaacccatgtacaagacagttctccaggtggccttggactgacccagttctcccttcttccttgcttgtagttcttaaggaataactgtaggaatgcactggggaatgcaatatcctgatatgggagggaactgcctggaaacaggttgggccttgttgttgtccctcctaggggaatgttaacatcttgatttaggggaactgttttgagacagcgaggttgtgttcctctttcccctggaaggaggatgtactttaaagctttgcccaatgagttatgtggctcctatggtatataacccaaggcaggctgtggtgcaagtgggggcacgtacaatcaagactcca

SEQ ID NO: 459013 - DNA, 428 bp, Homo Sapiens
  misc_feature (373)..(373): n is a, c, g, or t
ttttttttcaccagaaataaaattttattagtaacatgtcaaatgttttaaaatacaattacctttcttcttcctctcagtttaaaaaacaatccaataaaaactctaaatcatgacccaaatatttttaaatgtgaaaaagacatatttcagattatgtaacagatacacattttcccaaataaatgttgtagaacaccatctgcttgatatttgagtgcattcccacagaaataaatttctgcttctcttccttcattaatggcttatgacaaatttatgacactatatttcacaatagctatacccaaaattttatggacccaaagggggctggacaaaaatcacttggggcatggcttcaaattggggncaatttatggtggactggtcctcattttgacacccaatcctccaccccctttact

SEQ ID NO: 459014 - DNA, 387 bp, Homo Sapiens
  misc_feature (13)..(13): n is a, c, g, or t
tttgcccaaaaanaagctcttccttctggaggctaccaacaaaagccaacaaattacagaagaccatagcaagcccagtgaggcttctgctgtgcttgaagagcctagctggaaggcccagagcccaccttacagccccttagaacagccaaggcgtcatcccaggctgtgtgtgtgtccgttcacacctttcagttgggaaacagggatcccctggagacttgtctggcaaagatgatgatattcacaaatcatgtcatgtgttccccccacgcttccagtgtacttctcatagaccatggtgggacactgaacaaattcagaggtgacagtcaaatttacattcctgtgaaaaagtgacataatgacttagccagagcctttgga

SEQ ID NO: 459015 - DNA, 419 bp, Homo Sapiens
agttatggaaaccattttaatgctaggagaatgtttttacttactgcctagggaagctgtagggcttggcccacatccagcagggcctggggccctgggaagccactcactgagttacagccccctcctcactcctgtatctgctcagggtggtgatgtgtttggctcctagactctctctcatggttcccctgacactcctgcttgggaagccaccgagtcactgccaaggtgacatgcttccccatctgcagtgccctatgcttcctgtcgggaaggacaggttgggggaatatccctttgcagagcccatacgatgagtgtgtcaggtataatagctattttcacacaagggaatctcattctgtttttaaccaataatccagtgacacatagggtatttgtttgccattttcaca

SEQ ID NO: 459016 - DNA, 417 bp, Homo Sapiens
tggcctataaaccccactgttgtcccctcaaattgattttgaatgttccacactgtccccccagattggattattcctttgtaagcccctacagggaatgacactaccaaggggaggacttaataaaagaagagctgctgtggtctgaatgtttgtgtcctcccaaaattcatattattcaggtttaatccctaatgtaatggtgtttggagatggggcctttgggagataattaggtcatgagggtaaagatctcatgaacaggattagtttccttataaaacaggcccaagagagctggatcacgccttccaccatggaaggacacggtgaaaagatggctgtctgcaaatgaggaagtgggccctcccaagacatagaatctgccagcaccttgatctttgacttccagcctcc

SEQ ID NO: 459017 - DNA, 463 bp, Homo Sapiens
  misc_feature (17)..(17): n is a, c, g, or t
  misc_feature (32)..(32): n is a, c, g, or t
  misc_feature (40)..(40): n is a, c, g, or t
atggatccttttaaaanatgggatatatcaanggaggaanaagagagggcctggaactcctacaggagaaacgcctgaactgaatagagggaagttgccagcccttctggtgaaatgggagttaaggcaagaatcatcaacggatgcctgaaatcctagagggggaaatttgaggaggagcaggattttcgcatagtctcaaaatatctctctattgattgcttattagctgcaaggggaaacaaagtaagcactaattggagtatccagatcacatcatgactaggtgatcaaaattacatcactggtgagggacagatggacgtcatgtgcttcctgaggtgataccctgagaagaacacaacatcagttatgctatatgccagtcagggatggaaaacctgaaactaatcataaggaatctcagacaaacccaaattgtggaacattctattaaaaaaaa

SEQ ID NO: 459018 - DNA, 1043 bp, Homo Sapiens
  misc_feature (12)..(12): n is a, c, g, or t
  misc_feature (23)..(23): n is a, c, g, or t
ggtgaataaatngggaagtcagnacgaaatcaatttctcccctatagtgaaatgaaacccctttggagtccatccacatttcagatacctcccaatgggtttccgagcaagtcagcagaaaacaaacctgtgtcccaaagaattcttgcagtcgtaacatcaacctcagcacttctcctctcctcttggggccccctaagaaccaagtggctactgctacttttaaggggagaatgcattctgatatgcaaacattatcacagattcatgcactcaaaatctaattttagctgcaagagacttcattataagatgttcacataattaagcagctttcttcccagggtttggaagcctgtctattcttctctctcatttacacatcactgggactacccaggatgtgttttagttttttaaaattacatattttggtttttccaaattgatccacaacgggagatgaaatccataaaaattacatgttttaacaacaggtttgtgtaactccacaggcttgctaattaaagttggaatctgtagacagtcagggtttctctgttctgttctaaccggttcctgatgcatttgccacacttctgccctacatacagatcagcttttattccttggctggttgggagagtatcctctttactgagaagctaagagctgtagatgagacctaacttggagaaaaacaaatggactttcctgcaagcacagacagatccccgttcctgtttctgatgagatctcccacgtaggcagacctgggatgaaggctgtgaggaccactgccagctgacagggccgttgctcttccttgctcatcaacatcccaggagtacctgccaagtgccaggtgtcttgctgtatggactgactcagcgtaaactggatggacactgaccccatcactctacttgcctgcactcttcactgaggtacagagtcatctacaaggccacaggagctggtgatgctctacctggagagagatgacatctctgggtacctggcagcagtgaatgtaccaatcc

SEQ ID NO: 459019 - DNA, 452 bp, Homo Sapiens
tacaagacactaaactgagtaaaacattcctccctgggctaagaagggaaggcagtggtacactcagtaggaaacagcaagtgatgtgttaatacagcatggtctgcgccacagaattctactgtgtacagttgctttctgtgtgactcaggaagttcaagaaggcaaattccaaaacacctaaagcatataaactaatttaaaagaactgttttgcaatccatcatccttagtttttaaccaaattcaggaaatgcagttttatataacctggaacagaatgaactgtagttaccctacgttgtcataaaccatcagtagttttgttaagtatgattgttcacaacaggttatacatacatgcagaatataatgatagctgcaacctcacaaattagggctagaaagtacaatgctaatgtgtaaatttccaagttgctttttaaacactg

SEQ ID NO: 459020 - DNA, 410 bp, Homo Sapiens
  misc_feature (32)..(32): n is a, c, g, or t
caacatcttgtcaattgcaacccattgggcanttgggcattgaagaagaagctgggaacccgagcagcttcccccacgatactacaagtggcagcactcaggaccccctgccatggaacaggctcctctgtcccaggccagcagcaggagcagccgggagaagagaacacactctgcgtgtggaatgtgcttccaacacgtctgagtgcagagggactgaagcatcctcccagtgggaggggagtcctgccgaaaggctccctttccaagtgaccccacagtgtccaagctggtatggggcctacacagacaggcaggaatattacagccctcagaaagaccgcggcaggaaaaatgtgttaacccagtaaacgtttccacccagacaggactgctctccatcatccggg

SEQ ID NO: 459021 - DNA, 505 bp, Homo Sapiens
ttttttttgtaaataaagttttattggcacagccacgctcgttcattcatatgccattgacatctgctgttgccctacacagcagggtggggacctgctcttcacgggagagctagttgtttaaagcagtggtccccaaccttctgtggtcccccgtgggtgctgaggcacaggctgtatggctgcagtgccaagaatatttcctgcctgacccttcatcggagaagcgtgcccacctgtgctctagattccccatgactgacatttagccactctcctctgtcactctccggggacgtgcacacaccgttggcatgaactgcagacgccacgctctggggccaagagcctcagtgtgcatctgcagtaggaggacgtcagtgaggaccgccccgtccctgctgcgctggtgctgactatgcctgcagttgactgttgcctggagtttacaacccaggtcggccaaacgtcccagcaaagttctttcaaaggaattttttccgat

SEQ ID NO: 459022 - DNA, 344 bp, Homo Sapiens
ccctttccccagaagaaagggagaactttccttccagcaattgtacaaatttatggaagaatagaggtacaccctattaacaaacgacctgtacttggatatcgaaatttgaatctctttaagttattcagacttgtacacaaacttggaggatttgataatattgaaagtggagctgtttggaaacaagtctaccaagatcttggaatccctgtcttaaattcagctgcaggatacaatgttaaatgtgcttataaaaaatacttatatggttttgaggagtactgtagatcagccaacattgaatttcagatgcattgccagagaaagttgttaacaagcaa

SEQ ID NO: 459023 - DNA, 471 bp, Homo Sapiens
ccccctaaccacccctcatccttccatccactggaggatggatgaaagactccttccccctggtcctgtaatgcccttacacacccaaggcttaaaacgcccaagcaagagtaacattgtccaggttcccttggcagtgagaatgacccaaccgtggtagagaagggcaaggaagagcaagcaaaacaagattacagatggagcaggtccttcattccctacactagtaatccttcaaccttttgtctgcattcatacttacacatgtataacacaatctcaacagcaaatctctcattacacatagagattctcaacaggaaaaccactaacttagaatgtttgctggagtctttagaaagcaaagatcaacttattcagcaataaatgcgtgctttattctcatatttacaaaacggactcctcaacttagaaacatcttacagttggggaacgacagaagaggaaata

SEQ ID NO: 459024 - DNA, 348 bp, Homo Sapiens
  misc_feature (270)..(270): n is a, c, g, or t
  misc_feature (281)..(289): n is a, c, g, or t
  misc_feature (293)..(293): n is a, c, g, or t
acaaagagcaagtacaggagctgttcaagatcatgtattcaatcaaaatgaaatgtgacttgtaccgactgctgaagttgtcttgatgtttgagagacttgaaatctgtgaagaaatttgaatagattaccttttataaaaatagtagtagtctttaagtgtagaatactgcctaactctgggaaatgtaggaaaagtcaggcattctttaggttcaagatattaagtttaaataggcagctggaatgtgggccctcatggccaaagccntaaaggacccnnnnnnnnncccntggaaaagggggattttcaaaattggtcccctttcccccctcacaggggtccccc

SEQ ID NO: 459025 - DNA, 529 bp, Homo Sapiens
  misc_feature (458)..(458): n is a, c, g, or t
  misc_feature (478)..(478): n is a, c, g, or t
  misc_feature (496)..(496): n is a, c, g, or t
  misc_feature (502)..(502): n is a, c, g, or t
  misc_feature (508)..(508): n is a, c, g, or t
catatatacacccaggatatcattttatatatgtcacaattcatgaaatatcttatatttcatcttcaaacttatcctctggccctggaactattctaatcactgctcttgcttctggaatgcttagcttcatgccatagtagagcattttcagaaaactggtaagctcagctaaagctaatatggcatatatggatagaacatttgatgagtaaattccagttctgaaagtctactagtcgctgaaatacttagaataaaaaatgaggattgattttgtatgtgtcatgaaacagtagcatttctaggtcagcattttcccagctgtgttattctttcctgtttgtcaatgctcagtgcatcttagaggtagggaaattattctactgcttgtggaaactaggaactaggataggcacatagtaattaacacagtgtggaatagttattagggaccnattattaggcactttttccngtaggaacgctctaggcngttttncttccntaacaggggttcaaattgttt

SEQ ID NO: 459026 - DNA, 731 bp, Homo Sapiens
  misc_feature (77)..(127): n is a, c, g, or t
  misc_feature (178)..(287): n is a, c, g, or t
  misc_feature (364)..(364): n is a, c, g, or t
  misc_feature (491)..(596): n is a, c, g, or t
aagccttgattttgtatgtccatcttgagtctaggtttggttgccttacttgtattgcatctaataactttgtactnnnnnnnnnnnnnnnnnnnnnnnnnnnnnnnnnnnnnnnnnnnnnnnnnnnagggatagggtcttactctgtcacccaggttggagtgcagtagtagcatgnnnnnnnnnnnnnnnnnnnnnnnnnnnnnnnnnnnnnnnnnnnnnnnnnnnnnnnnnnnnnnnnnnnnnnnnnnnnnnnnnnnnnnnnnnnnnnnnnnnnnnnnnnnnnntaccacagtaatacatgcaggcagttttagaagtcaaagaatatgacaagatttaaaatggaaaaaaaattagcagnacccatccatttcctccctatattggtactgttgaggatggcagctagtagccactgtggctcttgagcacttgaaatgtcctttgtcctaactgagaagtattggccaggagtggtggctcacacnnnnnnnnnnnnnnnnnnnnnnnnnnnnnnnnnnnnnnnnnnnnnnnnnnnnnnnnnnnnnnnnnnnnnnnnnnnnnnnnnnnnnnnnnnnnnnnnnnnnnnnnnnaataggctgggcacggtggctcatgcctgtaatcccatctctcagggaggcagaggcgggaggatagcttgagcccaggagtttgagacctgccttgggcaacatagcaagactctgttctccacgaaaaggaag

SEQ ID NO: 459027 - DNA, 366 bp, Homo Sapiens
  misc_feature (145)..(219): n is a, c, g, or t
ttttttttcttccttttcgtggagaacagagtcttgctatgttgcccaaggcaggttctcaaactcctgggctcaagctatcctcccgcctctgcctccctgagagatgggattacaggcatgagccaccgtgcccagcctattnnnnnnnnnnnnnnnnnnnnnnnnnnnnnnnnnnnnnnnnnnnnnnnnnnnnnnnnnnnnnnnnnnnnnnnnnnncacctcagccttccaaactgctagggattacaggtgtgagccaccactcctgggccaatacttctcagttagggacaaagggacatttcaagtgctcaaggaggccacagtgggctactaggctggccattccttcaacagttacca

SEQ ID NO: 459028 - DNA, 523 bp, Homo Sapiens
ctacaaaatgaatttgtattagagttttaatttgggattagaaagcatattaggagcataatggaataaagttacacaagattttcctcaaatgcaaagtcaaggtccctagaaattattgttactcttaatgagcactctttgagctcctttttcacttgttgttgcactcagagtagttattagaaaattctgctgatttttaaataatgtggtcaggttgcattttacctgagtgaaatggtttcaaactgcattacctaccattatgcgctaattttataactacatccttaatgctgagtttgcttacctgggtgggggtgcctaaatcatcgtgtcccaagtattgggtgccatcctaaaatgatggacatgtaattgtggctgaaaagtcatacattgacaaaaatattccaaatctctttaataaagaaagtttggggatctgtgttttttgcagcttgtttggttagcttttcttggctaagactaaaaattacctttagttgttttatagatc

SEQ ID NO: 459029 - DNA, 441 bp, Homo Sapiens
  misc_feature (31)..(31): n is a, c, g, or t
  misc_feature (66)..(66): n is a, c, g, or t
  misc_feature (371)..(371): n is a, c, g, or t
  misc_feature (378)..(378): n is a, c, g, or t
gcaggacaggacagagggaggtcattgttanacacacatcccccctcctttcctccttccccttcnacttccctgtgaaaggcctgaggcaggctgtggccaggctcaggccctgactgtggggtacacaccagggaggccacgccttccccacagacggggtggagtggtcagtggagccagcaccctctgctgcttcagcatctccgcctggagccagctgtcccctctctctcaggctccatccgaacaaaaggaagcagagcctgagatccggcaccccatccccctccactcagcactgagttagagctgggtggggcatgtctgccttcacacgctgccttatggcttctgtgtctccaacagcnccgtcanctctggctgctctccttcccaatagtcacaagatttaccatgataataataggttaagacttg

SEQ ID NO: 459030 - DNA, 489 bp, Homo Sapiens
  misc_feature (13)..(13): n is a, c, g, or t
  misc_feature (22)..(22): n is a, c, g, or t
  misc_feature (36)..(36): n is a, c, g, or t
  misc_feature (61)..(61): n is a, c, g, or t
gtggcaaactcanttgaaaaanaggccactaaaaanttgaaaccctctgtggaatgaaacnttgggtcaatcccacccagataaaatctcccaacacctaagggactgcccagaaagtagaggggctaatggaatgggtggtgggagaacaagactgccagttaccactctgggcctcatgaccagccacagaagggggcactagcagttgtgctttacaggaagtgttccacttacccgggactggctacattatgatttaagttgcaggagggagtgggactaaattgctatcacccccagacaatatggctgctggtgagattttatgtttcccctgtgccggggacaaaatatttttctcccatctaagcaaagtttgtgaatggctgctaagtggtaataagatgaattgtgctggtttttcttcttttgctccagtgtgctgcctatgtggaccgtatcacccagggtcccctgacctttagc

SEQ ID NO: 459031 - DNA, 335 bp, Homo Sapiens
  misc_feature (314)..(314): n is a, c, g, or t
ttttttttcctcaatagtaatccagctttaattgtagagcattaattcgccttacaaacaaattacagtcactacgatttatcagtaagtactgtactggttttgtgttttcttttggcaaactttgaacaaatcagagaagaaaacataactattcatcatcatgtagaaaaagaaaagaaaatgaacctcaagtatctacctatgtgtcaagtgattcatcctgccagtaaaactaaaatctacacttacagcggagttttaaacatccttaggtgcaaggaaacataacccatttattccgggtccacccnttatttattggtttgggggaa

SEQ ID NO: 459032 - DNA, 504 bp, Homo Sapiens
  misc_feature (11)..(11): n is a, c, g, or t
  misc_feature (33)..(33): n is a, c, g, or t
  misc_feature (43)..(77): n is a, c, g, or t
  misc_feature (90)..(90): n is a, c, g, or t
  misc_feature (96)..(96): n is a, c, g, or t
  misc_feature (120)..(120): n is a, c, g, or t
  misc_feature (141)..(141): n is a, c, g, or t
  misc_feature (146)..(146): n is a, c, g, or t
ctaacttcccnaagtggaactcaaaatgtaaanggggatcccnnnnnnnnnnnnnnnnnnnnnnnnnnnnnnnnnnnaggctgccccttnaaactnaaccctgggctgcctttgaaaaanggccctccctcctcctgaaanggaangggacccagctttgaattcttcccaacttcccaaggttaactgtgccctagggaaacacttttagcaaaacggcaaccgcttcttgggtggcattacgaacgtcttccccattcaccattaatatctggtctccctgcatcagtcttccatcggcatctgcaattcctcctttgacaatgtctgacacaaatactccagtatcgtttcttttaccaacaatacttaatcctaggccttttcccggcttcttctgcagctcaatagtgagggtgtcacacacttcctcctctttgtatggggcctcatctctgtagagtgtcaggcgcactctctgtggcgtctgtctcaggacattga

SEQ ID NO: 459033 - DNA, 388 bp, Homo Sapiens
  misc_feature (44)..(44): n is a, c, g, or t
  misc_feature (72)..(72): n is a, c, g, or t
ggaatccggcttgaaaatccttggctcaaaatctcccccagctnaaggctcttaaacttaatcaacacctgnaaaatccttttggtcatgcaaagtaatatattgacaggtcccaagggattagaacagggtcatcttgggggtgtggggagcatcattctgtctaccaaaaccacagaaccacagctcttcaggccaaaaacctaggggtttttcatgattctcttcttcccctcaatctttacatccaatctgccaataaatctggttggtttaacatccagaatatatcctgaatctaatgacttttcaccttctcttttgaacagtcttatccaggctaccatcagtttttgcttgaatgacttcagtagctccctaattattc

SEQ ID NO: 459034 - DNA, 680 bp, Homo Sapiens
  misc_feature (16)..(16): n is a, c, g, or t
  misc_feature (52)..(71): n is a, c, g, or t
  misc_feature (596)..(631): n is a, c, g, or t
gtgtttttatagggcntcaatacccaggtggtgacagagcagaagaaccggnnnnnnnnnnnnnnnnnnnnactactaagcttttacaaaagaagtatctgttttattgtatagaacaagtacagcattttactacatagtatacaagtttttaatgagcatttaaaaaaataagtaaatctaggctatttgaaaaatacagttgagccagtgagcacattttataatttggaagacacaaatcaaatgtgaaggatttgattttctacatttaaaatgaagaaccaaaactctcttcttgattttcagctaaaggcaggagactactttccaactccttttgcttctggagaaggccctgaaatcacattgatatatgtttgttagtaaaatgtgcacacctgacttgcaatgttgtgttaaactagaattatattcacttggaaaacatatcgcttaggataaaattttgtcattcaaaaattttttcagaaatgcttgtactagaccacctcatttggatatatagctatcacatttgtaagattctgtttttagcataaaaatcaatagggacaaagcgagacttcatctcnnnnnnnnnnnnnnnnnnnnnnnnnnnnnnnnnnnngtaaacaaatgcaggctgggtgaggtggctcatgcccgtattcccagca

SEQ ID NO: 459035 - DNA, 513 bp, Homo Sapiens
  misc_feature (448)..(448): n is a, c, g, or t
tttttttatgtaaatatttaaattttattcttaaatactatttattaatacagagaaatactcctgctataattttaagtgacacaatagtacaacaattgttaagaacaatccacctgtgtcaaagagacacatacacaaacacacatccatatacacatacaagcttggagaaaattctgaaaggatctcattgtcctagatggtggcattatgggcaattattttgcaaatgtcacccagtgaagaagcaatggtgcctttggaaagtatgtagctcttagttaagcttttatctggaaggtgctggagaaggtctgggcacagagctggttggctccatggttttgtgacctgtgccatcacatagggccccatgttcagaaggaccccactcttgggtttaatgctctgctgccgtgtcttgaaattcttaataatttttttngaacaagggatgctgcattttcactgtgttctgggcctaatgattatgtagtcaatcttgtctgg

SEQ ID NO: 459036 - DNA, 451 bp, Homo Sapiens
  misc_feature (392)..(392): n is a, c, g, or t
  misc_feature (402)..(402): n is a, c, g, or t
  misc_feature (430)..(430): n is a, c, g, or t
atgtaaatatttaaattttattcttaaatactatttattaatacagagaaatactcctgctataattttaagtgacacaatagtacaacaattgttaagaacaatccacctgtgtcaaagagacacatacacaaacacacatccatatacacatacaagcttggagaaaattctgaaaggatctcattgtcctagatggtgggcattatgggcaattattttgcaaatgtcacccagtgaaggaaggcaatgggtgcctttgggaaagtatgtaggctcttaggttaaggcttttatctgggaagggtgctgggaggaagggtctggggcacagagcctgggttgggcctcccatgggtttttgtggaccctgtgcccatccaccatagggnccccccatgnttccggaaggggcccccactccttgggnttttaatggctctgcttgccc

SEQ ID NO: 459037 - DNA, 464 bp, Homo Sapiens
  misc_feature (236)..(236): n is a, c, g, or t
  misc_feature (250)..(250): n is a, c, g, or t
  misc_feature (252)..(252): n is a, c, g, or t
  misc_feature (277)..(277): n is a, c, g, or t
  misc_feature (283)..(283): n is a, c, g, or t
  misc_feature (319)..(319): n is a, c, g, or t
  misc_feature (325)..(325): n is a, c, g, or t
  misc_feature (406)..(406): n is a, c, g, or t
  misc_feature (430)..(430): n is a, c, g, or t
cagctatgagatattttcatggtaatgtcaacatggtcaagcactttgtaccaagttattaagtaacataatttttaaaatttaaagaatgtgtcttcaactaaaaactttattctttagcatttatttatatttgtctgtagggtgttccctgtgacattgtctctttagtttgctctttcatgagatacttacagatgttgtgatggctgccctgcatttccagctaatctctnctgctctaaatatntnagaacagttcttcttcaaacatttngcattncaggataggctttctggaaagtgccctatccctctntgaccnttaattggggtaaaatgtaggccacattgttaataggtaaacgttcatatatgaagggggtgctttcatatttgggggttnatgggggaaaggcaatatattggngggccaggcccgtcctgttaggaagccattccag

SEQ ID NO: 459038 - DNA, 462 bp, Homo Sapiens
  misc_feature (21)..(21): n is a, c, g, or t
  misc_feature (35)..(35): n is a, c, g, or t
  misc_feature (54)..(54): n is a, c, g, or t
  misc_feature (70)..(70): n is a, c, g, or t
  misc_feature (85)..(85): n is a, c, g, or t
  misc_feature (118)..(118): n is a, c, g, or t
  misc_feature (148)..(171): n is a, c, g, or t
gccccggggtccacccttttncccccctggttccncccgggaggacccaatccnggcccaattaaacccnggatgtccccttttncacccttggagcccgggtcacctttggagaccnggtaagcccggaggtccctaaataataacnnnnnnnnnnnnnnnnnnnnnnnncagagtaggtatgaattagagaaccctataactagtcacagacctagtttagttttgaaaatacggagttgcaaatagtaatgattaatgttgctttatttttaaggcttctaagtaaatttatatatttaaaacactatggtttaatttgtaaccataatattgataattttgattaaatgaatgtaaagttagaaatagaacatggttatatggcttttcagttaagaataaagtgtcaatttttaagtacactagttttggaagggatttccaaattatatatccagt

SEQ ID NO: 459039 - DNA, 433 bp, Homo Sapiens
gtgttctacagcaccaaagaaattcaaataggaaaaggagagttgagaattgggaatcaagaatcagccctgtttccatcttagccacaccaacttatatctttatgattttcaaagcttttgccatgtgattctgcccccacaaaggcatcggtatttcctaaatggtacctgtatatgcagcgttgttttctataccatccttattcaaaacttgcatgtggcacaaaatgggttggtgggcaccaaggtatattttctgttgatttgatatgttctttgtcttaatcttaggccaaggaaaacaaacagggaccaacttcaaatccgaacttctggattctgatcaccaaaggtcattgatccatggacatcaacataggggacttggatcaatttttgggggtattggatttccatggacagttttttt

SEQ ID NO: 459040 - DNA, 344 bp, Homo Sapiens
tgcctcaacacaaaaataaacaaaatttttattagttcagcctctgaaataaggaagcacatttgtgaatattcatacataaaatgctgtccaaaataaattattcacagaaataggtaagatatagaagagagaatatagaatgctgtcatttatgtaatatattgtatttccagaaggatacagaagaaactggcaatggtgattgcctttaaagatggagaatggatggccaggagaaatgttggatgagaacttacttcacactgaattgtcataattttttagttttgtataatgtgcatatactgcctatttataaaatattaaacattttaaaggga

SEQ ID NO: 459041 - DNA, 466 bp, Homo Sapiens
aagtacctttggtgtattttcaaatatttctatctcttaaaaaaatggtattacctcagtttctaataatttctgggtttagtagtgttgacaattaaaaatggtatacattaaaatttataagtttgccttcagggtaacttccagtgtcacaatgagcagttctgtaagtgggtgcctctcagcacatttctatgaatatattatgtagataggctgtattgattttggtagcattgacaccttcttaggcaattagttgaagaaaactgcaaaatattttcttatgtaatagcctgtatagagcaatagcaatcaaagcatgagaaggcactaacccctgggatgaaagatgagattcagaggtgactgagaatcatgtgaagtgatggctgtatattttgtgtaaaatatatgtgtgaaaatgaacctaagagtgagttactccagcactctccagaattta

SEQ ID NO: 459042 - DNA, 592 bp, Homo Sapiens
  misc_feature (109)..(109): n is a, c, g, or t
  misc_feature (574)..(574): n is a, c, g, or t
agggaaaaacaaccttaagctgaggccgaccggacataggctaaagagcctactccctaagtatttggggcatttttccccccctatgaaatgccatgtgattccagangacacaactcaccctctccccaaaagcaacatgggctttatcccatttcctgcattaaccctagagttaaaaaggaatattgtttattgtttggctctccccactagaagtttcacaggagcacagatcatatctaccatttgaacagctctcctgcctgatggctaatacatttcttggcatatagtaggtaggtgctcaataaatttgttacaggaataaatgagataggattttcaagggtattttctattaggatttaataaaacaaagtgatctttagagaaacaaatctccccatcaacatgctatacttaataagtgttaaaatcactagaagtctctggaacattcagtaacaatatactctaattctctgctttccttatgtgttattctagggcaaaatccctttcttccaaatgtttcctatcattgcagtttccaaatgtatataaacatgtngttttttgttgaactaca

SEQ ID NO: 459043 - DNA, 578 bp, Homo Sapiens
  misc_feature (547)..(547): n is a, c, g, or t
  misc_feature (564)..(564): n is a, c, g, or t
atcacattgaatggttaatttatttttaattctatgaaaggagctggagagagagaagtaaaatattcaggggattttctgtgttttaaaagagaaaacctcctgattgcaagctctaaaataaatgctaagatttgtcacactttcagcccacgggagatttgcttttctcgcatagtatggactcaccaggatctgaaattaggggctttccttagaggtggcctcaggctttcctacccccacagttggattatgcagagaaggtcactgggtcctgaggctgctgccgagcgtgctgtcccgggtggacagcgtgccctgtcatctttcattaggatgtgtgtgcctgtgccgcaccagccacaggtcagggatgccagcccctgcacgccctgcttgctcttttgaaaactgagggtatctggggaagtcaccttacaaggtgccgagggagcagatggctaatttaaaggcaatctgtatgtgctctgagcctcccaaattattccatttctttgaaatcctcaatgtgtggaaattcagnacacttaagtccctcanaggcttagggaatc

SEQ ID NO: 459044 - DNA, 493 bp, Homo Sapiens
  misc_feature (431)..(431): n is a, c, g, or t
  misc_feature (437)..(437): n is a, c, g, or t
  misc_feature (442)..(442): n is a, c, g, or t
  misc_feature (455)..(455): n is a, c, g, or t
  misc_feature (460)..(460): n is a, c, g, or t
  misc_feature (477)..(477): n is a, c, g, or t
tttattttctcctgaagctgaaaatgtttcacccatataaatgtggcattttagactctagctataaacctcatcgaccagtatgttttcagagttgttcacaacaaaatattattcgtttctaaaatcagttttcactttttggtgatagtattccaggctggactgcttgaattttagatgcagagatcattttatatatatctgtcaatgtaatacagaaaaattacatgtgaattgtttatgtgccccctctacgtagggacacagtatcaatcactcaataaggcactgtaacatcaggtgggtgtttggggataaataacctctcggggtttctttcaatcccactacccatatggctttctactggtatttggttatggttttatggttatacaaactattctcccaattccttcaacaacccnttgtanagggnaccatcatagggntaagntccctgggggttatacntttggcggagggcttt

SEQ ID NO: 459045 - DNA, 476 bp, Homo Sapiens
ttttttttccagttacaaagtttctcattttataacatggaacagctatttacaaggttccaacttaatgacataccatatttggctctgcaagattacattcaaatataatctcaaaataattctctgtcctctcatgaactgaaccactttcagtgcttactactgtgtaagtgagagcaagggttggttttctgacaaagacatctatatgcaaagagccagctctctcggcaagacatttcctaagaaatccttctggtgatgtggtaacaccaaggctttgtgggtactcataaaatttctgtctaaatttattacaagttgcccagcaattttgggttaagggacctaggatcacatttcagtgttaatgtcaagatgactcttatagatgtaaatttaaatagagcagggaagatgaatatcatgcaattcttagcacccctggcataggataacagtggaccaccatg

SEQ ID NO: 459046 - DNA, 454 bp, Homo Sapiens
  misc_feature (50)..(50): n is a, c, g, or t
  misc_feature (65)..(65): n is a, c, g, or t
  misc_feature (79)..(79): n is a, c, g, or t
  misc_feature (85)..(85): n is a, c, g, or t
  misc_feature (103)..(103): n is a, c, g, or t
tccctgaaaccgttcccagtggatggaagcctggtaagccctaaaggagngggtaaaatcccccnccctcctagggacnttgaanttggaagtgttggccccntgtacctcccctggttggtacatcccccctggaaagtgtttgggttagaaatttatatagccaagtgagagcctctgaatgaatactcccagcaattaataggagagggaaggttttccataaacatacttgattttatagcaggcacccccaattttggattcaggggcagacataagaagaaaatctgctttgagtttatcatattcaccttactccattaataaatttcttctgtagaacaaagtaatgtgtatgaaagacaattagatatattcagcttaccttaacttcaagattcaagtggataaaaatataagtaacaatctcagctgagaatgaggcagaaat

SEQ ID NO: 459047 - DNA, 248 bp, Homo Sapiens
  misc_feature (87)..(87): n is a, c, g, or t
  misc_feature (192)..(192): n is a, c, g, or t
  misc_feature (212)..(212): n is a, c, g, or t
  misc_feature (231)..(231): n is a, c, g, or t
ctttgacaaaactttaattagaaaaccagactcctctgattataaaaattacacaagctaataaatcttggtaagttatagagagantaattttatgaacattttatacctaataaaaaagttaaaataattaacagcattcatcagattaattttgttttcacatgattttctaatataaaaaggcatatngtcatcaacctttatataantccatatatgtttgtaatngcttttcataatgggga

SEQ ID NO: 459048 - DNA, 427 bp, Homo Sapiens
  misc_feature (53)..(53): n is a, c, g, or t
  misc_feature (70)..(70): n is a, c, g, or t
  misc_feature (111)..(111): n is a, c, g, or t
  misc_feature (139)..(139): n is a, c, g, or t
ggcaggacttaccccctttttgacagaaatggaaaactgagggacagagaggnacccgaggagcccaaanaccgtgcctggcagacagtaggggctaaattaatagctccnaccctcaaaatatcgttaatacatcatntccattcggatcccaagccctgtacatttaatgcctgcagcaattctgagatgagagtgagttctcccacttgacacaagggaaaacttggctcagaggggggttaagactctctcaaggtcacacagccaagaggtggcccaggcgctttaagaagtgtgggagtttcagctggatcaacttagcgccctggatgctctgggaacgcggctgggatggaggcctaatcgagccccagggttccccgcctccgtcctcctgcatcctcctgcgtcttctcctgacgtc

SEQ ID NO: 459049 - DNA, 289 bp, Homo Sapiens
  misc_feature (113)..(113): n is a, c, g, or t
  misc_feature (234)..(234): n is a, c, g, or t
ggagtggctggcttttaattcccctgggccagacctgcagccttgccttcatcccttaactccaggactccaggggcagagtccctggccttcagccaagaggccttgccagnttgggggcccaccaacaagggaacattgccccaacctgtgccacagccccccggctgtttataggctggagaggctgtgtcagacttccctgtactacacaagggcaaccccagccaaagntcaccctgagcctagctcaacagaagtttccttgatctgcttcacattctctttt

SEQ ID NO: 459050 - DNA, 369 bp, Homo Sapiens
acttttcagaggactgtcttgtgggtgggactggaaaaaccctcaattctttgtgatatatttccagtcaacggaataaaattaattttgccttggagacgttttgaacagtattgtcatgtctctcgagaccctatgaagagtcccaaatgaatatgaaggagaaaccacagctgtcaaaatgaccatatgcattagcaatgaccataggatactaagagaaatgcttggcttgttggtgtaattgatctcattgctccaaaccaatcatagaggctggatatttgttccccccaaatttcatgttgatctccagtgctggaggtggggcctgctgggagatatttgggtcatagggacagattcctc

SEQ ID NO: 459051 - DNA, 458 bp, Homo Sapiens
ctgtaatgagttttggaactcagtacgctaaataataatactaatgttgtaaatgttaaagatacagaattatgaataagagtcataaattagaattatagagacagttgtagcagctgatggctttgctagttggggggcagagagggtggagttgcagtggaaaccaactccggacagccaggagctggactggcactattagctaggcatttgtggtactggcagctgtcctgggcattctcagttctcattgttttgtcaaatataaacagtcccacaaaacatcaacatcagttatagttcactttatgactacaatagggcaagacaaaaataagacccctccacaatcatgtctggaacacagccaattaccaggaccagtcttcttaaacccaccaaaatggaccaaccttctgggttaattttgggggcccccttttttttggggccct

SEQ ID NO: 459052 - DNA, 425 bp, Homo Sapiens
ttttttgtcatttcctagaccttaaaaaatgtgtattgagaaagaactctgttagctatacagaagatgaactgggcaatatagagtagcagcatggagaccagtctgactgaactaaggcagtggaagtgtggatgaggaagagaggtgaaaattgagaagcgctatcctttctctttgggcattattaggaggctcacagacaagtccagggagtctggttataccctcctgtgccattcaaccaggtggctttcccatgactgtgatgaataaaattgagaagcccctgcccttttcagagcagagggtgagggagaaagctaccattttgtcctcatccttacccccgttgacttggcgagagatttgacctttcaggttttgatcctgtcattttctaggatgtggtgcacgcactttgc

SEQ ID NO: 459053 - DNA, 349 bp, Homo Sapiens
  misc_feature (32)..(32): n is a, c, g, or t
  misc_feature (333)..(333): n is a, c, g, or t
taggaagatgtttctgtctgctggctacctgnaggagggtcagtttctgcttgatgatttcattctctcggagaagctgctgattttgctcacacacttctcgcattttctcaagttcttcatcctgacacttcagtgtgctcagcagctgctgttccttttcactgactgattcctctaactgcttctctgccatttggctttgctgcagctggctgagaaggtacagcaccttctcttggtgctgttgctccattctgaccagctcagcttgtaactctgtctctatctcggcaaaatgatttcgttcctcaaacagcatcttctgcatgntagcacagctggtctt

SEQ ID NO: 459054 - DNA, 445 bp, Homo Sapiens
  misc_feature (429)..(429): n is a, c, g, or t
tatcaccacaatttaattttggccatttctattatccaagtgcccaagttcttcctgcttattcacagttaatccccattctaatctcctttcctaccctagccccaggtaactactaaactgctttctgtctttatacattgtccttttctgaacatttcatataagtagaattattcatgtagacatcttttatgtctggttcctttcacttagcataacacttagcataacccataataatctggcataacctgtagtgaggtttctgccagattattattagacaaacagaatagacatattttactcctaaagagactatggaacactggggaaaacaacacgtgtgataagggatgtgggtgtgagactattcaaagggtgtaggagggaggacaaggaatttgagggggcccaggttagggncagggttggccggggg

SEQ ID NO: 459055 - DNA, 511 bp, Homo Sapiens
  misc_feature (425)..(425): n is a, c, g, or t
  misc_feature (477)..(477): n is a, c, g, or t
  misc_feature (491)..(491): n is a, c, g, or t
cttttatatatatatacatttatttatatatatagtatcattatccatcatgcagagagtcttcactgccctaaaatcaaagtctgtttatcccattagctgcattataaacctgtgatttttctagtaactagtagatcacacaaacaactccaaaattcgctttatcttcagttctacagtaacagtcaaatcagcaaggcagccattctcagttagtggggtggatcttgaatatagactcagaaaatctgccagaagccttgtcttctcctgcagaaagaatttttaaatttttacgacttggaatgacctcatcatggccacctaagtctgtttcttcatctggaacaaggcattcttaaatcagtcgtggcatttctctaaaaacactgtatctccaatctcagtgtgacttttcaaantgtcccttgggtccacagtgggttttcaaaggtaatacaggttgttctaggnggcactttggcccnttatgttttaatggcggtgt

SEQ ID NO: 459056 - DNA, 391 bp, Homo Sapiens
  misc_feature (132)..(132): n is a, c, g, or t
acccaaggtaaatttttactttaataaccataaaactgatttttcaccttcatgaagtcattgtcttacagaagactcggattcaaatcatgactctttccctcagtagccagaccacttactctgtacctngtaaaaggaggtatgcggtgcttctaaagcatgcactgcatccattcattcacgtggtccactgggtgacgacggtctgtcctccccttaagcaaaaactggctctaagggacaggtcttttcttcacgcaaaaggtgagcaatgcccccagcctttcattctagaaagtgatgaaggcgatggttttggtatccccaaaatggcattatccaaagctcaccacttttagggttccatttaccaaagttagcagagatc

SEQ ID NO: 459057 - DNA, 916 bp, Homo Sapiens
  misc_feature (36)..(36): n is a, c, g, or t
  misc_feature (900)..(900): n is a, c, g, or t
tctgtcattttaaacatgagaggacaatgaaaatcngcatgaaaacatcctaaattctcaactttccacaaagctatggctcttctttcaacatagaattggattgggccattttaattgactcctatacgaaggaattaagaagaacataaattttgagctagtaactctggccaaataaatacactcaagtttttatcagagtttttggccagtgcttctgccatttttttccctccacaatttggccttcttcaatcaagccagataaatttttgagacaaaagccagacgagtttttaatttttcttgctttgaaccctgtcataatgactgtgcaatacatgtgcagaagatgaggtattttaaaatttacttccttgcactgtcttacacagagtgctataactataaatttttcaaggtcttaaataaaaggaagcaaaaacaaaattattgaaaaattttttttgttgtgctggggaatatactatttagattgtccttcttattttaaatgcatgggaacagaatgacaggtgggatgctgaggagctggttgaagcatcagagcaatgctacagtccaacaatggagcattagatccccagctaggtgacctgatgaacacctttgtaaactctcatactgggaaatggcagtgaaacctttttctgaacccgtggaccagcctgcgtccgtccccatgggtttcaaagcacgaatgcattacctccatggttgtggttacaagcaagtcacatgctatctacagttcatgataacaagaccgtcaaccattgctgggagacagacactaggatgggaaaatgaaatttggccagcgggatgtttatcccatcaggatgtaacaaattttttaccagccaggggtagggncaggatgtgtgtgtgt

SEQ ID NO: 459058 - DNA, 324 bp, Homo Sapiens
  misc_feature (22)..(22): n is a, c, g, or t
aggacttggcacaactacaggnacaaagtccacaagcacagccctggcctcccaggcagaataagaagccagacctcacctccccggcccctgcccctgcccctgcctagggtggcttctaagagactgaggagacacactggcgggataagatggaactgtctccccaacgacatgcacagagcatggcacagatgagaaaattgagtcctggaagtccgtccctgcagctgttgagtgctgcctaccaggccaggccttgaactaaatgctttatggagatgaccgtacccagtccccaccccagccccaccgggtgcacac

SEQ ID NO: 459059 - DNA, 490 bp, Homo Sapiens
  misc_feature (352)..(352): n is a, c, g, or t
ctcatgagctcctgctcatcctttaagatccaggccaggtatcacctcctccgggaagctctcctggcattgtgctgggttgccatagttcatatggcccctaccccatcgtgccatagggaaatgactggagtctctctggctcccccagaatataagctatgtcccaagtacatcctcagggttcccagcacccatcacaaggcccagatatcaccggtggataacagagagtccagctgccaactccctacccagagaacccaggggcagagccagggagccactcccagtgggaggcactgagtcctatttttgcccgcgatgcccacagcttttaaggtatggggtnggagttgggcggaggggggagctcgctgcaaatggccaactggtaaccaaacccactccgtttctaaaactagggcacaggagagaaacgggaacagcagtattgtccccaaatagaactatgtctcatctggttccg

SEQ ID NO: 459060 - DNA, 319 bp, Homo Sapiens
  misc_feature (286)..(286): n is a, c, g, or t
tgagcacagtgcccggccccgccgcttattcttgattttaatctgtgaggaccctgggcacactgacaggggagatggagacccagggtctcatggtgcagtggtagggaagggtagagtgatctgtcctcttccttcccttccctccctccacaaaggagtctgggggcctgtattccagcccagtttctgcctaggccacagaaaagcgcctgaaccccagtttatccttatgcaaaagatcagggcagccctgggttgggttgggggcccagcttttttcagntcaattagtcagcattttgagcatggtttcata

SEQ ID NO: 459061 - DNA, 460 bp, Homo Sapiens
  misc_feature (396)..(396): n is a, c, g, or t
  misc_feature (402)..(402): n is a, c, g, or t
  misc_feature (430)..(430): n is a, c, g, or t
  misc_feature (436)..(436): n is a, c, g, or t
ttaatcaaataaacaaataataaaccaattttctttgaagtccatacgctaatccgtcctgacatttttaaagctattttctagtaccgtcaatctacaatttatgactgcgtttgtgaattaactatctgcaacaatgtaatatgaattacagatgggttctgtagtgccattaatagtatgagtgtttcagcctcattatggactaattaacatctttttgtgtggagttatacttttgacttctagaaatctagccaaacacattcctccattgcagtccagcagtggcaggaaactcttctttttccctcacaacaggatacagggttgttaaaggctttagtgacagcaagagaggcgttttgaagcaatgctcaagagacacaggtattntgggcntcccacgtgggtggtgggtgataggtancgtttnagatgaaggcagttttggaacttt

SEQ ID NO: 459062 - DNA, 372 bp, Homo Sapiens
  misc_feature (351)..(351): n is a, c, g, or t
gtttcatattttattgaatttcatttatattaaattaaaaatatatttctgacagattcatgtaacaaaaaggcagaacagttttcaaattgttcagctgggatgatcagtatggaatgaggcaaagcagttcgcattctataattgccttgtacaggtacaattctttcccaagagccaaaagaggatccttgagaactaacggaaaagcctaattacataaatgtaaaatactgtttctccctcattctcaaataacaacagggttgaggggaaaggaaggaggatggggtaaaaggttgggaggagaaggaaagattaaggagaaagtttacctaaaattatgcctancatttaaaaaagttagtatgt

SEQ ID NO: 459063 - DNA, 314 bp, Homo Sapiens
  misc_feature (158)..(158): n is a, c, g, or t
cttgcattatctccagctcctgttagtccagggccagcttctgagaatattccacaagtctagactaactcatcacaccaatctggagctaagcagtatctacagaaggcaatattgcttaaccttagcaatacaaccaggtatctaagtcatcaagnacaaagagacagtagcttcgaataccaaatattcatttccctgtattatccactcactggtttccttttaagaaccttcatgatccagaatggcctgtgattacttaaactgttaacaagtcaacagaaagtgatatgaaagcttgtggctgattg

SEQ ID NO: 459064 - DNA, 401 bp, Homo Sapiens
  misc_feature (66)..(66): n is a, c, g, or t
agttgaaggctgccgaagaggactgaccccctttgtgacactggcattcctcagattattaatagntggctgaaagtacagggttgtttccagaactatcaaacatccttaaatcatccctggaatcagcaatcttgctgatatcagactcagacttgctggagcacatgctctgaagttccttgacaagatctgcttcgtcatctgaacccagagagagtctctgatccaaattcaacgtcagtgatagatcattctctaaagacttttgttttgacagagaagcattcctgttacaattcagctgtgatatagtcttatttttcataccttcagtgcttaggtctggcttattccaggtgggtaaagagaagcggccagacttcctgcgaggactggtg

SEQ ID NO: 459065 - DNA, 436 bp, Homo Sapiens
  misc_feature (41)..(41): n is a, c, g, or t
actgcccaagcctaacgaaaacttttatccaaaatgcccanactgagaaagactggatcgatttattaaaagcaaaaccccctaaaggatctcttcttggaaacaattcattagtggttagtgtggaatctcagtgtggcacggaataaagtaaagtacatgggtaacggccccagaaaaaccagagcacagcccagcgcattaccactcatcgcctgggtgatcttgggaaggttacctaactccggtagctttaatttcctcacctgtaaaataaggctaatgatgtgtattttgtaaagccagtatgaggataataaagtgcctgacacataatatagggtcccctgaaatgttagttctcttattttatcttgttgtaaaaattgcttgtaaattgtatggtatatgaattatatctcagtaaagccattac

SEQ ID NO: 459066 - DNA, 370 bp, Homo Sapiens
cagacataataatgtctgaaggaaaaccaaagtgtggatggatattcaatgcaggccttctggagacctgtgtggaagcctatcacctccgagaaaattaaagtcaagtcgttttgaggatactcttgattggcaacccaaagaagcaggaaaatggcatggaagcaagtgtccatacagcctgtattcacacagctgtctccctgtatggtgcttccaaaccatgactaatgccttcttaacttacttccgaatctcatgtaagataggttactggtcaattgtatcatggaatcacaaatggaatggattctgggaaatctagttcctaacctaccaacactgacataacacaatccagagatccaac

SEQ ID NO: 459067 - DNA, 432 bp, Homo Sapiens
  misc_feature (19)..(19): n is a, c, g, or t
  misc_feature (49)..(49): n is a, c, g, or t
  misc_feature (59)..(59): n is a, c, g, or t
  misc_feature (70)..(70): n is a, c, g, or t
atccccccaacccccgganagtcctgaattaagttcccccctagtacangaccataatnatgtcctgaanggaaaaccccaaagtgtgggatgggatattcaaatgcagggccttcctggagaccctgtgtgaaagccctatcacctcccgagaaaattaaagtcaagtcgttttgaggatactcttgattggcaaaccccaaagaagcaggaaaatgggatggaagcaagtgtcccatacagcctgtattcacacagctgtctccctgtatggtgcttccaaaccatgactaatgccttcttaacttacttccgaatctcatgtaagataggttactggtgaattgtatcatggaatcacaaatggaatggattctgggaaatctagttcctaacctaccaacactgacataacacaatccagagatccaa

SEQ ID NO: 459068 - DNA, 550 bp, Homo Sapiens
catgggattaaaaatttttattctttgtgtatctgatttccgaaacatagaaatctctctcccactccttaaacctgccactgggctaagagagtattgtacagaatatgcactcactgacttaacagaattagaacatccaggcactcactgagattttgcttccacaaccgctcaaagtctagtcattagttcatgagttaacaccacacttgaccttcaaattttggaaatgctgacggtagacagggacttgttttgggaaaggaagtacacagtagacattgttacccatgacccaaccaccaccacctttcctttaaagaaccccactcttcctttaaggttgcagagtctcagaaagtgggaagaaaggaagtttttgcattttcaggtcaaaacgaagtacatttgtgcaaccacataatgcccatgcaaaggtttcttgaaatctagacacaagacagaagtagttctagcacctccacaaaaagtaaggtaagtaagcttttccttaatatacactttcagcagcatcaacacctaaaag

SEQ ID NO: 459069 - DNA, 388 bp, Homo Sapiens
  misc_feature (28)..(28): n is a, c, g, or t
  misc_feature (370)..(370): n is a, c, g, or t
gctgcccagagcccactgccttttatcnagatgtgagacttcactgccacagtgtcatcccacagtttccttccctggacatttgataaagggaaaatcatttcttgtcctttaaggcagggactattattttttcacttttccacataccccacaacacctaacattgatttactcgtagtaggagtttcatactgttgaactctctaaaggccatttgttccagggcctagctgggcttgtgaaggacaacagagtccatttcctaaggaccccaaaagacagcatgaagggaaaaataataataaactgctgttcacagtgccttgagtgtaccaccgtactttctgctatgccttgtccattccantctggacagttctctctc

SEQ ID NO: 459070 - DNA, 637 bp, Homo Sapiens
  misc_feature (33)..(33): n is a, c, g, or t
  misc_feature (66)..(66): n is a, c, g, or t
  misc_feature (101)..(101): n is a, c, g, or t
  misc_feature (185)..(185): n is a, c, g, or t
  misc_feature (203)..(203): n is a, c, g, or t
ccccctttggggtgcatttttacagggtacccnacaccatacacattgcacacgggggatggcctnggcaaagatgtgtgcctgaatccagccttggtccngcccattcaaaaccttacacatgacctatcagaaacccctcaggcggcccacggtggcaggtggcaacaactttccctccctangccctgcagagagagagntccctaccccacagtaggcccctcataaaggtattagatgaatggagcgcccaacagtatatttcccttagggtaaaatctgaagtgtctttcttttctctttcctcactgaaaggtgagacaaaatcaaaccttctgtagaacaaagccacacaatctctttaatctagaaatacaggtatactcatgaaaagatataatcactcttctgaaacaaattcatattgattttctatatagtgggaataagaaatttgggttaaagacaaaaggcatgagttatgtaacaatttcagttttgttcagaatattttcaccatggacagaggttcatgttgttggaaatgacactccagaactcagattcgacttcaatataaacatgatttcactaaaacagaatgggctctgaaggttccatagtatttacccag

SEQ ID NO: 459071 - DNA, 366 bp, Homo Sapiens
gtgtaatgtgtttttattgacagaaggcatcacacacattcccaagcagcatggttcccgtgagaaactgaaaactaatttcttgaatctacaatgcgacttccatcttccaggtgtaaccagagtttttcctggagcgattccagcttgtttccttttggtgccttccttaagaaattttgcagctgtttctggtgcagtttttgggtgggctctggggtgggcagacgatctccactttgcagaggctgctcttgtgagtggagctggtggtgagggagtaggagaggcctcgcatcatcctgggcattcaggcccttagccatggagaaggacttgaggtggcttcttaaggtactgggggag

SEQ ID NO: 459072 - DNA, 390 bp, Homo Sapiens
gtaattaaatttaaattattaagctttttgggtttttttccccccgtaataaaagaatatagttctaaaatcctgattatggtccacactgcataccatctgtgcaattaccaactcagacttaaggttctatatttctgtgtttttgtctctccccagtatgattctatatcttctttactggtgctgggggttttaggtcaccttttacataaaccctgcagagtggtcacattgatcaagttaatgtttcaatatttacaatgtgggaaaatgaaagtgtaatgcctcaggttgtgagtacttaagacgctaaaggctcggcttagttgagtccctatatattgtacttaaaagtatttagcagtggtagagcaacgattttataga

SEQ ID NO: 459073 - DNA, 565 bp, Homo Sapiens
  misc_feature (120)..(120): n is a, c, g, or t
ggctcctcagggtaaaagctcccacttgccctctccaaagggtccacgactcatccatccctggtgggggatgcttgtgggtgacaatcacactgccctccccattccactgagtaattnacagtgggagacattacaggcttcaaacactggaacaactggagattctgaaaaaccccttaaagacaggaaaactataaacattaaataattaatttgctttgacaactgcttcttcctttttcaggcatttacagtccatcaccttaagtgcaagcacattgctcgtagcatcgctgagaactccgcaaggattaaaaaccaacaaaaaaggatgcaaatggcttactagaagagatttactagtggcggggggattcagtgaatccactatctactctgaaagaaacatgcttcttccaatctctcctctgttgactgaaatccacagatgtccgagccagccctctgcagtgcagatgcagcccccaaaagactggagcccctgcagtaaggacattcaagcagtagccatcagagatgctttgaataatcaactttccaa

SEQ ID NO: 459074 - DNA, 332 bp, Homo Sapiens
tttttttctttactcatatttgctgttgttgctgtcatttctgtaaggtaaggatactggaatggtcttatttcatagacattaaagtaataaaagcaatttgttgactgaaaatcaactgcaaatgtttatttagaaagaacacgttatgtaaacaaggaatgaaacctgattttctaacattcaggagagtgatttggcaacacacaggaaaacaataaaagtagccatattaaaaactcagtagttcttctttatcacagaattttactgaaagatgtgaatggagattaatgttcacaaggctttaaatatgtccatttacatgctgt

SEQ ID NO: 459075 - DNA, 380 bp, Homo Sapiens
tgatcattacatatagaaggtatcttattgccctcacaattcaagtcaatatgtattttaaaaaatatatggtaccattacttaatgtcaataataaaaaggtgacatttttattaaagccaattcatgtgttttctattcaagatttagaatcacttttaaagcccacatacctttcttcacacttaaaaaacccctaactacacaaaagccatactgcaaacgaactgcttttatgaaattacgaaagatcgcctactgtgactggaaatgacggtttcttatcgcatttgcctaaaaactttatttttaaaactttgcaaggtgtacttttcaaatcatgagacagatttattcatgttcccatgtggtgtcaaacc

SEQ ID NO: 459076 - DNA, 456 bp, Homo Sapiens
  misc_feature (345)..(345): n is a, c, g, or t
  misc_feature (365)..(365): n is a, c, g, or t
  misc_feature (420)..(420): n is a, c, g, or t
  misc_feature (425)..(425): n is a, c, g, or t
  misc_feature (442)..(442): n is a, c, g, or t
tttggttgtttttagtaatgtttcatttctgattactattttcttgtgttttgatgtaattttgtctagaaaaccactctataatacctataaggtaatcctaaagaaatattctttaagtgtttcttgtaattgccacttttttcctgtcaagtactttcagagaaactggatgaatctatatctgcttacgttttgctggcattgtatgaaggatacctgtacatatgatttagttaggtttgacaatttcatgaaaatagtgggttaaatgtattctctgttaattcacactattttaaatttatagcattcttttaaaagattctatacttaatataaaantaattataggattgggtttntcttctgctgagggccttgatttgccaccatggtttttccaaattggttaaaacngagcnttttcctaccccggggnaattgtgtaggggc

SEQ ID NO: 459077 - DNA, 610 bp, Homo Sapiens
  misc_feature (465)..(465): n is a, c, g, or t
  misc_feature (487)..(512): n is a, c, g, or t
  misc_feature (537)..(537): n is a, c, g, or t
  misc_feature (577)..(577): n is a, c, g, or t
gctcaacagtcctttaaggtatgtgtccttaaggttaacttgctacataatatctgtctatgaaaaggttgtgaaccgtgaaccaaaggactttcatgattagtcatatgacacctgaggggacagtaccaggtacccaggtaccaacctggttgaactccaaattattttcaccaaaaaggatgaaacccattttcaaattagtgatatctgactcaagacattaatgtatgtgaaagaaataaacacaaaacttggcttttctaggctcaaagacttctaggaaggaaacgacttaaaaaaatgccactaagagaggagcaagcttgagataaattgttaataattattgttgtcccgtggggtttcagaaataccattcccactccttcgtgagtgttttccttacggtctatttactctgggccacaccctgctgctagacaaatttcacttttattgggntgggaatacatttaggctaggnnnnnnnnnnnnnnnnnnnnnnnnnnaaagcctgcttattaattttctacntcctcagggttgcaattggcaggcaaacttttttaggctntttgccaattggcccgtagcaatttctatgtaa

SEQ ID NO: 459078 - DNA, 480 bp, Homo Sapiens
  misc_feature (198)..(343): n is a, c, g, or t
  misc_feature (404)..(404): n is a, c, g, or t
  misc_feature (455)..(455): n is a, c, g, or t
  misc_feature (466)..(466): n is a, c, g, or t
tctttttttggggaaaaaaacctgggataataatgcattagtacattattaacatgagcatttgaagacagagagagattcagtgacgaagattggcatatagaacagtcatatagaaggaaagaccaggaacagactttctgattttctatttgttcattcattgcatgaaacccatcaaattttagttgaaaatannnnnnnnnnnnnnnnnnnnnnnnnnnnnnnnnnnnnnnnnnnnnnnnnnnnnnnnnnnnnnnnnnnnnnnnnnnnnnnnnnnnnnnnnnnnnnnnnnnnnnnnnnnnnnnnnnnnnnnnnnnnnnnnnnnnnnnnnnnnnnnnnnattgctatgttctagttaggctgagcatttacagtaggaggaactcttagggtcttttccngggcagggagagccagtggatttttatttaccacagaccaaactagttttncaggttttccntcagggaaggcatt

SEQ ID NO: 459079 - DNA, 518 bp, Homo Sapiens
  misc_feature (386)..(386): n is a, c, g, or t
  misc_feature (444)..(444): n is a, c, g, or t
  misc_feature (471)..(471): n is a, c, g, or t
  misc_feature (491)..(491): n is a, c, g, or t
  misc_feature (499)..(499): n is a, c, g, or t
cctggagtgaaaaatgttttagcatctttttcaggatttactccctcctgccctccatcattctcctgtctcaatgcatagtacagttcttagatatatactccctttccccaaaaaaatccctaatcagaaggactgtgatggttatagagggctactgctggtgatctggcttagctgaggtcagttttcccagtggataatgctgatcctttcccttccttctctcccaccaaagagtctgtcctcagtcagtttctctgcccctgcactaagctatccttttactacatattctgttccaccgtcttgggttcccagcttcttgaaagacaaaactgatgtcttctctgggtcctccaaatattttttttccctaaactttnaaattgggctcacataggttaactttgtctttggcaaacaccatcttctaggctttcntttctggggcagggtttaggggttatncccccgttttttgtggggancccaattntttttggggccccaattaa

SEQ ID NO: 459080 - DNA, 235 bp, Homo Sapiens
gcatagtagcttgtacataactgtcacatattgaagtgtgttactgtatatcaatacatttggattttagaaacatttatttggtaaaactatggtatttttcacagcttgctttctttagataaaattaaccattttaaaaatgtttttctgctatcttaaagtggtaactcagacctcctgagaataattttatcttttaaaaatatgagggctgtgcatggtggctcacact

SEQ ID NO: 459081 - DNA, 452 bp, Homo Sapiens
  misc_feature (385)..(385): n is a, c, g, or t
  misc_feature (425)..(425): n is a, c, g, or t
  misc_feature (439)..(439): n is a, c, g, or t
ttttttttcatgttaaaatgtgaactttaattgtaaaaatcattttctgtaaatatagttatatcaacctctctgcacacaacttggttcagatatatacagatatgatattcatagatgttatttgtaccacagaacaaaatcaattcaagaaacatttacttttagcttcaggattaaccccagctttctttaggccttaaaattaccaccactggaaacagagagagagcacggcatacctgggcacaccagtattcagggcaaaatctatgcagtgtcttactaatttcatactatgaggtaaagacccgaaacaaaaatagattcagtctctcgtattgctattaactcttagggctgggggttttattcaaaatagggnttttttacatttaagggcgacaggggagggctatgctggnttctaactcagganaggatatgggggt

SEQ ID NO: 459082 - DNA, 525 bp, Homo Sapiens
  misc_feature (515)..(515): n is a, c, g, or t
agtacctgacagttttattatactttaggggaagagatggctagtgacaaggagaattcaagattgttcaaatctttacagaagatttttgatactagcaaatgtttctcaaagataaactagacaagttcagtatggacaaagaaacaaagaaaagcattataatcagatgtcctacgaaagctacagtgattcaacatgtgctttaatttatactgcttagatcctttgagttcagatgtcttgagtttttgaggacagtaaaacaagtaaaactgggatgaaattaaagctatgtgggcaaattagtttcagttaaatcaggaatatctaatacaaagcttacaaactccaaaatagttcagccaatagagtaacttcccaaatgctggatttaagctttcatcacaaatttaaaaaggtaataattcttctaggtctcaactctaggctgttaacaagttgcaactccttcatattaactttctgctcccaactatttcctgaatccagancttgcctgct

SEQ ID NO: 459083 - DNA, 486 bp, Homo Sapiens
  misc_feature (66)..(66): n is a, c, g, or t
  misc_feature (80)..(80): n is a, c, g, or t
ggccttaaaaataatggactgcctgccccggttgggaatgaaagaatccataggaggccaatggantctgcctttcccanagtggaatatttgaaattgagagtatggagggttgttaggaatgatgaggtcccagagaatgactgtcgggtaagtggctgagattgtgtgtgggacaaggtcattggaagacaggaaggaagtcaaggaattaagatgccatgcaactggaaggattctctacatcaatattaaacacatcaggaatgatgacaggagtagtactggagaaagcagcagtaagtcaggacctaagatctccaggaataatggggagtgacagggatctgtagaagcctgtaataagaactagtagtaaggggtaaagccagatcttggggtgtttatagaaggggggaggagaaaggtctttaagtagaaggaagcataggatgccttagaaccctattccttccttaaatgcct

SEQ ID NO: 459084 - DNA, 552 bp, Homo Sapiens
  misc_feature (285)..(285): n is a, c, g, or t
  misc_feature (468)..(468): n is a, c, g, or t
  misc_feature (483)..(483): n is a, c, g, or t
  misc_feature (502)..(502): n is a, c, g, or t
  misc_feature (507)..(507): n is a, c, g, or t
  misc_feature (513)..(513): n is a, c, g, or t
  misc_feature (521)..(521): n is a, c, g, or t
ttttttttgttgagatgtaagaaattacagcacacttgaatgctgacgaggataattcagtagagagggaaaatttaattatgcatgaaagagagggaccaattgctagggaaatatcctgaagtaggcaagaggggatggcatctactgcacaattgtggggaattaatttaggtagaagcaaggacaagtccaggaagcaaacaggagtaacaggagggaaggcagggcatatggacacaaatgcaggtgggagggtagatgtggctatgagaacatacagantttctcttctgattgtgtctattttctccatgaaataaggagaaagggcattcattagctgggagtaagggatttgggaggatttgttgatttccaggggaaaccagaaagcgttgaaatacctctctttaggaaacggggagaggggattgcactgggggttgcattagtttactggtactnctttagccctttttnggtttcccatctttaactntaaancagacnttccaatngtttattttctttcccccaccttttcagcta

SEQ ID NO: 459085 - DNA, 332 bp, Homo Sapiens
  misc_feature (120)..(120): n is a, c, g, or t
gctttttagcttagtatatctgtcatgaatttgtaggatgttccattgcatcagaaaacggacagtgatttgattactttctaatgccacagatgcagattacatgtagttattgagaancctttcgaattcagtggcttaatcatgaatgtctaaatattgttgacattaggatgatacatgtaaattaaagttacatttgtttagcatagacaagcttaacattgtagatgtttctcttcaaaaatcatcttaaacatttgcatttggaattgtgttaaatagaatgtgtgaaacactgtattagtaaacttcatcacctttctacttcc

SEQ ID NO: 459086 - DNA, 174 bp, Homo Sapiens
ttcatcatgtactatgcccactttccttatttctcacagtttatcagccctcttatttcacattgtaacaggatgccgtatacttaacctgacgttagattttgaagaaggcagtatatatgcatatgtacagaagggcagtgtaaagcagtgagttagactgcctgggttcgt

SEQ ID NO: 459087 - DNA, 407 bp, Homo Sapiens
atgtatttagatatattttataaaaatcacactataacagtatcagtatttaatacatacttttaaagtgctagatgtgttccatccagagctagagaataattaaaatgtgtgattaaaatgtgagagattgcagtattttgacgtatacacacaacattaattatatagatagaaaagaaatctcagtgtgaggattataaagaagagttcagtgccttcattcctatatagttttatcttctagtcaagccccagccccaaggagattgggttaccttagggaaccatctctagttcagtctgggatgtgggtcccttagggcctttttgggctgggaaatctggcctctttccttcttccctatcttcattaggcctttttattgggggaggtccagtttttg

SEQ ID NO: 459088 - DNA, 472 bp, Homo Sapiens
  misc_feature (76)..(76): n is a, c, g, or t
  misc_feature (386)..(386): n is a, c, g, or t
ctgtcttgttgctttctgaaatctttactgtgcattttgagttgtgggttccactagggctgtatatacgcatctnctagtgatataccctttggatggtcaataaaaatgccaagtgaaaaacatttagatcttctttttatttagcagttttcttccagaggtagcctcaggagaaatgatactggctgctctcttgtactttactaataatagtaatttaaagatgaagtatttgaaaagattggcatgtaagtcaggaagggacagttgcacagtttagattgaagagaaaataagtatctgtttgcttgttgccagattatccatcagcttaatgcaactgcaatttctcacttcgtatgacagtgtgtttataacaagantttataattttgccatttcacttctcagtttgtgtgaccttatgtctcttgccatagctacttcttagagtgctgtgatatcggac

SEQ ID NO: 459089 - DNA, 279 bp, Homo Sapiens
cctgactggaataagaccttgaaacagcacgactggccacgtctatctggcgtctatctggcgtctatctggcgaggaggcgcggcatggagtccagggtggaagcccagctcacgtggctcaggaccccggggcctcggcctctcatctgcaaaccaagattaaactagggcagtaagatcctaaatctctatcgttctatgaagaaagtgggccaaaaagtccaaagcctctacagtttggagacatcacagctgactgctgctgactgatgagcac

SEQ ID NO: 459090 - DNA, 502 bp, Homo Sapiens
  misc_feature (479)..(479): n is a, c, g, or t
ggtggtttagttttctgctttgtggttacaatattgttttttaaatattcaacatgaatagactttcttgtttggataacgtgtaaaacgtctacaaggagggatagataataagttttcccttcagaatgcactgctttgcctgggatgaggaataatttataatggtaactgttgctggttaaaatttggctcctacccacattcatgcaaactcagtgttctagattaaaagagatttaagagacttgccaagcaaatgcatggcatccttagatgtatcctgatttgaataaaacagctataaataataatatttttggggattattgaaaaatttgactataggattagttttcaggtgatattgggggattaatgttattattgttagggtatgttaggcacggtcatgcagccaatgtgtctttctttttaaggggtgcatacaaaaatatttggggtgtggaatgttcccngtggccataatttgccttaaatt

SEQ ID NO: 459091 - DNA, 352 bp, Homo Sapiens
  misc_feature (151)..(151): n is a, c, g, or t
  misc_feature (191)..(191): n is a, c, g, or t
  misc_feature (229)..(229): n is a, c, g, or t
atgaaccactacacctggcctccacacacattattaatgtgtctcatgttgtgggtgcctgccatcagtcaagctctgtgctaaattctttatccaaccatctccttgatgcctcggaaagcctcaaggatgagcacatcctgggctgccnatggtggctggtctcaggaaccactctgagctggatgcgnaccggataaagccccgtcatcggaattcttgcccccantcctgggaactcagtgcccaaatgggatttaggtaacacgggcattttcacagggcaggcccgtagttttgaaagggccagccgcgattttggcaggccggttttttttcacccggcttcaga

SEQ ID NO: 459092 - DNA, 457 bp, Homo Sapiens
agaagttaaacattagaattttcttacatgaattgaattatcagaaaataatttgtattgtcaaaattccacagctgtgccaacttacagaaaaaattagtgcatttggtattaaacatttaccattatataattattgtcttgatactaaattcaggcaaaaccagatcagttacttagagaatgagatatccaaaataggatttaataattcttcaaatctttatatggatccaacactccagtctcttttctctgcttagtaaatattgctgattgttttagggggaattgaccagtgaacacttagaagcttttgttttctgattttaaaaggataaaacgtattggaaaggttactgcttatcaaagtaggaaagctaactgtcctctagcgcccaaaggtatatactgaggaattgagtgggaaatccccacccaggttttcccattggca

SEQ ID NO: 459093 - DNA, 441 bp, Homo Sapiens
  misc_feature (214)..(314): n is a, c, g, or t
  misc_feature (400)..(400): n is a, c, g, or t
  misc_feature (427)..(427): n is a, c, g, or t
tgtttattatgtgcagtttaccaaggctcagagagataaccaaattacattaagatgtacatctcatcagcaaagctaggtctcaaacccaggtctctcactccaaaaggagactgtgagctgataaaggtctcgaaaacaaactcctctcctttctagagcatgaccttgagtaagtaacatcaaccctagacacactagttctctccttccnnnnnnnnnnnnnnnnnnnnnnnnnnnnnnnnnnnnnnnnnnnnnnnnnnnnnnnnnnnnnnnnnnnnnnnnnnnnnnnnnnnnnnnnnnnnnnnnnnnnnccagggcctttcagttgattttagttccctctttcccttcttacaaggaaaatgtcagggaatttttcagggttctgggcccacantaccaggggtaaccacaaatttaaccngtggttcaggaaaa

SEQ ID NO: 459094 - DNA, 408 bp, Homo Sapiens
  misc_feature (382)..(382): n is a, c, g, or t
gctagaactttgaggcttacagattctgtttgttgattcctctaaaactaaagtcttaatataaacagatggtggtcaagcaaagattagttttgtttcatagagcatttgttgatcttcgtccatggtaagcaagaaaggaattccttcttgttaagggatacactccagtttctaatagtcctcctcctctttttttccttataaagtatatttccctttctgtactccttccttccttttatattttactgccagagttggttcctaggatgtgcagaaagaattgcagtgggaattttaacttttatgtgggcatttctactttgtaaatggatgtaggaaagagggaggctttttaacttttgctgcttttaaagantttcctgctggttcccgaattaattt

SEQ ID NO: 459095 - DNA, 223 bp, Homo Sapiens
agattccagactggctattgtgtgacacaacatacaggatatatctgaatagtgctcagaagagtttgaaaatgcaaatgatattaaaataaagatgaaaaagagaaagctggtcagaacttgtggacataacccttctggatctgttgcctgattaaaaaatagttgatattctcgaatgaattaaaacaagatttaaagactgagcatggtagctcattct

SEQ ID NO: 459096 - DNA, 502 bp, Homo Sapiens
  misc_feature (35)..(35): n is a, c, g, or t
atccggtgttggggaagcacataaccttaaaatgncctcccaccccatgcagtactgccacagagttggaaaagtgtgattgtagtccctaccccacgtggagtatgggaagcactaacaggaacatgacgttaaacagttttgggttatttagcatattttaagcaaattattccataccgcatcctacttataattacctctattattgtgtgcctataaatttatacataaacacacaaacacactacgtatgtgcatttgtatatgtacaaatcaagtatttataacacatacataaatacatgaaaacatcacaggtagcgctgatgtgaacacatgtataatatgaattctgatataatcttttatagcatagttcaaagtgttttctaaataagcctgattatgacattggttcagtgtacaagaatttagctgaatttagctgaagctaagagcatgattatatatcacaatatctcagttgcttgtcatctcc

SEQ ID NO: 459097 - DNA, 590 bp, Homo Sapiens
  misc_feature (14)..(14): n is a, c, g, or t
  misc_feature (23)..(23): n is a, c, g, or t
  misc_feature (47)..(47): n is a, c, g, or t
  misc_feature (81)..(81): n is a, c, g, or t
  misc_feature (167)..(167): n is a, c, g, or t
  misc_feature (525)..(525): n is a, c, g, or t
  misc_feature (534)..(534): n is a, c, g, or t
ccccaggtcctccntgggcccangacctcacgggaaataacacaatnaaacttggtccgaaaagtttgccaaatttccacngagtgtaccccctcctatccaaaagtagacatccatttgaaagcgggagaataccattatttttcacaaaatgaactgcctacttntcgtcctttttgatttttagtggtccagatttttgaatcatataatgatgtattttgtagcttgacatctggggttttagttgcaccatcctgaaaaattatatccaaatcgccctcatgtggaacttcttgcagcaaatgacatttagggcaatgaagtttaacagactgaaatagtcttctgggcttatatgacctcaattttgctcggatgcggtattgttgaggagctttttgtttcaaaatggcacatagtggtgtcctctccaaatactgatgatctgtaagtattgtagcagatagctgttgacatctttctacctcgtataatgatactgatccagagcttggaaagctntcgtcaggntctgattgacagataacatctgaatgctgattggctgtcaaattgcagattctaaa

SEQ ID NO: 459098 - DNA, 678 bp, Homo Sapiens
  misc_feature (76)..(76): n is a, c, g, or t
  misc_feature (86)..(86): n is a, c, g, or t
  misc_feature (627)..(627): n is a, c, g, or t
  misc_feature (667)..(667): n is a, c, g, or t
ggttaacatttggcaaaagttcatttgcaggcacccctcgttcttctcgaagggaaccttgaacaactgggaacancgcttggaanatgaacttggcccaggtgccttgctctgcgcctccacgctcatgccgtcatagtagccaccgtcgtcgacccactgagacatatggccacagcttagcagggtagtgtgcctcagggaagctacagttgaagcaagaggcccagccacacttggagcaggtggtcccacagcccaggccctggcggcacaggatgcggtcgcagccctgggggttggtgcaccaggtcaggttggagcagctctccacatagccacgcaggagcgccttctcatacttggagatgactctggcgaggagacgatggcacgaatgaaggctccggtgggctgggcggggcagtcggcaatggggcaggtgcaattcaaaacaaggttctgctcgatccgagttgtcaggtactcattccagcaagacttacagcaatagtgcatgcagcagagagagggcaggtcgtcgtcacaccccagggggctcacacagacggggcagtggtcaggccgtacgggtacagcctgagcctggggtacgcacagccccantgccagcagcagtggctcagggtcctcactgtagctctgnagcagctgttc

SEQ ID NO: 459099 - DNA, 522 bp, Homo Sapiens
  misc_feature (430)..(430): n is a, c, g, or t
  misc_feature (442)..(442): n is a, c, g, or t
  misc_feature (448)..(448): n is a, c, g, or t
  misc_feature (454)..(454): n is a, c, g, or t
  misc_feature (475)..(475): n is a, c, g, or t
  misc_feature (480)..(480): n is a, c, g, or t
  misc_feature (494)..(494): n is a, c, g, or t
gaatttgctgagtcagcagaggatgggcccaccaccagattctgtcagaagctggcgaagaaccatgacatggtggtggtgtctcccatcctggaacgagacagcgagcatggggatgttttgtggaatacagccgtggtgatctccaattccggagcagtcctgggaaagaccaggaaaaaccacatccccagagtgggtgatttcaacgagtcaacttactacatggagggaaacctggggccaccccgtgttccagacgcagttcggaaggatcgcggtgaacatttgctacgggcggcaccaccccctcaactggcttatgttacagcatcaacggggctgagatcatcttcaaccccttcggccacgataggagcacttcagcgagtccctgtggcccattcgagggcagaaacgcagccatttnccaattcactgntttcanctgcgncattcaattcgagtggggcanccttnaccagggatttttnggctaatttttattgggttcgaggtatt

SEQ ID NO: 459100 - DNA, 415 bp, Homo Sapiens
aggggatatattgagatttattgcaaggaattgacttcagtgattgtaggagctggctagtcatgtctaaactctgtgaggcaggctatcagaagggcagactgtcaggaactctcgccaagcactgggctgctgtcctcaggcagaatttcttcctcagggaaacccttagctctgttctttaggccttctgactaatcaggtcaggctgacccagattatctgagataatctcacttacttagtcaattgggaatggacttctgtcacatctacaaaataccttcacagaaatacctagattagtgtctgattgaattactggtgactgtggcctagctaagctgacacatccaaagaccatccgacccaccacagccttgctgtagggttcagggtctctggattcagccct

SEQ ID NO: 459101 - DNA, 366 bp, Homo Sapiens
  misc_feature (218)..(218): n is a, c, g, or t
gtggtataaatttttattttaaaaagtgttaaaaaatgccttgccctcttgcctttgaacattaattattcaacctctttggaatctaagagatttgataacaccatttggatggtggtacaaggagcaaacagaactcacccaggcccctccagcaaagcctggggcctccctccattctcccttttgggctgtaggagccaaggctgcgtggtggncaagtagtaaccggacaggtgcagacaggagagccgaggctcattactttacagcagtgctcttctcaaccggggcaattttcccctttccttggaccatttgacaatgtttagagactattgtcacaactggggcggggggctgggg

SEQ ID NO: 459102 - DNA, 296 bp, Homo Sapiens
tttttactgaaacttgtttttgtgaatactctgtgcttagaattaaatatcactttcttatgaacaacataacttcttcagattgtgtatatgaaaacattagcaagtcttgttttttctatgaagcaaacacaattggtgacaaaggttgtcaatcatttcttcaaaattataatgcagttctaatggtcagcatattttgatattaaatttaaagatcacctctctgcatttgtttttaaattatgctaatacaccacacattatgttggtatgttttgttctgtactttcttt

SEQ ID NO: 459103 - DNA, 543 bp, Homo Sapiens
gctgtcacaatacagatgtttattaatgattaaatgccagagaagttttaacaatcacaaatctttgagctcagcagttgttacccattaaatgatcaatttctatccctcaatacaatacagtcttcattttatggaccttagcagttgtcatccataatatcagctgtaattctggatcatatgcaacccatatctgtgtgttaccagagcatgtcccacaattttgtactgtcctgtataaaggaattacagagacgatagttaagaacatttgtaatcaagtgactttacctacttggaactatatgtccttacctaactagctgttttgctgacaagagggtgtaaacaccaattgtctttaaagcagatccaggcaataaaatctaaattttcctctaactttggatcccagaaacactaattagacctacacttgaggtttccctgttggcgtgacctgagcaaaactgtacagaattttgggagaggccatttggcaagccattggtctgaataatttggagggggaaatcccta

SEQ ID NO: 459104 - DNA, 422 bp, Homo Sapiens
  misc_feature (126)..(126): n is a, c, g, or t
cctaaagacaatatcttcgcccattttgtaaaataaataattcaaaatataatgaaaaaaccctggcaaggatagttgctggcctgaaaatgtgctctgtctcttagcagtgactcacagaacctncactgcggtgggttcccaggctaaggggtggagcggagagcgtgaagctctgtagcagcgcgcaaacccgggacagggcaggatgcacagccagtcctcaccctttatatattacatttatctttataaatagagcatcctgactcgagtggccataataaaaaagccaaacattgagttttttccctcaaatacctacacaaactgtcaaatatctactaaattatatccacatggcaaactggtcacctctatatgagagctccaactgccatgatggttacaggccaagtctc

SEQ ID NO: 459105 - DNA, 501 bp, Homo Sapiens
  misc_feature (417)..(417): n is a, c, g, or t
  misc_feature (433)..(433): n is a, c, g, or t
  misc_feature (458)..(458): n is a, c, g, or t
  misc_feature (468)..(468): n is a, c, g, or t
atttgtttattttcttgtaggtttagttcatgcatgtggcaaaaatgcacacagtacagaggatattcagtgaaagtatgcttcctcaccccacagcccttcctttcccttccccaaaacaactattgttgctatttctttgtctctggtaacctttctatattgggtatataaacatatatgtacatgtatatatggatacacatgcattttcagttcacatgatttaaattctttggtctaaagttctcagaccaggcaactcttcctttgagtcaccccagaggttaagagatgggctctccaacgctccagcaattctctttcttcctgccagggaaactattactttgattttactgtcttggacttgtaaaaagaggactgacgatgtctatctgtcttcccagagttgancgatggggccaccttnggggcgtaccgtaggcccttttccngccccgggtnaggttttttcaggtgactttttgaggcgaggga

SEQ ID NO: 459106 - DNA, 478 bp, Homo Sapiens
  misc_feature (17)..(17): n is a, c, g, or t
  misc_feature (139)..(360): n is a, c, g, or t
aatatcttatcctgtanttatcttcttggcaaatccctgttcaactttcaaaaatacggcaaggctggctgggcgcaagtggttcacgccctgtaaatctcaacaactttgggaagcccgaaggcggcaggggggccgnnnnnnnnnnnnnnnnnnnnnnnnnnnnnnnnnnnnnnnnnnnnnnnnnnnnnnnnnnnnnnnnnnnnnnnnnnnnnnnnnnnnnnnnnnnnnnnnnnnnnnnnnnnnnnnnnnnnnnnnnnnnnnnnnnnnnnnnnnnnnnnnnnnnnnnnnnnnnnnnnnnnnnnnnnnnnnnnnnnnnnnnnnnnnnnnnnnnnnnnnnnnnnnnnnnnnnnnnnnnnncccatctccaaacaaaacaaaagacagcaggccaactttcttatctgggaagactttccttatattccccaaggaactaagctaatttttaccgctcagaagctacctagatgtaaac

SEQ ID NO: 459107 - DNA, 612 bp, Homo Sapiens
  misc_feature (404)..(404): n is a, c, g, or t
gccaaatgcgttttcttctaagagttgttggcaaaatactgttacaagcttcttatgggacttttgtctactgtggcctggttaaaggctttgtcctcctgtttaatccacttccgtggttttgctgtcatttctcttgatgccatattttcatgtccctcgtgggagggggcataaggtctccatcgtgatgccctctctgcagctgtccagccagcagtgagtgggcccacacatgtgcattcctgtgcttgaattgccaaataaacagtgtccctttcattgctgcccaaacagactggaagcctgctcctgccagcactcagggagggagtgtgtgcttcccaagagcctgcccccttggcccatgcaaactttctccatggcaggtgtccgtgaaggtntcccaggccctatggggtgtccagctctttgcacacattcttcccgcttgcaggaatgggatccaaacacctgatacggaatgatgacttggcagtggggagtggggcagcttgtctccgctaacttaggaccaaaactaggaaactcaccatgagcatgtgttggagatcagctgtggcctccagcccctgttacacacagaggcaa

SEQ ID NO: 459108 - DNA, 399 bp, Homo Sapiens
  misc_feature (344)..(344): n is a, c, g, or t
  misc_feature (376)..(376): n is a, c, g, or t
gtccttttaggtaagtgtatttgtcttttcccctagagagctctttattgtgtcacctttatttaaactgattttccaaagttgtagtagaatctcagcattgaacagtccattacaacagtgtctgatccagccagtcatgtttcctatgagttcaggagtaactaaaccctacagctgctgaaagattgcatctgaaagaagattctgtgttaattcactcaacaattttttattgagtgggctgtatggggccagatgctatcttgtgtgccgagatacagcagtgtacaaaataggacacaggccttgggattaggtgggtctggaaattctaattatanttactctttcactctttgcaaattttctgttnccgtgtgtggcacactaacccat

SEQ ID NO: 459109 - DNA, 470 bp, Homo Sapiens
  misc_feature (343)..(343): n is a, c, g, or t
  misc_feature (391)..(391): n is a, c, g, or t
  misc_feature (417)..(417): n is a, c, g, or t
ataataatcattttactaaagcaaagattaagtacacattttcccaacataacaatttcatctatggataggcattagctacatgatttttcattttaaaaccccacaatgattatttttcagacataaataaaaaatacactggttctagatgccaacaaaatcacatttgcaaaccttaagagtttggtaagttacaacattaaggatgactaacgatatgtgtgcagtattctcagtataggaatacccaaaattcccgtgtacatctgtgttgcttgagtgtcccagtatggggagggaggtaggacttgggcacatcggaaagccactgctattactnaaaggaatccattacaaagttcttcaggggattctttcagaggaatcnggctattattaaatcccatcttggtnattccttttgtggcgaggatgtgaggtttgaattggcaaggggggttattttt

SEQ ID NO: 459110 - DNA, 372 bp, Homo Sapiens
ggacattcctgccttttaacctgtggaatgtgctgcatcgtccttcctgtccctgtttgccttctccttcctgccatgctcttactttatgcttctttgtctttatcacttctagcatatttctttattttgcttgatattttttccccttttccctttgcctttctccccaatcctgacatagcttttacctagtcttttttccccttcctttttcttatccttcactgttttttccttaatctcttactctgggattgacaattgtgattcaaaaactgacttatcctggccaggtgggcagaatgagacaaacatgtagttgcaactgactcaaggtcctcatatcaagacgtcatgtctctctggctc

SEQ ID NO: 459111 - DNA, 395 bp, Homo Sapiens
  misc_feature (354)..(354): n is a, c, g, or t
  misc_feature (384)..(384): n is a, c, g, or t
attttataatagtattttattaaggaattaatttacatatagtaaaatcacaaatctaaacatacagcatgaggaatgttgacaaatatatgcagctacataaccatcatccagatcaaaatacaaaacatttcaatcaccccagaaaatttcctcaggccccttttccattcaatttgaattccctgccctcactctaagcagccactgttctggtatctatcatcaaatattagttttgcctggaagtggctttaatataaaagtaattagatagtatgttatgtttggtttgttttgctcaacttaatgtttttgagattcatacaggttgttgcatgtatcagcagtccntttttaaatgaacagtattccactgactanattggtagttt

SEQ ID NO: 459112 - DNA, 359 bp, Homo Sapiens
atgtaggacaagtgataataattgtttctgtgttggaaaaaataattgcaaagttgttttgtttcttataggttatcttctttatctgtaatacagaggcctttctgtacttattttccaaatttaattcttttttcctgtaggctcaaacaggcccacacccttcccggttacttagtaatacagcgaaaacaaaagactaagtatttgagtgtttgaaaactttaatgtgtactacattgcataccaggaagaaaatatggaaccattttctgcctcccacatgctaggtggttcatttcccttattccctaacaattttccttaatttctgtccttcagatagctggtacacagca

SEQ ID NO: 459113 - DNA, 144 bp, Homo Sapiens
gactgtatttaccttctgaaatattattcctgacaattacttggccttggctgtttatttaaacagaccactcacttcaccatttctcatcagaatgtaagctaatgaatcgttacatccccagtgtctcaaagagggtttggc

SEQ ID NO: 459114 - DNA, 264 bp, Homo Sapiens
ccttactttttaaacttttttgctaaaaccaaagacacaaatgcacacattagcctaggcctacacagggtcaggatcatctgtatcagagtcttccaccttcacattttgtcccagtggaaggtcttcaaaggcagtaacacacagagctgtcatctcctatgataacaatgccttcttctggatccctcctgaaggacctgcctgaggatgttttacagtcaactgtttttaataagtagaagtagtatatgctaaaaaaaa

SEQ ID NO: 459115 - DNA, 521 bp, Homo Sapiens
catgtacaaaattaatgtttatttaaaaagcacttttcttatcccctgataaaagcactcaaatatggtttcacaatatagaaatgattgacttatgatttttagtttattgatgatgccctgaggcataacaatcccaggagctgcaggaacacagatctatttctgtgatagggaatactttcctcctattgttcagaaaagttccattgaactccggggtgggatgaaacaatggtgcaagctccgggaagccgcaatcagggagagggctggtgaaagagccaatgccccagggcaattctagcaccttcagctttaaaatgtccactggaactctgccttgacacagcctgatctaacacaaagttgtggtttttagagtttgacagatcagggactgatggctgattcccttcctcactagtttgagaaagataaacctctctggccttcctcattccaactcacagaaatactgtgcgttaagggaagcaggtatccagagcaaactgtataat

SEQ ID NO: 459116 - DNA, 639 bp, Homo Sapiens
  misc_feature (19)..(19): n is a, c, g, or t
  misc_feature (592)..(592): n is a, c, g, or t
  misc_feature (617)..(617): n is a, c, g, or t
  misc_feature (627)..(627): n is a, c, g, or t
cccgggcccccaaacggtngaaatgggcaatccccctattaaaaaactaccggccccataacaaaaagcctataaacaataccccccaaagcagttaagatttcctaccctcatataaaaccataaacattttaattccaaaatgttgacatttagaagaaaaactacataaaagcaaatggatttgaattatctgactttatttagcatgcaatcaatttattctggcaataaattaatatgtgcagtaaaatgttgggtactttttccaagaaaaatgtttctgaatgtgcacactagaatatatgcagaatcctttaaacagtcgacttcatattttaaacttgtaagtgtggtaacatcaagttttggaagaatggactttttctgtaattcatgatttagtttgagtttataaaggttttaattgcaatttcagttcctacaagctaccaagcctgaaattagagaactgacagctgagaaaggcaatcacctgatcgagtctcctaattgtacagctgaaggaatccaatggccttgccaaaggattacggaggctaaaaaggggacatagcctggggttacaagntcagttttttttaggggctccgggnttgttctttnagcctaattaag

SEQ ID NO: 459117 - DNA, 474 bp, Homo Sapiens
  misc_feature (36)..(36): n is a, c, g, or t
caggatagacaaatggcgaaggatttgcataaaggntgtgtgaaactttaggtcatggaattagaggtctcttccacagctttgcaaaaatctgggtcacccctctcttgagacgtgactcctgacgggccccacagctggcatctcagtcctcttactccaggacagcgcattactggggttggcaagcacttcctttctgacccagcgctgagcagagtcctctccttttgaaggggtctccaggattagggagtgggagtcttgttacagatgtttcattcaagagttttctgtcttccaccatctcatagggcaacagtctctccccagccacatatgcccaggcctgtgagcaggcttggctgtttatgaatgtgtaactgtgtggtgtgggaggtgagatgggcctggcaagggaggctttctcatccttctgtttccttctgaaggtttctggccaaggaggagagg

SEQ ID NO: 459118 - DNA, 1426 bp, Homo Sapiens
catttttactgctttcatttggcttgaatatcaacaagtatttccagaataagtatctttatgccagaatatctttatacatgtgtttgtgggtagtagaatggggtataaattttacaaacaaaaatattttttaagaatagtggaacaacttactatacaaaaacaaaattcagaggaatttgtggcaacagcaacctcaagcagcacacatatttcacagagtgaatgtcatgaatattatttctgtatcttacatgttataaacatataaatacaataatttgtatttctatttggagtcattgttcattgtgacttaacagatctaacaaagaattaaacacatattagtagacattggatagtcaactgccgattaaatggatcatcaaaactgcacctcacagtgttgaaatactatgtcttatttttcaggcacaatatttactatcagtcccgtattacttctggatacaatatcaacaactcaatttcttgtggaagccagtgatggtggaaatcctgacctgagagctcttactttagtggagataggaatagaagatatgaacaattatgcccctgaattcacagtcaaatcctataatcttagcctaagtgaggatgctctggttggaagcacgcttgttacattttcaaacatcgaccatgactggacccgtgaaaacacatatgttgaatattccatcatcagtggtaattcacagaacaattttcatgtggaaactaagttctttcattcagaatatccttataagcaagtcggttatcttgtgttgcttcacagtctggacagagaagcaagtgctagccatgagcttgtcattctggcatctgacagtggctgccctccattgagttccacagctgtcatatcaatacaagtacttgatgtcaatgacaatcccccaaacttcagcagcctgagctatcacacccatgtcaaggaaagcacccctctagggagtcacatcactgtggtctcagcaaatgaccgtgacacagggtcacatgcagaaatcatcctacaacatcatctctggaaatgagaagggacatttttacttaagaagaaaacactggagttctttatttgattaaacctctggattatgaaaaaatgacaaaattcaccttaactgtccaagcttcagatgcagaaaagaaacatttttcttttgcagttgtgtttgtcagtgtcctggatgataacgaccatgcacctcagtttatgttctcaagcttcagctgtattgttccagaaaatctgcctatttcctctaccatatgctctataaatgctctggattttgatgctggtccgtatggagaattgacctattctattgtatcaccctgttttctcactcatggaatgtcttatgatcatgatctcttcctc

SEQ ID NO: 459119 - DNA, 369 bp, Homo Sapiens
aggaaccccatagtgggcatttaaatatttatccatttaccccttttatggcacattaaaaatgttaaataatttcctccttaatttagtcaaccttaaaatttttattagccaattatatttaatggtgaacctataacagtggtaaaattagttcttaaagattatataaaaccatgggctaaaaatatatctgaggatatgatttgaagtatttgaacactaaagacttgttttttgataaattattttaaaaataaatgataatcacatatttataaatatatcaagacaccatattgatattgttcccatttcaatttactttatttgaagctgagggcagaaatcaatattatttcacttgca

SEQ ID NO: 459120 - DNA, 329 bp, Homo Sapiens
  misc_feature (78)..(78): n is a, c, g, or t
  misc_feature (82)..(82): n is a, c, g, or t
atttttgtatagaccttgaataactttagctatctctaattaaagaatttcctgagatgtatgtttaaaacctattantttngcttacatttgtgtgaatcaaaattttcttgatagtatacaaataaaacagggcatagctataaattggctgctggtttcatcaactatgtataactccacatttgtgttattcagaaataactcagaatcttattatgcttagtaatgagccaaaatgaataagcataaatgtgaacccaaaatacatttatattgataaaattgagttttcaggctttatgtattggggttatacataaaatttc

SEQ ID NO: 459121 - DNA, 374 bp, Homo Sapiens
tatcagcttaactattttgtgtaggctacacacagcttgcttttgtttctcttctgtttctgccttattggcggaaacataagcgtgcatgccatgttgttttgaattggaggcacaattttattattcgagagtaaaagacatgtcctcttctgatgcatggcacaccatagtcaccaagcaaataacagagccttcacattgtgtaatatttgtatgagaatgactcaagctctttgagaacattccaaactagtaacatttcgctactaaaagctaggaaagggtgaactgtggaaaggttctagggcagctctgtgagactccaagctccttgaaagtaggacctttgtgagccacgcctttcattcttc

SEQ ID NO: 459122 - DNA, 504 bp, Homo Sapiens
  misc_feature (36)..(36): n is a, c, g, or t
  misc_feature (57)..(57): n is a, c, g, or t
  misc_feature (68)..(68): n is a, c, g, or t
  misc_feature (92)..(92): n is a, c, g, or t
ttggtgatgtggcaatgcaactcccaccgggtgccnaagggactcaccgcaaaaaangccacttaagncactttccccttggttttcccccngtggttgtgtttccacatggaacctgccaagtccagtttccgttgcggaaagtccccagttgccaagatgtgcacctatagactttcttttcgttactgtgcttcacagcccaagtggagctgaatggagacttttgagtcaaaaacttccctggcagagggtgcagcgaaagaagacaaaggtgtgcatgtccagcaggtgtttctgaaggtcatccactgatgtgaattgcttgtcacaactctcacagatgtaatacgttgaagtgatcataaagtgaatggtaacatgcttcagcaaggattcttggttggggaattccttgttgcactgaggacaggtcaattttggaagcacagtgtcgagatgagtttttaggtgagtctgaaagctgtctagggatgtgtactt

SEQ ID NO: 459123 - DNA, 325 bp, Homo Sapiens
  misc_feature (273)..(273): n is a, c, g, or t
actattgttgcatcagagtctcctttgtctgatataagaatagctactcttgctcagttttggtttccatttgggtagaatatctttccctttccctttaccttaagtttatgagtccttatgtgttacgtgagtctcttgaagacagcagatacttggttggtggatttttttatccattctgccattctgtattgttgccttaatactttggtttattttgcattgtgatattgttttgtaggtcctgtgagatttatgctttaaggaggntctattttggtgtatatcaagattttgtttccacatttaggactccttctag

SEQ ID NO: 459124 - DNA, 221 bp, Homo Sapiens
agagtaaagtctatattgttgtaatacagaagtgaaggtgagtgggagggaacaatataatgaagaaacccaagtcagatggaacaggttaaacatgaaggtgaattcagagtaccttccctcaaaccccacccacacccctgctgctgttcctgagtatgacctgagttcagggctgcagcttcttcacagcagctacagaacaaggtctacctagaaaa

SEQ ID NO: 459125 - DNA, 505 bp, Homo Sapiens
  misc_feature (14)..(14): n is a, c, g, or t
  misc_feature (24)..(24): n is a, c, g, or t
  misc_feature (468)..(468): n is a, c, g, or t
cagtgctgcctggnagcttttganaagttggtgaagggaactaagagttttggatctttttgaaactttatgctcctctgcaactgtattctgtagccagggcataaaatgttagttgtcctcccaagatccaccaccatcttcttcttcatcaagagaaactggatttttgtcaaaggcagttatatatccagctacaaaaactacatttctcagacaatcttgcagatagcagtagccaatgacacagttctggccaatgagatgaaggcaaaagttattgggctgctgaggaagctctttaaaaggaagtggatttgaactggcatgccccgttttctctgtgggcttcctccttcttcttgtggggtgctgcggggaccatcttggaacctagttccaagtttccacccctgcaagcgaaccaaaaacaaatcctggcaccttgccattcccagaaaagcctangcatggcacactctgggtaaattttctctcttattct

SEQ ID NO: 459126 - DNA, 465 bp, Homo Sapiens
aactgtgttacgtatagtttatttttatttcatagccttttaaaaaatataagccacctaatattttgaaaaacatacacagaataatcatttagctgccacaatattacaaaaataaaatgacacagaataaattgcacaagagaacaaaataatctctgctgagtcactctgactaggaacacataatagtcactaggaaggtgaagtggagcagtactgccatttcttcatgatcaattatcactaaaatcagtcacaggaactattcccaggaggtcatccattcactatacaggattatgtgcaatatatagatgtcaagttaacatcttggaatttaattccaaataccattctttcttttcctctgggagacaaattcaatggcaagctagaatagtgaagaccaggggataccaagcccatgactgacccacacctctcccagctggttctaccaca

SEQ ID NO: 459127 - DNA, 365 bp, Homo Sapiens
ccattaagcacaactttattgatatggtgagataatacttcactttcttgttgtatcgcagcatgcacgtcagggccatgtgtcatttctagtatcacacacaaacacatcgctattctattcagggacaatagattgattcagatcaagtgatttctgtgcagtgatgaaacattatgatatgtttactatgcagagagcatgaattacagtgctagctacaaataccacaattgggactaaggtgaaataggaatttcttcctagttaaaaaaatatttgggacaaaaatttaaatttaaaacgaagggcatactactgacgtgggaattgaggtaggggccacagttgtctaggacctatgg

SEQ ID NO: 459128 - DNA, 534 bp, Homo Sapiens
gtttaaagcactgaaaatttttaatgcacatcatagatttttcaacaaatgtttattgaattgggttgaatgttaggacagaattctaattgtgaaataggatttgagtcccaacttgatctcaaattcacttcttgcatgtaaacaagctcattccctctaaagtttcagtttcttcaccagtaaaggaaaaggttggaccagacatgttggaccgtaattgcttggtaactgccttctgcatttgtctctgaggttgtgtgtccctaggactaggtaggatctctcttgctttctgccttacctagcatagtgcctgatagcagctgaagcccaattcatacttgtttgatgagtgggccccttgaggcacatgctcacctctggacctctcaggaagtctaggaccccaggaggtcaacattggaccctttttgtgtagtggggaaaaagctgatacatgggaagggagagtcaggaacatttcctctcctccttgtccctggtatacaggctgtggacgtcacttttcag

SEQ ID NO: 459129 - DNA, 465 bp, Homo Sapiens
  misc_feature (357)..(357): n is a, c, g, or t
  misc_feature (429)..(429): n is a, c, g, or t
  misc_feature (447)..(447): n is a, c, g, or t
gataggtaaaatttcttgtgttagtaaaaaaactaaaaatgcctcttcatgaaagtattcagtcactgccaaaagttgtcaagtttctggagcctgagtgtgtggacaggtagggggtcctggggagcctggcctgaactctctggtccacttcaaaggcctcagagctcagtgcaggcagctgccccgagaacaaaggctgctcaagtgagaaggctttaacctcttccttgctgttgctcagccccgctgggaaagagatgacgtgttaaattccacagtccatagctacaatttgcctgtgattttccagattgtcacttctctgtgggtgattctgtagggaggcctgccatnaaaactgctgtggatcatctgtgggtaacaagggtggggggcagagttaacaagggtctggggaaacctcantttgggctgttagccctnttccttttcacaccttct

SEQ ID NO: 459130 - DNA, 508 bp, Homo Sapiens
  misc_feature (22)..(22): n is a, c, g, or t
  misc_feature (31)..(31): n is a, c, g, or t
  misc_feature (109)..(109): n is a, c, g, or t
acacggggtacccacatatttnttaccatcnggtcattcaccctcagagcgtatacaagtcaatagaaaacaaaaaaagcacaaggcctacgaggtgaccatgcattanggctaattccttggaacaactttaataaaaatgtaatctttcatttaaatcgctaaaaagaaacataaaaaaggacaatgaaaactattctcataaaattttgaataaaaatggcttcaccaatacacacttaacctcttttgaaagacccaggaaactaacaaatccacccactgtaaactctctgaaagtcctaaccacacatcctatcttggtcaggtccttcctgactcactttacccccaccttgctatgctttgttcatgggaaccaattcagtaacatttcataggctattcctgatctaagtaaataatgcatactgcttaaccaggtgaattgtcttcagtttgttattgttttgtttaatatctagtaactcagtaaatacagagtttt

SEQ ID NO: 459131 - DNA, 480 bp, Homo Sapiens
  misc_feature (16)..(16): n is a, c, g, or t
  misc_feature (32)..(32): n is a, c, g, or t
  misc_feature (43)..(43): n is a, c, g, or t
  misc_feature (51)..(51): n is a, c, g, or t
  misc_feature (57)..(57): n is a, c, g, or t
  misc_feature (64)..(64): n is a, c, g, or t
tttaaggggaaaaaantggcctcccctacaantttgcctcccncaaggtanaacggnagaaaantaaaaaaatccatgtggttacctactgtcctagttgtttccttgaaaagggtatgaaaaaaagtgtgatgaatataattgagattattcatatttttgtagtctcaatgtgttcccttggttgtctctttaattgtcccttctcagggtcagcctactcagattcagtactttacacgttgttttcagcattttctgcttgaagcactaatgcacttaacccagcatgttctgtattttaggatattagtgttctggagaggtcaagctggaatgtcattcgccctcattgggctacatcaccacccattaaatttcagcttttcagtaattgttctgggatgtgttctagttgtgcaaattagatgctagctaatataaatctaagttacccactaactgtattagccataacat

SEQ ID NO: 459132 - DNA, 339 bp, Homo Sapiens
gctaacaggaacaaatcctaccctgaaatcctccactgatggcccatgctgggcttcttggaacttcccccatggatgaaacacagggaagtgcccaaggcttaaagggtgggctcccaggaagctggagaaggccttcccagacatgtcacagacatcagaggtgaggtatgatagacatgggcatacactgggtcagggtttacaaaagggacatgtgggccgggcagcagacccctggtcactagtaggggagggtggagtcatcccactccagctgggcttgcctggctccattctgcccatgtctgcctctgcccatcccttccttcctctgtc

SEQ ID NO: 459133 - DNA, 462 bp, Homo Sapiens
  misc_feature (415)..(415): n is a, c, g, or t
ttttttttgactgaaaactactttatttgaagacattttcttctatagttctaaacacaaaaggaatgctgttatagtgggtatttcataggcattcttgtattcaaatgaatcacataatgtttacacttttaagctagacttgaaattgaagacttaatacaaccttttaacaaagaaagtatcagtcatatcaaaacataactattcattctacagattatcactttccctaaaatgactactagatatgaaaacattgcagggacagctcaagtgccccattcttaagggttttttttaatagggaaaaatgacaacgtaaatcacattttccttttctttactaggtaatggaactatgggcaatccatttggaggaaaggcaccagcccaaccggtacaggtcatttcnggcaccctttgctctttcaaaactggaccatcttttatatttaatgg

SEQ ID NO: 459134 - DNA, 468 bp, Homo Sapiens
  misc_feature (410)..(410): n is a, c, g, or t
attcaatttaaatatctttttcaagacctgaatccctgtattgtaaagggggaaactgaggcacactgacattaaagtggcataacctaggtgaatcaatagcaacatttccaacttttacccttctctagggtaaaatgcttcactgttgctgttaatctctattactatcctgaaacgtttcctgaaatgataataaacagaaaattttaacataagaaagtaaaagatagatgtaaattacatcaaaactatgtatacctattaggatgtctattacaaggacagagaaaagagaaaatagatgccttgtttggttaggggattatggggcaacatcctttatatgctgcttttaaactaagtcaacataggtttttattgcagggaggaagtttcacatttgtgtnctacccaaatggacaacctgttaaagtttgggattggagttgggttttagggttttcc

SEQ ID NO: 459135 - DNA, 541 bp, Homo Sapiens
  misc_feature (33)..(33): n is a, c, g, or t
  misc_feature (59)..(59): n is a, c, g, or t
  misc_feature (68)..(68): n is a, c, g, or t
  misc_feature (81)..(81): n is a, c, g, or t
  misc_feature (125)..(125): n is a, c, g, or t
aagaacccaagaaaatgccctacagttacaccnacccatggaccaagatcaaacctccnactttaacngtggagaaatgangccccaggaaatcctagaatttcccccaaactccacagaagganttggtggcaagactttggcccaggccttgaaataaggctgggtctcagtgccgggttcctcacctccccaggccttggtaagaaggggctggagttagtctgtctccttcactttgatctaaatagagaggctctaacctgacagtaaaaggcagcaagatgctatgaacaagtatggctttggcggcctggggtctctatctgtgttggttaggaatgcttttggcttcaagtgatggaaaatctgatttatggtagcttcagctttggagacgtttacctgtgcatataataagtccagaaagtgaggtctgaggtcactaagaacagactcacactctgcccatccctctacctcaacatcttcctctcattgactctttaccatcaggggttcctcatggcctccagattgc

SEQ ID NO: 459136 - DNA, 370 bp, Homo Sapiens
  misc_feature (71)..(106): n is a, c, g, or t
aaatacctaaggccaatttaaaggaattacccagtatataaaaaaatagctgtcacttggcacacaggttnnnnnnnnnnnnnnnnnnnnnnnnnnnnnnnnnnnngtgtgggtacatagtcttaaaaattacccagtaatgtgatttgacatcaagttgcagcaattaatatcttggtgtttgtaagtaagttgcatgataaacacaaatgactaccacttgtctgtagatgaaaatctggttacccttatggttccagaaggaaaaacagacttatcttgcctgtttcataaacagcataaaagattaatacatgcagaacatgctcttattctggaggggatgggggatccagaacagggctttatt

SEQ ID NO: 459137 - DNA, 491 bp, Homo Sapiens
  misc_feature (100)..(100): n is a, c, g, or t
ctctggaattctgtaggtgaaaacagggtaaaaagcttgtcccattgttgggtaaaagcaagaacgttcctggcctacccgccatattggtaaggggccnaagtaaatacaacacccaacagagttcttaaacttggcaaaactaaaagtcattatatgtccattggcacagaaacaggcaaggcagatactgttactcaatgctacaatatctccacgaagcacaaacgaggtctctgtaatattttgcttataagcacagttctgggttggcagtgagattacttttgcttgcttttcagaacatatcactgcatactggttttcactaatttcctgagaagaggagggggatactgagacaggccgccgttttttcaatttctccttttcgtctttttcttcaggaacattgtgctctctccagggttcatacgcaggtggtattaagcagcctgtggtatccagaaatgccattctcaagattgcac

SEQ ID NO: 459138 - DNA, 312 bp, Homo Sapiens
tattttgggaaatctttcagcttcagtttttgctgatatttatgtgattcctttgttctgcaattcaaatttcctgggagccaaacagtctccttggttcagattactgttttttgactagagcttctcacttcagattctgtcataagattatggcttaacctatggttgtcctttgatttggtgccatatgaaataaaacattattttctatggctatgtattaagaattttgtgcaattctgtttttcttagaaggctgagggtgtgttgtcagacaccatgactgatgtgacaggtgtattttattat

SEQ ID NO: 459139 - DNA, 381 bp, Homo Sapiens
tccatttgttggatgctcttaatttgtccaatgtaaatataaaaagagagggcattaaaccgttttgccctataatgggggaaagatgctggttagatgtttattttagtgagcttgcattttcttacacgtgcaaagcagttcatagaattcatagttttacacttactatgtctttcctaaagacacccaggatgctttatttttaactcttgagccactagtgactcttgaataaattgaggtcagaaatgttgcaaaagtggtaagtttctgggcagtgtgggagacaggggaataatctcaacagtaggtttttactgaatccaattattttaatttagggctgtgtctatatggagcttttttggacttactaaa

SEQ ID NO: 459140 - DNA, 435 bp, Homo Sapiens
  misc_feature (389)..(389): n is a, c, g, or t
  misc_feature (402)..(402): n is a, c, g, or t
ggagttgaatctaagtttaatattcttttttcaacagctgctggcagaaaaccaactatggggtgacagcctttcctcacccctttggcatcccagtgaggttgagaatataagttagtcccctgtagcttcatcaggtggggtggaaacctaccttggatgtcatcattgaacatgcagtacttgttacggtatttgttgagcaggcggaaggcattggcattggcgaagtcttcaaattggatgaggcaatttattccaaacctgtgtgggagggagaggaagaaacccatgattgcctctctgaggagtatcccttgacagatcccagcttgcacagtggggtggggaggtgcaggcctgggggtgggaggtggcatggctccttnatctgtgtttttngccactgggttggctcctggacttcctgggttt

SEQ ID NO: 459141 - DNA, 673 bp, Homo Sapiens
  misc_feature (17)..(17): n is a, c, g, or t
  misc_feature (30)..(30): n is a, c, g, or t
  misc_feature (404)..(416): n is a, c, g, or t
  misc_feature (492)..(519): n is a, c, g, or t
caacatttaatcctccncattccacagganggccccacaagggactttgccactgggacttttccccaggtttaagttgtaaatcccttagggttcgcaatgcacagagctgaactaagaaggtgtactggcctgccaaaaatataggaaagtgtattgacttcataaagttccagctggacaccacagtgtaggctacaacctgtcccaaatggaaggaaatgttgaaaatgttttcaaagttaaaacatctctcaacgtgataacatactgtgcaatatcctgtcacaataataacacccattgcataacatccttaacaaaatagtccgaaggggagatttctgatgtttgtctttggtgagaagtgtcatggagggtagtaatagaattaatttttgtcnnnnnnnnnnnnngaccatctttggtcttaacaccatcattaagttctactttccaatcaatcaagacatttaagccctcctccaacannnnnnnnnnnnnnnnnnnnnnnnnnnnaaagacaaagtctctctgtcacccaggcagcagtggtggcacaatcttagctcactgaagcctcgaattcccgggatcaagctattctcccacttcagcttcctgcatagctagggagtacagttgcataccaccacacccaggctgatttaaa

SEQ ID NO: 459142 - DNA, 301 bp, Homo Sapiens
  misc_feature (274)..(274): n is a, c, g, or t
atagggtcttaaaaatcttttcatttattcttaaaaaatcttgtgctgctatgcataaataaaatgaaattattcacagtatgggggttttacaatgtgaaaagcaataagtgatattttatgaaactataaactcactgattagagagagtatttaagataataataacccagcatctaaaaatgcactaaaaacactatcaaatgtataataaagttcccagaaatggcaagaggtaagagctgatgtatcatatttaagatttacaaaaancaacatatttttttaaaacccctaaaa

SEQ ID NO: 459143 - DNA, 522 bp, Homo Sapiens
  misc_feature (68)..(68): n is a, c, g, or t
ttttttttgtcctcaaacactgttatttattttcaagataaaatttagtaacaacattacgaagtagncttttattcccttgggtgaataagatgtgcacatttaataataaatttgcttactaaaggtccttttaggggaaaacaaccttaaaaatacagttctagtccttgggcagtgaacaaagaaaaaatgtgcttgagaaacacagtccaggttaaaggaaaactctcagatcggttaatgcagttgaatttttgcttgagaatgtgagcaacgtatcagcaaatacattcattcttgtgctactcttcattatttagcatagagctaccttaggtgtttctacacatgctctaaaccaagagtaagtttaacatgtcagcagtgaggagtagacattttctactatagcacactgggagatgtttactggtactctaggtagaaatgactccattgtccactaagtttgggaaataaataatatggcaacattgctactggagatacataatgtac

SEQ ID NO: 459144 - DNA, 501 bp, Homo Sapiens
tatgcttatttccagaatgactgacaacattcatacaaggatctgtagaagactctagtatgcaaaaaacagtaacataaaatagagatcctctagcaacaagacttaacataaagacaacctctcccattccttcaaaccaatattgttgatcacgttatttctttctaatttttttgaatcagccattcctcatttaacctcgtgaacttgcatgttccttttcatttcctcagtcaggaccagtattattccatctagtaacttctccgcagtactaatagccttgcaaatgtcgttcatgagcctctgctggttccggtgacaagagaaaagcttctgcagtctgccagttatcatggtttctcatcgattagcaagaaccgtgactccttacagatcaccatcaaacctgagctttactattctgtgtgtcggcttctacctttagcgaggtactagtcagtagcagcaggtttccataaactataaattagcact

SEQ ID NO: 459145 - DNA, 539 bp, Homo Sapiens
  misc_feature (114)..(168): n is a, c, g, or t
caattcacttgcaacaataagactctactattaggcttgtgattattactgtcacccttcctcattactgcatgaagtcctgagggcaggggtggtatctgacttatgtccctnnnnnnnnnnnnnnnnnnnnnnnnnnnnnnnnnnnnnnnnnnnnnnnnnnnnnnnatttgcaagagagcttacatcacatcttgacaccctagtgtggaggttgaaaagtgccagagtagctaaactttaaagttccttcctgctttaaactatgattatagtattcttagtacctcctacaaagttgactgcatgaaaactaacatatatatatatccctggtactaacaaagtgcaaacacatgacctttcttatgcctgcctttccccatctgttatgaggtgatattggatgagatcatcttgaactcccagcgctgttttaggagcaagaacttctactgggggctgtggtgcaagggtgtgagcaacagtatctcttgcagcccatgctgtgttgctgtgggtttggggagtactcaggt

SEQ ID NO: 459146 - DNA, 361 bp, Homo Sapiens
  misc_feature (267)..(267): n is a, c, g, or t
  misc_feature (317)..(317): n is a, c, g, or t
  misc_feature (324)..(324): n is a, c, g, or t
  misc_feature (341)..(341): n is a, c, g, or t
  misc_feature (347)..(347): n is a, c, g, or t
gcatgttaatattttacaagtagctctcattctttaaccttaaataaaaatgttagcatttcaaatattttcatagttatacaaagacgcagaatattttacttcacactataagatgcatttggacagtaataaaaggcaaaaggtcttggggttgacttttcaattctaaggcaactaaactaactaaattttagacatgggaatgcctccagggttaaaactgtttttaataccatcagctactgataaattatagttaaagcnatagtagtgattaatgatttggaaaataatccttaaggattttggctccnttttctnttaaaatgcatttattncatctncccgacaagacggg

SEQ ID NO: 459147 - DNA, 426 bp, Homo Sapiens
  misc_feature (250)..(250): n is a, c, g, or t
  misc_feature (334)..(334): n is a, c, g, or t
  misc_feature (345)..(345): n is a, c, g, or t
  misc_feature (352)..(352): n is a, c, g, or t
  misc_feature (390)..(390): n is a, c, g, or t
ttttttttaaactgattacacagtatgaactgaggactgttttcgaatccctctctcctctcgaattgatttaccacattctaaatccgtagataaagtagttccagaagtggagttggttggatgggtttgcttacattgcagtccataaaagaaacaaaaagcctgttcaatatcattattcttccgtgatttgtatatgaattctccaatagctacaaatacagaaaggaccagtccggcagccagnaacaatgaagatgcctccaatattttccactcccaggggcactggcttctttgttgtcttcctcgggggcagccattcccacgncaccacttctntttcatnatatggcaggttcccttcttcttgggagtttgaaggcntaggcaattaggttaatttttgatcccgggttaagg

SEQ ID NO: 459148 - DNA, 488 bp, Homo Sapiens
  misc_feature (19)..(19): n is a, c, g, or t
  misc_feature (38)..(38): n is a, c, g, or t
  misc_feature (79)..(79): n is a, c, g, or t
  misc_feature (146)..(146): n is a, c, g, or t
ttccttgggttctgatganttgcctccctctacccccnccctaaacttctttccccggtccagggctctcccgggaaantggctgtcctcaagtaggaataaactggacacaggtccagatgaaaagcccacaaggtcatgtgccnggataaacaagcttcctgcgaagagggacacctggcccacaggttggacactcaggaatcaggccgtctgtgaggtcaaagaaggatcccatgaaaggcacatgggaaacacccacgaccacatccccaggatccccgtcagggcagggctagagtttacagccactctctcctgagaaggacgtcaagacaaaattaggaaaaaaactacaacatcaagtcacttgcccaaagtcacatgtaccgaccccgtaggtgcaggtgcagtgtttctcaccggctctcccctttacgccaccaccagaaacacaggagatatttctgaggtagcctcaggccctg

SEQ ID NO: 459149 - DNA, 150 bp, Homo Sapiens
aatcgttataacagttttattcaagtctctgtgtgctctggcattgagaccaggctgagatcagcattacactgtaatacaataagaggtttagccattgaaccaagcctgcttggcatccctagttaacaatttacagtacctcgaaag

SEQ ID NO: 459150 - DNA, 464 bp, Homo Sapiens
  misc_feature (13)..(13): n is a, c, g, or t
  misc_feature (56)..(56): n is a, c, g, or t
  misc_feature (66)..(66): n is a, c, g, or t
  misc_feature (76)..(76): n is a, c, g, or t
  misc_feature (163)..(294): n is a, c, g, or t
gggattccggccngggaaagcctgtgaagacttgaagtatggggtggtaattgggnatgcagtggnccgggtaccnaatccccctccgtatatagaggaacagctgtacacaaatgaggaatgaagcacttcctaattcagggtattttcctaaattaaagtnnnnnnnnnnnnnnnnnnnnnnnnnnnnnnnnnnnnnnnnnnnnnnnnnnnnnnnnnnnnnnnnnnnnnnnnnnnnnnnnnnnnnnnnnnnnnnnnnnnnnnnnnnnnnnnnnnnnnnnnnnnnnnnnnnnntgtaattcaatttttaaagggaaatttaaaaatagtataaggctcaaaggttcaattaaagaaaccatttatgaaggagaataataaaatattactttgtgtacatatgtcagtgcagagaattgggtaagggtgatttttagctctgttaagacttgcttcagaatgcc

SEQ ID NO: 459151 - DNA, 423 bp, Homo Sapiens
ccagtaggtgacttcctttgcattttaaacattctgaacaagtcagtgatattatgcaatttgctaccattactgaaagtaggtaattagcagtgttattatgtgtttcagatgttattaaaaaggctataaacaaaatgtactttgtagaatctttgacatgaaagacagataggaggagacaagtcatgtttcgagataactaagaaagtaagtgatgtggattacatactggagttgacaacttgtgaagctagacattattaataattaaaagttatgaccggtcatgtactggacaaccaacagtaattaatttctaacgactgtgtgccgaatgagaatggggaggaaattaacagtatttcttcctggagtgtgttcttattaggctgagatgctttaaatgtagccggttgtatc

SEQ ID NO: 459152 - DNA, 532 bp, Homo Sapiens
aaatcttcatagagacgccttagcagaagctatcggctttgacagtacaccgaaatcctggcagtgaaccataaattgaccattaccataaaaagagctgctaaacgagaaaccatgtgctcagtataaaactaatttcatgctttcaaaagcacacagtggcttctagcaagatagtggccctgggacttgccgagacagattggtgaacacaaatggtttgctcctgatgcgtctgcttagccaagctttacgtgtactggcagtaaaagaggttctcgagccttctatcaaacaaatacacacttagctataactttaaagctgaaagctattaaaacagctgcctcaaataaaatatagcaggaaaaacacatacacttattatacatacacaccccatgtgccatgctagctgcttccaatcaaagaaaaatagattcccctgccaacctaatatactaaacagagacttaataagcacaatgctatttaatacattataaccctcacactccattcatgcttagaa

SEQ ID NO: 459153 - DNA, 154 bp, Homo Sapiens
attttcctgagatctaaccgtttccctccgctagctcctgaccccagcccagcaggctgtctcctcagtaacacatgggccttggtatctggcacccatcagccagcctcataggaaagaagccacctccgctgtatttgaagtttcacttttt

SEQ ID NO: 459154 - DNA, 145 bp, Homo Sapiens
gttatttaaggatttgtttaatgttttaaaattcaaagcactttaaattattttaagacaaaagattaataaaaacaacattacctttcaaatacaactttataacagcacagtggaagaatggtaaacagtccctctttttttt

SEQ ID NO: 459155 - DNA, 362 bp, Homo Sapiens
  misc_feature (111)..(111): n is a, c, g, or t
ccttgaagtttgacttgtctgttccctcaaatgtgtcgacacttctgaaatgttttctcctttggcacatcggtttgaacatccccagatgtctatggtgtacctcaaaanctggtccttgcagtcggggtgatatgacacatctgttgtctaatgtacctactgtgtgctcacggacaaagccaaataattaatctgggccgggattgttcatgctttcacagttcggttcggcattgatctcttcttgcagaaggcctatattgggaccaaactgggaatgcaacagggcaaagttggtctaaaaatcctctgggaattttccatttggcaattaaattttctgtagattacatctctct

SEQ ID NO: 459156 - DNA, 432 bp, Homo Sapiens
  misc_feature (417)..(417): n is a, c, g, or t
agggggattattagctacttgttaactttttcagcatattatcattcctcttttaagactcaagtattattcactttgcttcttacaacccagagaatgtgaaaattctcctctattttatgtagcactattcacttaacattttttcaaagcactttataggatataaaaatagtacccggtaacatttaagtaaaggtagcagaaaacaaaagaactttcaaacagaaattatgttccctgccacctcctccacctcaaagaataataagcatgtggcataaatggagttgttcagaaaagctgtctgcataattttccttcaagggtaatgtatttgacagcatgaagtttgtgatgatcttacttgggtctactactcaggcggggtctttagggattctcttattatttttncttctgagggggttg

SEQ ID NO: 459157 - DNA, 649 bp, Homo Sapiens
gagtcaatataacatttattctgtattaataatcagtacataaattaattcaacttgaaaccttttttctacagagtactatttaatattatcatctgatccatagtaatttagtactaattttaatgagaaaaaatgaaacttttactttcataatagctcatccacttaacatttttacaaagaactactataaatatgtaacactatggcaggcttttttctacacctaggtcacaaatcaaaataagcatactgtttatttaaaaacggaacactttcaaactggctggctgtattcggatcaccaccttccccacaccaaattaattgctctctctgtgtactcccctctgtgccactcatgttgcagcattatccatggctctttgccttaacccaacccggtttctgttgtcactgctccctaggttgagttcttggatggcagggagcctgtctcccttatcaaatagtgttaggtatgagttatgcctaatacgtgtgttgaatcaaattgaatttaattaggacacctgaattttatgtagcttccttctaatttttgtaactaaggagcattacaaattttcttttcaaaatgtaccataaaatataccatggattgaaattttgaattatgtataag

SEQ ID NO: 459158 - DNA, 456 bp, Homo Sapiens
ccctacataacccatggactgttacccacacccccaggagaatgaatggggaattcccatagtagcatcctgataccccagagcatgttcctaatttccctcagttgtatcaagctgttcctttttgaacccaggatccagtcaggtttgtgtattgccttaattatatgtccctttattcttttcatataaaacactcctttttctcacgacttttaccttttttaaaattaaaatgatcaaggtcaaagatttattttacgccttgaggagaccagtaagagataaaacttatgccaagagcatttgaggaattaggggtgtgtgtgtgtttgtacacacatatatgcgtaaaacccaaaaagaactagagtaagatggctaggttagatttcaatgaacaaacaaactggtgacaataaaacataatctttggggttatcttttcttttggac

SEQ ID NO: 459159 - DNA, 365 bp, Homo Sapiens
  misc_feature (236)..(236): n is a, c, g, or t
gtccttttacaggtctttactggggcctttcacagtactggggtgagaggggtctcaggcctgtaaacatggggttggggtgggttgggaagactctggctttgggattagaaagccggaatgtgtaccttggttctgtcatttacagtcagtcgtgtggacttaagcccatgtctttgtctctctgagcctcagtatcctctgcagaggtagtgctcacattgcctatgctcgtnagggtgaagtacaatgcagcatggggtcgtggagcagtggctggcatcctggcatcccatgggagcttcggcacggtcaggacttctcattgtggtctcctgtcacagctagaccttcagtcttgtgtg

SEQ ID NO: 459160 - DNA, 371 bp, Homo Sapiens
aaatgatgtagtctctaatttatgctttttgagtgatacgaagaactattcccaaatttatgaaattattgtgataagcaaaaacatgtaaatattctaaatgattccttactctatgttaaaataaaatagcgcagatctatctctattgtgttctatctggtaactcacaggagaaactcaccttgatacatacacatatgcatttttttcagtctcccaatttttggcattttctgcattagagataattgaagatgaaaaggagaaatgctttaagttcttgatgagaaagctatttgtactgatttttaaacagtgaaatgcgatgtaaacatgtttaaaaggataagtgaggaaactgaggactg

SEQ ID NO: 459161 - DNA, 339 bp, Homo Sapiens
  misc_feature (192)..(192): n is a, c, g, or t
ctggacagtgtttcttgctgttgactgggagcaggttttcaaacatttacatagttgtgcacaattaggtttaaaatagctcagcttattggactcaaagattctgtaccataacttacctaaattccacagagatgtgatgatgattttcaagttatctactttcctaccagagaaaatttgatatttgtngtgttattctttgttgactgttaacacattttatatttagaattccagctagatcctttacaaaaatttagatactaaatttttttagctccaaaattattctcatttattttcaggcaatagatcggtagcttggctaacctgtta

SEQ ID NO: 459162 - DNA, 428 bp, Homo Sapiens
ctgcaagttcaattttataaaaaacggtattaaacttttgaaacatgattgggtttaatttttagtgttctcatcctttttgcactcttcaccacttaattattcacatttcttgactcagtttgtttatcataagactcttaattcctgaagggcaatcattaaattcatcacaagtcattccttgataattccttttattttggctgcttattggtaagatgcttcagcaataccaaacgtcagcttaataatgcagatactcaggacctgcgtttcttggaggaagcttcatggttatcctaccccttgctgaaccagtgttttaaaagctacagtaaggtaaaggcaggacaaacggcatagttttttcttaattttgtttaaaatatcctaatccatctttttaattaaaggctttcggttgc

SEQ ID NO: 459163 - DNA, 569 bp, Homo Sapiens
  misc_feature (490)..(490): n is a, c, g, or t
  misc_feature (511)..(511): n is a, c, g, or t
  misc_feature (516)..(516): n is a, c, g, or t
  misc_feature (535)..(535): n is a, c, g, or t
  misc_feature (545)..(545): n is a, c, g, or t
  misc_feature (551)..(551): n is a, c, g, or t
ttttttttctctttaagatgctttataaatattttcatcatagtttttatcaagttgcactataatttactaacttccacattcaggctgttttcagttctaaataatatggtgatgaataattgtgcctacgcttgattacttttagattattttctaaaacagaatcccagaagtggaatgactgggatgagaatcatgaggagttttaagatccaggtcttctgtgcagttatctttgaggctgtgacaggttatttttgggctttggttccctttcccccaaatggggctccagactgttttcctctccttcacatatccagtgctgttctatcacaggactttctgaggcccattacatttcttcccaggaggatccgggggcctgcactgaggcttgttcccagttagggttttgcctgtgctaggagctccagtgtaggatgtagggagggcagggctgggagtcccgagttgaagccatccngggcagcgtttggctaaaggnccctntagttgggagggcggtcantgcagctccntggganccaacatccatggaggtt

SEQ ID NO: 459164 - DNA, 231 bp, Homo Sapiens
gaatggaacatgtcttataattgtaaattacatgagaacatatttatgttggaagtgaacacaagtttttattttaaaaagtagaataactctcaggggaaactaagtttttatatattataataccttcttgttaattttaattatgtaaagaataccctcaaaatatagctgagatgagtgaagatacgaaaaggaaatgctaaggcatcttaaagtagagtaaatttt

SEQ ID NO: 459165 - DNA, 733 bp, Homo Sapiens
  misc_feature (688)..(688): n is a, c, g, or t
  misc_feature (718)..(718): n is a, c, g, or t
gggcctcaaaaccaacctccctaatgggttaagtagttaaatgtggaaaagaagatgccacatcccatttttaagtgcccatcccctgccataactagttggcaaggccctgaataatcctattccctaggtgacgagatgtactgctgcaacctttaagtcaagaaagcagagaaagaaaggtcccatggatataaaataaaccaatggggtataagccatgaaacatttggggcaaaaatatggaacaacgtctggaagcaaaacccaaagcaaatggctgtctgagaaggcctggcagccactttgttgggtattctattgtgggactccttataaccggccaacctcaatattgctctctcaattgccaaactacaaaaatcagaaaagggatgatttataagtatgtttttctggctgactgtaatctaagaggcaggactgtgcagaaacatttcagcaaagtgatgccatggtttgatcacattttaacagcatttgtgtaattgagaaaggacagttgttgtggtcttttcctccatattgagagtgaacgctgtcaggaggtcaccttctaaatagaagaagttgcatttctgaagaatgttcctaggcagagatacctttgaaagggtactgaaatgggcagccattttcttctttctcctcacaactctgtttcctnaagccttgcaaagcacttcaacatgaatgnaaaaacaaaccgaca

SEQ ID NO: 459166 - DNA, 346 bp, Homo Sapiens
  misc_feature (301)..(301): n is a, c, g, or t
acttggtaccatgagaagtgacatgttctgagatgttgactatctgaaggcaactagctgatgtataacttgtttaattatttcaaaggggtacccacatacatacaaggcattttcaggtaaggaatattaatggcataactctcataattgttggcatattccccatgatgtaaaaaacatctatcatgcctgagactgtacattagtgctttttcaccatcctttcttgaggttgccatgaatttgtaagagaatctgtaactatcctagatgtggagaagggttagcttatcaagtncctcacagtaaataagactcactaatgaggtatgagattttattg

SEQ ID NO: 459167 - DNA, 433 bp, Homo Sapiens
  misc_feature (383)..(383): n is a, c, g, or t
  misc_feature (389)..(389): n is a, c, g, or t
tggcacgaggaaatacagaagaattatttgttctgatcctattccaaattatataagttgataaccaaatgttaccattggaaaacgtcttggaactatttaagtctttctattgcactttttcttccaactttaaaagacaaaattttaaaatctgaccccagcccttgtgattgttcagtatataatcaatggtatcttacaaggactattttatttgggaatcaatcaaatttgtttcctgccaacaataagttaggattgttttttgcagttctcaagtaacaaatatgagggaccgaactctcattcaacatccaagcccttgcagtttgtgccaaatatatgtttaggcaccaaggggacagacaggattccatccntaggtntgggctttttaccgggggatggttttggcattttattccatggt

SEQ ID NO: 459168 - DNA, 337 bp, Homo Sapiens
agaaaaatagagaaattttaatttgcaaacttactgtattcttccccctcacttaagccagagtagtgtttttcccatcgcgctcttcgctctagctccggtgtcctcccaagctctgtgctgctgttgccagcgtatcaacctctctgtcttcttcgggtctaagttgtattggcctgaacgagtttttcagatcccagagttaataatgatactgtgcaccacagagtgcaggaagcgcacacgttcatttgatcgtcccccgcctgcaggcaaggcagatggggaccccacgttttgctgctcagactctctcccactgttggttccttgtatg

SEQ ID NO: 459169 - DNA, 151 bp, Homo Sapiens
ttttgcattgttctatagttactattgtatattggaaattagagatgctttctgtacactagtactcttattttgattattaattatgtttgttaacactaattacaaagttgcataagtattaagtagtctgcaccaaactgtttttgcg

SEQ ID NO: 459170 - DNA, 403 bp, Homo Sapiens
ttttttttgattttaaaggtaagatgttttattttcaattgagaattgttgcctgaaaaccatgtgggagatttaaatgtattagtttttatttgttttttcttctgtgacataaagacattttgatatcgtagaaccaattttttattgtggtaacggacaggaataataactacattttacaggtctaatcattgctaattagaagcagatcatatgccaaaagttcatttgttaatagattgatttgaactttttaaaattcttagggaaaaatgtattaagtgggtagtgaatctccaaaactagggccacaacatctatttaaggttataggaataactgggactaggtatctgggcctgagttctggggacctcaggggtgatgtgatggaaggagg

SEQ ID NO: 459171 - DNA, 463 bp, Homo Sapiens
  misc_feature (289)..(298): n is a, c, g, or t
tttgaaaagttaagacgggggtcactcccccaagaatagtaaaggacactcactggggacagtcatgatgggtgaagaagggatacatatttttaaggcagcaggaataaatttccatcatccctcccccagaagacagcaagaattattccaaggtggcccacccaagtctggaaaccaggcaaatcttttaacaaatggtttattgatatgttataatgaatgacaaaatattagtatctaattctagactttatggccaccccataggatgaatctttggaacagnnnnnnnnnntaaagaatttgttttctcataatcataaagctgttatactcagtccaggcacagctagtacaacattctgctcaaccccacaggctccattccctttaccacatatttataatatgtttgggtcactcataggagtgaaacactgtcagcatcaatagttagcag

SEQ ID NO: 459172 - DNA, 552 bp, Homo Sapiens
catgtgcccagccctttaattctttacttggggttcaggtgactacatatttcttacttacaaattttacttaatctcgctgatgctgtcacttgaaagctgacccaccttgaatgaagcctcctccaacaagtctggaatccatccgaatttaaattaacaggcgctcctatgaattccatcagagaacacacagtagatgctttagaacctcttcccatgcctccgaagtatctggtttgcattgtggtggccattagtcatccatgggcttctgatgtaaaaaacaaacctgcctcttttgaccctgtgctgtacagcatcagggcagtgattgctggccacatactggacccttgaaacagagggctctgcatccatgtccatgagccttcatgcccatctggccatcaggctcttgggaagcagcaccccacagctttgggcacagctggcagtgacctccttgcctccgaatggggttcaaatgtgttacacgctggcaatttttcatcttgcagggaaggcactgggcctcctttcatccttagg

SEQ ID NO: 459173 - DNA, 315 bp, Homo Sapiens
  misc_feature (97)..(97): n is a, c, g, or t
tatctggaaacagagctggtcattttctttttctgtatctcagccaaggggaggggaaaaggttggttagagagaaggagggaggtcaggagatggnaaatgggatgagatcctgttactttcaatcccctataatttgttagtgtttaacagagacagttacattaagcaggaaatccaattcagtttcccagtcagcatgcttgtactgtttcaactaatgctctggatgctccaaaggaaatgcaaactagcatattaattatgacaacattctcatttcattccttcaaaataagcaataaagaaacaaat

SEQ ID NO: 459174 - DNA, 504 bp, Homo Sapiens
ttttttttagcagaacaacatgatcctatagatgataggtaaagttcactaaagattttttcatccaagcctaagtagaccgtattttactatcaagtgcagataaacaatcccacttaacagatgataacaattaagtagagatgaaattactggaatagagatatacagtaaaacactagtatagctgccttccagctatacaatttagtaatgcaatgccaaaacagaaggatattttgattgaattaggttcatcctagattctgaagtcagactatggttctaccacataccaactgtatgagcttgagcaaatgacaacctgcttagacctcgatctcttctgtaaaatagagataccacttaaggaaatattttgaggattaaaaatattttactgccaaacatacgaaatgctgcactcttaaaaagatctcattttatttgcattttcacatagaacttattagtatttacatataaaatcaaacttttcctcat

SEQ ID NO: 459175 - DNA, 506 bp, Homo Sapiens
  misc_feature (480)..(480): n is a, c, g, or t
  misc_feature (495)..(495): n is a, c, g, or t
ttttttttatctctgttatatgattttattttccttctttgccaaatttcctcaatgaacatgtcactggctttcaaaacaatagattgttacaatcttattttaaaaaaacattgtattaagttccctttttcacctttggaaaggggaactgtgtccacccataaggctgtgtctggatttcttgataacgccaaagacaaaaaagaatttccgttagaacttattcccccatcatgtaacaattaactgttctgaaaataatcccttagccagacgctgcactctgatgttcaacgtgtacccacagatgctgctccgtgaggtttcttacagcatccatgagacaggtgggcactgctgttactctcctgttcacacttccaggaaaaaaggaaggtcgaggttattaactggccacactgtaggggtgggacccagaactaggcactcaggttctgggaccccaatggcagtctntttttcacaacaggnttgacttggca

SEQ ID NO: 459176 - DNA, 326 bp, Homo Sapiens
ttggatctggatctttatttcataatgaccagaattgcttattctaagaaaaccatcattgtgtttgaaggattgaatggagcaatcatagattttataattatctcaagaacttaatacaattttatgattgctctttccaaaccataaacaaaattgcaattaccctattgaaaatgtttaagaattactgttatgggctgtttaacctatctattaacctatctagaacctcattaaaactggtaagctggtgcggtggcatgcacctgaatgtcccagctatggaggctgaggtgggaggatcacttgagcccaggggttca

SEQ ID NO: 459177 - DNA, 344 bp, Homo Sapiens
  misc_feature (88)..(155): n is a, c, g, or t
gagacaggtctcccactcagttgcccaatctggaggtacagtcgtgtgatcatggctcactgcacgccttgagcttctgggctcgagnnnnnnnnnnnnnnnnnnnnnnnnnnnnnnnnnnnnnnnnnnnnnnnnnnnnnnnnnnnnnnnnnnnntttgtttaagtatagacagggcttgctatactgcccaggctggtttcaaactcctaggcttaagcaattcttccgccctctctcctagcgtgctgggattacaggcgtgagcatcacgcccggccctccaagcatccttaattttgattcagcagcatgtcttcaaagagcagacccaagctttagggt

SEQ ID NO: 459178 - DNA, 449 bp, Homo Sapiens
  misc_feature (27)..(27): n is a, c, g, or t
  misc_feature (32)..(32): n is a, c, g, or t
  misc_feature (52)..(52): n is a, c, g, or t
  misc_feature (424)..(424): n is a, c, g, or t
aaggccaagcttgctttgagctcaggnacccnaactccacatcgtctgatanattctggttcctctgacttcttcccatctgaagctcccctgctctgcgttcagatgccccctctgactcgctgctcaggaacataggcttccacagacagaggtaaggatatgaaccagccaggctggcaaggactgaatccaaatcccaggtttctctccaagtccaggcctttcctggcagatatgagcagcaagaccagggtagccacagaggcgagctcggctgggtggaaactccctgaatagccaagtgtgcatgggattcttccaggggacagcctggtcctgtcctgttccgggtaagaggcactgggcatctgggcactcaaaacctaccactgtaaagaagactgaaccagtaagccacacngcctgcacgggccccattttcagag

SEQ ID NO: 459179 - DNA, 304 bp, Homo Sapiens
  misc_feature (42)..(42): n is a, c, g, or t
  misc_feature (155)..(155): n is a, c, g, or t
  misc_feature (240)..(240): n is a, c, g, or t
  misc_feature (263)..(263): n is a, c, g, or t
  misc_feature (269)..(269): n is a, c, g, or t
caagaagctaaaatattatcagattattttttaaagacacantcaatcagaaaactttagaaaacgccagcatgcatcatccaaagtaatagattccagttcaaaaaaagagagagaaagacaggattacagcagaaactcagaggtaagtgagntttgggaagacagttactttgtaggatgctgtgagcaacctgcacttcagtccaaaaagacagctggagtcaaagagagattgangcagaagttgcaccccaggcaantaaatntttggtgagaaaagcttctaatatcatctccagga

SEQ ID NO: 459180 - DNA, 388 bp, Homo Sapiens
  misc_feature (363)..(363): n is a, c, g, or t
  misc_feature (368)..(368): n is a, c, g, or t
cacgcataataacagttttattgatgatgtgttttcttttatttacatttgtttttactgtatttggtattgaatttcaacactctctaccctggtcgcacagctgctctagaaaagctgtaaacaacacggcactgtgctttcctgcacaaaccgcctgtcaaagtcaaagctgctcattctcctcccagtaattaccttctcagtttagacttaatgcaagtgaaatttttactttatcataatataataaataaaagacattagttaattagtagtgctggtatatttctaaaatactaaacaggccaaacaataaactgtggaacttaatcacaggggttcttatacagtttcagggcnggggnattgggggctctcggctaca

SEQ ID NO: 459181 - DNA, 302 bp, Homo Sapiens
  misc_feature (92)..(92): n is a, c, g, or t
  misc_feature (119)..(119): n is a, c, g, or t
caaaatggaagtctgtttattatattaaagaaaacttataataatccaatgaacaaagaatctcaataaagaggtacaaagttatgaaaganccaaatggaaacctgggcgctgaaaanttcaacttacgaaacaaaacaatgcaagtagatttgagatggcagacgcatcggtgagcttgaggaaaaatcaacgttacacaacctgagaaatagagggagaaaaagactgaaaaaaatgaacagagcctgagaccagggtaacaggaaatgtaccaacaaatgcataaggcgaatcacaga

SEQ ID NO: 459182 - DNA, 339 bp, Homo Sapiens
  misc_feature (50)..(201): n is a, c, g, or t
tttcagatagtaattatttctaaaactgttgaaaatgagggctgggcatnnnnnnnnnnnnnnnnnnnnnnnnnnnnnnnnnnnnnnnnnnnnnnnnnnnnnnnnnnnnnnnnnnnnnnnnnnnnnnnnnnnnnnnnnnnnnnnnnnnnnnnnnnnnnnnnnnnnnnnnnnnnnnnnnnnnnnnnnnnnnnnnnnnnnnnnacttgctgatctgagctgtaagtagacaaggtctaaagactggagggtttgagagcagctgagaagatcactggtgatgaggagcccgatacggttttgttctatgtctccacgcaaatctcaccttgaattttacta

SEQ ID NO: 459183 - DNA, 342 bp, Homo Sapiens
  misc_feature (78)..(78): n is a, c, g, or t
  misc_feature (137)..(137): n is a, c, g, or t
  misc_feature (234)..(234): n is a, c, g, or t
tatttgtttgtaaattgcctatacatatccccgttctttttttctatcagataggctgtcttttttatattgattttnatgtttttatactttatgaatattaaccattcttatgttttaggtgttgcaaatttttncttttttatcatttgtcttttgaatgtgtttatagtgacttttgctggtgtaccaaagcttccatttttaaaatacaaaatacatgaatctttgtgngtcctgggtttcgtcctttattgataaatccttctttagcataagattataaaaacattatgctattaatttaatcattatggttttttatatccgtaatctatctca

SEQ ID NO: 459184 - DNA, 282 bp, Homo Sapiens
cctccttaggaaaaaaacataagattccttgagatatatcacatctcaccaagtcgttcagttattgaaaccagttaaaaacgagtaatttagtatattatcatttgacctttctccagggaaataaatgtacacttccatgacacctataaaaatactgttttttgatgaacttctaggtttgtcaacttcagagacaacccactgaaattgaaagtatcacttcctcccagtgaaggcacagatgaagaagaggaacgggaattatttggccttcagttt

SEQ ID NO: 459185 - DNA, 346 bp, Homo Sapiens
  misc_feature (242)..(242): n is a, c, g, or t
  misc_feature (312)..(312): n is a, c, g, or t
  misc_feature (324)..(324): n is a, c, g, or t
cagctttgattttaatgaagccatagttaccatgaggtgcatctgaacactcccagagcctgcttgccatggggaaagggcctgtaatttcatagcccatttctgtcccaaccttagttgatgactttgggaataggttgagcttttcagttgaagatcctgaaatcacaaatgacttgaacccaaatgctccctgtttgcatgggctcaccaccataatcctaaaaggaactcctattttntggaagccttttctggatcccccaacctaccttgacccagaacacccccctttggtgctgccatagcctnccacatatacgnccagctgtgccacgttctgatt

SEQ ID NO: 459186 - DNA, 347 bp, Homo Sapiens
atttaagagagatattacagtggctggtgcctgttagaatatctatagatgctttcctcagataaaattttagacctggcagaaggtgtctatattcattttttattgtgtgtacaaattaccacaatttagtggcttaaaataacatgcatttattatctcacagtttccgtgcatcaggagtttgggcacagtgtagttgagtcctttgcttaggatctcataaggctgcaataaagctattggccaggctgtattatgtagaggctcaattatgaagaaatctgcttccacacttattcaggtcattggcagaattcatttccttggagctgtatgactgaggg

SEQ ID NO: 459187 - DNA, 381 bp, Homo Sapiens
  misc_feature (350)..(350): n is a, c, g, or t
  misc_feature (359)..(359): n is a, c, g, or t
tccatgtactaagtatcgtgggaagttccaacctcatacttatgctgcttttctacttgctaatattggatgcttcttgccaggctccttaaattgtgctgtaacctggaagaaaccttcctactctccacaaaccctgaataatcctgagagtttaaacctcacctaattattctctatcatttagaaactagaggggtggaggactgagagagggacagtataaaattcgaaaccagtgatgcattggctgaaaaacactgacatgaattgtgagagcaaagaaaccacagctggtttttgcaggtgcagtccaggtgggccttggcagctgatgttgaattgtacgnttgtagccntatattttctgggctacagctg

SEQ ID NO: 459188 - DNA, 483 bp, Homo Sapiens
  misc_feature (267)..(367): n is a, c, g, or t
  misc_feature (431)..(431): n is a, c, g, or t
gggatatcgtagtctcctctagatattttgccataatacatgccaaaatacaagtccctgctggacattctccctaagcacatctttgtatcatatcttttaattgcagaagtaatgtgtgaatatattttccttataaaagatgcaaacattacaaaaaggcaaatgtaccctttgaccatatcccaaaggatagtctttatcagttcattatttattgctgatcatttttctgttcatatatacatgcgtgtctcagtaaaaatnnnnnnnnnnnnnnnnnnnnnnnnnnnnnnnnnnnnnnnnnnnnnnnnnnnnnnnnnnnnnnnnnnnnnnnnnnnnnnnnnnnnnnnnnnnnnnnnnnnnnatacatactcactgaatgttagtcatcgttattatattcatcatcatcagtattattatttgtngaaaggctttttaacttctgcagaacttgtcaccattggcagggtgtttgct

SEQ ID NO: 459189 - DNA, 457 bp, Homo Sapiens
tcctcattagtgcaccaatattttgcttatgttctcttttcttttttactgggtataaaatgcgacaaaaagagtattagtcggaataaagtccttcacacacattattcacagtactttcccccccaacacctaggattatttcatgttcaatagtaagtacatcgatcgatgggaaattttcttaacttgttaccttcaaagggtctttcttcagtcaaacaccctgcctaatggtgactaagttctgcagaagttaaaaagcctttctacaaataataatactgatgatgatgaatataataacgatgactaacattcagtgagtatgtatttatcatgtcaggcacaattctaagcactttatcgatcttaattcatttaatcctcacaaagcattatgaggtaggtattataattatcccccattttataatttttactgagacacgcatgt

SEQ ID NO: 459190 - DNA, 420 bp, Homo Sapiens
gagattattaaccttttctgatgccttttatcaatccaatctctatgttaggcacgtaccttttaatgctattttattttgggatcatacttgcctgatcatctctcaattagagtgattccaaacatttttccacggagaatactgcgcctacctaaaggaagcccttaggctgcctctcagtcttagtgaagtgactgctactaggagtgtgagttgcccactcaatttactaaaggaatgtcccctctacctcccctcttaattattgattaaggcaaatggatctttatttcattggcaacctgggaggagtagtagtccaaccacttcccagggcaacatagagcgatgggtcgctatataaatggctttaaattgaacacagggccgggggacccctggggaggccaccggggg

SEQ ID NO: 459191 - DNA, 458 bp, Homo Sapiens
  misc_feature (196)..(204): n is a, c, g, or t
  misc_feature (404)..(404): n is a, c, g, or t
  misc_feature (427)..(427): n is a, c, g, or t
cgtatttttatagagatgaggtttcaccatgttggccacggctggtcttgagaataattttatttttaaaaaattcctatttttccataatagatatttttgaagtgatatatataacctgaatccttataaattcaaatgtaaacagactcatagggtctgctatttaagaaagtcctatcagaaaaacaattcnnnnnnnnnccaaagtgtgtaatctcctgagtggttctgaaagtcaagagtgcaacagaatcacctcgcgatgactgacaagctgcgggcccctccctcacggcttctgtttcagtgcgtctgggggtaggggcccggggaatttgcgtttttaggtattaatttcagggccatgtgcttttgagggaatcaatggcctccgatcagcnggatcttgcaggggtttttgggnatgcatgtgtcctgcagcggtgcccccctga

SEQ ID NO: 459192 - DNA, 584 bp, Homo Sapiens
  misc_feature (25)..(25): n is a, c, g, or t
  misc_feature (64)..(64): n is a, c, g, or t
  misc_feature (95)..(95): n is a, c, g, or t
  misc_feature (117)..(117): n is a, c, g, or t
  misc_feature (181)..(189): n is a, c, g, or t
aggttatttgtaagtggaccaagantcctgggaataaaaatccccatataagctgggtgccagncagggccgccctgtaacccccagcaactccnggaggcctaaaggcaggagggntcacttggagcccccgggagtttggaagtcccagcccgggcagcaaagcaagacccctatcccnnnnnnnnntcctaaacaaaatacccatatacacatccatatataatgatgtgacatggtagtttccttggtgcagtgggaaaggctggagttagcaaaccctagtttgaatcctttcttcttttttcaagattcttatacgtcccctaaaagtacaagtcataatattgagtgaagtagggttggcagttaggaaatgagtggccacaggtatgtgtctgaagattttaaaaaagaggtggttttctcattgtctcaaaatcaacatgtctgtcatgtttctctccattaaaaccttcattatacaacttttaatgactttcttgccctaaactctcacatccagtaagatgctaaatcctatttattcaatctctgctttgtgtcttacccttctcccttcc

SEQ ID NO: 459193 - DNA, 434 bp, Homo Sapiens
  misc_feature (281)..(281): n is a, c, g, or t
  misc_feature (340)..(340): n is a, c, g, or t
  misc_feature (345)..(345): n is a, c, g, or t
  misc_feature (355)..(355): n is a, c, g, or t
  misc_feature (419)..(419): n is a, c, g, or t
aagaagcaacatgtgtattattaaattatttgtcagaatttccagaatcagagtctctactgggcaagtagaaaaatagaaaagtttactactttgaaaaggaaactatgacaaacaagtatatattcaggaaagggactcctagaacttgagcaacaaaaaagagttcaacctcggcacagtgggagtctgcagtgtctccgcaacaacagaaatgaacttgtgttcctcacatccttgagagtcgaggtttgcatttctctacagagctagggctggantgaaggcaaagagacctctgccacccccactaggctgggcccagtcctgggagcggaanaggtncacttgcggnttcttccacactgtgttggctggggttaggcctggggcgggttcagggtggaagtttctggttngaagtccccttgttt

SEQ ID NO: 459194 - DNA, 475 bp, Homo Sapiens
gtctgcggcccttcttgtgcacctctgcttaaaagagctcacagtgttggctttcatagcagagcagtctaggaaattttgtactctggttccagggctcagagtagcaagagtgctgggacctgtctgagaagcagtgctgggctgtggatgcttgcctgtggcaccagatgccttacagtggccaggaatgctgcgggacagtctactttgattgctttctttcctccatggctgagatctgagtgtagtgttaactgggcttaaaaatcaagtccgttgtatctgcatggtcacgtagttcggcatctcatggcttttgcacctaggaggtgtggaaccataatacctgaaacacaatttcataacctgggctccttgggcttagcctatatggtggaggttaggtctgtatatcatcaagactgtgtctttgcatggttgtcattctgttggaattgaactttcttatttc

SEQ ID NO: 459195 - DNA, 371 bp, Homo Sapiens
  misc_feature (11)..(11): n is a, c, g, or t
  misc_feature (24)..(24): n is a, c, g, or t
  misc_feature (44)..(44): n is a, c, g, or t
  misc_feature (75)..(75): n is a, c, g, or t
  misc_feature (94)..(94): n is a, c, g, or t
  misc_feature (125)..(125): n is a, c, g, or t
agcttccctgntggccaattcaanggaagtaccctgggctggtnatgctgaagtgaatgccccattttattaacnggggctgcatttaaaaccnagcagggtcccatttgtgaaacagcaacccnactttattctcccaggagatcttggggagtagcatgcccttctatggcacaatgaatcttacttggcatattggacacagaacttgtccgacttggaaccacttggtacttaaagcaaataaaggattagaacacccaggtgtaggagattaaggacttaacaggcagatggaggagaagagcataatctggacatccttcagcttttattataagggaaagttcccccgggattccagcagaaag

SEQ ID NO: 459196 - DNA, 431 bp, Homo Sapiens
  misc_feature (41)..(41): n is a, c, g, or t
cccaagcctgaataaaagcctgcctccccaacaggggtacnggttaaataaatcctgaccaactatgccatgtcctagtgaaaattgaaccgattaaaataaatggatggtgaaatggtaggagttatatttctcacgattgaaatggaaggttcgagataactggaggagcctagaatactcccacgtgatgacggctcatcattggtgacataaactcatgtttaccttaatatgaatatggatggtttcatagagaaacatttatagatatatgtatatacacaggctggtatacacacgtatttccttgctgtcagatgatagcaactaggactaacaacacctcagtggcagcaagtacatctaggctccagaccatggtttccactcataatactctcctgcaatggaaggaccctggtatcctt

SEQ ID NO: 459197 - DNA, 543 bp, Homo Sapiens
ttttttttcacttaccacacagtctaatccaactgagcattcactagacctttttaaaaactgagaccaactaaaagacatggtacagacatcacctctcctactctcaattctcttaacccctggtgcaaggacaaaatcttttcctaatagggacatggttcctcttggaagaggagtgggaagtgaaagttagggtataaatggggcttcctggaacaaagctgatggcagagaggggtgggggagcctagagtccaggagtaatcagaaatcaattcagatcatctagagagtaggaaatcattacagaccagatgcaggagtcctgggtctgcaaccaacgttcggaccctacacaagggcaatggctatgctggaagtgtgggtagctgctacataaagcagcttgctgacctccccacattgggagtttactgcccttcaaagtctgttacctcagcagttgaattaacttctcatcagcctctttgttttatattatggaaggagagaaccttaaaaaaacttaagaattaaaaa

SEQ ID NO: 459198 - DNA, 597 bp, Homo Sapiens
  misc_feature (14)..(14): n is a, c, g, or t
  misc_feature (27)..(27): n is a, c, g, or t
  misc_feature (36)..(36): n is a, c, g, or t
  misc_feature (41)..(41): n is a, c, g, or t
  misc_feature (46)..(46): n is a, c, g, or t
  misc_feature (53)..(53): n is a, c, g, or t
  misc_feature (65)..(65): n is a, c, g, or t
  misc_feature (95)..(95): n is a, c, g, or t
  misc_feature (399)..(509): n is a, c, g, or t
  misc_feature (532)..(532): n is a, c, g, or t
  misc_feature (549)..(549): n is a, c, g, or t
  misc_feature (564)..(564): n is a, c, g, or t
gcctgacctaattnctaccccataggnaaacatagnagggnccctnaaactcnaagttaaaacantggtgaacagaaaatggttttccttcaaantggacaaaattcctacatttaaaggggcctatattttaatttggccctttttccggcccctcctccctttgatcctctcttaattaagagtaaagagctgaaagccatgactgctctcccctcactctaaggttttgggggagcttacagagcaggtccgtgcttaccccgctggcctcacaagaaagaaagctaaagtgccatatggaaaaacatgagaagctgggaaacagagggaatcgggccagtgtggcctgatggcaaaaacctctctatgaaggctaggtgcagtggctcatgacgnnnnnnnnnnnnnnnnnnnnnnnnnnnnnnnnnnnnnnnnnnnnnnnnnnnnnnnnnnnnnnnnnnnnnnnnnnnnnnnnnnnnnnnnnnnnnnnnnnnnnnnnnnnnnnntgtggtggcacatgcttataatnccagctactcaggaggntgaggcattagaatngcttgaacctgggagaaggggattacagtgagc

SEQ ID NO: 459199 - DNA, 363 bp, Homo Sapiens
  misc_feature (223)..(223): n is a, c, g, or t
  misc_feature (246)..(246): n is a, c, g, or t
tgggctcaagtggtcctcctgcttcagcttcccaagtagctgggactacaggcatgtgccaccacccccagccaaaacatccatattttctcttagaatggtttacattatgatgggggatggggagctgggggagggctgtacattcccaaaagaaagtagtgttataggaaatccaaatgcgcttcagtgattcactccttaaaagcagcctgggtatgtnggcagattttttttgcatttgtnttgcgtatttaaagtctcaggaaatctagtcttggtccaaaacactggagaaaaaaataacaccagacaaaacacatttgagtaacttgaagtagcagcatagaataggcccaacta

SEQ ID NO: 459200 - DNA, 518 bp, Homo Sapiens
  misc_feature (490)..(490): n is a, c, g, or t
  misc_feature (499)..(499): n is a, c, g, or t
gcctgcatccacaagacagccaaaaattagccacatccaataatttcctgccagcggaaaccctttggatggcccatgaaaggatgcagaaaatgccgtgctgaaatttcacactgggacatgcaggtttcaaaagcccattctagtatcacagtcattattccctaacaagcaatgattaaaattcacaattaaacattcactgttagcttctcctagttacaaatactggtgaagtcttgctctggagagaaagattaatttagagatatggtcattttcagcaagctaaaaaaaccagttgtgccacatttttatctttaaaaatctttaaaacgtatacttttgaccaaaatgcattcaaaatgcagacagataaggttttagtttgggggaattctgaaatcaattaatgtttggagccaggaagctgtaagagagattgattcccaatttagtggggctcaattaagccaaacaaaaaagagtncttgacagncacaagtgggaaccatctt

SEQ ID NO: 459201 - DNA, 380 bp, Homo Sapiens
cagaaataaagccctaagaccagtatatatgggcaaaataacattaacttttaacccttcttggatctcaggaactcaaaagttcatttaaaaaattgttttctctctctatgtatatattttaaagaaagcaccttagggtacatctgtcaacctgtgagtagctctgaaattactcaagaaacactgccacacctattattaatgccacacctattatttaatagcttcattctgtaacctgctaatgcctctctctgggagttcccaggggctcattttaaaatgagggcagggcctgggctccccatctggctctaagccctcccacaaggagacctactagtggccacttcaagactaattcatccagcattagc

SEQ ID NO: 459202 - DNA, 521 bp, Homo Sapiens
  misc_feature (409)..(409): n is a, c, g, or t
  misc_feature (429)..(429): n is a, c, g, or t
  misc_feature (447)..(447): n is a, c, g, or t
  misc_feature (452)..(452): n is a, c, g, or t
  misc_feature (467)..(467): n is a, c, g, or t
  misc_feature (498)..(498): n is a, c, g, or t
  misc_feature (505)..(505): n is a, c, g, or t
ttttttttcttgtaaaatgaggtctctttctcaaaccaacaattttgtagttgttaggataaaggaatcaaatataacatctcaagcaaatggaccttcttggacaagttcctggtctcctctttaaatgccaactgggtgctaaggactgtttaggtgttttgggcacatcatctcactaaatcctcacaccaccacatgtcagtgatggtttctattttacatacagaagttttgggactctaagtaacccatccagggtttaccacagtggaactggggtttaggcttagactcaccgcattccaaatccttgctcttagctttacaccaactatctctacctaatgttcaaagggcacaggctccttattgttgagtcatttcccccatactatatgggcttttngggtttgggctaacacaggnggactattcccaatcttnacttnaaaatcaaattggtnccaagggccaattttaattggggagggaaangggggtnaggtttaaccccaggt

SEQ ID NO: 459203 - DNA, 489 bp, Homo Sapiens
  misc_feature (25)..(25): n is a, c, g, or t
  misc_feature (30)..(30): n is a, c, g, or t
  misc_feature (52)..(52): n is a, c, g, or t
  misc_feature (80)..(80): n is a, c, g, or t
  misc_feature (156)..(156): n is a, c, g, or t
actggccgatgagaaagccggaaanagagncccgtgagtaaaaccattgccngggccagagttaaatataataaaagtancctgttttccaagtaagacagccccaaatgttttgttgtgccctgtgtacagccagaccttatacttgtttttaantcctgttttggtttgtagatttgtgtgtaattctagctgaaatataagtatatgtcatcatcgtaattgctcgttgttttgtcaaaacatcatggtaaaaatatttcaaccagaaaaggatgtatttcctgttgagctgctgcacactctgaaggttttagctggtgcttctcagctgttggcaatgcaatgtatttgtgcccttgcaaaaacataaataggtgctaagctgataaataatttgagggttcatctgaatccaaagaaagagatggtaatgtttacttagtatatagactaaatactagatgtacaaaccagaaggaagatgcc

SEQ ID NO: 459204 - DNA, 274 bp, Homo Sapiens
ataaggaggaaaactatagctctagtggacatgctgtatcccagtggttctcacctgggaaagattttacccaggaagggacatttggcaatgtcaggagacatttttggatgtgacatcaggagtaggggaggctaatggcatctaataggtaggggttagggatgagccaaaacatcctacaatacacagcatagctctccacagcaatgattcatccagcccaaaatgtcaagagttctgaggttgagaaaccctatgttaaccaggttac

SEQ ID NO: 459205 - DNA, 355 bp, Homo Sapiens
  misc_feature (150)..(150): n is a, c, g, or t
ttccaaaagccatttaatattgcaagtcaattgaatgcctttaaatgtctttttgagaaacaatgctgcacaaatgagaacctacaccaaagaattctaccactattgtttttttccttagcatatgctgtatggaagaacttctctatnctgtgtgccacaaatagctaaagctactgatcaccttagccctttgagtggcagggctgagcctgggatgattggaggccctggatggtcacctgtggccgtgagcaccttgtcagtttaccccagtgtactaggcaaatgttatttcccatgtgtgtcttgatgggaaaacagctggaaagcacactgccacatggtaaattgg

SEQ ID NO: 459206 - DNA, 495 bp, Homo Sapiens
  misc_feature (345)..(345): n is a, c, g, or t
gtaaaacactttattaaaaatttctgaattaaaaagaaacttacattttggagtagaggaaacaggagttcagatattttaggagttaatatcactgcagcaacaattgtgtagtattgtaaaaggctcaggagcctcctgcttaccattggggaaggttgaaacaacttgtctcattaagttaagcttcttccctggagtgtcttatttagctttagttctcttaattctctttccctggtgatttgggtagtgtctgaaaccactaaaggtaaaaggttgaagcaatcccaaatttaataatctatcacctttctttaggtgtatctgagtgtaattcccagncagttcctttgtggaattcattaggaagacagccaagtcattaaaagttaataagaaactatttgtttctgtgggtgtgaatacagccactttgtaagtctgacattcgttcccagtcataaaagccttgcttttagccaatttggtttt

SEQ ID NO: 459207 - DNA, 400 bp, Homo Sapiens
  misc_feature (25)..(25): n is a, c, g, or t
  misc_feature (35)..(35): n is a, c, g, or t
  misc_feature (60)..(60): n is a, c, g, or t
atcctcagagtctcccctgggaggnaaagcttatntggcaaagcaacattattaaggganaaaactccctggcacccaggatgtattcttagctgaacatactgcatctttcagcccaattataatctgaagggcagccacccaatcagtccctgcacctctatgtgagaaaatgggttccatttgcttctctgttagagacaatcatggacatttacacttaaatccaacataaagctaagcaatattaatcctttcatccacagactatcactgggcttagaatggttgcaacataagtactctaaaatttagataggagaatgaaggtcatcctcagaagtactttttagcacaggaagaataatgattatgaatatggatatatggcaagagtttc

SEQ ID NO: 459208 - DNA, 395 bp, Homo Sapiens
  misc_feature (16)..(16): n is a, c, g, or t
  misc_feature (57)..(57): n is a, c, g, or t
  misc_feature (96)..(96): n is a, c, g, or t
aaaagcagcaccttcnagcccttatatcctgggcctcaagcagccgccccgcctccnacctttccctccctctggggaagctttaagatcatatanaccccctccggagggtggggggcagagagacctcctgctggggatgggcgagacctgagcctggtgcggaggaggcccgcaaagctggcggaggacctagttccagggacgggatctagggctcctggtttgcccggtctggacaccctggcaccctgctcctctaggtaccaaacgccttgatgctgagacagagcaggcttgtcccggcagattcccaggtcagaactgcgacttccttactcgacctcacctgggatccctgccccatcctctccactcaggctgccctcgtgcca

SEQ ID NO: 459209 - DNA, 485 bp, Homo Sapiens
aattggacagatgtttattgaatcactgcatcagatgctggggatacaaccctgcacaaagtctccaccctcacagggcacagtctagtaggggagacaagtccaccagcaatgatgtggggagggcagagtgctgccaggagcacctcgacagttaaaccactgaccagagggatttcggcagaggagtaacttgatcggatttctgtttataaaagattgccatggctgcacattgcatttgggtcaagagtgggaggccgccgggaagtaggacgctattcccgagtccggtcacaagatgggcggacttgtccggcagaagacgagcaggggacgagggaagcggggctaattgaacctgagatacagttagaagactggacagatttgctgttggactgaacgaggggtgagggaacaggggtaggcttgcacaaggaagtggtaccattttccaagataggaaacatgtggtctgtctc

SEQ ID NO: 459210 - DNA, 484 bp, Homo Sapiens
  misc_feature (378)..(378): n is a, c, g, or t
  misc_feature (433)..(433): n is a, c, g, or t
  misc_feature (469)..(469): n is a, c, g, or t
tttttcttggaaccttttagatgaaggtagctttgcccaagaacccatcaccaataggggaagaaaaggttgggttaaataagacaaaaacatcactgcagataggaggctgagaagctttcactgtatcatgtttaaagacttgatgcaaagtacttcagagaggtagtccaccggaaaaggaaaatcaaacacaaatttcttttcccaagaatgtaatcttctcggcatggcgttttgttgctcactaaaaactccctgctaaagaaaacattttcaggtcgctccactgaatctgctgcaactggtctattttcagctctatttctctgagcctcgcaggcagaagttcttaaatgatcctggggaccgggtttngttaaaagttgccaagagcattttaaggatcgtgttgtttttgctttttgttttnccaattattctacagctggggggttttgaggagggntaccagtgggatgtt

SEQ ID NO: 459211 - DNA, 531 bp, Homo Sapiens
ttttttttatggtgagtgtgagtgggtatgattttttccccctcatttcaaaccaggagtagaagttagaaaagaggaatattagctgtaatttgcattttttgccattaagtttgacattaaatacactaagtttgctaaaagagaaggctagtggaagtttgttttactcatgcatatttttcataggtataggtcttttgtgtttgctcatcattcttagccaggaaagggacacctttatctttattttaaaaactggttacactggggtcttggctggaaactgaatctgcctccgagggtttgaatgaagagagtctaatgaagggactactgcagacccctggggaggattatagagataaacagagggtgatctggctcccaaaaactagcagcaggggtaagccatcgccatccttgggccacagaaacaagaggagcaaattgtggagacccatgagggttgtaatcatgatggaagggccactgagcagaagccagagctgtgaagggacatacccattg

SEQ ID NO: 459212 - DNA, 443 bp, Homo Sapiens
  misc_feature (32)..(32): n is a, c, g, or t
  misc_feature (82)..(82): n is a, c, g, or t
aaaagtgaagtgctcagtaaagtcattttaancccctttccacctgtaactagtcaggagttcattagccaactaagaagancctacatcatttgcagaccttgtatttgagatgctaactttgttcctcaaaaggacaaatttttattcaacccaattaaattcaacaagtatttctgtgtatactctgcctggaacggctgctgagaatgtgcttgcctgttactctgttgtgggggaataactgaaattagatagtgtaaattttcagcaaccagattttcttactacctttagcactgaccagatcacttaagacatttcagaatgtgtgaccgttggctataagataaagttctcaaggttacatatcctacaatcaacgaacttctgttctttttctgcatgtaacttttgctcatgtgaaaaatgcaactctggcc

SEQ ID NO: 459213 - DNA, 468 bp, Homo Sapiens
  misc_feature (437)..(437): n is a, c, g, or t
cctttttttaaagagctgaaggctttgtctgtctaatgcagtcataagcgtggcttccctgccgtgaggggttagcgtataatgaaaaggtgtaatagcctgatgtacgaccttcgcgtcatacttataatggttaataacagcattcctgtctaccccgatgatgcttctctctgcaaatggactatttgcccagttgcaacagggctaagattgtcgcactatgacaatgagttgttgattgtttggagttgcggtgtcctgtcagaaagatttcttgactttctccaagttacttccttccaggggatgttacggggttttaatagggtaccttgcagaccataacgagtttgctgtttactcatcaaacagggaagtgcaatgatgaaagttttttttaagggaatcccaattgtccttaggacttccctagnttcaggtaatggaaacagactaaagtgagtt

SEQ ID NO: 459214 - DNA, 451 bp, Homo Sapiens
  misc_feature (15)..(15): n is a, c, g, or t
  misc_feature (48)..(48): n is a, c, g, or t
  misc_feature (65)..(65): n is a, c, g, or t
aaaatcccccagganggtcttcctgtgcccatctgaggtccaacttantggaaaagcctttgccnacacccaggacactttcaggactactcccccacgtggctgtgctcatggtggccagggctgtatggctcttgaagctctccacacacttggcacagatggatggcttttccagtggaatcaaaaggactcaggcattctgaagccagtctggccttggggtttttcagcttcccagaagcctgcagaatcgttctggggggttcccagttgcctccagaatcatcttcagtcttgtttctgactgtgttaccaaatactgtggaagaaactcagatgttagcctagtgatggggacacacttcttttgttcagtgtgacctgctcagcctctagcccccagccccagcgagatgacggataaggcagcgtcctgtggatgccagag

SEQ ID NO: 459215 - DNA, 635 bp, Homo Sapiens
atttaaaagaaagaaagcctaaaatccaggtttgcctgttggtccacattatttttgtgtcctttcctttttactgtcagcccacagagttacttctgtgcggggacaaatctcgcacacagttttctgagagaagcagctgtttcagaacattaaagcttttgctctctctggcccaactcctgtgttcactttcgctggctgagccatgacccgcaggatatttaaaattccaagatcatttctgcctaaatttccagctcctccctggttaaagcaaggaccccatacagtacttcctggggcactgtgattgtttgcagcatcaacaatgttgtttttcatctttttaaatggattttctaatggctcagtataaagcttccttttcttagggaccatgcaaagattctttgattctagaagtgccatttcattatttctgtgactcctgtctgaatcatctgccaggtaactatcttgattttgtcttagcaatcgacttagcagaccattcttggagaaagaaaaatcctgaggtgaaacaggctccgatttaaagtcttcggacactggtaaggcaggtgcgcttcttgcacagcaggagccatacccaagaatggggcactcttagc

SEQ ID NO: 459216 - DNA, 511 bp, Homo Sapiens
  misc_feature (83)..(91): n is a, c, g, or t
  misc_feature (480)..(480): n is a, c, g, or t
  misc_feature (487)..(487): n is a, c, g, or t
ttttagcaaaagtgaaaaatgtaagcatatatttttctaatttatttttgaattggataataagctgtgaatcagcactaggnnnnnnnnnattggataattatcctttaaagagttgtttaacagtttagactttaaaaatgtgttatgtaggctgacttctgaaaagcaaaataaagtaccctaataaaggcagcaaaatgcattaatccactatgaatggagttttacattttaatttatgcctaatatttataaaagaatttcattcataggctactcacagttgttatctgacgcatacagaagtgttaaacaaccaattgctagttcagtagtttcctcatgacatctaatgttaggcaaaaattaggtatggcatatttcaacatcaccggtaacccctacttttccaaatggaaaaaaggtttcaattataccctggctttttttcaaatcatggctcttatttatacaggnctcaggntcatactcattgggtttaaaaggg

SEQ ID NO: 459217 - DNA, 226 bp, Homo Sapiens
  misc_feature (1)..(1): n is a, c, g, or t
  misc_feature (183)..(183): n is a, c, g, or t
  misc_feature (206)..(206): n is a, c, g, or t
nctgagctactgtgcccagcctaaactttcccacttctctctgtggcttctttccaacctctctccttcctctccccaagtcctgtttctttgaagctggtaactgaatttaaggatgatatctgggttgggtgtttaagggttgagcctcccaagggtctgtggcatttttgaaagggagantttctaaaaattaattaaggggncccaactcctttccccaaga

SEQ ID NO: 459218 - DNA, 566 bp, Homo Sapiens
  misc_feature (155)..(181): n is a, c, g, or t
  misc_feature (516)..(524): n is a, c, g, or t
acactaaataatttattttcccaaaatgtgtatgtgttctgaggcgtgacacatgatacagttccattggtcattctctatcaatcataatatgacaggacacaagaggctaaaaatggctcatcataatttattttatgttaaaatgtacagcnnnnnnnnnnnnnnnnnnnnnnnnnnngaagtgactgactaaaaagagaacagataaatacaagagtgtcgctggatcctattttatacaaggattacgcctctcctgcttggcccttactgtcaccctgtacaggtacaaaggctacaaaaaaggaagcaatataaacagacacaaataacttttttgcttttttacatgcgatttgtaagcttagtttgagctattcacaagctacttttctatttttccttaaaaaataactccaatattttataaagatagaaaaatctacagatggaatgaaaatgtaaagttagaggcatttccataaaatagcaactttacaccaaattcactannnnnnnnnaaatcctgccaagtatttggacatatagaaatgtttcaaaac

SEQ ID NO: 459219 - DNA, 378 bp, Homo Sapiens
caaaaggaaagaaacaaaatcgaacaaacaattgcctgtgggccctggaatgaaaggggtctggctgtgctctctgtggaagccatggggattggcctctccttttcccaggagtgtttgttgcagttgaaagttctcccggtttcatctgaaacggggcccaggggtgttgtgacaacagaggggcctttgcagccccgcacaggctctgcggacagctctgccgggaacccaggcctgggttcctcttcctttccttttcctgttgtctctgccacaaggaaggttcctgcgggcgggctggggctgctgcaggtgtgggagagcagcgactgaatggtggcccccaaatctaggcctggcacagtggctcacacc

SEQ ID NO: 459220 - DNA, 557 bp, Homo Sapiens
ccatcgtcaagaaatttaatatggcaccaggagatttgcataattgacctatttggctttctgcatcaagtttggtgtcctgttgcagaagctgagcattgacgggacagaggcataaactgcagcgcttgataaaatagagcccagtattctgaggttagtgaagaaaacacaaagacttgacagatgcactcccagatcgcatctcacagtcattcaaggtttagggcaaggcatttccatgtggagtctcaccttttcttgtcccagtcatgcatcttggagttccttggctaagtctgcagggaggagaagcagcaggcttgatttgcatcaataaaagcagcgatctgtgctggccatgctaaccctgttggctattagggggtgggggcactctgtcaaggggagtcactgggacggtgtaggatcagccttcagagcctgctgcctgaccgtagaggaggaacctgcacacaccctgctgttttagttcacgagcagctatcaaagcctgttagccatcctggttacctgcttgtgccagacagaactta

SEQ ID NO: 459221 - DNA, 595 bp, Homo Sapiens
  misc_feature (27)..(27): n is a, c, g, or t
  misc_feature (39)..(39): n is a, c, g, or t
  misc_feature (47)..(47): n is a, c, g, or t
  misc_feature (72)..(72): n is a, c, g, or t
  misc_feature (98)..(98): n is a, c, g, or t
  misc_feature (113)..(113): n is a, c, g, or t
  misc_feature (123)..(123): n is a, c, g, or t
  misc_feature (138)..(138): n is a, c, g, or t
gggttccttgtttatggcaaccataanggtccaccggcntcaccggntgaagtccatatttttttaaaaaantcctaatcaacccacccagaccctanccctccagtcctatnggaaattccnggagattgaggaacnaattaagtgatgtcattgggaaaaagtcagacaattaaaaaatgtaggtgaggcactctaaagcaactagcttggactcttcaaaaaattgtcatggaaaattagaatggtaccgccaactctggaaaacagcttggcagtttgtaactacatacaacccatcagtttcactcctgggcatttatcttaaagaaatgaaaacttaatgttcacacaaaaacttgcacatgaatgtccacagcagcattattcacagactggaatgagcccagatatccttcaataggtcaatgagttaaaccaaacaaaacagtaaaaggaaatgaactattgatacacacaacagctgagatgactcagaaaaaaagagatcaacagaaaaaaagcgaatcccataaaattacatactgtatgattcaatttataacattattgaaatgacagagttttagaaact

SEQ ID NO: 459222 - DNA, 424 bp, Homo Sapiens
  misc_feature (52)..(52): n is a, c, g, or t
  misc_feature (55)..(55): n is a, c, g, or t
  misc_feature (80)..(80): n is a, c, g, or t
  misc_feature (82)..(82): n is a, c, g, or t
  misc_feature (154)..(154): n is a, c, g, or t
  misc_feature (300)..(300): n is a, c, g, or t
  misc_feature (314)..(314): n is a, c, g, or t
  misc_feature (317)..(317): n is a, c, g, or t
  misc_feature (366)..(367): n is a, c, g, or t
  misc_feature (411)..(411): n is a, c, g, or t
aaataagctacctcaccttttgatttcccactgcaacttggtttcaacttanacntcagtactctagttgttagtaccananaattgccaagaggctttttgttaaaggctacttctgatatcaggttccagctaagctactcagtaaaatggntcaaaccccagcctctctattttagtcttcaggagtactcttacttcactgttttttgtaacatcttacaatttaggattgtccatctaccttcctctctctgcaagttcttgagatgtaatctgctgccaactcttcacaaaatnaaataatatttaancgntcttccttaatagtcttgcattcagtgtgtcaaattgatgtactaatgnnaaatacctaaactgtggggaataagaattaaatctatttcaagnacatgcaacttgg

SEQ ID NO: 459223 - DNA, 331 bp, Homo Sapiens
  misc_feature (17)..(17): n is a, c, g, or t
aattttaaatatttccngatttaaacagttagttaattaaagtggtaccttccattgctgttttagcccaacgttttaaaaataatttgggagtttgactattttggcttacgtactcatttccttttcctctgctaaaaatgttttgccttgtgtgcgttcctgatttttgtcttgtataatcttgatctttgaaaaccctcaaacatgtattaaattgttgtaactttttttcattagagggaagacattaaggggattggggacatttgtttcacacatctgcagtaatatgagttaactaatatttaacaagctctttctttacatt

SEQ ID NO: 459224 - DNA, 372 bp, Homo Sapiens
ttgtataaccaacgaacaactacataatactgaacctgaaacaaagattcatgattggtaccatgggtgcactcttggcatacacactcccgagaaacacattttcacaagcatgcttgcaaagaacccatctaaaacacatggcaacatctaacccatatgctttcacttgtttcctatttcagatgcaaattaatccgcgtgcggaaggtgagccagctttgcctccgtttgcctctggatgcagcttctcctaacaggcaggtgatgctggtggagcggccgggctggcttggggttgggtgggcgtcggggaaagggcgcggcctggacgccccaggagctttttggactatgctcgttcaacttccc

SEQ ID NO: 459225 - DNA, 593 bp, Homo Sapiens
  misc_feature (507)..(507): n is a, c, g, or t
tttatatgtactgttttatctggccccaggtagaaacttttatctattctgagaaaacaagcaagttctgagagccagggttttcctacgtaggatgaaaagattcttctgtgtttataaaatataaacaaagattcatgatttataaatgccatttatttattgattccttttttcaaaatccaaaaagaaatgatgttggagaagggaagttgaacgagcatagtccaaaaagctcctggggcgtccaggccgcgccctttccccgacgcccacccaaccccaagccagcccggccgctccaccagcatcacctgcctgttaggagaagctgcatccagaggcaaacggaggcaaagctggctcaccttccgcacgcgatttaatttgcatctgaaataggaaacaagtgaaagcatatgggttagatgttgccatgtgttttagatggttttcttgcaagcatgcttgttgaaaatgtgtttttcgggagtgttgttattgccnaggagttgcacccatgggtaccaatcctggaatcttttgtttttcaggtttcagtatttatgtagttgttcgttgggttatacaag

SEQ ID NO: 459226 - DNA, 311 bp, Homo Sapiens
ccaaaacacttaagaagttttattgaaaacgataaaatacagtaacaccagattctcattttaaagtaaaattaacagcatcttccagaacattcctagaactgaaccattcttgtcactattgaaaaacaaagccaagttccaaatccaaaataataaatgaacgtgctgataaacattcttcttatggttccagcccctactttagttattttcctaaattttacatgtgtaccttttcaaggaaagagtaagttttttaagtgatcaatatttatgaggaactgggactttctttcatataattacaa

SEQ ID NO: 459227 - DNA, 409 bp, Homo Sapiens
  misc_feature (359)..(359): n is a, c, g, or t
  misc_feature (387)..(387): n is a, c, g, or t
aaatagtttaaaaatattccctttttcaccctattttcagatagcacatgagcccaacactcacttaattctcattatgaagatgtttttagaggggcaaaaatattttgcaagctctggaattgttgaatgtattcttttatataactacattaaaagctttagattgaaatttatgactagcaaacaaaaatagaatatataaacgatatatgtaaatatacagcatgaggattgtacattttttacttttttaaaattgtgttcttaaaatattgtgtaaggaatcactggcacttaggctgttgggaatgttgttaaatgctatggggaaatacatttaggacctgcatttaagnacagaacagcaagtatgaaccacatggnacttaaaacacatgggtgtgaa

SEQ ID NO: 459228 - DNA, 504 bp, Homo Sapiens
ctttatctcctttattaatctacattagaaaaataaacttttcatacactaagaacaaggaaaccactctcaattgacaaaatgtaccaatccaacacaatgattactttcacctttaatttacaggcagccagattcaaaatccttaaagttgcttaaacttaaaaatgacaatgacaacctaaaaggtataatgttgattggaacagacatttaattggaaaattgatgattttccatttccaattaaatctctagatagaaatgaaaaaaattaaaaatcgtatttaagaaaagccaaatcttgggttgtgaggtatctttttaaggatgtttcagcagaaaaaaacaaaggctctcacaattgtgtagctgcctagattaagtgggtatcctgatcaaggagatgggggatgatttggctttagtattccaatgataaagtttataatgagaataacatgttgctacacaattgtgagagtctccgtcgaactgggtacc

SEQ ID NO: 459229 - DNA, 475 bp, Homo Sapiens
ttccttccttgtctctgttgggttccccagagttttcccaacagcagaatattagacaaggaagtactaaaaaatgtctcaacgaaatctccctgggttcttgacaaaactctccctttatgtagaagaaaccccatttgtcctcttgtaatcaggatcaatcactctggccagaaaaacaatcccaattctgcctgtgagtgtagcagtacgtgaagccccacatagggtgtactcttaggccagttgatcagaaccatgactatgcccctgatagaagcattcttccctcagggattagtttcttcaaaatcatccagcccaaggttgtaggaaccagaagcaaaaattattcaaatgagtaattaaggattgataatgaagaagactcttttgccccaaacccatagagagatggttatgtacaaacttctattatttgtaacattatttgtagcatatcacataattttgc

SEQ ID NO: 459230 - DNA, 498 bp, Homo Sapiens
  misc_feature (55)..(55): n is a, c, g, or t
ccctcccctcccttgtcctttggtgggggtcccccagggttttcccaaacagcangaatattaagacaagggaagtacctaaaaaaatgtcctcaaacgaattccccccggggtccttgaacaaaaactctcccctttatgtaggaagaaaccccatttgtccctcttgtaatccgggatcaatcactctggccagaaaaacaatccccaattctgcctgtgagtgtagcagtacgtgaagccccacatagggtgtactcttaggccagttgatcagaaccatgactatgcccctgatagaagcattcttccctcagggattagtttcttcaaaatcatccagcccaaggttgtaggaaccagaagcaaaaattattcaaatgagtaattaaggattgataatgaagaagactcttttgccccaaacccatagagagatggttatgtacaaacttctattatttgtaacattatttgtagcatatcacataattttgc

SEQ ID NO: 459231 - DNA, 492 bp, Homo Sapiens
agagtaatttaaagagggtttatttaaaacagatgagaagtatagggagtcaggatcctacaaatagtaattgtgggaaatctgtaaccacatgtaggccaggcagggtgagggtagccagcatttgctggaacctagaagggaagtgttctgtagttattgctatgagatcagcagtgacctttggttgtgaaacatcagcagcacaaggcaacctcctcctgggaagagccaggggtatacatgtcctgattttgttttcttccctcccaactcctgctgagggtctcactggctggaagcaactggaggccaatggcccaggcagttccattggtacaggccacaccttttcccctttcaacatcctctattagcttttcatccacattgaaaagtgttgtgcctcccaacacaaggggacacatgaagtccctttcagaatgtgtattcatcatgggagtgatcttgattcaatcatattccctcacg

SEQ ID NO: 459232 - DNA, 391 bp, Homo Sapiens
  misc_feature (29)..(29): n is a, c, g, or t
aaccttaaggccaaaatcaggggcaaccngatagagaaggggaagaaaatttgagattccatttccagaagttgacaggacttggtgattaagcctaatcccaacagagaaaaggaaaagtcaaagatgcttccatagtttctagtttaggaaatcagtgatgacatcaattgagctaatgcaagaacaggtgaagtgagaagattaacaattcctgtgctgaagataatgaagttcaaatacctctggaggcagggcaagttacccaacaagaagtcaggctatttaagtttgaatttcaacaacagggtcgagaatgggagcacatgaacactattactcaggagagagaattttaaacctgtggacacagtcttaccctcgatgcaat

SEQ ID NO: 459233 - DNA, 328 bp, Homo Sapiens
ctatatagatgggaagtttttaaatcagataaggttcctaagggcatgtggacaatttacgttatcatagtattgttcataacgtccatcattaatctgtagactgtaagggcttacttagctcgtgtaagaattatccttcaaaaagcatttttaaggtattagtattgctaatctataaactttgtgcaagaagtcctaaagtcaatagcaacatttatttaaagtacagtttgtcatacttaataaacctctggtatattttcctttattatgcttgttaaaaacacagtataaatgggagaaatcattaaagatcattaactcc

SEQ ID NO: 459234 - DNA, 195 bp, Homo Sapiens
gttttcaaaaactataaatgccatcgacccagagttaagtccagcctcagagagacagaatataaatacccaagtggccctgggcctgaggttcctcagacattatgtgctatgggagttccagaaagggggattgcctggttttgagtgcagaaggcttcctggaggaggcgagatttctgatgggcctctgtt

SEQ ID NO: 459235 - DNA, 277 bp, Homo Sapiens
  misc_feature (135)..(135): n is a, c, g, or t
  misc_feature (173)..(173): n is a, c, g, or t
ttaaaagcctttgatatgttttattaattagttcattctttttaaaatacatttataaaaggtatgagaacaagcagtagtgtttcttttcaaaagaactggattccttatttttgcaattggctgctgcaaagncttaactctacattcaatgttctaactattctttgaancagctttatagcctgtacttaaaaacactaatcctcagttcgggaaatacctaatcgttacaggaataggatatgcagtctggtagaatgtagatggaactgga

SEQ ID NO: 459236 - DNA, 261 bp, Homo Sapiens
aatgtgaaattttcagaatgttgtttttttcatgtagatactccaggaagagttaagcactgctttcagttttaatatccaccttgaggggtcgctgcttgagggctcttatcccaggggactttttaattcggatgttacttaatgtggcttctctaatgtagtttctttgattaccgactacacaattatgtaccatcacagtattagtggaaaagtaccatgtgatttaattctccattcctccaatgtaactcttaa

SEQ ID NO: 459237 - DNA, 529 bp, Homo Sapiens
  misc_feature (295)..(295): n is a, c, g, or t
  misc_feature (309)..(309): n is a, c, g, or t
  misc_feature (322)..(322): n is a, c, g, or t
  misc_feature (327)..(327): n is a, c, g, or t
  misc_feature (349)..(349): n is a, c, g, or t
  misc_feature (387)..(387): n is a, c, g, or t
  misc_feature (408)..(408): n is a, c, g, or t
  misc_feature (463)..(463): n is a, c, g, or t
  misc_feature (505)..(505): n is a, c, g, or t
cagtgcttgacttcttttatttagagaaaaatcaccactcaagaaaagaaaaacagccaacagaaacccagacacaggcaggggcagcacttgacgggccagctcccagctgcagctgaaagggctggaagggcaagggggcaggggtgggaggacagggtgtgcccgggatggggagtcccctctgctgcttctcacagctcctcagctgggcctgggaggcgctggctggggcagagggagctctgggaagccatggaaacccacaggcaggacaggcgaccccctgggaagngagaggagccaagnggagcccagcagnggcanaagcagccgcgctgggacttgngggcagggtctggcccctgctgcggatcaaagaccggngctatctgcaggggtcacggnggggataccttttgctcgttcattctttttaaagccctgggcactgacccatggnccttggttaatttcactaaagcttcaatcctgtacttggaanacctggggagggtttcaggagtct

SEQ ID NO: 459238 - DNA, 564 bp, Homo Sapiens
  misc_feature (22)..(22): n is a, c, g, or t
  misc_feature (37)..(37): n is a, c, g, or t
  misc_feature (52)..(52): n is a, c, g, or t
actcatgacctaaaatccttgnaaggctgcaaggggnaaaacggcccccccnaggctgtcaattgcccagctgctccctgggggagtgggccatgagacctaacaggtcacctcccacaggcagggtggtcagggaaccctggccgtcatccccccagccacagctctttgggggctgctccatgacctgccagctcagactgctgtggactgcttgatgctgtgaaagctgacacgggttggggaggtggggatggacatggcacgggccactcgggcacggatcgagtgcttgtcctgccaccggtgccacctcttccggatggcagaacggacctcactattgaggaaacagtagaacacagacacaaagaagccctggaaggattccaggaaggagttgaagtagatgaagacgacccgggagacctcatcctccccgggattgacgaagaacagcatgtaggtgatgcccaggaggggcagcagcaccagagtggctttcacagccttcctgtactgaatggtctcagacgtggtggatgcccggagcttggtcatgag

SEQ ID NO: 459239 - DNA, 190 bp, Homo Sapiens
gtttttgcaaatcacaaattctacaatcatatgatacgtatatgacctatcatagatactgggaatttaggtttgcagagctgcacgatggtggctattgggccaaatctatcttgaacacttcttaaatttggatcaaagaatttcaggaggggagaaaacacttcctttaaattgaatggcttcattt

SEQ ID NO: 459240 - DNA, 479 bp, Homo Sapiens
ttttttttgcttgattatgcagccaaacaaatgagaatactcagtgctatggccattatttctattataggagaaaataaataacagtataaaagaatctaatgttttttttctgcctcatggggtttttgaaagctctttgctgcttattttgttgagtttcccattgatattgctttggtgagtaattatttgaagaaggggtagaaagtaaatacttgctggagaattgtctctcaatgagaactgatccagtgggcattatactgattcccccttttccccctctttttgaagttactaccttccacagattaatagggacctttttgtctcagactttaatacttgcatttattttgctcaaaccagataactgaacacaggtaccagtattcacaactaccatgaagataacgacaattccatcctatttttcaggccatgtatataggaggctatagtgaataaaatcccat

SEQ ID NO: 459241 - DNA, 442 bp, Homo Sapiens
  misc_feature (372)..(372): n is a, c, g, or t
  misc_feature (418)..(418): n is a, c, g, or t
aacacaattttgcatcttatatttattatatactgtattcttataacaaacaaaatagctacagaaaagaaaatgttatttagaatatcaaatggaagagaaaatatatttagtattcattaaatggaggtggatcatcataaaggtcttcatcctcatcgtcttcacattgaaaaggttgaggagaaggaggaaaaggagagttggtcttgctatctcaaggctaatagaagcagaagaggtggaagcggaggcagggagaggcaggtacactcaatgtaactttacaggaaatacatcgtaatttctgtctgaatttttgccttctcatttctcttaaaaatgtttctgtataatacaaatccttctttncactatttggccttagtttcagtgcccacatcataggaagggtccngtccttaaaaggagttcgaaagtt

SEQ ID NO: 459242 - DNA, 279 bp, Homo Sapiens
  misc_feature (127)..(127): n is a, c, g, or t
tagtagaagcccttttaaaatgcagtaattctgaaaaacttatcatttccactataacctcacaacctgtgaaggtaccctcaacagcactgaaacataatgcaccatcccttgtgaagtagagaanaatttcatgttgctctcagaagcaccagagattgtgatgaaaactgccaccctttcaggttgacctatgaaccccaaaattatggtatttttgagatagtttcgctcttgttgctcatcctggtatggggtggcattacctgagctcactgc

SEQ ID NO: 459243 - DNA, 405 bp, Homo Sapiens
attgtcacagggaaataaatggtaccagaagtccctttcctgttctgtctcttcattgtaatggaagtttcagttgggcatgagcctggagagatgtgactgtctacagttctatttgtatatataaaaagaagactgaaagtcttttgacatggatattgtgaatggtatgaacttttaaaccatattattgatgatgaaaattatttcctgggaactcagtaggaataataccgtattaaggaataatactgtacataaaacatcatgaaaccctagatatgaaatcccctgaagtctgttaatcatggtggttatgttttgtctattcttttgctgtttgtgcctcattaaaaaggggattgagggtcttcttgctaggagcttcgtatttgctttgggaag

SEQ ID NO: 459244 - DNA, 457 bp, Homo Sapiens
  misc_feature (362)..(362): n is a, c, g, or t
caagagtaaaacataatggtccaaatttaattcacttcctgagactcacatagagcttgctgacttgaacaaaacatgtcaacatttgttttaaaatattgaggacactattttctggcagcatctactactttcatgttacaagtaagccataaagatagggcttcagggagaaataaaacacagatgaacttccaaagcaatacgaagctctagcagaagacctcattctctttttatgaggcacaaacagcaaaagaatagacaaaacataaccaccatgattacagacttcaggggctttcatatctagggtttcatgatgttttatgtacagtattattccttaatagggtataatncctacggagttcccaggaaataattttcatcatcaataatatggtttaaaagttcataccattcacaatatccttgtcaaacgacttccagtctt

SEQ ID NO: 459245 - DNA, 399 bp, Homo Sapiens
  misc_feature (324)..(324): n is a, c, g, or t
  misc_feature (354)..(354): n is a, c, g, or t
  misc_feature (379)..(379): n is a, c, g, or t
  misc_feature (385)..(385): n is a, c, g, or t
aaagaattttttggtggtgtaagtgggctgacagtggaacaatttagaaagatcaatggttttcctaatgccttctggggatggggaggagaagatgatgacctttggaacagagttcactatgctggatataatgtaaccagaccagagggagacttaggaaaatacaagtcaattcctcatcaccatagaggtgaagtccagtttttaggacggtataaattactaaggtattccaaggagcgtcagtacatcgatggactgaacaatttaatatataggccaaaaatactggttgataggttgtatacaaacatatctgtnaaacctcatgccagagttagctccaatcgnaggactttttaaaaggagttggctnttcgtngccaaggttggacc

SEQ ID NO: 459246 - DNA, 382 bp, Homo Sapiens
agtttccttatctttaaatggaggtaatcacagtacctacctcagtgttgttgtgaagatttaatgagataataacctgcagagcacttgagagtctcaagaaatatgagctcttataacattattgctattgtaaaacattgctattacttctgtcccaatttggcagtttcaggaaattgagaaggaatgtcactgaatctttaatgccagttacacagagctcagtaggtgtccgcacagccctttagatgcacgtagcctatttgatcttcgtatcagccctgtaaggttgggcttaagaatgacccagcatggaagtactcttgggaccacaggggaagcaacagtccttgtaagctgttgtcagtggaaatctgtt

SEQ ID NO: 459247 - DNA, 321 bp, Homo Sapiens
  misc_feature (80)..(80): n is a, c, g, or t
  misc_feature (88)..(88): n is a, c, g, or t
  misc_feature (119)..(119): n is a, c, g, or t
gaaacttttgtcacggctttattgagattaagttcacatacaatttgtatccatttaaagtgtacaatttgatgactttnggtatatncagagttgtgcaaccattatcactagatcanttttagaaagtttatcaccccaaagagaaatcctggacccatcagccaacactccccaacccatcggccaccccaagccctctgcaaccacgaatcgactgtctctgtagattggccttctggacgttctacataaatgaaatcatatagtatgtggtatttcgtgactggcttctttcacttagcatagtgttttaaagtt

SEQ ID NO: 459248 - DNA, 481 bp, Homo Sapiens
  misc_feature (276)..(361): n is a, c, g, or t
  misc_feature (401)..(401): n is a, c, g, or t
  misc_feature (415)..(415): n is a, c, g, or t
  misc_feature (423)..(423): n is a, c, g, or t
aaagggaggactgcagggtagagaagcaagcacagtgggcgcctctttaggaagtgacacttacagcctgcatgtgcagtatggctgtgaaggggcagatatcatagcacacctaactcaacaggatcttacttgaactgctgtgagttggtcaagtcagggcacttctgctcttcaggctcctctaggtcacacctttgaccaccctacatctgtttcctctttcaggctccagtagtagtcttaaaagtgaagtttatctaaggataagcacannnnnnnnnnnnnnnnnnnnnnnnnnnnnnnnnnnnnnnnnnnnnnnnnnnnnnnnnnnnnnnnnnnnnnnnnnnnnnnnnnnnnntacttattaattaaggtcttattttcagtcatgggacaanccttggggtttgantcctaaantttttaagggtaccatggggaacgtgggtttgttaactgtccagagggttgtgttaaa

SEQ ID NO: 459249 - DNA, 324 bp, Homo Sapiens
gggtataacagggacaagtaaactcaaaatcccagttgattttgctatttataagctgctcatctcccaccttcccaccaagatattctagatttgaaaggagagtttagactcttagctaagttgctgtttttgccaggatgtgtagtaagtcagttactaatttgttccaccctttgctgaagtgtttctcacttcatcactgtatattcactgccaatctggtttcctcagagtcctctaaaaattaatctttaggcaagtttcagtcactctttttaccaaaccaaaaatgattaccccaaagctgaagagtgttttgtc

SEQ ID NO: 459250 - DNA, 509 bp, Homo Sapiens
gttttctcagacaggatcctaggatgtgtctggaagcctgcggagtgaaggtagacatgcaggtgtgatgttctgcctgatagtgcctctctccaggcattaactacaaggctgggtgggggcttacggtaaggcatcgagtccctaagcatttatacagtcccaattgtgcatcagtgcagtgctggttataacagggaagaatttgtggaggggagggcacaggctgaaattggcccattcctacacatgctcttgacctagacctagagtaagtgacattgaccccaaccgtccccctacccacctccagcttgtgccagacatcactaattcagtcacagcgcttctttccagctggaatccagactcagaatcctcattagagctcattgttagcacgtcttcctgaagtgcaacccatttgccattccttccctggacgaaacccaccccaaataactgggaaacccttcaaggcagtttttaatcaacacttcaattgtgga

SEQ ID NO: 459251 - DNA, 468 bp, Homo Sapiens
  misc_feature (19)..(19): n is a, c, g, or t
  misc_feature (74)..(74): n is a, c, g, or t
  misc_feature (131)..(131): n is a, c, g, or t
  misc_feature (143)..(143): n is a, c, g, or t
  misc_feature (153)..(153): n is a, c, g, or t
  misc_feature (177)..(177): n is a, c, g, or t
gggccccaaatgtccttgnccaagagtggaaggggttaacactgcagatactttcaaggccttgtcttgctgtntcttgggagtgctctataaccttcagggtagcgggccataatctgggctctgtgacntggcatatttcntggtaatgtntggtaagaaattactcccctggtntcttcttcatgacccctccccttctggattttaatccactgttccaactgctgcattgaatttgttctctgtatgactcgatcggcctctgtgtataagggccctgtattggggcgatttccacctctaagatctgccaggctaacattgactattttgttctctgaactgctcaagttgattggtctgtagtgcacagtctgagcagggcatgctgacccactctcatattcagatggcagagaattcagctttacactattaatttttgttaagggtctattcttgacc

SEQ ID NO: 459252 - DNA, 293 bp, Homo Sapiens
  misc_feature (120)..(120): n is a, c, g, or t
  misc_feature (161)..(161): n is a, c, g, or t
  misc_feature (165)..(165): n is a, c, g, or t
  misc_feature (190)..(190): n is a, c, g, or t
aggaaaatggcacatttaatattcaacagcaaaatgttcagcgaagcattgctaagaatactgcagcatcttgaaaagcatggatgaattgtggttttccaaataaacataaacaaaaantaaaataagaaaaacactgatgtcatgagtaaatctgagantaantcaaaactgtcactgagggattttncagatgataaagcagtatcattgactgtccaagaccttacttgctggtacagttggggtcttagcgccgagttctcaatcattgtgtgaaccatggtgataat

SEQ ID NO: 459253 - DNA, 453 bp, Homo Sapiens
  misc_feature (392)..(392): n is a, c, g, or t
  misc_feature (401)..(401): n is a, c, g, or t
gagaaaggtgctcctttcctcttttagttttctctcacccttccttcttttcacatctatttcttactgtttcctgcacagtgcttgtcttttctctgacattgtatgagcaatttctttgatacaatggtagtctccaattatgctactgggcaagccagcctagaggttgtggaacagaaaggctctcagaccaacttaagtcactcatatcgcaagttttattgaatcagctgaaaatatccagtactttcaaggggaaagatgtgagaaaggttcacccacttaggcttaaggtgcaagcaggtgggcagggaccacacggacccgatcctcagtggactcagtgtttcatgtggacccgtgtttctctttcttaccattggaccttnccaggttcntgggggtaggttacttttggggaaccagggagggtttttcagggggaaactg

SEQ ID NO: 459254 - DNA, 475 bp, Homo Sapiens
  misc_feature (34)..(34): n is a, c, g, or t
  misc_feature (39)..(39): n is a, c, g, or t
  misc_feature (348)..(348): n is a, c, g, or t
gttgcaatcctggtaatcccagagatgggccaangcaangcattcccccatacttgggttcggggttgttgcaaaacacgcttccggttccgaatgcccctgctgcagtcacggctgcactgtgaccacgacgtcccaggctgaccaagccccgttgaccgtgtgggcagagtatctcccagcacgcaggaaatccccagaaagcccatctgtggagcagccactggtgccgtcgctagaacagtaccgcatttcgattctctgtcttcccacttccagcaaattcggatcagccaggcgggctttgcatgtgtatcggaatcgttgctcatagtggccgccgttgtnagagatgttgacaggtgtccagggtgtccagggcgtggtcttcttcagctcaggacacgggttggtgttgcaagactggtactccacattgcagcctgcacagtcaggcccattctcacagatcctg

SEQ ID NO: 459255 - DNA, 430 bp, Homo Sapiens
ttttttttattaatatcagttctttcaatattttcaataacataaaaagttgcttttagttataatttagtattttcaatactttcactaattgacatcataaatgttcaagatttttctttgcagggagagagaaggcatggagtctatccaaacgctaagtaagtggttggttattttacagactggctcttcaggacgtcactatggaccagacaggtgggacttccaggccaacagcatggcaaggggcttcctgggaatgccatgaaatccaaaagtcagaataaggtgagttttgcagcaacctgcagaaacacatccacgcttcattgtgcctgagcctctgctccgctgcctccaccaggcaccagcaatgggcacaggaaactggcatccaggagcaaggtgggggtgcctcacagtttta

SEQ ID NO: 459256 - DNA, 529 bp, Homo Sapiens
tgaactgcaacattgttttttggggttctcgatgcctgggctcaagacaaaccaaaacctttgcaaaatgagggccctaatagaactctccgtaaagctggggccccaaagggtgacaccctctgtgaactaatagcaaatctgccctcctggcatcccatacaaaagttaaaccttgccacttactggactgaaaaaaaggtcttccttgagaactgagccaaccttcatgtgggtttttgtacatgagaatccaagaatttaagtggtcccactggtcccagaatgttggaagtctcaaacacttgataggaaggaaaatgtagatcctacctgggacaaagctttattcatatcagctctcaaagaattctccctgataaagtttcaagacatatgagaatcttagggcctactcagtgaccctggatggacaatgaccctcaaggatcatccccaaacatgacctgggccacttcatgatgtactgcctcaccgctgctgagtatgatgggcacagcacctgtcc

SEQ ID NO: 459257 - DNA, 486 bp, Homo Sapiens
  misc_feature (14)..(14): n is a, c, g, or t
  misc_feature (34)..(34): n is a, c, g, or t
  misc_feature (65)..(65): n is a, c, g, or t
  misc_feature (72)..(72): n is a, c, g, or t
  misc_feature (82)..(82): n is a, c, g, or t
  misc_feature (99)..(99): n is a, c, g, or t
  misc_feature (104)..(104): n is a, c, g, or t
aaaggccttccctncctaaggcaatgaaacctcnaaattcccctaaacctaacagaaccccaccnaagctanacctctcccnggggccttcaatcccantcctnaaagagtggcaccctggtgaaagggggttcttgggatgtgacagtgacctccgaagcctggacatttgctctgtaaggagggggtctgggcttttaaaatgtcctgctgagaaaagagaagacacagggtggattcgggcacaagggatgtgacggaaggaacagcccctctgcagcggtggcggttcagagggcccaatcagcacacgacccccaccctggcccctgcagaaaggcaggcctggtgcggaagctgaaactcgaagcctagcgcgaaggccccgcagatgtcagtcgtggggtgcccagaggcaatgggggccccgtgatgagtgcgaccctaactgggttatgttgatgaacgcagggattttcacatcag

SEQ ID NO: 459258 - DNA, 493 bp, Homo Sapiens
  misc_feature (40)..(40): n is a, c, g, or t
  misc_feature (71)..(105): n is a, c, g, or t
ttttttttgcagagatcgggttgtgctgtgctgcccaggntggtctcaaactcctgggctcaagaaattcnnnnnnnnnnnnnnnnnnnnnnnnnnnnnnnnnnngcataagcactgtgcctggcttctggaactgatctttcaggcggctgaatccctaaaagatttctctttacctcgttgcagccccaggactactcatgcacagtattccacaaggttcatgctccatccaaacagaagccccctcagtgcaaaaactaaatcatgctatcttccctacattatttatgtacttgcccagttattacttattcaccaacaccgtaacaaagataaagtaggacttgaaggaatcacgtattcaatcggtaaattcattttcttgtgtttcagagccttttgttgatgacatgcataaatgtaaatatttaaaattgctaatgaacagctatttataatgaaacttctttgagggtgagtccggaatgaa

SEQ ID NO: 459259 - DNA, 493 bp, Homo Sapiens
  misc_feature (384)..(384): n is a, c, g, or t
  misc_feature (388)..(388): n is a, c, g, or t
  misc_feature (414)..(414): n is a, c, g, or t
  misc_feature (461)..(461): n is a, c, g, or t
  misc_feature (471)..(471): n is a, c, g, or t
  misc_feature (480)..(480): n is a, c, g, or t
cttttcttcagaggagctcaagctatttaatgacaatttgaccatttagagaagggctttgactttgtaatgtttagggtatttgctctggtcaattttccatgtggattcactagctgatgtgtggccatctcagagatggtttggggcctcattccataatttatgtggcagtgactcaaaaggtttagtacacatgataaatggtaacaataccttccacctaaataggggagtgtcattattttcacatatttttggtggcgtaactgataaccaaaacattttgttaaatttacccaaagttttcagcagccctgggatgccactacagttaagacatagctgtgtcagaaaggtgggcaaactctgccctgccgaaanggtnccatgggaaggacagacgcgtttttncatggatgactgtggaaggcagtgcatttttaaaagggattgcattnccagagctcntgggttggntgaccatggactc

SEQ ID NO: 459260 - DNA, 450 bp, Homo Sapiens
  misc_feature (47)..(47): n is a, c, g, or t
  misc_feature (159)..(200): n is a, c, g, or t
  misc_feature (223)..(246): n is a, c, g, or t
  misc_feature (381)..(389): n is a, c, g, or t
cccacccctgggccaacatagtgaagaccccccatccctacagaaanggaaattttaaaaaatcaacccccggcatgaatggtatgtgccctgtaatccccagcctactgggaaaggcctgaggcaggaggatcacctgagccctaggagtttgaggcnnnnnnnnnnnnnnnnnnnnnnnnnnnnnnnnnnnnnnnnnnctacggagtaagaaccctgtctnnnnnnnnnnnnnnnnnnnnnnnngaggagctgtacacattacctattattaagaagaaactaagtaagacatatgggaacttaaactgtaatcctgttctcagtcaagctgatttctaaacaattttcgacaggaaatttatactatgacaagaaatnnnnnnnnngcagatagcgagtgtaaaagctttttaaaaaatgctcagaaagatactcacattcttccag

SEQ ID NO: 459261 - DNA, 378 bp, Homo Sapiens
tttccacaaacctgaagtaaattttattgagatgagcaatttacaataaaacactttacagcacattggaaaaactcaagtttcacaaattttacattcacaaaaagaagtcactttttgctcaaagtcacacacggacctcggggaagggacagatctaatgagccatcagtgggttctccccagagtaaaagcgttttctctgggacttggcagtactgaaggtcccggactaacaatgattcaacttaggatttttaaaaattttatgatgatggggaaagcaatacacattcagtaggaaaccatacttcgcatatccatacaaccattctgggttttcaccttcagtacagtatttcaattaaattacatgag

SEQ ID NO: 459262 - DNA, 731 bp, Homo Sapiens
  misc_feature (24)..(24): n is a, c, g, or t
  misc_feature (43)..(43): n is a, c, g, or t
  misc_feature (690)..(690): n is a, c, g, or t
tctagaaccccggcccagtcactnaaccactgatttatggaanggaccatatacgtatttatccaaccaagttccccaaacttagggtgccccaatatccctcaccttgaagttagcaagagaaccacaactttgcttctctgtagacagatctcccaactttcccatctgttcctcacacacattcatttaaaaacagctgagagagctgggtgtggaaccttattacaaataccttctgaggactcatgccaccaccagaccatgttacctcaaagtctcctgcctccatttccccattttatacacagttcatgcttttaaatacagaactcccatgccattggaagctgttcccagaaagcgtcgagattttcatccagatgcctctgtccctcacccgtcagaacagaccatcaggtaccaccttctaacagggatggcctgagtgaggccatatgaaccccagcgggaggaaccccctcctcaatagagaagttgagatcccagcaatgctaatgccagcggaattccctaatgccagcggaattccctaatgccagcggaattccctaatgccagcggaattccctaatgccagcggaattccctaatgccagcggaattccctaatgccagcgggggtctgaaaggtctcagctgcttaggatttcgttggtaaaaaagganaaagtataagactgagttactaatttgacacaagatttctt

SEQ ID NO: 459263 - DNA, 604 bp, Homo Sapiens
acctaaatgggggtgaaataaaacataaaacgtttggagacccactgccctaaatagggatgggacgatctgggctgtctgcaaacatttaaaagacttctctaaaacaaaatgtacattactttgtacaattttatatttataaaatgaaaaatatatgccacaaacactcttgagagactagaaggaaattccaaaattaaaggagtaaatgtatcagggccagaccctctaagctgctatctaaggtcccaggcctggcttcagaaggggaatgggggacatgagcatagaaattaagataaagataaatgttacttcacttcctgcactggccacttgtatatccatagacaatccttccctacatagattgcacttgtttttgatttataaacctgtactttttattattttagcaagatggcaccacctagaaaactttcaattgcctgatacatctctaccacagccataccacatggttgcttgaaattttgacatttgttactgttttcttctctcctcctactcagttaaattctaataccaccaaatgagggactcagaccctcagttttccaaacttcaccatggaaaaacc

SEQ ID NO: 459264 - DNA, 490 bp, Homo Sapiens
tctgaaaaacatgttttgataatgcctgataattcatcatctcactgattacatgtctttttttctatttgtttataatcttgtgtcttcaaatgtgtggaagatgtgccagacttatttttaggtatcctgagataggaagggccaatgttggcataatttgaacccacatttcggggctaatgggcggacaccaccctggaaacacttacctgcaccctctgttttgcaatcacaatgattagcatcttgctgaatgatgaccccaatgtgaagatggcatttccagtgtttatttctggatctatgagttactttagcagagttattagtagtttataaagccatatttaaacttgtacacttgattgtaagatagatttgaattgtgcactatgttgactactgtatataaatgtggaaattctgtatatttggtcttaatgctatatgtatttgatgtgtaaatgataactaatggatatgaaat

SEQ ID NO: 459265 - DNA, 450 bp, Homo Sapiens
  misc_feature (34)..(34): n is a, c, g, or t
  misc_feature (39)..(39): n is a, c, g, or t
  misc_feature (65)..(65): n is a, c, g, or t
ccagaaggctggtctggacccactcccaggtccnaactncagcacccccctctgtgccagacctnctggatgcccaaatggaccttgttcaccccactagaagaatcccccaaccactcctttttcaactgccttcaactactgatggatggtgcctccatacatgactaagtcagacatggtctatttaggataggcatttaaactcaacgcacgggttgatagcttcagcattaccttacaaacaactaagggactccttgggaagatagttgcctttccataaggtgaatttgctctttatattaaggacatttagtacagggaagcaataaactattctttggtgcctcaagtggttttctgaggtataatataagtcttatgtttatgcttattaagacagttccgaagttaagcagcaaatatccatctccttacatttataac

SEQ ID NO: 459266 - DNA, 484 bp, Homo Sapiens
gctttccctcttcttagccccttccctaaatcctaccctctgaaatctcaatataccttcttcttttcccagacttggactaaaattcccttcttggtcttccatctctgaagattaagagcctggtactagactgcccctcagcctgagtcaaggattctccatatctgtgtagagtcttccaggcagcctgaggaggcatgccatgggctggttccatgagcaaagatagtgagacccataggactttggagagacaaggccaccctgaggaccagaatgagagctggcttcctggagcaggtaggacttggattgagttaagaaaggaaagtctagagagtagggaaggaagacattccagggcagaagaagtcctttgagcaaggcactgaactgataatatgatatgaaacaaaaagtggtctcagaaagtttgaagctaagaagttctaaatggattttttcagaagcaagtttagga

SEQ ID NO: 459267 - DNA, 199 bp, Homo Sapiens
cccctcttgaagcggctctgatcctgtgacctaaccagtttccacctggcttctctcagtgcgttgccatatagtataattttttgtttgtttgtttcgtgtagggttttgttggttcttttccaagtatcaatcaaaactacatgccaacgtccactccttggaaataattaaatgacatgacgtgcctgattttttc

SEQ ID NO: 459268 - DNA, 311 bp, Homo Sapiens
ctgaagcatgcgtctgcattttacaaagaaactgtccagtacattattctatattccctatttagtagccaacattagaattttaattcaagttatgctttcactttctcctttctgaaaactagaactagacaacttttcttgcttttcttttttgacaaaaacaatgctttaataaaacatggatacagaattagagcaattatgttaacagtatggctactgaatttgcatcttctaacctctttaggcatgaccttatttctattagagatattagaccttagtagagatagtctcaattataattg

SEQ ID NO: 459269 - DNA, 240 bp, Homo Sapiens
  misc_feature (60)..(60): n is a, c, g, or t
tttacatttgactcattaaacaagtagagagatgttcacacatctcaactaatagtaatnggtaatttttaaatgatgtttacttgtaagtaatgtgtcagtaagcatcagcaaaaaatgttactttagagatatttaatcatttagtttaatgccatcctttctcttctttcatgtactcagcaaaatcatattcagcagttactatgtggcaacactatgtggcaacaatggaaatct

SEQ ID NO: 459270 - DNA, 483 bp, Homo Sapiens
  misc_feature (347)..(347): n is a, c, g, or t
  misc_feature (418)..(418): n is a, c, g, or t
  misc_feature (425)..(425): n is a, c, g, or t
  misc_feature (433)..(433): n is a, c, g, or t
  misc_feature (456)..(456): n is a, c, g, or t
ggttaagttattttgcttatttagtagcaaccacactctgataagagtattctgcccatttcagaaatgacgttttttaaaaacttatctaggaaacagagaccaaaggcaataaaggatgaaaggctaaaagatcatcttctctatgaagaaagagatcacacaaacttcagttattaagcttgaagaagagacagcttagaggcacctaaatcattatctttaattccatgaaaatgtatactgcatgaaagatggtgaccagatgtttctcatcacttctgagggggaaaataaacaggaaaaagccttggaacttcagccaaaaggggctctggggagggccntgttccctggaggctaggtcccagttaaggtcttcaggttttttaattgcacacgtggagttcacggtttnaggatcnttgtttantacggtaggacttggccccggtngggttccagggaccacgggacttaggg

SEQ ID NO: 459271 - DNA, 349 bp, Homo Sapiens
aatatttacactaaattctatggctgattagagtatcttgaaagaaaacaacctcgagttggaaagaggccccaaagaatggattatccctggtgtgtttggttcaagtcactgctcacagagacttggagtcaactacagaccgtgcaggccaaggacccttcttggcttccgggctctgagtttgtacactcaggaaccaaattcttcagggttattgaatgattgcaagtggttgtttttttccaattgctgtgaaaaaaatgtacagtgtataataaactgttttgctaaaatctcaaagaattcagaaatcaaacttctagctataaacagtattaatattgtc

SEQ ID NO: 459272 - DNA, 561 bp, Homo Sapiens
  misc_feature (29)..(29): n is a, c, g, or t
cccatcatactgaatgtgccttggaagcntgcaaagaattaatatcttttcttttaagttaaaaccagcaaaacacacccatcagaaatgtagtcaaaaattcgtatcaatactgcaatgcctacggtggcaacacaaaggcctacagtttctggtctgagagatgcaaatagatacctctgctcccaattagtcccaaaaagaaggggctgaaaaatgtccccaggcaactgcaattatcttttcaacctctgccttttcgctggtccatcccatgcctgcaaggaaagccatgaccaacgtgcacagtcctcctgatccagggaaaccaaaatgcacactgctgaacacagctagcacagacaaccccaacacaaggaatgttctcttacacacaagtttgtcctggtcacggcttggaaagtactgaatgaaaaatccaagaacagatccagttgccacaccaattaccacctccaaaactcctctgaggacattaaagacagtagagcctgtggaaaaggctatgcccaagcatgtgttgaagccagtgatggccag

SEQ ID NO: 459273 - DNA, 398 bp, Homo Sapiens
  misc_feature (314)..(314): n is a, c, g, or t
  misc_feature (343)..(343): n is a, c, g, or t
aacagaaattggaatatttaattataaaataatctggggcaaaacagttaaatgttgtttgatgtaattagtctgaaaatatacaaccaaagatacatcacatttgcaacaaatcataatctatacagttctaacttaattagcaatcatagatattctaacaaatgcatggtcaacaaattcaagcacctatctataatagctttatttatcacgtttattagaatgcacaaattttcggttaagtgattgagacatttgccgggaagttcagtgagttttgaataattaataccaactaataatctaggggnatcaataaagtgctttctgagttgttttntcaataaatcttttctccattacatacaaggactctgggtcaggctcaactgatc

SEQ ID NO: 459274 - DNA, 945 bp, Homo Sapiens
  misc_feature (67)..(75): n is a, c, g, or t
  misc_feature (819)..(819): n is a, c, g, or t
  misc_feature (844)..(844): n is a, c, g, or t
  misc_feature (862)..(862): n is a, c, g, or t
  misc_feature (867)..(867): n is a, c, g, or t
  misc_feature (877)..(877): n is a, c, g, or t
  misc_feature (893)..(893): n is a, c, g, or t
  misc_feature (903)..(903): n is a, c, g, or t
  misc_feature (923)..(923): n is a, c, g, or t
  misc_feature (928)..(928): n is a, c, g, or t
actgaagcaaactagcccttgaaagatgagtaagaattcaccaaagaaaaaaaataattgagacaannnnnnnnnaagtaaaatatttttataaagcttttaatgctactttctgacctacaggtgatgaagggagtatgccagcagatatagccacattactaaaaacatcaatgggcctgtgaaataagaactgtgaactctcaattgatgaggaaatatcaacttggtgcactcaaggacatttacattatgatgaccatggggtttatgaacatttataactttttataatttccatattacatttctcatagtatggacaactttttgccactaactgaattctccaaatactcacacgtgaaatttcaaaaaagaagtcacaaatatgtagttctgaagatgttgaataatcattttacaaagcagttttctgaatggggattagttggtgattgtttgtaacaaatatgctaatgctttagaaatgtcagtatttttgtaattatttctacctccaaatatatatatattgtctttcactggataatgtgtgtagatttttacatgtgccttatttgacaatgcttatgtcttgtttttgcttgtctcatttgaagttcttttttattatgttaaagaatgcagctgtatagattatatagctttcattttattgctatttgaagcagatgttcaccaatgtcagcaaggaactcaacctggaatttaaaggtgggcattccatatactaacatcccccggggccctcttcaagtacttctggctggaaacaaatttatttgggctaggggnactaaggttgttttcccaggtgganaggtaacctaagggaggnccccntacccttggncccagggggttaaatnccctccggtnccatttccccaccggcaccnattgnggccaattaccctgggc

SEQ ID NO: 459275 - DNA, 439 bp, Homo Sapiens
  misc_feature (51)..(51): n is a, c, g, or t
  misc_feature (424)..(424): n is a, c, g, or t
gttttttgaatgatctctgctccctggctctatgataggaattctcaaccntgagtgaacaattcaaacttgagattacttgtgtttagactcatatattttgataacatatgacttctccagtatgccccagaaagctgctaataacttgctcaacctgaaatttacagttttccaaattacaggttggcagagatactggattgataacaacatccacagttatcatataatcattcttatgctgtaaacaaaattattttggttagcagaatttaataattaactgttaactacatactagggcaatattgtagccactttatgtgcttcatgacaccttatggggatagggtactatttatcctcattttgcagatgagggaaactgagggtacgagggagggtattttcctccaagggncaccacaacttgggg

SEQ ID NO: 459276 - DNA, 402 bp, Homo Sapiens
ttttttttgctataatacaatttgtgtttattagtttccacaatgttacacaaataccatgcatttatttgcaatactgaaatgtcctctttaatcaagattttccagggcttaaaaaaatgattatccttgctattacttattaaatggtatatctaggtgccagaaaagatagaaaacatagggtaaacttatttttaaatagcatgttatttatattttcaaatcatatgcccagcatgttttctttcaatctctagacatcttttcagggtgaaatacctctaaatttcaagcactgtgtgaaattgttaatctgaggaaagatacaataaattcactatacaatgtcttaaaaattggaaacatgggggaaatagtgtatttatttatttatatacc

SEQ ID NO: 459277 - DNA, 564 bp, Homo Sapiens
  misc_feature (446)..(446): n is a, c, g, or t
  misc_feature (484)..(484): n is a, c, g, or t
  misc_feature (493)..(493): n is a, c, g, or t
  misc_feature (527)..(527): n is a, c, g, or t
  misc_feature (533)..(533): n is a, c, g, or t
  misc_feature (547)..(547): n is a, c, g, or t
aaaatgttttgtgggccatttcagtgctcctcactccctcatagccaccagcctcatcagaaagatgccccgagagcacaggaagccccccaagcatgtgccccacccaccttctctaacaaggtaataaatatttccacagccagtcccaagctgctcccaagcctgtaggtcaccaggttggaagggcaggccacttctacctgttacatgccctgacacctcttatggatcaatcaggacattttttctcaatgacatgacctcagatgctgttactcagccacaaattgacccatgaggtgaaacctatttttatccatgtattaagtagtttttaataatccatactacacttggtttacagaaagggttaaagacacaaacaaaacttttcaaacaccagcattcaaagaggcaaggattgggagttaaagggggaattntgttgttgcggaaggcccacaggaaggttgaggggggnctgttggcnattgaggcaaaaatttcattttcaggtttccttncgggcntgttttaaaggggnattgggttccaaatttt

SEQ ID NO: 459278 - DNA, 640 bp, Homo Sapiens
  misc_feature (18)..(18): n is a, c, g, or t
  misc_feature (40)..(40): n is a, c, g, or t
  misc_feature (65)..(65): n is a, c, g, or t
  misc_feature (72)..(72): n is a, c, g, or t
  misc_feature (91)..(91): n is a, c, g, or t
  misc_feature (144)..(144): n is a, c, g, or t
aaaagggcccaaagctancacagaaaatgggccccccccnaagaaaccatttcccaaaaaaaccnaaaaagntgaatttcccagcacccgngggccccagacaaccctactcgaaagccaatggtttcccctttatttgaatgntccttgttccctgtggtaaaagtaaatactttcctgaagaaagcaccctgggcctaacccctttttccctgcctgtgagttgaatcctacaagagttatggcctctgctaaacaggccctttgcccttggattaaaccagtataaagtttatcccacaaatctttgctctttatcagaaagtccttctgtgtggtcctttaaggttgtttgtacacataattttctctttaagccatctgacagcagcatccactttgtacaatggagtccaagagaattaaacggctgagcacatgggattcctgatccgagatgagtacttgagtgaaagatgaagtggtaacatcggaaaggtgctcttaaaaggccttttaggaaatgctggtgaggatgtggtagcagcatgggcatattcgttttatttgtaactggagaaaacactggatgcgttttggctcaatgtgattgtgacctccccgcccgaagccacggaag

SEQ ID NO: 459279 - DNA, 392 bp, Homo Sapiens
  misc_feature (377)..(377): n is a, c, g, or t
ccacaagaaagaatttattagggttttcatttcagtgtcttcatcacatgtaactatatgctaaggatataaaacaatgaaataaaacatatttgcattttcaaaaggcacccaactacattaattttcttgatgaacacagtagacatatgaaatgtacttaaaataggtgttgtgccaaagcatcatttacacagatcatcctaatgtttacagttctcctctgggcatgtataatataccacctgtataacagttatccagataggatgggcttatttttactttttaaaaataagatcttgggaggggtaaaggattattaacctatacattcatatcttctaggggagtttgggggtatcttgtatttaatnatacatttgggcaaa

SEQ ID NO: 459280 - DNA, 463 bp, Homo Sapiens
gtgtcttcatcacatgtaactatatgctaaggatataaaacaatgaaataaaacatatttgcattttcaaaaggcacccaactacattaattttcttgatgaacacagtagacatatgaaatgtacttaaaataggtgttgtgccaaagcatcatttacacagatcatcctaatgtttacagttctcctctggcatgtataatataccacctgtataacagttatccagatagatggcttatttttactttttaaaataagatcttggagggtaaagattataacctatacattcatatcttctagggagtatgggatatcttgtatttaattatacatttagcaaatatctgctgaatgaacaaaaataagttgtcactcatctttatatagcattcataaaatagtacattgttatgaaatagaatatcacactcaccaacggtttcaataagaattatgt

SEQ ID NO: 459281 - DNA, 419 bp, Homo Sapiens
  misc_feature (22)..(22): n is a, c, g, or t
  misc_feature (38)..(38): n is a, c, g, or t
accaataaacctccgacattgncaaacactggaacganaccgtccatggctgccagcccacagaccctgattgtcaaggtgcctagtgctgcctcagtggaggatttcccactatcactgattatgattggtaaaagatagacttcttgcttctggcggttgaatccattatgctttgccaaaatactgagggaattatcttcatttttcttgatggtgaaattcggattgttgaccatttctggaaggagactgtataagaaataatgtccgtttttgggatcatctttgtccatggcgctaacagtttgaatgacttggccgggttttccattttcacataaaaatgcctcatattcggatgcgaattcaggggcgttgtcattgacatccagcactttaatagcaacaggtactcg

SEQ ID NO: 459282 - DNA, 341 bp, Homo Sapiens
agatctatctgactgtcaaaataccaaagtgctccacgtggccaaataaaagggcaattctttccaggaccccaaaacgggagtctggtccctctgcatatgaccgctgtctgtgtcgagttaagggtgttcctctccttactatacctacagaagaaaatctttattgtgtaaccaaactttaaaagtcctccacagtcggctctgaaactacgtatcccagagaggggaacatctcctgcatctgttcatccggaaagacaggcacacttcagacccttaaaaccagaccgtgcgttaagggcaacgcacgcgccagacctccagtaaataggcgagtt

SEQ ID NO: 459283 - DNA, 386 bp, Homo Sapiens
  misc_feature (167)..(231): n is a, c, g, or t
cctcagcctcctgaggagctgggaccacaggcacacacaaacatgcctggctaattttttatctttcttattttttgtagagatgaacatctcactgaattgcccgggctggtcttgaactcctggtggcccagtctggtctcgaactcccaaaggacttttgaacnnnnnnnnnnnnnnnnnnnnnnnnnnnnnnnnnnnnnnnnnnnnnnnnnnnnnnnnnnnnnnnnntatactattagactggcaaaggtttggaggctagatcctgcccagtgttggtgggggatgggagcagggcggcctgcaagccctgctgtgggattaaagtgtaccactggggagacctcaccacaggcccaccttagacgggagctctgtcccta

SEQ ID NO: 459284 - DNA, 437 bp, Homo Sapiens
  misc_feature (354)..(354): n is a, c, g, or t
  misc_feature (365)..(365): n is a, c, g, or t
  misc_feature (374)..(374): n is a, c, g, or t
ttttttttactttcttaatgaataataaacaatcttcttagcctgaaaatttttagtcatcattccaaatacgtagtttatgtaacctgcatggcaatttctttaaataagaatggttgttattctgttatcagttgctattataaatcttctgttgttagttataaataacatatatcccaaaatatttttattgttcaataaattacccatattacttaaaaagtaattgtgtgtgcattagttttgagtcacacagcccgtatcattttttctttaattgtacatatttaaggtacttttagagttaggtttctaagggaaaggattttcctaggctataaattaatttcngttaccttccnaatcattangaggcggggtgttggttagggctatattgcggtttccctacctgggtgtaaagggcttccata

SEQ ID NO: 459285 - DNA, 366 bp, Homo Sapiens
  misc_feature (19)..(19): n is a, c, g, or t
  misc_feature (77)..(77): n is a, c, g, or t
aaatcccgaggaaaagganaaaagagctgaaaagctggtcttgccgcaaaagacccccaaaatgccccccagccggncgtgcgcctcgggtaaatcccgcgtccgcaagtccgtgcggtggttaagttggcttttaaaaaaaatcactacacacctcctacatctttgattttacacatcttccaccggtgagaaggaacgaaaacaagaatcttgtagcctagtagaatgggggagggggatgaagattttcattgtctacgctcggcacacgcagcccaaggaaagacgctcactgcctttggagctccttctactttctgcttgaaattcagaagctttcaacgcagtaaagcgggggtttgg

SEQ ID NO: 459286 - DNA, 464 bp, Homo Sapiens
  misc_feature (115)..(115): n is a, c, g, or t
  misc_feature (413)..(413): n is a, c, g, or t
  misc_feature (431)..(431): n is a, c, g, or t
  misc_feature (452)..(452): n is a, c, g, or t
cacgtttctacccagatcctttttcatttccttaagttttgatctccgtcttcctgatgaagcaggcagagctcagaggatcttggcatcacccaccaaagttagctgaaagagnggcactcctggataaagcagcttcactcaactctggggaatgctaccattttttttccaaagtagaaaggaagcacttctgagccagtgaccactgaaaggtatgtgctatgataaagcagatggcctatttgaggaagagggtgtctgcccttcacaaacacctctctctcccctgcactagctgtcccaagcttacatacagaggcccttcaggagggcctcctgtgccgcaggagggtgcgttgggaagatgcttcctgccagcacgtgcctgaaggttttcacatgaaggcatngggaaggcgcaccctgtncgtttcagtgaacgtgcattntttttccgggtg

SEQ ID NO: 459287 - DNA, 338 bp, Homo Sapiens
tctcaggaaccctggggattgtgtggttcctgttccccagagaagtctcagaaagctgaagggggttccccatgtagtggccgtttccatgaaggtcccctgatcccaggcagctcataccctgagaattacggaagctgcacttctatctctccagagacagaagcagtgcccccaggttgagaagaattgtggctctatgaaatccagagagtttaggaaatgagccaaaattaatggttcccagtttttctcagcattctaagatctgatcccttttctattcaagatatatgatctctgggactttctttagttagaaactttccaacttggct

SEQ ID NO: 459288 - DNA, 520 bp, Homo Sapiens
  misc_feature (113)..(113): n is a, c, g, or t
  misc_feature (506)..(506): n is a, c, g, or t
attggatcatgggggaagcaaatgtgtgtattttaagtgagttcctgcgagtcatacactgcgatgatgctccgcctttacccgttcagttgggagcttattgtgagattggntcatttccttttgagtgttcttctctttggtacaaaacctattgtgggtgacaggagcagtgttttcctgctggacccgcaagccaccagctatttcctggtgacacaagctcttctcaggcggggctgcctgcaggctcccgttttctgagcccacgctgcccacagctgaccccagcgcagcccgggcacgcggcactttacatgggggcagcttgggcccagactcctccgctgtgtagcagatgaggaaaatcaggccagaggacaacaggctggcgttttgttgggaactgaagaggaatctgttgaacacagcgaccagatgaccttccatttcaccggcggcagagtttcagcgtgcagttcccaaaccccaaagctgaaccctgngccccatttgaata

SEQ ID NO: 459289 - DNA, 461 bp, Homo Sapiens
  misc_feature (23)..(23): n is a, c, g, or t
gaagatgtctttttccagatgtnctttttatttaactaaaatgtctctagcttctttccatttatgataatcctgcccttttcgacccacagtgtagctcagaggaggaggaccttaagaaaaactgagattcgttattcagggcccatggtaccttaatctagaaacacatatcccaagaaatattttctttttaaaattatacatcaactttatgccttattgtttaaaaatcttctatcaaaagtatcatcgataagacaatttatcttgcttttgtacctcataattaccctaaaatgtgaagtttctagtctcactgatttcagatgaatatttaaaataatttgataagtttaatcaattggaactctactgtgtggggtgaggggagagaaagggagttatttttgtgttttggaggaaagttggacagggtgggaggatctgaaattttgggc

SEQ ID NO: 459290 - DNA, 456 bp, Homo Sapiens
  misc_feature (382)..(382): n is a, c, g, or t
  misc_feature (443)..(443): n is a, c, g, or t
gttactatccccattttacagataaggaaacaggttcagaggacattactgcattgctggaggacacatagcccgtaagtagcagagccagaattggaacgcaggcctcctgatgccaaagtaatacggcctttccattatgtctactatatgtaacctaagaggacaaaatggagagaggaagaaaagatcaatctgaaagctgcgtcctttggttgttctagctcaggtcaccacacatgctaactccctgttcccatcaaaaggcagctggccttgaagggctggagcagggtcgagtatacaggagactcagttgacaggtgaactctgtcccagtccactgtcttccatgtgttgcgtcccagtgaagggcagagtnctggggaagaaaccatccgttttcatggcgcctggggttcgagagaggggattcccggttncattgggaaggga

SEQ ID NO: 459291 - DNA, 755 bp, Homo Sapiens
gctttttaacaattttacattttaattcttagtttggtagattggattgaaagaaaggagaaagaacattagcagaaggcactttcccattttcttccaggaatgacttattcctggggtggtgagaattggtgggtggtaaccatccatagtataaaattgttagaaagaatataaactgccaaacaagcatgttatcttcaggcttttccaagcaagaatgaagtcttttgatgtttatgttcattttaagaagacaaacaaactaaaattttaagaccagacacaacccaagttgaattgtgatctcaggaggtgaactctcattcaccatgtgggcatattactacctgtatttatatcatgggatttcagggtatttgtgaacatgtctagtatgactcaggtaaaccttttaaaggaatgtatgttacttaccatttttgttaaggaggcaaaccggggctggattgttaacccaaactgttccattaccttgggtcactgtgcaaactaattcagggtacagatataaagtttagaagccttgggattaaatgccagcctctttgctcaggcaaaatgaccctgggctttcttgggaagtccagcatgtatgtaaggggtgaggccctgctgacctcagggcttttcgctttaaggagattaaccctagtcacagtgattttcatttaggagctaactaggagtttactccttatgacgtgaaactttcaagagtatggaaacctttg

SEQ ID NO: 459292 - DNA, 526 bp, Homo Sapiens
aagatccttaaaaagtatctttaattgatgccaaatatgaacagatcgtaaagtgacagaagcaagtaaaattgcatagatgaaaactatgcgcatcaattaggttctcaattcataacattcaatgtccttgacctgacatattacacagttagagaagggagaatgcgcagtaggtgaagatgagacacgtccttaactcaaggtggaagcaactggcaaactcaagaaataaaatagcgttttttcagcttaaatggtttgttgtcctgatgggtggcactttaaattaatactacttcaatttttattttttaacctcagtaatactttatctttactattagaggcatgtcacatggagtccatgttgtctacttacatctgctgcataaacagtcccaaaacagtgcgctgaagagaagaaaggtgcttctgcaaggtttggagaggagacaactttgacctggaatattttacaagaggatttcctgttttgttttggttttctttccatacaccattt

SEQ ID NO: 459293 - DNA, 378 bp, Homo Sapiens
gtgcttttggaaaagatcatatgacagctataaagactctgatgaaaggttactagcaggttattcaaaggtactttttttgaaggcaagattttaaggcatgttagggtaggcattcaagtagggtgattttttaaaaatgtatttgcttgccgcagaagacaagtacaggttctgctctgatgcctgtcctggtcctctttcccttttaatgttagaatgtggcaaatgctcagtaatcactgagctagggatttccaaggctcttgtctttgtctgcatcccaggtccagggattgtacagttggtaaactgtaccaaagcatggagaccaggtgtttacgaggattgaagcatagttggtgctcctttcaccaa

SEQ ID NO: 459294 - DNA, 499 bp, Homo Sapiens
  misc_feature (19)..(19): n is a, c, g, or t
cttttttgggggtccgcantttccttaaactcgttccccaccgcctcaactggaaaaggcccctcctcctttcccaggcgtcctccttcagttttctctcaaaaactgttaattcccatctcgcttccctcggcaacagtcattcttctcactgctgggtctcactggtgagcttcggtcagtctgctgaagcagggcttggctttgcaagtaaagtctggtaaagttcctgaatttcaggaagggatacctggagcagctgggcttccatcaatagttcattcacttctggactaacaccatggagggggatacaacttcgtccagttgagaagggggagtgcaaatatgaggttctgttgtcccagtcatcaggcaaagaaaatgatgttgtgccaggaggttgagataccttgtttgtgtctgacacctgtcctgctgaggcttgccatctgctatataacagtcctgagcccactcgatcttgcacaaatttaag

SEQ ID NO: 459295 - DNA, 484 bp, Homo Sapiens
  misc_feature (358)..(358): n is a, c, g, or t
  misc_feature (382)..(382): n is a, c, g, or t
  misc_feature (434)..(434): n is a, c, g, or t
  misc_feature (456)..(456): n is a, c, g, or t
gtttattatattgtggctttaggcacattaaacctcacttcaactgaaggtaatttgtaatttaagaaggagagggtagtagtggtattaggggcagtccttctatttgtctcataaacccaaatgtgagtgtgaaacaccctttgttgttatcattttgatttggtctggtcttttacaggtgttagtccagaagtgaatgaactattgatggaagcccagctgctccaggtatcccttcctgaaattcaggaactttaccagactttacttgcaaagccaagccctgctcagcagactgaccgaagctcaccagtgagacccagcagtgagaaggtgagtgtctgagaggcttctngggcaaggcaccagtcttggggtnggggtatgctttattttactcctccgaaacataacccagacagcttggtgtnaggacttgggcgattagacttnagggtgaccctttttgaatgctgactta

SEQ ID NO: 459296 - DNA, 325 bp, Homo Sapiens
gagattttcataaaaattttattttgcatttttaaataattcaatgcattggcagtatagttaatgcctctatgagagaaaccaacgcaccagctcagccaatatcatttttacagagacatcttgttggaaaacaacaaaaccacattaaaatgtttgtacacagagttactgtactgagaacaaagcaccaacaaaacgcttgtgcgccacacatttgaaatgcaaagccacacaggcagatatagttttatacacataaagcacatgaaaccagcttttaaaaaccagataacatttcattaattgattgattttagaacag

SEQ ID NO: 459297 - DNA, 988 bp, Homo Sapiens
  misc_feature (863)..(863): n is a, c, g, or t
  misc_feature (968)..(968): n is a, c, g, or t
gggtataaaaaggtttattactcacatactgagactttccagggagatagggcaggctcccaggagggtcgagaaacggcttaattggtttggcttttatccgtcttagagtgtgaggctggggtgaagcttcctggcatgcatgccagggcttgcgtgatttgaacttcctgctggggccaaaggaggaggcacccatgcttccatcagcttgcccagatgtgcagcataagggagaagggaaaggtgagtcttgaaagatgtcagcagtcaaacattaaaaacggcattgaagtctttattacagtcaaatgaactaaaaccccggcctataaaagcgtatatttttcagtctctaaggcaatctaggtctaaaagtctgcaccagcaagcaggggctgcaaaagctgcgatgtccctcaaaagtttcagacggggccacagaagctgacgagcaagactttcctagaggtcaaactagtggccacagaagacaatggacaagggagtttctcctagatagcagattcatgatttcaccaaggaacactttctgctgggcaagggatctccatcatgcctgctcagcagattatcacggcatgggccattggctgctatcatttttgtctttaactctagtattcattcccctctttttagctttagtaatagaaccctttccctggagttttagtagggcacatgtccatctagttagagacacgtcccaggctttcttgaagctaggtatagctatatagtaagtattcatgaatggacggtgggcagaagtgatggctgtaatttcctaaaaaggaaatggcttgctccaccttcttcttttttcacaggctaggaantcttgagccagctttgaccatggaaagaacaatacccttgggtattaagagaactaacaaggtagatgactcctatatcccttgaataccttgtgaaatgaagcnacttctggattgctatgtga

SEQ ID NO: 459298 - DNA, 729 bp, Homo Sapiens
  misc_feature (127)..(127): n is a, c, g, or t
aaaaccccagcctagctaaaacctattcttaaggtgaccctagaaggctctgctgtccttctggaggctgaaacctccactttagcataactaaagtgacagtaacatcagtgtcctatgaggaaanaacaaggaaggtgctcagtaatgcagcactcccctcctccagagcttggtaagcagggcctgagggagccagcagagccagctatagacaccatccccccagcagggcccccaatgtctccactaggtggtgtctcctcaatttcctccatggcctaacaaacctccctgctaatgcacacagtggctgggcccatgggttggcagtggctgactggtcagcaggtacgtgcctgagtgaggctgccctgtcagccactggggctcctccatctctggcccatggctaggccccccagcaggcaagggtaatcaactgtacttaaaaaagtgagcactgcacgaagggttgcctttggatttctgaaaaatacccccaaggaactgaacggaggggtgtacacactgccaaccacagacagtgctagccagactcaaccacagcagcccttatgttctccagagtagagcccagaggaagattcaaagccagcggagaccagtaaagggtcgcaggaccaaaacaggtgtcaaacaggctgtggccttaacctctcaggcccaaagcctttctgctacacaggccttcctcttcactaggac

SEQ ID NO: 459299 - DNA, 456 bp, Homo Sapiens
  misc_feature (349)..(349): n is a, c, g, or t
  misc_feature (361)..(361): n is a, c, g, or t
  misc_feature (368)..(368): n is a, c, g, or t
  misc_feature (378)..(378): n is a, c, g, or t
  misc_feature (406)..(406): n is a, c, g, or t
  misc_feature (423)..(423): n is a, c, g, or t
  misc_feature (430)..(430): n is a, c, g, or t
  misc_feature (446)..(446): n is a, c, g, or t
ttttttttaaaagatccaaatctgctcaatttaatgtgataatctccaacagttaatgaaacacatcgtagtatgacatcatttcaccagccagctacttcatgtggcagaaaaggtaaccttttccccattttacagacaaaaccagttacagacctgggaagcttttaggacttgaccaaggccccagcaggtagaggaatgaaaacttcagtcctgctctgtcaagcaccactgtccttttttaattcttttaaccactgccttcctgtctcagataaagtcaggtctccttggctgagtttctagggggtccgtggtccaactggtccttcactttataattaancttatttaaaanatttttnttctttgagncagtcttgctctgtggcccagggttggntgtgcagtagcggacgntcatggnttcactgcagccttgnttctcgctgg

SEQ ID NO: 459300 - DNA, 173 bp, Homo Sapiens
catgtagaaataatgtacttagtgatgcataagacaacagtccagattcagttttatttggttttatttcctacagtatagtgaggaataaaattggggttgatcaaggctttacagatttgagaagccttgaaaaccctacaaaaatatttagaatggatttcataagaaac

SEQ ID NO: 459301 - DNA, 451 bp, Homo Sapiens
ataatacaattttcattttattttaaacatattttgcatgatataaaaatattgatcacagtgagttttaccaattgttgttgctataaaaatgaatgcagaaacaatatttttagtggaaataaattatatagtcattcttttaaagaaatcacaagaggaaaatcttggctgtttggtcattggcagaaaaccagtctttacaagaggccttttgcagatgagctccagtccatttctgtaaagttatccacatggttcaggaaagacagacttttgtctttgttagcatggacccacaagggtctctctgttcacagacagttctactgtgggcaacacagttttccataataggaaaatcgatggaactggaaaacagtaccaatcttagcttatggtcttttccaatatgaagggacacaacgacacacttcttcactatatgaaa

SEQ ID NO: 459302 - DNA, 561 bp, Homo Sapiens
  misc_feature (516)..(516): n is a, c, g, or t
tttaaacatgttttattattctaaaacacaaacaatataacttacgtgaggcatatttttaaatcatctatcatgattaaaggtatctttaatatctaactgtaatgtaacagacaaataaaaggaagcaacttacggtaatgtgtaattcaaactggagatggccaaaactcctgatgacacaatcattagatgcttgcacatgtacatataattaccattaatgtgcccactacaaatgcagactactgcagtagttttgacctggaactcaaatgccatgagcaatgttgccactagtgacagtttttaaaatgatagaaaactcttggttacgtactggaacaaagactacgaccttccctcacttaactggtaattgcatttttgagcaaatcaagtactgcagatctacaacaaaaatataaaatggagttataatctaagctcaaaaaattattgtcaatgtccacccgtcagagatcatgaggaacagatctggcagttgaatcgagntggggtttatcagcacacttttacccaggagagatcacacaccct

SEQ ID NO: 459303 - DNA, 453 bp, Homo Sapiens
  misc_feature (442)..(442): n is a, c, g, or t
ctggaagaattgctcagtctcttgattttagatttaatacttgtaaaaccctataatgactggcactagtcagacaagtgcttgttcttttgacagcatttattaagcacttactatgtgtaaggcactatgcctaatgctggggcacagcaattacagggcacacaagacaagtttatgccctagctggagacatagccactaatcaaataaagaggtatttcgttatctctatgtatatttaagactcagcccaagagctcacccacctagtgtttggcaggtagggggtggttaatttgactcacaaagttccctagtgtcaaggttgaacttgccctttgggagttcagcatgacaaatatgacttgcgaagatataggagggcagacttctttctggtggctcttaagggacccctgtcttggaaaggaactgccantctgtaggcgg

SEQ ID NO: 459304 - DNA, 435 bp, Homo Sapiens
  misc_feature (280)..(280): n is a, c, g, or t
  misc_feature (396)..(396): n is a, c, g, or t
  misc_feature (414)..(414): n is a, c, g, or t
  misc_feature (421)..(421): n is a, c, g, or t
aggaatgttaactccatcttttattatgtcaacctaaagctttatcttggttcagagtgaatatcaaagtatgtgctttggtttttaaactcatggcagagtttctggatgagatgagctagctagcttttctatgcccagacagtgaaggacattgtgtaacccaaaattaactacagatactttcctgctaaatttttcaagcgaatcaagggctttgcttttggttccacatggtaattctggagccgtttggggaaggacattcctggggaacagncaaatgcgagggtcctgggggcgaggtgttgctctttgggccagcttcaagggaaggagctgggtgttgggctgggagcacagttgagttgaggaggaaagggggttagggagatnttagggagatggtttttnccaggtnggcctagggccttt

SEQ ID NO: 459305 - DNA, 509 bp, Homo Sapiens
aaaaaatccctggcagtcacttgtaagtggcttttactatttaagttaaaatgggtaaactaacctcggggtcctactggccacataaaatcactagccagcaatggatcaaggcatgccaaactgagaagcatttacagtaaatcatcatgaagaattcaaaagaagagagttaaattaaaaccctttgagtattgcatgttaacacatgagtaatttgcatggtctgacttcctaaactgcctaaaaagcaacgtttacggcatacttgcactatgctatggatgtcctttcaccagacatcagaataggttacactcttatttgcacccagctagggcagcgcaagcacatctgcagacaacactgctttcatgttcgatcacgcagggaacagagggaatcaagtgcacgaagagattcccttgaacaaaatcagcaatggtgtaagcagactgacatttagagatatcagaagcagtagtcatagcatctcctgacagatgagc

SEQ ID NO: 459306 - DNA, 536 bp, Homo Sapiens
  misc_feature (101)..(101): n is a, c, g, or t
ttttcaatcccacaaatgttttaaatgaaacagatacagagagccgcttttaaaagaaaggagtctctcaagcttcctctatttcagtcttctgaaatagnaaagaaatattttcatggcccatgtaaaattcccaatctgaaaaagattaatttccattaatttgggcctttccattttcagaccaaaagtaaaccagagtaattcttaaaagtttataaatgacaagatcaggtggctggctcatccttgtgtcttctagacatattgcatggatccattcaccactgccttccaaactgcaggtgctggcatgtgtgacagatatcatccatgaaggctctgctagaagaattccttttgctgaagaagtatgatgttttaccagttgaaagaaatctgggcaattaaagaacaaataaaccagtctcccattatcaagatacctggagtcacagaaggaatccaccaaggaaaaatgaaaacttgccaaaggtaacaagttcacattctacccattgtaggtgataagaact

SEQ ID NO: 459307 - DNA, 392 bp, Homo Sapiens
aaagtcacaagaattttctttattatagcaaatactttcacggcatttgacagaactcagaactatttacaaagaaagaaagaaaaatcaaacaaccaaaagatacatttcatataataggaaaatataaaaatcgaagccaagtgacagaatgaaaaagttagctaagcaatggatttgaaaaacttcgattctaactatctgacttgttgctaattgtccaaacatataataatttaagatggtcttttgagacttcctaggaagtaaaaaggaattattgaaaaaatgttcaaatatttcataaataaataccaaaaatatttattttcattgtactttccgacttgcttcagtgaaggtgtccttttacaacactctgtttcttgttt

SEQ ID NO: 459308 - DNA, 679 bp, Homo Sapiens
  misc_feature (18)..(18): n is a, c, g, or t
  misc_feature (23)..(23): n is a, c, g, or t
  misc_feature (55)..(55): n is a, c, g, or t
  misc_feature (70)..(127): n is a, c, g, or t
  misc_feature (664)..(664): n is a, c, g, or t
tggggtcaaaatgcccgnacccnaacccaaatacttggaacaccctatcccaagnaaaacaatgaataannnnnnnnnnnnnnnnnnnnnnnnnnnnnnnnnnnnnnnnnnnnnnnnnnnnnnnnnnggcactcaaataattaatgcctacaggtctcagatctttcagaatctttaaaagaaacaaattattgctctcaacacgcacatttcattttcctttcttgtttttttaaattaatagtctctacctatttgaaaacaaaagtaactcaacatctcaaatgatctataaattcatcaagaaatactctgtcgctcaagttctcatagataataccacactgctgacgacctggggcaatgccaccgccgccaagtctctacagttgatttgctatcggctgcttctctgtaacactaacattctctttcatgagtataatctcttctcactgtatcagagctcaccaaggttcacatctcttactgcctctgctgctagtcccaaatatttttctcctttaagtgggaaaaaagctaatttttaaattcctgaaaattcactgggttattatattatttgccatggggaggggggtatctgtgagggtgaggagagggttaatgaaaaaggaaaaggaacaaacccaaacccaaattngcaacttttacagga

SEQ ID NO: 459309 - DNA, 366 bp, Homo Sapiens
tgcttttggctctgcttgcccttcatgggagtcagctccttttctggaagttctatattgtagggaagaagtagacttttgaaaataaaacccttgtggagttgtcagggttcttgggcagtaactgagtcaagatgctgcagaatctgctggcactgtcaggttgcccagaggaccatgagcattgcttcatgcaggcattttgaaaataaaggtccagaaaacacaagctgtttcaggagaagaatggaattccagtgcatctaaagggtggtagagctgatgacctcctgtatagagccaccatggttctcagttagtgaaacagcatatgccatgcatcagctggctgtggtttcatttccc

SEQ ID NO: 459310 - DNA, 344 bp, Homo Sapiens
  misc_feature (85)..(85): n is a, c, g, or t
  misc_feature (91)..(91): n is a, c, g, or t
  misc_feature (137)..(137): n is a, c, g, or t
ctaaattctccctgttctcaatgctatgtctcttttatttttaacttctcgaaactttcctctaactaaattttcatatccttcnttcttnctatctccccattattatttcaaatctgttaagtctcatattcccnaattattacttgaagccattagggagttatcttagtaccaacccagcacagcaccatgtggagtagaagttaatcatcaggcaccatggggatctataactaaattgaagatgcagataatagtcaaagatgtccccacatcttttgtcttgtttttctgagatttatttatgccatctccttctcttagggaaaccatatgagttg

SEQ ID NO: 459311 - DNA, 493 bp, Homo Sapiens
  misc_feature (453)..(453): n is a, c, g, or t
aacaagaaaaccgcaagtttcctggttaactgtggctccccatccttggattgggctttggatcttaatggctagtcccccaatgtaagaaaagctccgcattccttccttaaagagtggcctgcccctccttaataatccctttgggaggcccccaatccaaaacacttgatgatctaagctttttacaagtctgttttctgttataaacagcaaggacgaggccattttagttgcttgcaagaggttgatgttgagtctgcgccgtaccgactctctccgatctaaattctctaaacattagcttatcaatctgtgagtccaatgggttgagtgccaacagaagtggatccgatttggcatggagaggttctaccaactctcgcagtgtattaccctaatatgataaagcagtgatacaatatgatgaaagacctgcgagtgccattattnccaaagcatattagtatttgtattagaaataccatcatgc

SEQ ID NO: 459312 - DNA, 501 bp, Homo Sapiens
  misc_feature (480)..(480): n is a, c, g, or t
aagagatgttctggccaggtgaaagtggactttatttttaggtgggtttttcagtttagaaaggtttcctttgcttatcccttgaggacttctgtgctgctgcttctcctccatcttgctagttaacagaacaggggcagaagtgacaccaatgctctcggccatgcctgccttgggaagcactaccgggccccactgtttagaatcttagatggaaatgtacacaaggcattgacacacgcctgcggagtgacccagtgcttccctcccatgggactcagggtcagcgtgggaaggcagctggcagggacaggagccccgcccgcaaggtggactgagccttcacttccacacaaaaccagagtcccattttgccccagagcgttcgttttccttcccctttcctttccggttcaattgcaggcttgacaattctttttgaccagaccttgcaacattttcaaaacacaaacccagttntttttggggaattcttattta

SEQ ID NO: 459313 - DNA, 470 bp, Homo Sapiens
  misc_feature (457)..(457): n is a, c, g, or t
ctttgccttctggcatggcttatatcttttaattgaaagttagacatgtactgcgtaataggaactaaggtaaatatgcctatggtgtgaggtttatgttaatcgggctaggagttgggctttgttttatgtttgctgtagctataggtaccagaggcttcaaattcccaaagtacttcttcttagagaagatccatgtctttcagttctttcagctgtaatatcctcttgttatactggagccccgttggtatgatgagaaactgtggaggcggtgaagcattctacaaccttccaattaagtctcagccttttacctgacttgcatctttgacctgtgatcaccgagaatcaaaagggaagtgtttcttcttgtatagtttctcccctcccaattaggtgagggaacgctagagggggctatggtgagatctctgggacaaggctctggtaaagnactttccctctga

SEQ ID NO: 459314 - DNA, 549 bp, Homo Sapiens
  misc_feature (19)..(19): n is a, c, g, or t
  misc_feature (30)..(30): n is a, c, g, or t
  misc_feature (54)..(54): n is a, c, g, or t
  misc_feature (114)..(114): n is a, c, g, or t
  misc_feature (159)..(298): n is a, c, g, or t
  misc_feature (318)..(382): n is a, c, g, or t
  misc_feature (395)..(446): n is a, c, g, or t
ctttttcctaaaaggaaanggtaattatangctacttattttggactttttttntcctttaaaaaattaagatatttacatacagtaaaatttactcttgcaattttatgatgncagtgagttttggataaatgttgttataaacgactgggcatggtnnnnnnnnnnnnnnnnnnnnnnnnnnnnnnnnnnnnnnnnnnnnnnnnnnnnnnnnnnnnnnnnnnnnnnnnnnnnnnnnnnnnnnnnnnnnnnnnnnnnnnnnnnnnnnnnnnnnnnnnnnnnnnnnnnnnnnnnnnnntgcacagaatcacttgaacnnnnnnnnnnnnnnnnnnnnnnnnnnnnnnnnnnnnnnnnnnnnnnnnnnnnnnnnnnnnnnnnnagactccatcccnnnnnnnnnnnnnnnnnnnnnnnnnnnnnnnnnnnnnnnnnnnnnnnnnnnngtatataaccatgtaactactaccacaatctagttacaggacaatttcattcccccaaattccctcttgcctcaccccatccactggcaaccactgacttgat

SEQ ID NO: 459315 - DNA, 570 bp, Homo Sapiens
  misc_feature (11)..(11): n is a, c, g, or t
  misc_feature (35)..(35): n is a, c, g, or t
  misc_feature (435)..(474): n is a, c, g, or t
aagacaacccnagctggtaacccaaccggaccccngagtggcccaccggtagaagtgtacctgcaagtttagcccaattggcccaacccctgaaataaacagcattaataatacctatttatgaatagtaatcctgttaataaaataaggatttatacaaagcaatactggactttttaaacagttagatgcctatgttacttggcacagttagtaatgattgtgtaaagattttagccagtcctagagggacttctttgtatgaaaatatgaagtatctgaatttgttcctagcatttagggtttggtctattgtctcacacacccagctaaggtactgtcttcctattaggtaagtggagctccttgtaaggtgggtattgctaatgtggactgaaacgcctgcctttcacacacaagtactacctatacagnnnnnnnnnnnnnnnnnnnnnnnnnnnnnnnnnnnnnnnnaagtttacttacgtattttcatcaaccatatcaggtctacttatttttttgcccattgtcaataaaagagcaataatgcagcaagttttggggttt

SEQ ID NO: 459316 - DNA, 396 bp, Homo Sapiens
  misc_feature (372)..(372): n is a, c, g, or t
  misc_feature (377)..(377): n is a, c, g, or t
gccttttaccttttactgaaataatgccatgaacttataagaactgacagaaggcattttaggtcaaagagattttgttaatttgatatattgatttgaataaagtatttaggaaaacaattgttccgtcattattcattttcctatgaacctattaatacaaatacgttatgtgtatagttttctttcatccttggaaatacagctgtgggcagactatatagtcccaaaatagcagctgcaatttttcccatcccttataatcttccagaggccttgacatctatggtctcctcctatggaatggccttgaccaggtacaggtccaggtacaggtggatggctgccctggcttttggaggggttggggtnccatnaccaggtttttgggggctc

SEQ ID NO: 459317 - DNA, 508 bp, Homo Sapiens
  misc_feature (51)..(68): n is a, c, g, or t
  misc_feature (212)..(240): n is a, c, g, or t
  misc_feature (259)..(421): n is a, c, g, or t
  misc_feature (452)..(452): n is a, c, g, or t
ttttcctttactcagcaccatttaatgtattaaaaaacagctttatttacnnnnnnnnnnnnnnnnnncttgaaataggaacttcaccgtctcttaagagcgatatatttaatacattcacaagattcgaaatgaaaaacaaacattattcatgctacaggtttttaattttccttggacaacaccaaaaacacagtactcaaacggcatgnnnnnnnnnnnnnnnnnnnnnnnnnnnnngagatggaatttcactctnnnnnnnnnnnnnnnnnnnnnnnnnnnnnnnnnnnnnnnnnnnnnnnnnnnnnnnnnnnnnnnnnnnnnnnnnnnnnnnnnnnnnnnnnnnnnnnnnnnnnnnnnnnnnnnnnnnnnnnnnnnnnnnnnnnnnnnnnnnnnnnnnnnnnnnnnnnnnnnnnnnctcgatttcctgacctcgtggatccatccgncttgggtctcccaaaatgctggggattacagggcatgagccactgtgctcggcctt

SEQ ID NO: 459318 - DNA, 328 bp, Homo Sapiens
  misc_feature (183)..(199): n is a, c, g, or t
  misc_feature (260)..(260): n is a, c, g, or t
gttcaaagtgatttgcctaattcatttaaagcatatttagttttttttaaattgagtgtattttatctagatatttttaaaaggcagcatctaaccttggattttataaatacatctaaatttgttatttccagaatgcttcaaaacagatctctgtagcctcgtgctttgttattgttaggnnnnnnnnnnnnnnnnngagacagggtcttgctctatctggagtgcagtggcacagtcatagctcactgtacccttanactcctaaactcaagtaatcctcccatctcagcctcctgagtagttgggaccacagtcatgcaccagc

SEQ ID NO: 459319 - DNA, 546 bp, Homo Sapiens
aaggggcgagagataagaaatatcagtgctgttggacacccttctaatagtggcatcatgtgccccaggctggcttcggggctctccttctctcccatgctcctaccctgaatgggaaagcactggtcgtggggtgttctggccccagctgtgaggttctgaattcatttgagttgtagagtgggctagcacatgggatgctgattttcctttaatgaccttgccctttccattccctactatggccacagaatgcattgttcccataaggaccaaacaaagacttgtagacgatggtagctcatgtcacccaggcagcaaacacacacctcactggcgtacctgtgttagaaataatttgggatggggagaaggcgtgctgggactctccatgaggttcagagcatgctgctgtcatgctcaccaccagggctggagggagcttgttggagagcacgcttactgcgggccaggcactgcaccagagggcacccgtttggccttaattgacaccgctaatcttggtaaggcctgtccctcgtgcca

SEQ ID NO: 459320 - DNA, 407 bp, Homo Sapiens
ttttttggcttgtctgcagaatagatgaaaagagaaaatatacccagatactttgctcactctcccaagtgcacactaggcaatgtaagctccagaggcagagcttacaggaggggaagggacgctgaggccaagagtgctggctcactggggtggaagggacttcagagggcgttcctcactcctcttattgcaggtgaagaaacagaggcagtggtcctttgccccaggccattcagctggccagtagcggagcccagggctacccagatcctccaatgcccaggctggtcctctttcctttctggaccccaacacatgaagagtccatctgggaaatgtttggctcccacattttcaaaacattaaactcctggttctctttgtccaaatgattaatttggttt

SEQ ID NO: 459321 - DNA, 357 bp, Homo Sapiens
ctggcctcaagcgattttcctgatctcagcctacaaagttgctggagctctagaaaatgcagctgaaccaagcctgcctatcttgtctatgagcagctgattctttgaatctaaagaattgatacaggacttgatacatgtggaataacagaaagaacctggaccgtggagtgagacaggcttagacttgagttctggctacacacttggctgtgccaactcaaggcagctaccttgacattataaggctgattttcttcaactgtaaaatgtcgatgtaggattacatgataacacatgcaaagcctctggtagaacactcagggcagcactgctcatgcttcttagttgccttcc

SEQ ID NO: 459322 - DNA, 268 bp, Homo Sapiens
  misc_feature (55)..(55): n is a, c, g, or t
  misc_feature (71)..(71): n is a, c, g, or t
  misc_feature (82)..(82): n is a, c, g, or t
  misc_feature (181)..(181): n is a, c, g, or t
ggaggggcctggtgggaggtgattggatcatgggggcagacatcccccttgctgntctctcaataatgagnttttatgaganctggtcgtttgaaagtgtgtagcacctcctcctttgctctctttttcctgctggccatgtgaagatgtgcctgctttccccttcgccttccgccatgantgtaagttttctgaggcctctccagaaggagaagcctgtatagcccacagaactatgagttaattaaacctcttttctttataaatt

SEQ ID NO: 459323 - DNA, 525 bp, Homo Sapiens
  misc_feature (464)..(464): n is a, c, g, or t
  misc_feature (474)..(474): n is a, c, g, or t
  misc_feature (496)..(496): n is a, c, g, or t
  misc_feature (511)..(511): n is a, c, g, or t
tgaaagggaacatgtgggctaacaggccacaaatacctttgtaagtacatgccaaggacaaacacatggacgcaaatcctctgagcccttcagggtacttctttatttgtaaactaaggatactgggcatagaatttgaatcaggttcaaagaacacgctcttttgattcatatcaagttcacaatgtatccatttctattcctccactgcattgccatcctccccaaagccgttggtcacctgtgggtggcgggagggagagggcagtttgtagtatttgctgggtcttttttctccccctgggttttgtgtcaactcccaagtgacattctgtagagaagctccccccgcaaccggggcatatgtcccacgccgtccgtctttggaagaggctggtctctagggcatggggcggtagttcacggtgaatttccatcaccagggggatatcacattcccttgnttttattagnaaaggaaaacaggggccatttngggatggggtttttncattgtttcatggg

SEQ ID NO: 459324 - DNA, 569 bp, Homo Sapiens
ttttttttgaatttgcaaccttttactatttgatctcagatttttaaaacttccaatggtgctaccaccaccgcttacctaaatttgtgacacttcccgagcattacctcctgacttaattctcaaccttcccccacccccaccgcaaaataggcacaggaccctcaagctatgaggaaactgttagagaaattgatttgctcaagggaatccaactgagctttttactactatagaatctgtttcctcagactgttatgagaattaagtaacataatgggtgtacggtacttaggcacactgactgacttacaggcaagttttcccagtaaaggattaggccattatggatggttatgagggcagacaaagcctggcaattaaccagtacttctccaagggaaacttgtaagggtaggcagtgtgttatactccctttgcaaataatgggggctgaaggcttcattgtcttttcttacccatggtcacactaccaggaaatgggaaggctacaaataacaggactgtgtagctccaaagggctcaccacctggaggcttgggcccagg

SEQ ID NO: 459325 - DNA, 434 bp, Homo Sapiens
  misc_feature (402)..(402): n is a, c, g, or t
  misc_feature (417)..(417): n is a, c, g, or t
ttttttttgaatttgcaaccttttactatttgacctcagatttttaaaacttccaatggtgctaccaccaccgcttacctaaatttgtgacacttcccgagcattacctcctgacttaattctcaaccttcccccacccccaccgcaaaataggcacaggaccctcaagctatgaggaaactgttagagaaattgatttgctcaagggaatccaactgagctttttactactataggaatctgtttcctcaggactgttatgaggaattaaggtaacataatgggtgtacggtacttaggcacactggactgacttacaggcaagtttttcccaggtaaaggattaggccattatggatgggttatggagggcaggacaaaggcctggcaatttaaccagtnattttttccaagggnaatttgttaagggtagg

SEQ ID NO: 459326 - DNA, 637 bp, Homo Sapiens
  misc_feature (134)..(134): n is a, c, g, or t
  misc_feature (295)..(295): n is a, c, g, or t
  misc_feature (477)..(477): n is a, c, g, or t
  misc_feature (492)..(492): n is a, c, g, or t
  misc_feature (532)..(532): n is a, c, g, or t
  misc_feature (582)..(582): n is a, c, g, or t
  misc_feature (592)..(592): n is a, c, g, or t
gacattttagtaaaacaccaaagtgtatttaaaatatatgtggggtaaaaaaacttgctgcactctagttaacaatgttttaatgcatgttgtttgttaaatatttaaaagttattgttgcaatttttgctagnactatgttaaatgcatgatagtgttgggaagggggtatcaaaatataaaattgttagtttgtgtatataaacaatgcacattaaaacaattgaattgcttccagcatacaacaaactaccttaaaattatgttcaaaatctattaaatatattttcatggnctaatgtcgagtatatgttttcatcaattacattgttattgtattaatcgcggttaaacttgggcatctcttgggcaggatcctatttaatttctgttgccatcaaaatatatttatatgcatgagttttgctataaacctttattttctgctataaagttatatattatgacaaccataantgcaattacaaattnggttggacagctgaataaaagttgttccatgactaatatngtcttcatgcttttgcatatttttaagcagtacactcatccatcaatttncattcatttngatttctgggtcattgcaggccttaatttagctgttttatatgtt

SEQ ID NO: 459327 - DNA, 559 bp, Homo Sapiens
  misc_feature (444)..(444): n is a, c, g, or t
  misc_feature (452)..(452): n is a, c, g, or t
  misc_feature (531)..(531): n is a, c, g, or t
gatttacttaattgttcaatcctagtatgtagttgaccctagaacaacacaggggttaggagcacctatgccccacacaggcaaaaatccatgtagaacttttgcctcctcaaaaactaaactacaaggagcctactgttgagcagaatctgactgataacagtcaattaacacgtatcttgtatgctgtatgtattatatactgtgtccttacaataaagtaagctagagaaaagtcaatgttattaagaaaattataagaaaaagaaaatatatttactattcattaagtgaaaatggatcatcctaaaagtcttcatcctcaccatcctcacattgggtagggtgcagaggaggagaaaggaagagcagttgggccttgcttcttcttcatggggtgggcagaggccaggaaggaaattcttacaaattaagtgggttccntgttgttntaaacccatgttgtttcaaaggttcactgtattttttagggttgtttaacttacctcttcttgtggaaccactttatcngttagggttcttttgccttaagtcttac

SEQ ID NO: 459328 - DNA, 485 bp, Homo Sapiens
  misc_feature (25)..(25): n is a, c, g, or t
  misc_feature (367)..(367): n is a, c, g, or t
  misc_feature (374)..(374): n is a, c, g, or t
aaaaacaatgccttaaaaaattcantgttcatgcttgctgtggctttaatgaattccctgtgattaccattagcaaaaatctgaaattttaaaatgtaggcttacccataggtggtgctacttgatccattaacttcaatatcagagtctgagcttcatctcgaaccttgtctttggcatctcccattctgtctattaaagctacaataaccattgctacataggatttaaagcgtgttgataatctgtccacaaaggcacttaaaatttccaatcccattaatgatacccggtagttgctcgaacccacccagccggtgagcgcgtcgactgtcttgcctaggcggcccaggtcctcctccaggtnccgaagnatgccgggggcgccaaggtagagcaggagctccttgccgacctgcagccggccgccgacgtccttctgttgcacctgggcgcagaagtactccatgctgcggggctccatg

SEQ ID NO: 459329 - DNA, 459 bp, Homo Sapiens
  misc_feature (18)..(18): n is a, c, g, or t
  misc_feature (66)..(66): n is a, c, g, or t
  misc_feature (75)..(75): n is a, c, g, or t
tatggcccactggacaancacccaaacagtcactcctaggaaggcaggttctcacccctaaagaantgtgattanccccagagtaagtagccacaagagggcgggctctgaagtggacatcttactaagtctgtaagtgaaatctgaaccagaagatttaagtggtctctccacagccacccagctcagtcaagaatgtcacaccatccacagcattttcacagcagccacctatgtcaacatcaggaaagtgactatgcaaaacaaataccctgaaaaccgttagaacccaaataggcacaaattgagacctatggcctctagaagcctccactagtctgcacatggcaggtgcctctatccagacaggacaagcaaaggcaaacagtgacagtctttggctgtgctgggccagggatcacagtcctgccatatgtctaaacctctctcccttctttt

SEQ ID NO: 459330 - DNA, 491 bp, Homo Sapiens
ttttttttaatttctaagtcatgttctggtttttgcatgcaaaaacaaaacaaaaccatgattcaaaacactggtggctaggtctaaaggaaaagccagcgagaggcaggtgtctaaagggagcctctcagcatgcaggctctctacgatgagaagggagcatgtgtctctctaagcacattactaagaccccctctggcccagcaagctgatccgtgagcccaggaggccacacccaagctgggagcctcactcatataaggaaagccaagcttttaacaggtatttctgctttaaatttgtggtctccaattgctcctgaggaaggatcaggtctgagcctgtcacaacactcaccagttgcccaacaccaagtacaacaaagttcacaggatggtgggaatgtgggctgcacaaaggaaagatgacctagagcaggaattagtgacatgagaacagagggtactttgccaagccaactgaacagagaa

SEQ ID NO: 459331 - DNA, 340 bp, Homo Sapiens
ggcattttgtctctctccacacaaagctctgttttgattctgaagatgtcagaaagccttcatagtgccagagacaccagcagtagctttcagtgatggcacccacagaacctggcaagagtatcacacgttttagggggcagccacagaggattttgctgacaggctgaaggactaccttgttcacctgaagcacggcctctgtcaagtgtatgatgttatccgtgccataggaacagagcaaggcgtttccctgagggccttccagggtagacaatgccaatactgccccagagtgaacagtcttctctattcgggcacaactatagtgggaaagggt

SEQ ID NO: 459332 - DNA, 456 bp, Homo Sapiens
  misc_feature (29)..(29): n is a, c, g, or t
  misc_feature (47)..(47): n is a, c, g, or t
  misc_feature (54)..(54): n is a, c, g, or t
  misc_feature (78)..(78): n is a, c, g, or t
tcatgggaagggcttggggattttcctcnatgaatggggagcagtgncatgtanctcttaacaaataaaggacacccnatgctgacattgtaaacaactgtacacacacacacatttatgattacaacagcaagagccccaagttgcagccaaccggacctgtgtcacccaacttgccagcccagagacctcccagggaagtccttctccctcccacgactccctttcctcctctgtgccagggtaaccactgggggtaaccagcagggtgtgccacagggctttggtccacattagatagacaaggtatgcatgagccagccaggcacacagcagatgacagtgtgagttctgcttcttaatctggggcctggttcctcactaacttagtcaaagtaatactggctgagggagtgggctgtggtggctgattctgtctgcctagtgagcatctcc

SEQ ID NO: 459333 - DNA, 324 bp, Homo Sapiens
  misc_feature (43)..(43): n is a, c, g, or t
cacatcagttattctgaaattttcagtgttatgatggatgttncagtaattattcttatatatgcacagaacccccagaggacatgactactgaaggctgtgctggcaggatcacaggtaaggatctagcaaattgtcccagcttcattgactgagctttcatccttgttgcactactttgagctgccattttgatcatataataatgatttagtagagctcttttttggttcaacctacctgttcttgtatcagaactgaaatgtttgattttataaatttgaatagtggcacaatatagagttcactattcctcaatatttt

SEQ ID NO: 459334 - DNA, 299 bp, Homo Sapiens
  misc_feature (43)..(55): n is a, c, g, or t
aagtgaacctcattaattaccagctaggtggttggcttgtttnnnnnnnnnnnnnttcttggccaactgttccttccctgaatcctaacaagaagttaaatgctaacagtgcgatgccaggatgtgtgtttgaggcagagagttttgattctgtcaggatctgcaactattttggaacaaaatgaaaagtggggtaggcggaagtggcccaagtggcaaggggtggtctcccaggctatgttagggaagacaagctccagcgggctcccatccatctcaccccaatccccatcccacgc

SEQ ID NO: 459335 - DNA, 475 bp, Homo Sapiens
  misc_feature (30)..(30): n is a, c, g, or t
  misc_feature (63)..(63): n is a, c, g, or t
  misc_feature (93)..(93): n is a, c, g, or t
  misc_feature (102)..(102): n is a, c, g, or t
atctggaacccaccactggaaaaactcaanggcaatgggacatcctcatgccccagaagtgantaaaaggtcccagttgggccaagataatanttttataanaagtatatatgtatgtaacaagagatgttaaaaagatagtctctaaagcacgttgggattcctcccaacgaaaggcaccagataaatgcaagtcattaccaaaaagaaaagtcaagttttccagctttcacatctgcaaagggtaaccactagggtacctcttttttggtggtaagccttcttgtttagaaaaatcttcatgaaagtgactgagttattctgccttgttccttgcttccactttgcataagcttcctggtcagcggccatggataccaggctcagtgacccaataccatcagccttggcaaactgatccgtcctcataagtctgtaccaccacctgccttcagtgcagctggggatgagtccg

SEQ ID NO: 459336 - DNA, 396 bp, Homo Sapiens
tttttattaatttttgtctatttaatctgcacactttttgatgctggagtcccgagtgtgtcagtattactgcccattcccgaatcgaggcacagagatgaaagtgcagcaatcagacataatggttcagtgcagcctgtgtcaatgcttgcacagtagtgtgttaatgagtgttaaaactgacatctcaaatatggcatcctcaattttaaaaattacagctctgtaagaagtcatgctgttaaaacacacaagaaataccagttacgccttcaagtagctaacacacagcctgtacagatcaccactatcccaaagtgcataacaacttattttctttgaaatgcggcaagaattagcagggtagttcaattatttgagtgctaaggataagta

SEQ ID NO: 459337 - DNA, 445 bp, Homo Sapiens
  misc_feature (51)..(51): n is a, c, g, or t
  misc_feature (107)..(107): n is a, c, g, or t
gtaaaaattggaacattaacccaaaaagaactgaaaggcatgggcctaatnattaataatcctccttcaatcctttcctttttgaaaagtgctgaatttcaattccnacacatccccatgtgcccagctattattacatttctgtgtttcaaaaaattttctctgggccaactcggagaaggctggctcctgcccctcattcaaagcaaacagcccgtatgtctccctaaatgttgagcttttactttgaagcttaaatttagtcttgttttttaatgtaaacaaatctgcagattagatggcagaaatgtgtgtctctaggagacagcctatagtgtttctttagctcgttgtgaaaactccatgtttcgcaccgatcatggatttcttactacagtctttctattcttccctccctttttctttcctttttccttcacatgtg

SEQ ID NO: 459338 - DNA, 569 bp, Homo Sapiens
tttaaaaggtaaattctactgttgtaattccgatagtctttttccacaaatatcagaaatatatttatttaattctgtcagatgagctttctaccgatgccatgtcccaaagccatgttaaaataattcccacgttatcattgtgattctacttcctgtcactaaaattgctggagaaacaaaataatgatggaacactatgaacaaaaaggagcatctgaactggtctggttatttagaatccaatgtgttcaaatccttttgttttcttattaagtcagatgctactgtaagtcagataaaattttgtttgcactctgcagtctttgggctcaatgtatgggaaatgtttgcacctatgtaaagtcacaagctaattacaaattgctacagaacaggagtaagctgaaaactgaatgccatgttttgtttataaggtggggaggggagggaaaataccaaaaaactctgttccaagtttggcatttgacattaatgtgaagcagtgggaccatgctgcctgctaaactactgtatgaatcgtaaatgttctgaagacgagcagctgg

SEQ ID NO: 459339 - DNA, 193 bp, Homo Sapiens
  misc_feature (169)..(169): n is a, c, g, or t
ttttttttctcttaatattatattatacttatgtcagtacatttttaaaatgatttttagaagttgtatccaccatatagattatcattaatttcaccattcccatactataatgcatttgactattaaaattgttccactcttataaaatgctaagttttaaaaaaancttttgttttttgagacagggtct

SEQ ID NO: 459340 - DNA, 329 bp, Homo Sapiens
ctcaatggggatttccttgccattgtgtctcaccacccagttattgttgcagcggcagagcgcccaggaagcagagttcttcccaatccattcatgcttcggggctgatttgtaagcaagaccaatggcataccatgtgcttccacttatgaccacttcccaataatgccggccactatcaataaacacatttccagctactccatagctcccctggctggtgaagcgttcaggtgtgtgactcttcttggatgatgactcatcacgttctactgtcaagttatcatgggacaccttcagttttcgatgagcagatttgggatccagtt

SEQ ID NO: 459341 - DNA, 420 bp, Homo Sapiens
ctagaattctgcattatacaggcaaattttctttaaagctagagacttgtgctaaatttgcctgattttcatacagatatgctgtagtaatacagctaccttttcatttcatctttgtgctttggttaacaagcaggctcaagagactgctttgtgtaattaaatgaattgacctaaacatgagctgtcaggtgaatacttaatatttccatgcagatacagaattccatattgtgttcagtaaatttcttttggttcttcacagtgaagaaagaatgtttctaacctaacatttgtaggaaggatactgggaaaattccttccagggaagggaagggaagggaaggatgccattacttgggtgtatttatggatgggatgaccaccaaagctattgttctacccagttattaatttacc

SEQ ID NO: 459342 - DNA, 386 bp, Homo Sapiens
  misc_feature (213)..(297): n is a, c, g, or t
  misc_feature (309)..(309): n is a, c, g, or t
cttacattcagattttaatacactagaatgacagtctttaaaacaagcatgctagcctataatgaatattgtatatacagtaatttaaacacttagaactatatattatactgcaaaagcaaacagcacaacactcatcatactcatcattatctgctgtgtatactacctccaaaaatgaaaatacaaaacagtaaaatgcacctatggttnnnnnnnnnnnnnnnnnnnnnnnnnnnnnnnnnnnnnnnnnnnnnnnnnnnnnnnnnnnnnnnnnnnnnnnnnnnnnnnnnnnnncatacattttanacattttcaaataaatcttcatcattatctccaaaagaaatttatagcaagaatactgaaggaatgaaagtcagatt

SEQ ID NO: 459343 - DNA, 362 bp, Homo Sapiens
aggaaacacaggatgactggcacacgcagagagctcaaggtcttttgtctgcccctcaagcccttctggtgaaccaaatggactcccaccagagtcagcgggtaaacacccttgtacagcttgcaggccagtcattctcaaagagaagcctgtggatcagcagcacaggaagaagaatgtttactatcgcctccacaattcttttgtattttatcagatcctctggccatctttgagaaactgtgcactgtcctacttctgacaatcagattaaaagggcgcgtattaaaggtccctttctgtcttagcagaaacagtattttttcattttacttgtaatcaatcagctttgccccctttcc

SEQ ID NO: 459344 - DNA, 248 bp, Homo Sapiens
atgggttgtcgtgcaggtagagtagttgtttttcagatgaaacaatgcatggactgtcgaattcctaacatcataacttagttatgaatgatttcaaacctagcttcaatgaaccaagctagctacaactgcctcaaaaaaggcatagccagagttccgttaaattgcccaacaaaacccaaagaggtctagcttggtgattctcaaccagggctgatctcaatacacatttttggttttcacaactg

SEQ ID NO: 459345 - DNA, 513 bp, Homo Sapiens
  misc_feature (129)..(166): n is a, c, g, or t
caaaaaacagagggaacctggcagtggaattggggccccgggctcttggctccctgttttccttcaatgtcccagatttatttgttttccaggcttggatgatgatacatatttaagtccttaggtttnnnnnnnnnnnnnnnnnnnnnnnnnnnnnnnnnnnnnncaaccacccacagaaatccctctactctgtccttcagaaaggacaacagggtatggggccggagtagggtggagtagaaaaacagcttacactcactgcctttagataagaggtaactgatggtaaaatgccaagcaggcagaaagaggggccgtaagacacttcttgtctaacgttttgccctccctccactgttgtcactctgtgtagaatcctggctggcaaggctggcttggatggatacttatgcttagacctcacacaattgatttgcttagggctaggtgccaggcttctcttccagcccataaacaactaatcaaattaatggatgctgctgctggttc

SEQ ID NO: 459346 - DNA, 516 bp, Homo Sapiens
  misc_feature (477)..(477): n is a, c, g, or t
  misc_feature (484)..(484): n is a, c, g, or t
  misc_feature (495)..(495): n is a, c, g, or t
ccttgttataaaaagtttattgtaaatagacaagttatagttgtatgtatttatagagtacaaaatgatgctatgattttgtaatacaaatgtggaataattaaatcaagctaattaacatatccatcctcacaaacatttatcatatatcctgagagaggcactagatatacaggattgagccatacaaataactagagggaaagatacacttaaaactcataatgacacaaataatgacttaattatagctatagaaaggactacctttttttgaaggtagactgttataaaaacaaatgcaatcttccctgccttaggcaaagcattattctttgggcattatttcagttgggttttttgtgcaggagcatccttagggtctgtgggattcgggctttattcaatcactgagtgactcctaccaaaatccagcggtgttcccgttggcccgcccccagcgttagggcccgtttntcggggncagctcctccngtgtgggggtggggttgggca

SEQ ID NO: 459347 - DNA, 448 bp, Homo Sapiens
  misc_feature (77)..(77): n is a, c, g, or t
gggaattcaaaccttgtgtaataggtgaaaataaaggtttgaggttccttttccttcctatagggatacccaatagnccccagtatgattagttgaaaagattgtcctttcccatagaattatccttggcacttgtgccaacaatcaattgaccatatgtgtctatatgtagactttccatatgctctcccactggactatatgattgtatgttggccgattccatgtcttgattattgtagctttttagttaagtattgaaattgcacagtgtaagttatccaactttgttcataggtcttttgtgttttcacatacattttacaatcagattgttaatttctatttttaaaaaaagcttgcttggatttcaattgggattatattgaatctgtagatcaatttagggagaattacatattaacaacattgagtctttcaatccatg

SEQ ID NO: 459348 - DNA, 500 bp, Homo Sapiens
  misc_feature (404)..(404): n is a, c, g, or t
  misc_feature (418)..(418): n is a, c, g, or t
  misc_feature (431)..(431): n is a, c, g, or t
  misc_feature (436)..(436): n is a, c, g, or t
  misc_feature (454)..(454): n is a, c, g, or t
  misc_feature (466)..(466): n is a, c, g, or t
attgatgtttaacctgtatacaaccatacccattttaaagtgtacagacaaatgaattttgacaaattcattcactcatctaatcatcactataaccatgatacagatttttatcactccaaaagtccatcctgtgctcttttcaagtccatcctcctcatctgataccccaagccaccattgttttgctttctgtaactacagttttgtgtttttagaatttcatatatgttgaatcataccatttgtaattttggggtctgacgtctttcactcagaataatgtatttgaggatttatctacattttgcatggtatccagggggttattttatacccaaggcgggggggtctattatggtaaataagggggacccaccaatttggtttggtcagggtaaccnggttggttgggacnctggggggctggnttccntttttgggggctggctanggcataagggcnggctatgggatggcctttttggggggggccccat

SEQ ID NO: 459349 - DNA, 456 bp, Homo Sapiens
ggggggaaaaaaggtaaacctttatttggaaaaagagtttaaataacaatttaaaaccccatttcactttcaaaacagaaacaagaaagcaaggaaaagataatctatcaagcatctgccctctgctgtggttagccattttaaagctgcatttcccagcagaagagaacagtgatgggccctagtcctaggaacccacagggcactgtcttgagacccttttaggcagtgtccagggaacagacagacagaatgaatggtggggtgtagacagacctggggctcagacaggcacatgcccagtacccaggaaacaaagtttgaaaatatatacacatagaaaaataaattccctagaacctaggcatggaaagcttctaaccatggaatgcagcagcacaatgcaaactgggtctttggctttcaaaaaaaggaaagaaccttaacccctggctt

SEQ ID NO: 459350 - DNA, 725 bp, Homo Sapiens
  misc_feature (685)..(685): n is a, c, g, or t
gcaagtgttacctttatttatttcatatatgtatatttccagaaggacaacggttgactggtattaagaccaaaccagtccatcagaatatcatcgaccaaaatgagaatttccctgttgggccattagggttggagtcttattaaccctcccctattcctcgggcccataatgcattatgagatagaggagaagaaaccaggcacagaagactctccctgtcatgctttaaccccataccctgtgctccacttatggaggacgtctccccagttcttgccactcccacaatcagagaaggtgaggttcataattatttcaggcctcatcttccaagggaacctttaactgggcaacagagattggttgggccatcatgagatgctactttctagctctatgaacataaaatcacgtaagaaaaaagcaaacaacacaaatacatgaaagccatttactcctggtgaattcctcagggtcccaggttcaacactttccgtgatgtcagagtactcagtcagggatgatggggacagggtgtcagaacagtcttgatggtcttgccagcaacagctttttcttattttccataatttggtcttagtcgttctccagttgtcttcatgtaaataaagtggcccatggcaatcatgattctgtaattgttatagtgcctttgtaagtngacagtttccaaatccccttactcatacgacccctgtgaa

SEQ ID NO: 459351 - DNA, 445 bp, Homo Sapiens
  misc_feature (40)..(40): n is a, c, g, or t
  misc_feature (48)..(48): n is a, c, g, or t
  misc_feature (85)..(85): n is a, c, g, or t
aatggaattaaaacaggaggaacaaaaccctttaaacccngcccacantaagaacaaaaatccccataaaaaagcttgtaaacantattttgcccaacaactccttagaagaaaacgcatttggccaaaggacctagaagtaaacaccaaagttaggtagttgtgaaaatcatctggcaggggcaggaaggtcattggaggacccacgcctcccctgctgtgggtgaggccacctgccagcactggagggccaccgtgctggggcctgggcccaaggaggtgtgtgttgcttggctctgtggtgtcaaggccctgaccttccagtgcacctccaccagtggccaatggggatacccgggggccttggctctctggccctgctgcttccaaatttgtcaatgcagttacccagccctgagccggttaatgtttgtgacaagctcct

SEQ ID NO: 459352 - DNA, 425 bp, Homo Sapiens
  misc_feature (407)..(407): n is a, c, g, or t
accccacaaagtagaggtataaaggggttttgactaagcaagtgtcgtttgctccctggaggatgtgtcagctcttgcttcttttcaattgcttaagagttaaaaacgattactgtggtctcagaggacagacaccagcactgtgagctggatctcacccacagatgtgttcggcttgacccacatagttgtatacgcatatgtcagtttgttgcaacatacaaaaactggggggtttcacataaaaatctgcattttcaatttcttttttttaactgccaaatctgacaacactgtgtcttccctgcttcccctgtgggaaacagtctgcctgactggggtaacagtgggctccctgggtaccccacagtttaccagggccccacctgggcccactttccttccantcctgttttgttttccta

SEQ ID NO: 459353 - DNA, 389 bp, Homo Sapiens
  misc_feature (250)..(250): n is a, c, g, or t
  misc_feature (262)..(262): n is a, c, g, or t
  misc_feature (300)..(300): n is a, c, g, or t
  misc_feature (320)..(320): n is a, c, g, or t
  misc_feature (350)..(350): n is a, c, g, or t
  misc_feature (359)..(359): n is a, c, g, or t
aagagacatcatggaaaaagaaattttattaatgtcttttactattcactataaagtagcaaatacgttactaagtatagcttccttctgatattaaaatactaaaatttatcctgtaaaactaaagcacagttccatttaaaggataaatttcacataattcaacaagttgaaaataatactgatagtgttatattctttgtaaagccacagatacagtatatatatatatctcccaaaataaacagantatattccaaangatataatagttttataaaactagtttcccaatattanggctaaatatttatataatngggccatatggacttgggaactaaaagggntactaacanttatccatcccggccattcctttcacacat

SEQ ID NO: 459354 - DNA, 422 bp, Homo Sapiens
  misc_feature (25)..(25): n is a, c, g, or t
  misc_feature (31)..(31): n is a, c, g, or t
  misc_feature (43)..(43): n is a, c, g, or t
  misc_feature (57)..(57): n is a, c, g, or t
  misc_feature (137)..(163): n is a, c, g, or t
gggggtgcctgccaatgtcctgtcncctggncctgagtgccantgccaggggtgtantccattcctgtgaaaattccagtgaagccctgcacatatgatttgtgcatttttccagtatgcatgcctatatttcaatnnnnnnnnnnnnnnnnnnnnnnnnnnntagtcttcctctacacaccacacacttaaccacaacaccattcttccaataaatagaaaatgacagagccaagctgaaatgcaggtgctgatcttgctcattagtaagtaactaatgccaacacaccacattttagttattttcctttttgatagtgacaaatgactgcatatcactgcaaatagctgaactctggttgttgaattttcaaaatcaagagtcttatcccagccatctggttaatgaggcaggggtgctg

SEQ ID NO: 459355 - DNA, 494 bp, Homo Sapiens
  misc_feature (16)..(16): n is a, c, g, or t
  misc_feature (30)..(30): n is a, c, g, or t
aactccgggggccccntttagggagggcanccaacattaaagtccaccctcaaagacttttggttatttggccttatatccctcccccctgcactttccaagccttaacccaagccctggcaattagttactattttcagactaggtgctgaatgagcagcaggtgcccccccaaaaccccaagggagaatgctggagcattcaattggaatctgtgtgtgggaaccatttttagaatatttaactgtgaaagaatccagattctaaaatgaaatttcaattcattatgcttgaatataggtatcatgagttcactgtcaaattcttttgtgaattaagtttcactgaagaaaagagacattgcgtattagctcctcagtgacttttagaaacaccaaaatgtgcaacaattcttaatctagcattaggtggcgtaaagactagtacgtcaattatttgtgagaaatggctttctgggtttgtaccaataaccc

SEQ ID NO: 459356 - DNA, 451 bp, Homo Sapiens
aaaggccttcggggcggttcccgggaaagcccatgtggcttcctgtgcacgtggaacaaccaatgcggccggttcccccagtgaaagacgggagtcgggggacaggagggtggcagaggctctcccaccctgggaacccgaatccaaaaagcaaaggtacgaccctgagctctgggcaactgcttgatttttagcgtatccgacgcctctaggagagggagaatcgtgccccccaatgatcacgtggacaccagaatcttccagcttcactctccatttttcaatgatagccccagacttgtccttcaaagtcctgttgcaaaacagacctcaaacattcgtccagccatggttcagcgttgtggactgggaggataatagacacgtggcctgcatggcctggctctcctcggacgccccgcccacgccgtccgctcatcccccgcttcgg

SEQ ID NO: 459357 - DNA, 490 bp, Homo Sapiens
  misc_feature (16)..(16): n is a, c, g, or t
  misc_feature (24)..(24): n is a, c, g, or t
cctgctccggccgtcnaacctggntgaacccaaacgtgtgtaatcgttcgggtgaaagttaagggggatctctccctcaactctgcaaaccaatgatgcctcgaacgggtgctgaaacggcagcctccgtgttgcagcctccacccgctggggcatcatgacgtcatccgaatccaaaaagcaaaggtacgaccctgagctctgggcaactgcttgatttttagcgtatccgacgcctctaggagagggagaatcgtgccccccaatgatcacgtggacaccagaatcttccagcttcactctccatttttcaatgatagccccagacttgtccttactggcatcattgaaaacagacagctccatggtaccttcaaagtcctgttgcaaaacagacctcaaacattcgtccagccatggttcagcgttgtggactgggaggataatagacacgtggcctgcatggcctggctctcctcggacgccccgc

SEQ ID NO: 459358 - DNA, 485 bp, Homo Sapiens
  misc_feature (188)..(188): n is a, c, g, or t
  misc_feature (440)..(440): n is a, c, g, or t
  misc_feature (447)..(447): n is a, c, g, or t
agaatgttaatggacgtctttattctagtaacccgaactggaaactacagcatcgaaacaatctcggtgcagtcacagaaggatgagcaaacagtaaggagccaccaatacacagccaccaatacacaagctgtaacgcatgaccatccggctgagtggaaagagaaacacgagggcacagcgtcggntttcacgtacgcatgaaattcaagagctggcaacagaagccctggggcttccaagtcagggcagtggctgccgtggggaccggagccgggagcatgcaggccgttccgagggacagaagtctctgcaccttgactggggtgtgagttacacaggcgtgtgagctgttcaaaacacacattattccatgttgtacacaattttcacacggaaatcctggcatttcattgcttgtaatttttacctcatttttnccaaacntgattaaattttattgagttgcaacaacgcggttgggc

SEQ ID NO: 459359 - DNA, 578 bp, Homo Sapiens
  misc_feature (27)..(27): n is a, c, g, or t
aagttaacccaaaaagccttttccgtnccttaacggtttggtcaaaatttccccaggaaatatgaactttccgaggaaccctctgatgtcgggcccccatcaaaacatcaggaaaaataacaaaaactgccatttcctccccaggaggaatgaggaagaggtgggttgtccccagttaaagcaaagctggggttactccaagggttgcactgtcccaggctggctgaagagttgtcatggagaaaggggcccagctggggcttcagactatgtcttggggcctcttccctaaaatgggtctttgtgtctgcatgcacatgtgagtctttatgagttgttgaaacttttctggaagttggtgggtttctgtaatgctggatcatggacttgtgccctcttgcagttgggaaagtcattactaaaaataaagctgggttttgccttatttggagaggactggcctgcatcgtctctctcttcctatgttgccttttagagcaagttgaagggctttatcatgaaaaaagagtggtttttaaaagtatagaccaaatcctatggcaagatttttagagact

SEQ ID NO: 459360 - DNA, 124 bp, Homo Sapiens
  misc_feature (83)..(83): n is a, c, g, or t
acataaatcgaggcttttatttacatcataggacaagaaaaggatacaaaagaagtctcttggtcaagcacatcaagcgaaantctaaaactcaatactcagtaaggtgtgggcactgatattg

SEQ ID NO: 459361 - DNA, 450 bp, Homo Sapiens
  misc_feature (35)..(35): n is a, c, g, or t
  misc_feature (51)..(51): n is a, c, g, or t
ttgaaaggaaggggaaaaaaggaacaaaacagccncgcctaagtacagggnccttaaaagaaaacacggttcttaaagccctttgtcctctgtctatctgtagcacaggataatgaaaatggatacgtgttgcctgttgttcctatgtaaatgctacctcgaggacacagtcttcaccaggcagatggctaatttctttgctctaacctcatttctccagtattccggtgttcctgtgacgtcctgctcctggagtcaggtcctaattgttgtcaagcgttcagagacaaaagtggtgtctacacatcattcatgtgaaggctgttactggctatgaactgtagttgtggtggcagcagcagtgactgcagtggctgcaacacaaaccttatggcaggtagtacctgctggtgtggggctgctcagaacctgcctttctgcttccaagtg

SEQ ID NO: 459362 - DNA, 401 bp, Homo Sapiens
cacaattacaatatagcatgctgtttattttagcttttacaacaaagcgagggtttaaggagcctgagaagaatttcacaactattgactatacagagtcttcaattccaaaaacagttaatagtaacttggtggcacatacaacatgcattgaatactctgtattattcagtaactaaataggatcctgcatcattctcttcacagttcacaatcatacattcattctcttttacctgaaacagtccattaatattaaggtgcaaagatcttgggacaaaaaccaagaaagaaaacctcatgtccttatttttactaatgtatagctgatgatttctgtgatgagctgtaaatttaaaagcgtgactctcatttgaataactgtagagtaagcaaaccag

SEQ ID NO: 459363 - DNA, 458 bp, Homo Sapiens
  misc_feature (19)..(19): n is a, c, g, or t
  misc_feature (29)..(29): n is a, c, g, or t
  misc_feature (34)..(34): n is a, c, g, or t
  misc_feature (90)..(90): n is a, c, g, or t
gggccctgaaagaagagangaaccattangaaangaatgtgtgtggggctgtggcaagcccatggtcttcaccaccacagcacagccccnggttttatttttgtgtagggacaacacagtgtaagtgcaaaatagccctggagatgaggcaacatgattcctgaagtaactgaaacctctgggcgtcagcatgctcttctgtacaagagaggtgatgactgtggctgccctcagtagggttgtcttgagagagcactgaggggctgtgcacaaagtctttgggacagtggcctggcccatgcatgggtccctgactggcttgatcgctctggagaggtctcccgctttccatgggagcaagttttctcatctataaaacaaaggatttcaatatgtcagtggccttaacttttctgagtagaaatggctttgagaagtcagtgaatgctttggtagcc

SEQ ID NO: 459364 - DNA, 445 bp, Homo Sapiens
  misc_feature (247)..(247): n is a, c, g, or t
  misc_feature (389)..(389): n is a, c, g, or t
  misc_feature (398)..(398): n is a, c, g, or t
  misc_feature (403)..(403): n is a, c, g, or t
  misc_feature (429)..(429): n is a, c, g, or t
cctagcagaacacttcccacattgcactataatttctgtttttatgtctgtgtcccttatgctttgtgaggttaagggttttttaccagtcattattcctatttgctctgtgcacaggacaaatgattggacacagagggcctacaatcctataatattgcagggttgggaaggatgcaggaaaacagggcattctcttatgccttttgtgggaagggatcaattgggtgcatgcacttttaggggnacaatttgggcagtagctgttcaaatttcaaatttcagttcaggcaaaatattttttggaaaatttattctataggataccccacacatattacaaataaataaatttcagggctatttcactggaggccttgttttatatnggcccaggntgganttaattctaaaatttcttccctaggngggttttgttttaatt

SEQ ID NO: 459365 - DNA, 510 bp, Homo Sapiens
  misc_feature (322)..(322): n is a, c, g, or t
  misc_feature (366)..(366): n is a, c, g, or t
  misc_feature (416)..(416): n is a, c, g, or t
  misc_feature (424)..(424): n is a, c, g, or t
  misc_feature (440)..(440): n is a, c, g, or t
  misc_feature (453)..(453): n is a, c, g, or t
  misc_feature (468)..(468): n is a, c, g, or t
taatgactgagaaaacttgtttacagctccagcatataaggaaagtgttcaaggccagatatgcctcagatatttaaccagtaagccttagttgtacataaatacttttgtgtcaacaaaaactttcagctctcacagaagacagttactcaacattttttgatgtgccacagtttcgagtttttcgatatttaaattttttggcttttcatctaagtttgggtttgtattttttccttctaaactcttcatgtggcagagtcttctatgttttcacagctttttcattacagaaaagaacacttgctcttctgtgattatngtcatgtattagggctaaatgctgtgttgtctcccacctggggnctgaattgcttggtgggaaccataaggcttttcactgtttgtggcaaaanggcattantttccttataaggaanggcttttaaaggncattggagggtaggncccttttaatccccattttccggcttcatggggcaccttttt

SEQ ID NO: 459366 - DNA, 574 bp, Homo Sapiens
  misc_feature (181)..(181): n is a, c, g, or t
  misc_feature (537)..(537): n is a, c, g, or t
  misc_feature (552)..(552): n is a, c, g, or t
gtgtttttaaagccaatagaatgtttcattattgttagcttcactgaattttattattccttaactattttactctcttgtaggagatctatgcttgtgaattagctaagagatctggagtagctaattacataaatttttatgtatattcatgtcagtgtataggtgacatttgcgacanaagttctaggtcattgttttggaaactatcccagttcgtgtaacatatatccatcccattcaggaagcatctgggtatgtagctgcatggcagccctctccatgccctcttgtaaaaatcccttaatggtgcattatcagttgtgttataggaaacctgcttaaaaggtttcatgaatcataaaacattatgaaggctattaaatttttaaaatagtatttgggaaagggggaagtccccaggaaatcctggatcttttccaacttccctctctactaaaatctttttggaagggacctaatgtttttcataaccggggctggagggaggacttctggacttggttttggctaccnggtctgggaattccncatggtccaggttctctggatc

SEQ ID NO: 459367 - DNA, 452 bp, Homo Sapiens
ttttttttcttcttgtttttgtgttataattttatcttgcttgtccctcttctctaattttaatctcagtattcttttcatatctagttggattcttcagggcttctttttctgacttctattcccagtctgcatgcctaacttgagtgatctttcatttccttttcttcaactttttaccttctctacttttccattctcagttctcaccatcccccacatgaactctaggctctagtcatagttgttctctaatacttcctgttccttcaggactgcatgtctttgttcatgttctttctttcatttggattgcccctttcatctttggcttcctgataaatagcttaaaaatcaccttaactgagtggctcagatactcatctgctgctgcttttgtgctcttgtgagtctctgcatcacctaccatattcttttgtaacggacttctc

SEQ ID NO: 459368 - DNA, 463 bp, Homo Sapiens
  misc_feature (45)..(45): n is a, c, g, or t
ctcctcaattcctcaccccttggctcctcctgtcccctttccccnctttccctcaggctgccgagatattttaaacttgaaagatcatcttcaaagtgtagggttaattcccattactttcagtgtacaaatacacacatctccaaagaacattcaattaagccaacaaacaaaagccaaatggtacttttagctagaggcaatacttaagaagatggcattgaccttcaggaaattatctatcagaatagagagaaccatcagtctgtgctttctcaacctcaaagccatcccagagtagtgaaagaatggttcacaagaggaggacttgcagctcctggtcactggtatactgacaattggattaaactagaggagaggatgcagacaggcctcagaaccaccagctacttcacaggcagatgccccttcagtgtgtgtagacaccagccatacttctggg

SEQ ID NO: 459369 - DNA, 431 bp, Homo Sapiens
aaataaaggctgccccattcccccaactggaaaactggaaacaacagggcctaagcaggggccaaatacgttttctaatccaaaacactgcagttttgcaagaactagagaatgggcatgacttggcaagagggtacacagcgagtcagaggcagagctgggactgagctcgtggggtcccaggctcctagggcagtgctcccggggttctgtcccggggtcctgtccgtgggtctgagctgtgtgtgtgctgagctctctcaggcagagaggccaagcccaacccgaggacaggggaggggttggcagagatatccctgaaaaggaagagccttgccagggagaagaatcacttagggaccccacggcccctcctacgttgagggctgacagcatctaagtgcagagagcgccttcagagccgaggacac

SEQ ID NO: 459370 - DNA, 548 bp, Homo Sapiens
cattctctaatttatacacacttaagtttatttaaatatcacacatttgtaccataagaatgcgttttaacaagtgattttttattctttagccacaattctcccacatttttacattatcccttttttccatattttttaaacattagatacataatttgttagaagttaaaagggaaaaacatttttttctgaatcatatcacattatatttagcttaaagattattaactttttgaatatcaaaaattgaagctgctgggaatcacatttatttgtaggtcccaaaatagccctgaggtctgaataggaaaatatcttttataaactataacaaaactctcacctcaaaataaaacactatgaaatttacacagttatatctgtactcagtatctttacaatatccagaaacctactggattattagaaatgacaatgcaaataggtttacattcagaaaaaaagagagcttatactaagaggacctaacttgaaacctggcaccctgtgcaggaatctgttcaatccttagaacggtcataaag

SEQ ID NO: 459371 - DNA, 280 bp, Homo Sapiens
caatccatgcaaaatgaacactagatcttcctgaattacttcacataaaactgttttctggattttaataatttattttgataatctcttttctcaattcccctgactttgatgatgcaaacatagcatcagtgggggtagtggatagggtggggtgggaaggaagtaggagaggactgatggtagatatgttcaacttgctttttttccagaatgtgctagtaatgtccaagggaagttccaggcaaatcccagaaactagttccctttccagcctttc

SEQ ID NO: 459372 - DNA, 400 bp, Homo Sapiens
  misc_feature (304)..(318): n is a, c, g, or t
gttgttgtagttttgttttttacataattaaacagaaaaaacatggttacagtcaagcttcacaaacattacagactcacttggagttatggaacaagtaagccatgaagtcttctaccttttagtaaaaggtcctccggagaaggaagtttccaggcctgcggaagtggtggagccaccgtccggctccagagcgctaagtgtgtgctttatgatacagcagggcacaaaaccttctgtctcccagcgaccgctggaaccttgccgcagccgtggctgagctttaggagagagatgcatcgcnnnnnnnnnnnnnnncctttaaaaaacggttttcccccaccagagtcgtgggttattataccccatttcatagtttccagcagtttctgacatctgt

SEQ ID NO: 459373 - DNA, 405 bp, Homo Sapiens
  misc_feature (370)..(371): n is a, c, g, or t
ggtcggggcgatccgcctggtgagagcaacaatgtcaaacaccgcccccgcgatcccccgcatccgccctaaccccacgcccggacgtccacaccagctcctatagggagcccgccttgatgcccacacggggagacccgagacaccgccccttttctctacgtgacgtggtgaattcgacctccagctgtggaagtgaagggacaagcgaagattagaaaggcccgcaccgaggcgcgttcgttccttaggggatttgcaaagaatgggcaaaagtagggcatgtgcaactgcgtacttgtggttggccgaagcccctgtgttccctgtgaagccccggagacgccccttctacctgccgctcagcctnngccactgcgagtcccgctcagggccaggactctg

SEQ ID NO: 459374 - DNA, 410 bp, Homo Sapiens
agttcaaaaatgcattttattaatgataaaataagagattacaaatcaggaaattaaagtcatggcatgggatgtgtcaatgcatttccatgccataatgttgagtctctaggcaggtgcagaccacagaggactgtgaggtttcaccaataaacctccctagagttcagctaccaatgaggttaataccgctactaaataacatgaacatctgcaaaagattcagagatataatgatgtttgcactcagctttgcatcgaataaataatgccatttctatgttaaatccttcccttgtcaccatagatcttccaatcaaacaaagagtataccatctaccaacataggtccttagtccttcgtaaactactatgttaattcaggttcttaagatttagtcaggcatttg

SEQ ID NO: 459375 - DNA, 502 bp, Homo Sapiens
  misc_feature (67)..(67): n is a, c, g, or t
cccctctcccttcccactcacactcctctgtccccagctttctcaaactctgtttgtggccaaagangctcccatccagcaaaaacaagagcagccacaggctgtttttatgtagcactgctgaccatttgccttggcattggaggcgtaagagccatcgtctgtccactgggtgcttttggccttcaggagtatggatcacaaaaaacgatgtctttttttaactggtaagtagcactggcaaaggtagaagggactctttacttccttgcagcaaattctgcctccttgaccttactgcagtttatagcaatgaatgctgattccattcctgtacacagtgcgggggctggtgacaagatggacagagactccactgggcaaccagacagctggcagaatcctggctctgtcacttaggagttttatggtctttggcaagttccttaattcctcagagccccaggttcctcattcacaaagtgggaatatcttggagagc

SEQ ID NO: 459376 - DNA, 415 bp, Homo Sapiens
  misc_feature (315)..(315): n is a, c, g, or t
  misc_feature (339)..(339): n is a, c, g, or t
  misc_feature (366)..(366): n is a, c, g, or t
atctgatgattttttactttaaagagcagcttcattaaggtataatttacatacatagtttgatgaagttttaaaaagtgtatacacccagataaccaccacgacaatcaagccatggcaatcaagctatagaacactgccattggccccttgaggccccttgctgtctcttcgcctccgttcctcctcttcacgttggggcaaccatcagttcaattttttttcgtcctcgggactagttttgcctattctacctaggaagtgggaattgctggggtcatatggggcaatcatatgttttaacgttctaagggnaattcccaaactggatttttcaangtaggcttttggccattttttacaggntcctacccaggcaatgttttccccattttccagtgggggcttcccacat

SEQ ID NO: 459377 - DNA, 542 bp, Homo Sapiens
cctcgtgccatgtttttgtattttgataaaattttagcatacagtctatcctcattatttgtggattctgtatttatgaattcacctacttactaaaatttgtctgtagccctcaaattaatacttacaatgcttttgtggtctttggaagacatgacattttttcacgtgaaaaattttagttgcctgatgcacatgttctcaactgaagtcaaacaaggtgacactgccttcttgtcaactctcatattgtaagcaaatgtcatttttgcagtctttggtgctacatttttctcatctttgtgctttttgtcggtgattccactgtttgagatagcccccaagcatagtgctgaggtgcttctaaatgcaagaagattgtgatttgtcttatgggagaaaatatgtgtgttaggttaagctttgtttagggcatgagttccagtatttaatggaattactaatgtatattcagtaagtgcctttaaacataaacacacataaaacatgattatgtattgattggttgacaagaatgtgcc

SEQ ID NO: 459378 - DNA, 595 bp, Homo Sapiens
  misc_feature (61)..(61): n is a, c, g, or t
  misc_feature (209)..(209): n is a, c, g, or t
acttccctaaaaagtcagggtcccaaaggctttcctttcaggttgccaaacctgctaaaanggctcataaaactcaaaagcccacttgattgacgatcagggtttactacaaggttaacaagtgaacaaagagttacataggtcttgagatctcgaagggtcccgagccacaggagcgtttggaccccttggagttgggatgtgcaccncccaccatgtggatgtgtttaccaactacccaatctctcctgaactcccgtcattaaagaggttgaatgacatcagaatgattgattgaatcatccgccgttagtgattagccaagtctcaagcctctctcccctctctggatgttggtgaggtcggggagtggggactgaaaattccatattccagagatcacaggggtcttaggagctgtgtgtactaatgacacctgggtaaactcaaatagaaatcaatggtggcttctaagactgcccagagcagacttacacttctcaaagtgtagtccttggtccagcatcagcagtagcaactgagcctttgttagaaatgcaaattctaagacccagccacggacctgctgcagcta

SEQ ID NO: 459379 - DNA, 450 bp, Homo Sapiens
  misc_feature (58)..(58): n is a, c, g, or t
  misc_feature (80)..(80): n is a, c, g, or t
  misc_feature (85)..(85): n is a, c, g, or t
  misc_feature (118)..(118): n is a, c, g, or t
gtttagggaatggggggaaggatgttaaatgaccctgctttaaacctctaaagagaancaatggttcccctttgtgtttnaaaanctggaacaataacagggtgtaatagatggtgancaactttctcaaaaatccacccccattccccaggccaactgccccagcagcccctggggatctgctggtgtcagagggaactcgctcatttcctccctcagtcccaggccacactttcctccaaaggaaggccggtctgtgggcccagggtgaggctgcctgcccaccgcagacggaaggcttcccaaccctctccaggtggctgtggtagggccatctcccctgagtacagtgaagcctttgtgctttgccattgctgtcccttcaaggttgttgcctgtccctgtcctcagagatgtggaggcagacaggccctggaggcagaaggaagg

SEQ ID NO: 459380 - DNA, 467 bp, Homo Sapiens
  misc_feature (423)..(423): n is a, c, g, or t
agcattttctcttagacaaagtatataaagcctcttactcttggaatgaccttcattagtttctttcctgtttggtgagcttcatatttgcagagatcttgaaaattagtaagggcatataagaaagaaaaatatctcaaaattatggacagaattacaatataatctgacaggccaaagtcacactaatatttagggaacaagctgccttgattatttattcccttcgacttttaaatactcttcaattttacactaataaaacattttttggaagatagtatttgccttgtattttataagtaatgtaggaacaagaaggaaagaaaaatgaggggggttattttttcactgtacatgggtcagtgtgatcagtcacatttatagggcagaagcaatataggggactataaaaatgtaacngtgtttccactctatccggcataattactcagttactcccctta

SEQ ID NO: 459381 - DNA, 418 bp, Homo Sapiens
ttttttttaaattgatttctttaaaaaccatcgtatctaatcagacttctttgcttttattgttaatgctattacccactgctctaggcaacactgaagagggaataatcaatcttaagctctgggcatttgattcatacaaattaaattctgcaaactataatttataaatatcttattgacctgctcatgaaaaactattgaaaattttaatgcaaatatttcaaagcaaatttaatagtatcctaaactgagttaagtaatcttcactttatataaataagggaaaatcttgtggggtaattcagggcatactgcattatcgtaggtactacccttccttcaccgcatcatataccttcctattaaagctactactttttccaactggggtaaccaaaaatttctctcttcattt

SEQ ID NO: 459382 - DNA, 299 bp, Homo Sapiens
agaaccctctattttgcatcatatcatttcctgtcccataattgtactggaatagaaagagtgacccgctcttgctcttggtaaaaatatagagtggtcagtagccttatgcacctaattccaaaggtggaatatagttctgtcagggcttttacgtaaacctccacttgtacatgcaatttggacagttatgtgttgagggaaatacagtttggtaccttgtttatttcaaatatcagaaaaacccagaggtgatcatttgctcatgaagatgcttataaatggttgcttaacccaaa

SEQ ID NO: 459383 - DNA, 491 bp, Homo Sapiens
  misc_feature (31)..(31): n is a, c, g, or t
  misc_feature (45)..(45): n is a, c, g, or t
ctcacaatgggacactttgaccaggctggcntcgaactcctgggnctacacaatcctcccacctcggcgtcgaagtagctgggactacaggtactcaccactatggctggcagttttttaaatttgcgtttttaaaaattgtttattatttattgaatattttctacctgagattgacttaatctgtggatatggaacctatagatatggagggctggctgtatatgaatttgtttttggcttttacaaaattagaaattaaaagtaactacagttactataatgtgcagaatgactcaaatatttccatttattatgttagtgtaaaaactcctaactacgtatttataatattttatattaatgaagtactttagcatacattatgagcctgaataaagctttttattggatattcacaagattgaaggagaaattctttatagttaggaaacgattttttcataaacaataaatagctttgaaaatat

SEQ ID NO: 459384 - DNA, 767 bp, Homo Sapiens
  misc_feature (19)..(19): n is a, c, g, or t
  misc_feature (25)..(25): n is a, c, g, or t
  misc_feature (88)..(88): n is a, c, g, or t
  misc_feature (119)..(119): n is a, c, g, or t
  misc_feature (592)..(592): n is a, c, g, or t
aggaaacctgtacctaacncccccnatgtcaacccctgcctcctccaccccccccagcctccaggtaaaggggaaccgccagggaaanggctgaaagaagttgccttagctgcgggaanccactgaaattagggtgtcccctcagcccctcccattccccaactggaagcccagtagttccacttaagtgtatatagcagagcctcaaaagcacaagcattttgaagtgtccgtttttcctgtgcccctcccagcgatgagatggcaaatggtgggaaagtgtcagctgtgtgaaaagatagtgattgtttggttttgctaggacagttttaatgttgataaaaattgtttatacatttctgagaagtacagaccagaagaactgaattcttgttctgtcttcttcataggtagttgtgtgatgctgaaagttaagacaagattgctgatgtagaacccgattttcctttttgtctgatgtgtgtgtataatttcaaatttgcttcactaggatgctattttactaatgcgttcctgtgaatcctttccttggaatcttagggggcctcttgtagaggcatttgtctgttancaaatgtcacttagaggcaagtgactttgagatccctgtgaccaccaccctcctgcttatgtgggatgaagctgtgtttctgtcctctgagttggattagactattacatgctggtgaagtaagctggcctggaaattgtctaccattaggaatgctgtttctgtgagaaatggt

SEQ ID NO: 459385 - DNA, 480 bp, Homo Sapiens
aatttataaaaatgaaaagtttatttgtctcatggttctgcaggctgtacaagaaacatggcaccaacatctatttctggtgagggctttaggctgcttccactcatggtagaaggcaaaaaggagctggcatgtgcagagatcacgtagcaagagaggatacaaggagatttccaggctctttttaacagtcagctctcatgagaagtaatagaggaagaagtcacttactactgagagagtggctccaagccatttcataaggaatcaaccaccatgacacactagggcctcacctccaaaactggggaatcacatttcaacatgaggatttgggaagggtcaaatatccaaactataggcattctacccctggaacgcctaagtatcctgtccttctcacaagcaaaatacaataattttatcccaatagttcccgaaaactttaacttgttccagcatcgactcagaaatctaaag

SEQ ID NO: 459386 - DNA, 269 bp, Homo Sapiens
gaagtttctatctgaacatttattccacagtcatagaaactgaagatggaaaagacctgaggacatctaatccatccatgtggttgtacaagaaaagtggctggagcaaaacagcccgttcacttcatgctcacaagacagcatttccgttcttcctggagcggagcgattgcaaacacattaaaatgaaggacacaatgcaaatactcttcacaaaccttaaggaaaatacttataaatacattattttcataaaatgattagtaact

SEQ ID NO: 459387 - DNA, 469 bp, Homo Sapiens
  misc_feature (19)..(19): n is a, c, g, or t
  misc_feature (28)..(28): n is a, c, g, or t
  misc_feature (50)..(50): n is a, c, g, or t
  misc_feature (61)..(61): n is a, c, g, or t
cggaactcggccatggaanccatgaaantcccaaccccttgaatctgccnaatcccaaaantattgggggtttgggggtacccaaagcctcagctctgaaatcttctccggaaaaatgtccacagcccctcactcccttccctggagaggatgtgaggggcccaaggggtgggagaagttggcgtcctaggctggggattggtcgggggaccttaaagaaaaaggccagggctgagggtcctgaggagagagagagaggccacgtggatggaggactgtcacccccttctcggttctgtcacccccttgagtctaactcactgttgaggggaggaagaagggggatggacggaagggagaccgaggaaaggctttcgggagtggggacattatccccccagaggtgtgctgccccacccagctgcaccccacaatctggccaactcatttcacagtataaatcactcca

SEQ ID NO: 459388 - DNA, 392 bp, Homo Sapiens
  misc_feature (362)..(362): n is a, c, g, or t
aaatcacaaccttagacatttatgaaggtagaaaatagccgttccagtattgataataatttgtgtttaatttctatacagaaatggttctttcttgaatattttgtagggatggatgaattgaaagtgaattaaagtcaagataaagggggcaactctttaataaaggaaatgttaccaaatccatagtgaagagtagaatatgttcttttagagtagatagaaagtccccaggctcctggtactctgtatttgacattatatctcaggcagcaaaaaaaatatgttaccttacttgaaacaagtacttgtaggaaagataacaatacaatgattatatgtatttaaactaagattagggnagaaatatagcatgagttttgttgtcaagc

SEQ ID NO: 459389 - DNA, 508 bp, Homo Sapiens
tggaagactctcacggctttttaatacggagctcacagccaatcttcgtagacagctccctccattctgacatgggccatgcacacaggagtcatgatccacagattccacctttactccactctgccggagaaggatctctttgatgctttcaaagaaggtggctacgccactgggattcacatactgattatgatttcgcttcacagctgccaaaagaaacgttctattgttctcttcatatgcactgtacagttgcacagcagtccctaagcctgtcagctgtgagctggcaatgcgtaaaaaatgaagatagtggttggtcaagaagtcctttactgttggtacgccgagacgaagtaagatgctgttatccactgtggcattggaaaatccagcaaagaaaactcggatgttgctcgtgactgtgctgtgaactccatcattgctaaggacagtcagatcaaacgtgccatctgtggaccttggctgggaattcagatcacaa

SEQ ID NO: 459390 - DNA, 428 bp, Homo Sapiens
  misc_feature (404)..(404): n is a, c, g, or t
ggtggctaatagtttattacaaactttctgaagatagttatgacattcttaggatatttataattgatattatcagacatcaaactacttttttaaacataaattttattgaatgaaattgttctgtatatgagattcatgttaaatgtgtagtcttgccacaagaaaaagcaattactttttgaagaacaattttacttcccttgtgactctacttaataaaggcatttacctgtttgggcatctcgatgtgcttgattgggtggaattcctccaagtgatatagtaagcacatcaaggccaccgaagtcctgagtaggggtgggataatatctctgttatatattctgtcaacagacaatactgttgctgttccatttttcccaattaggaaaagtgtgccngtggcccgtctggcaacatatact

SEQ ID NO: 459391 - DNA, 413 bp, Homo Sapiens
ctaattaccccaaaaccttgtgtacacttgtgaacacacaagagtagacactcaactgactggttaagccatacactttagaatcactgcttcctagaagaaatacctttcatgacttaaatacccaaatatcaagtaatgtgagtgggtttctaaatacagaacaagaattcttctagtcctttgtaactttgtttagagtatgacaaatgtttagtgtctgctaaatgcatcaggaagcataatgttcagcagaagtgagatttgcaacattatttctctgtacttgggaacagagagcagaaggtaacatttcaaagcgcacaggtttgttctagctgcaaccctaaagaaagttgtgcaaataaatcaagccttatgcagtgatttccaaagctccttttcagtcatga

SEQ ID NO: 459392 - DNA, 736 bp, Homo Sapiens
  misc_feature (630)..(630): n is a, c, g, or t
  misc_feature (661)..(661): n is a, c, g, or t
  misc_feature (679)..(679): n is a, c, g, or t
  misc_feature (696)..(696): n is a, c, g, or t
  misc_feature (716)..(716): n is a, c, g, or t
  misc_feature (724)..(724): n is a, c, g, or t
gatgccaatgttgtgtatgctgaaggctgctggctgacttctggacacataatgaccagatctgagttttgcttcacacacttcacagtgcagaagcattgctggtctttacacccttgctgatataggcagccatggaaattagagcctgcagtggatttcccaggctctctgttgacttccagaatgatgtgtactttttctgcacctaaatttctcttttggtaatagctatagatctacctcatatccatggtgtgagcatcgataacacaagtcagtacaacgtccttgaggacttttgggacaaagctgccccagtgctcagctgtgaagctgcaacacagactgaaaggagactgggatctgggcttcagtgactctgagggagaggcttgagatctaggagcttcgcgaatgcagacccgcggtcttttgataggattacaaatcctacatggacaccaagctgctggtggcgaggttcctggggcagtcctcttgtaccatgaccccagacatccatgaacttgtagaaaacattaaatctgttttgaaatctgatgaggagcacatggaggaagccatcacaagtgccagttttctagaacagataatggcccattcagnccagcacatcagggcccacaagcttccttgngagacagctggcctcttnacctcagagcttcgggnccttacaccttacaccagcnggaagccnagccagagaggc

SEQ ID NO: 459393 - DNA, 308 bp, Homo Sapiens
  misc_feature (197)..(197): n is a, c, g, or t
  misc_feature (290)..(290): n is a, c, g, or t
tgacaactggtgcccggcctgacttcaaatcctgtgttgaatagaagtagtgagagcgggcatccttctcttgttcctgatcttgggagggcaaagatttcagtctttcatctaaaatgactgaaaggactttcagccatgggccttgcatgactgggcctttattttgttgcagtacattccttctcttcctgggnttgtgggagtgttttaccaggggaaggggtgtttcagggctggggcacagtggggcttcaagtcacacaaaagtgttcaagttcaggcccttncccaagggggccccagtg

SEQ ID NO: 459394 - DNA, 393 bp, Homo Sapiens
ctaaaagtcttcctacattgaaatgttttcataagttttttctgcattatttccctagcacacgatgaggcaaaacattttactgaaaaccctgccacaggggtttgccagaggaaagtatttctccagtgtgaactctctcaatctgttgaagttttatttttgggcaaagacgttcctataattattacatttccacgaattagtagtttattcatgatctatgatcacttctgagggggtttatcttcccaccaaaggcttttatagtctgccacattcataggatttttctcagtatacaatttttagacataatgtcctaaaatattttctcaaatgttttgtacatgttttctctgacacaaaacatgaagtaactgatcactaaat

SEQ ID NO: 459395 - DNA, 551 bp, Homo Sapiens
  misc_feature (27)..(27): n is a, c, g, or t
  misc_feature (46)..(46): n is a, c, g, or t
  misc_feature (388)..(388): n is a, c, g, or t
ttgtaaaaggtaaataatgaatggcantgtcgaaaggcaaatgggncgctggcggaacaccgtttggtttgctgtcccacgatggaggcccaggatggttgccttaagttgcccaatttcagggcaacagggcccaaggaatggtccccaacaactggggtcacccaggattgggctgtaggcctgcatggacgaatgcgccgcgtggcagtcttggtgactgggtgctggatagagtgctcagtttctgtcatgtccacagtataatgctggtccaagagctctgggcaggacacactcacaggtggctctgtggggctagagaaacagccctggttcctcccccacatctggttagtcagctctgggtagcagaggtcagcaccancagcgtgacgtggccatatctaccacatagacaggcggccagtggcgggaagaggcaagcaggtccacatggtcacgggcactctcacctcgcacaagatacttggagccgcagaccacctgatgggggcacaccttgtagattttaccacctgtgaagtgac

SEQ ID NO: 459396 - DNA, 515 bp, Homo Sapiens
  misc_feature (31)..(31): n is a, c, g, or t
  misc_feature (51)..(51): n is a, c, g, or t
  misc_feature (80)..(80): n is a, c, g, or t
  misc_feature (101)..(101): n is a, c, g, or t
  misc_feature (111)..(111): n is a, c, g, or t
  misc_feature (150)..(150): n is a, c, g, or t
  misc_feature (408)..(408): n is a, c, g, or t
  misc_feature (496)..(496): n is a, c, g, or t
tctgggtttcccaaaaaattccccctaaaantctggcctttcctgtctgtnctgccctgtcctctcctaaacgttggttncccgcttttaaaaaaaaggtnaagaactttnaaccctgggccaaaattggaacaaaaaggccgtcttggnaaggtctctttcccggaaaactaccatcggccgcaaggccataatcccccagtgctgaagcaggaaagcaagcagctgccttcttgtttctgtctcgagtggtggagcgtcgcagggcccggcgctcctcgggggtcggggaggaggcccaggggttgggtgaggccagctccctcctcatcagacagcactgcgttggcatcgccattctgcttagagtctgcccgtttcctctcgatcataccctcttccccgggncaggggggctggtatcactgcaggtgctgctcctggggggaagtctcctgcagacttgcagtacatgggtgaccaccactgcgccggncgtggcacgtgcttcttcc

SEQ ID NO: 459397 - DNA, 381 bp, Homo Sapiens
  misc_feature (45)..(45): n is a, c, g, or t
  misc_feature (64)..(64): n is a, c, g, or t
ttttaaaaactagcttttcaactcattagttcctaggctgtaacnctcttgtaagcctttatgnataacccactttagttttgtgaataataaattttattcttttgttaatacttgtatacaatttaattgaaaactgtagcttgcacactggaccagatgagtccctcactggcacaggccctgcacctggagtgatgtttcataaaacggaattttaatagtgtaagagcaccaagatttctctgcacctatacctagcgttggactgtgcattccaaatgaaattcctcctctttatccctgtaatgcactgactaacagaagacttactacacatttaaactgtatattgacatgctattaaatgcgttttttatt

SEQ ID NO: 459398 - DNA, 466 bp, Homo Sapiens
tatctgtagccatgtcccctaatggctattagtgttcatggttagtgtgttgaagatgagccaggtacataacgcggcacattttctgcaggtcagcagtaaggtttcaaggtacagttatggaggaaagaagaaaatgacacattgataacacaggtctttatttcctaagggtacatatgaattattcccttttgaatgagacagtttttaaaagttgatttataaatacaaaaatacattctccaaagatagtatttccaaactgttatatacccatctactcccaacatggatataagttttttaaaaaaatagttgtatataacatacatatctgccccagtgttacttcacaggcctatgccctacgggaactccgactctcccagccccactttttctcttggttctcccacattcttattctcccacatccctacccacgtttgagctggaaaggatg

SEQ ID NO: 459399 - DNA, 424 bp, Homo Sapiens
  misc_feature (18)..(18): n is a, c, g, or t
  misc_feature (60)..(60): n is a, c, g, or t
ctgcaaaaacaagctgtncaagcaacccccttcctcacccaagaaacaagggctgtggangcactcaacagaattgaagaagcaacggtgaggaagagctcgcccccgttgatgatcttgtccagctcactggagccgcccagggtactcgttgtagaagatggtgtgtgtgaagaggccgcaggtctgccgtgggagaaccatgatgccattgtggatgaagccacggcggtagcgggctggcttcaggtgggggtactcctccgtgctggtccacgcggatgctccacacctgcttccaagcctcgtacagctgcacgtgcacggggtacacgcccgagtggtggggcgccactgcataccccatgtctgtgggaatgccatgctctcacgacagcgaacttcttgttcaaggccatctgct

SEQ ID NO: 459400 - DNA, 442 bp, Homo Sapiens
  misc_feature (36)..(36): n is a, c, g, or t
  misc_feature (64)..(64): n is a, c, g, or t
acagatgatgttatggcccgaacactgaactggaantgctggtgccatggtaaataacgaaaanccacatcaacctttccatacagatttatgatcacttttaaattctcgaacagatagtgcccagcccccagagtgggtgtttcccacactgccaaacaaaggtcctgcccagcagccctggtgctggccccaggaagggaacagcacagacagagacacaggcgtaagcacataactggttctgtggggcgacctagaacacaagaagcgctgccacacggagaatcaggattgggctgaggcagcactgaaacgcctcactccccttcatcgcatccctcaacagaagtttccaggtaggaagacgggcgtgtttttgagagtgaatggactaagcaaatgttactgggaacgcttttagatgttcttggggatatgt

SEQ ID NO: 459401 - DNA, 492 bp, Homo Sapiens
aacattagtgtattttttgaaacaaccccacctatttatctcactcatgaataacagcacagtttatttttaagccttatgttctgcaatttgtcaatgatccataatgacctgaacataatccttatcatgttcaacagttactagtcatatctgtcaatgtttctttggagttaaactgcttttctattaatttcaaaaagtttctttcaaatgaggcaacggatagaaatagtaaaaatccactgggcaaagtgtggcagaattttaggaacaactggcatttcacacacattccaggacaatacaattaccgtccatggcttttgtttcttcaagatcaactgtaatggctttcaaatgtctctgctgtcgaaaaattctactaccgcacacatcctcatgatataacttcataatactggtaaaaacctctgcaatcttacattttctacaaaaatgacagaaaaatagctgaatgatgcaaacgct

SEQ ID NO: 459402 - DNA, 464 bp, Homo Sapiens
  misc_feature (51)..(51): n is a, c, g, or t
ctgagatggcctgggaaggaccttgtggacaatggttttatctgttctttntgtcactgttaatttctgggctgctgaggttctagaatagaagggctgccaaatgaggtttgctgcaggaggaaagtttaatcccccattccaaaagtccaggccaaatggtgggcttagcctctttgaaaagttctgccttgcccccacaggtgggcacatcctgtgtctcattcaccatgatgcttcctgagggtgttctagaagcccgttccccagtggctgtatccagcctttccttgcatcatcttcctcttgaaggtgaggaagtgaaaactacagaccttccccggacagcccactctctatcacgagcctaacccgcgggaggcggaagagacatccattcgagaactgaagcggccttcgggatgaggtcagaggccccacctgattttcctggtggtggtatc

SEQ ID NO: 459403 - DNA, 529 bp, Homo Sapiens
ctcactttaacaaatgagttttattgaagcattttaacagcaaacacttgtgaactaataatgttttgaatggccccagtcttccatctggttaaacagtggatttcagacagtaacattaagcactaccattgaattgtaaaacaagattttatgaacttatttaggaattcactgtttctggcacaataaatgcacctgggcagaccttgtctccacttttcaaatgggcccatttctacagataagcatatttatatacacatacatacattactaatcatggaattagagatccagagcttgaaggaaccacaaagatcatctagcacaatgtcttcattttataggttagaaaactgagttctggaggagttaggtaatatatcacggacgggacgactggcaaagctggaattagaactcaggttttctgtcctatggaatatatcacggacaggatgactggcaaagctggaattagaactcaggttttctgtcctatggaatatatcacggacgggacgac

SEQ ID NO: 459404 - DNA, 443 bp, Homo Sapiens
  misc_feature (76)..(76): n is a, c, g, or t
  misc_feature (108)..(108): n is a, c, g, or t
  misc_feature (372)..(372): n is a, c, g, or t
aaaacgggtaataccaacaccaatactggcccgggccccaagtccttgtcccccaagtttagggtttacgatgaangcaaagacatcctgtaaaagaacagctttccnagagaaagcgggcccagcggggagcatgatctttcccgaaccctcagcccatagatcttccgttttctcctaaccggcctgagtggccagcttcccagtgccgcaaggaggctgcaaaagcctcgtgggaactattgagccgagtccggaattggctgcaaatgctcttagccaatttggaggcgctgaggctctcaatggcttcctgggccaccttcctcttccattccagagtgatggcaggtgggctcacccatgtgatgncgctggatgatctgtttgatttgctcccatagcatccttgtaactgacgaccctgagtgaaacgtgacttc

SEQ ID NO: 459405 - DNA, 490 bp, Homo Sapiens
  misc_feature (177)..(187): n is a, c, g, or t
  misc_feature (320)..(320): n is a, c, g, or t
caaattgagactgctcacaatattaactttttttgtaggttattttgttgtttagataacttgcctccctagaggagcattcaggagataaagacctagctacatgtaatgatatgatcatttcaaaaatgtgccaagaaagcaaaattcattattgaactctaaatttctgggtgnnnnnnnnnnnaaagtagcattttctctgggtaaagggaaaggcaatgaatgattgccaacatgtaaactccctgctgcccgccttcccccagtcccctccatctaacataatacagtaaatttgtagccagttgtaggaaaanggaaattgatatctttctgagtaaggtttcatggccctgtggactaaggaatagggtgggagggaattcatgggcccaaattcaaattatggaatttgttttaggcttgggtcctgttggcagttgggctttctgttaggtgttctggaaacagggggacggtttccctt

SEQ ID NO: 459406 - DNA, 450 bp, Homo Sapiens
ttgattctaacaaaatttattatgcagtaattacaaaggttaaagactcttccatctcaaataaaaataacagttataattacacacataatatagtaccttatagaatgattccaataaatatcacaggaaatacagtgcattttcaagttggagagacaaatactttctcattcacagtgtttgacataggaaagcctatttacataacaatctgtataaagtcatgctcttagtaacagtctatacagagctgtgccaacacaattctttcagaatgtgaagtaccgggcaaaccactcctggcgctggggatctggagaagccactggagaagcttcactctgagcaggactggaattcataaaaagagagacatgtaacccagcattaagtccattttgccaaatggaagggccaaagcacataaaacatcagcatagattacca

SEQ ID NO: 459407 - DNA, 328 bp, Homo Sapiens
  misc_feature (105)..(105): n is a, c, g, or t
attattttcagatctttagcacaaactggaaaaaacacccagacattttctttaaaccacttaaaacaacaatacagtctggaccgcagacatacctggcttcantctccaacctcaaattcagccctcaatatttgcctatataagcaatgtttacagcctcagaagccaaacaatctcttcttttagtttttatcttgattccaggccccatactttattcttatctgagagtccttggaatattttcatttcctgaagttctgaaaaatggattgtctctgctgtgtagctcctctctcctttctctcattctttatagcttatt

SEQ ID NO: 459408 - DNA, 540 bp, Homo Sapiens
  misc_feature (490)..(490): n is a, c, g, or t
taagtttttaattcatagtcactaaagagataaatgtttcttatatacatttgtatatttttatggtgttatttattccatggcttagcttccttcaaatcaaaatttggacacacactattaagagaagccattaaaattttactaaaattgtgcatgtaaattaattgtcaggcattccatgtctcaaggattttcttaatttagttcgctgtttaaattaattcatgtcctgtaaagttctgaccttgataacaaagctataaatatttaagtttgctaatatgcgtaagtattatcggtaagttacaagatggaagaagaataacagtagggcacagtcattctgtgaatccttttacttatcaaaatttggtagctattctaaggcttttgcagaaaaataagtgttcaatgtttgtagttcttcaaaagcatgttgcagtagccagccatactatgtgtattcccagtatcatgtacggcactnaaaaaaatgtgtgcttgctggctgctgtgagtggaaccattgcttaagga

SEQ ID NO: 459409 - DNA, 265 bp, Homo Sapiens
  misc_feature (16)..(16): n is a, c, g, or t
  misc_feature (51)..(51): n is a, c, g, or t
  misc_feature (61)..(61): n is a, c, g, or t
  misc_feature (179)..(179): n is a, c, g, or t
cctcatctctcctctnaggttttattgactgatggaaactacatctttgtnagccaccagntccatggggacagtgctggggacagggaacctgatgatgatgccagatttcagcctgagagcagagttttggaaggtcacccaagagggagaagaaaggaatatgtgaaaaggaattntaggggaggaggaggaggagaagttcctcctgtctcctataactcccaaagttcagaaacatcccaggccggagcccctgatgctt

SEQ ID NO: 459410 - DNA, 514 bp, Homo Sapiens
  misc_feature (51)..(51): n is a, c, g, or t
  misc_feature (67)..(67): n is a, c, g, or t
gaggccacacccatagatcacttaccatctcccctcggcccccacacaganttttcctacttgtganaagcaggcccctgtaaacaccccactgggggaacacgcacaatccatgccctcacccccatggctgccatggaaaacccagcctttctgtcccttggctacagcagataaggtatgttctgacctactccccaaacctacttcagaagacagtaattttcagaagcaccacagcagagactgaaagaaaataacacctagttactatctaaagcagtgagggaaactgtggaagagaatggaatcattaaaggaaataaaagttcctacttcttccgaaaacgctgagtggttattatgtgttaagcattatctgcaaattttatgacaatccctgtaataatcctgaagaagctataattagctccattttataagtgaatcagtttggaataacgggaacaaagacagacaccaggattcagattctagctcttcaacttaccag

SEQ ID NO: 459411 - DNA, 303 bp, Homo Sapiens
  misc_feature (249)..(249): n is a, c, g, or t
  misc_feature (274)..(274): n is a, c, g, or t
aaaaggttattgtgctgaacaaatgttttcaaaaccacccaggataatagagtgcactacaaatctgaccaaacaatggagaggccacaacctcagaaaagaaacaagaacttgtagaaccgttttctaaacactcctgtggcagcacgaattctaggaaaggaaagccctcttcaaagattacctatcacatcttgctctcacaggagacaacacccacccatgtggcttgttgctgctgcacctttngcggtttccaacctcagcaaggatnctgggtgccccgtggcaatcattttactg

SEQ ID NO: 459412 - DNA, 488 bp, Homo Sapiens
ccttttgtacaagcaagttcctcaactatcttcctcctctgccaatcatccttctcttgattatttcgatcgtctcccctggacccaaccatctccaataattttttgtgaagtacaatgttgatgaccatagaggatgcaaagctccgggctggttctgtatgatgttttatatttatgtataatgtcttacctgatgatacccaacatattactagccttatagatgaggatggatggcagcttggctggtcaatcaataagtcagtccacagatatttaatgagcattttctatgcaacttatactgttctagatagtctatgacctaaagaagattctttgtactcggggtgggtagggaagacaataggcccataaataaatagataagacaggtttacatattgataaaaataatgaagaacataaaattaggcaatgagatagggaatgactacagagactgggggtaaggaaaagtgtgt

SEQ ID NO: 459413 - DNA, 186 bp, Homo Sapiens
ttgactagaatataaatttcaggtaggcagagataagagatatgtatacaaaacaaacaaatgctcccctatgcccaaaagcaggaaaggaaaggggaatgtagaagagaaagtgaaactctagtggcctggcaattcctgtccctattaatgctgaactgaaatgctttggatctacaggagtac

SEQ ID NO: 459414 - DNA, 114 bp, Homo Sapiens
gcatttgtacatatagggtctggtactttcaggcacccactgggggtcctggaagatatcgccgcacagataagggaggactattgtacatggccagttctaggcagtggctta

SEQ ID NO: 459415 - DNA, 491 bp, Homo Sapiens
  misc_feature (407)..(407): n is a, c, g, or t
  misc_feature (465)..(465): n is a, c, g, or t
  misc_feature (475)..(475): n is a, c, g, or t
ggcagagcaatcatttacctatattctttggggtgtatgccaaggtaaggtctctaggtagcccagttgctttgtctaaaacagaagactcttaaaagaagctcctgtattctccctgagctgacctttcctgtcttgtccctcgatattaagcttatgctatcgagcctcatctcagttagatatctgtggcttcctttgccagctgacctagctggagctgctaatggagtaatcaagtatgaattcctgtataaatcaagtctggctcttattccagggatctagactactacaggcctacacaatttaggaaaccctcattagatagatgcaagtagttgtaaatataaacctaggctaggggccttctgacttaatgtgtctcccggggaagccctccaggnttgggaagccttcttcagtttcacaggggaaaggaaaattcatttccctccctcttgnccttcccttngcccattttcaaggtg

SEQ ID NO: 459416 - DNA, 475 bp, Homo Sapiens
  misc_feature (27)..(27): n is a, c, g, or t
  misc_feature (108)..(108): n is a, c, g, or t
ttaccttggaacaattggtggtaacangggcgtcaaaccctgccaggtgaaacctcctagtgatttggtccacaatatagcccttccaagccaggtggcattggatantggaatatcaccttcctccctggaggtatcgtacaagaacaacaagtggaatgtcagctttgtcaaagtatttcccactgcaaagatctttcccacaagttaaagattcaaccaccttcactagatcagggtcatcgcttaggacttccaagcctgcaagcttacattttgtagcttgaaatgagagtgaacaaaacttcgggtttaatttgtatgctttgcttttttcaacattttcactaaaaccatagtcaacatagcatacctttattttgttctcttctgttgagatgacctgtgcccgtaaccaggcgtcctcctcggcatttacggccagcaactgcccaacattcacagcctggactgg

SEQ ID NO: 459417 - DNA, 720 bp, Homo Sapiens
  misc_feature (38)..(38): n is a, c, g, or t
  misc_feature (73)..(73): n is a, c, g, or t
ccgaattaaatactgcgatgagggtcagggaagttccntaggggtaaaataaaataaacatgtgcgaatcccnctggtttcaatcccacttttgtaacctttaatgctaacagtccgagcaattccaaaacagaatctcttaaccacagcactgcatctggtgtccacatgccaatagattgtggaagatctgctaaacagcacttaatggcctgaggtggtattgcaatcatttcttgtagaaaccgaggtggaatttccctgagctctgacacttttacagatgtcacagtgccagagtccaggaactgaacatcaagagcccggctgctgtgaacatttgtgatctctactcgtaaccattttcctttgcaatggaagaggcagattttcccacagaagggtaatgaaacaaagcactcagaggtcatgtgcttgcaatggaagtagtcctctatcttacgtagaaggtcactgagcttgttcagacccttacaaggcacctggcagtagagtgtcccatcagagcaaatattagttactttgacatttgtgtacatggcgtcaacctgcaggtgaacctctagtgacttgtcacatatagccttcaagcaggtggcattgatattgatatcatcttctcctgaggtatcgtacagaacaacaagtggaatgtcagctttgtcaagtatttccactgcaaagatctttccacaagtt

SEQ ID NO: 459418 - DNA, 288 bp, Homo Sapiens
gtttttttaaaatcttcacatctttattgcaatgctcagaatacaggtggctcaggagttagcttcttaaataagtttacacatgaggattatcaggttaacagatgggggatttgaggattaggcttgctactgagtctttaatatgatttctgttacaaagcctggaagttggaagttctacctatattcatttaaaagacttcatgttctgaatgtgaagcatgttcaatgtactcgttgtatttaaaaaaactatgaatcaaattttttataaaaaaagatttt

SEQ ID NO: 459419 - DNA, 144 bp, Homo Sapiens
  misc_feature (20)..(20): n is a, c, g, or t
atcacatgccatttattttnatttgtacaaatttacattaattttactacatacatatatatttaaagcgttcataacaaacttagaaaatagcggatgaaatccagtacaccaatcatctagtcttagcaaatactattattt

SEQ ID NO: 459420 - DNA, 470 bp, Homo Sapiens
  misc_feature (389)..(389): n is a, c, g, or t
  misc_feature (444)..(444): n is a, c, g, or t
tatttcttttattttcaaagcctaggattgagccagtaacaaattgcctaacataaatcagcattatggaacttctgtctctctattctcaactctttttgccttatattataagaaaacgtaaaaggagtcagaagaaaagcagagagcttgcagaaatagcttgccactagcaacttaattcagcccccaaaataggaaattcacagctggttaaacatctgtgggccactggcgggctgagaatgttcaaacacttaaactgtgttttccagatcaagccaatccagaagtctttaaatcaccataataaccagagaataggaacttccctgggctggctgtggggctctttggggtacagttaggctcgttacccttcagctggntcagagtgggccccggggcttggctgggacttttcaggggcctgggtgctgggcntctgtgttttcccttcagggttcctt

SEQ ID NO: 459421 - DNA, 487 bp, Homo Sapiens
  misc_feature (275)..(275): n is a, c, g, or t
gggattatgaaagcttttattttattttgtattttaatgtttctttctaaatttaccacaataaattagtgttcatttttgtaataaaagcacctgttaatgttattaaaacggttttactttctaatcaaaacttactttcttcatttgattgtgtttgttcttaaaatttcgtcttaaaattcagaggaaactcagtgtctcattcttacatctgtgttctccccagttgtctgccagagactaaccctttactgaaatgatgagcggggcgnggaatgggacctgaggcgggctgagcaggaaatccccgctccacagggccatgctgcgctgtgcagttgggcggtgcagggggggcagcttcggtctggggcatcaccgagcccacatgcagcaggcccggcacaagctgcaccagatgcatccggggtgcagatccgtgctgcgcgccttccctctgtcaccgtggcccttttttcttggt

SEQ ID NO: 459422 - DNA, 446 bp, Homo Sapiens
  misc_feature (299)..(311): n is a, c, g, or t
  misc_feature (347)..(347): n is a, c, g, or t
  misc_feature (422)..(422): n is a, c, g, or t
caagtctcttctcaaatctcaattttaaatgctctatttctgatatttatttcttcctgaattgtgtggtcttatcggtccataccagttagttctcacaattagtatttaaactacaagggcgttcccaaagtcccccgacctggggttttattccatttacacccatcttccgtgattagactctcacatccttgaagcagggactgggctcttatgtttcgaggtggcccaaacgtcggagtcaaacagatcagtgtcccccagccatgtggacctaaggacaaaaacaactcccnnnnnnnnnnnnngaggatgggagttttgctcttatgggcccaggggtnggaagtgcaatgggtgttgattttcagtttcactggcaatctctggcctctcggggtttcaagttgaattcttcntggcctcaggttttcccaagtagg

SEQ ID NO: 459423 - DNA, 531 bp, Homo Sapiens
  misc_feature (392)..(392): n is a, c, g, or t
  misc_feature (425)..(468): n is a, c, g, or t
  misc_feature (471)..(471): n is a, c, g, or t
  misc_feature (479)..(479): n is a, c, g, or t
  misc_feature (492)..(492): n is a, c, g, or t
  misc_feature (506)..(506): n is a, c, g, or t
  misc_feature (516)..(516): n is a, c, g, or t
attattaatcatatttttaatattaacagataaagaaaaggctcagggagggttagtgactcatccaagggcctcacagtgaacagaactgacattgtaacccaggaattctgactccaagccaaggcctttttctgttacatcatagctgcctctacttctgcacagttggctctatattaaccaatgacctttaatattgtcctacttgcagctcagctctgggctaggcactgtggaaactgcaaacagtcactgcagagaacttgctatgggccccattgtccaggatgccaaggcagggagtcaagggaaagggaatcttaaggcagggctctttgagggtggggtattaacaattgtcattacaacaatgggaaaacttggactcnggaaaggggagtttgcgggccgggtttgggtgnnnnnnnnnnnnnnnnnnnnnnnnnnnnnnnnnnnnnnnnnnnngtnggtccacncgagtttcagggntttcgaggcccagncttgacccancacggtggaaacccc

SEQ ID NO: 459424 - DNA, 423 bp, Homo Sapiens
  misc_feature (340)..(340): n is a, c, g, or t
  misc_feature (356)..(356): n is a, c, g, or t
  misc_feature (361)..(361): n is a, c, g, or t
  misc_feature (367)..(367): n is a, c, g, or t
  misc_feature (378)..(378): n is a, c, g, or t
  misc_feature (387)..(387): n is a, c, g, or t
  misc_feature (406)..(406): n is a, c, g, or t
ctcaagcattctattttattttaagcattctattttaaattaataaaagttattaatattaattttaaaaaacctattgtgtatgattcattaatggttgtatcagatcatgtaaaacgtttccagtttaacaaatctttacaaagtgcctctcaagcgttctattttaaattaataaaagtaattactaaaagttattaatttttaaaaacctattgtgtatgatccattaatgattgtatcaaataccctatggcaactaaaaataacacctatggatcacatttaaatcaggggctatgtataggtctaagggattttttaacatatctttggaaantatggcaaatgggggnagggnaatctntgggttggccntggatgggnccttttaccgggccctttnccatgggggtttccttc

SEQ ID NO: 459425 - DNA, 350 bp, Homo Sapiens
  misc_feature (146)..(178): n is a, c, g, or t
taacatgatggaatgccttgaaactgtgtcaacagtgatgaaaatgtctcatgaaaattataacttaatttcatacctgtctacataggtagcatgtgaattccaaattatacattgtcaagttttcatacatttggctatgttgnnnnnnnnnnnnnnnnnnnnnnnnnnnnnnnnngatcttctcgataaattgacagtaaaggacacacttattttatacattttttgggttaaaaataaatcatatacttatttatatggtaaaagtgttttgttgcaagttagtatgaattgagatttatttccctttccttcaggagtcatgcttctaatcaataacgattaga

SEQ ID NO: 459426 - DNA, 885 bp, Homo Sapiens
  misc_feature (12)..(12): n is a, c, g, or t
  misc_feature (36)..(36): n is a, c, g, or t
  misc_feature (44)..(44): n is a, c, g, or t
  misc_feature (53)..(53): n is a, c, g, or t
aacctttacggnaaatgcaaccaatctggacatccnagttttgncctgaagantgccgtgggatatgaagaacctgtgctgttgggtgctggatgcccacactaagttttggccagtccacactccttggttccttccatatttgaaggagatgggatggtgaggaaggcctgttggctttattttattaatgccaccatctagaatacagattcttggatatttcatcttcacaaggtgagctgcaaactcagctgtgtgttttgccacatgccccacgatgacaatgaccttccctttgaagttctggagcatagcagtgtaagggccctgggtaagctccccttctgcagtgaaggcagcactgaatggaatgttgatgcttcctgaaatgtgaccacgaataaagtcttcactattccggatgtcaaccaccaggagctttggtttactggactttgttttcttgctgggtgttttgaagtggcctgtcactgtgagctcacacaagtcaatcaggtcctctgctgaaatccgtggtgatacttctgacttcaggtcatttaatgggatggattctcttgacagatctgtctttggaggatctggacactcagcagagaaataaggtgccgaacttctgcctccactgctgtcagaagatggctttggaggttgagcatgctgtctgtaagtagcacttttaggagtccaacaaaacaggttgatagattctctcacacagcgttcaatgtcaatttctggtaaatcggagaagagaagaatacactcattaaagccattagccaaaagccggtcccgcagctgctgaagaattgctactccaatacagaatgggaaagaggaattcccaagtagtaaggt

SEQ ID NO: 459427 - DNA, 543 bp, Homo Sapiens
  misc_feature (442)..(442): n is a, c, g, or t
  misc_feature (456)..(456): n is a, c, g, or t
tccccatgaggaccttctcctcttcaggtctagtcatgaccaaatcagatcactccacccaagacctgcaagtggttcaggtgcaatgacatgactaaggctgcctgagctatctggaaagaaggtcttttcctgctgtgttgcttatctaggaagaagataatctgggaatgctgccaccaacctgcagaatgtttgcctgaagggcaaagtgaagcagagagataagaacagagatggagaaggccttaccgggtaataatatttgagcctcaggatctcactatgttgaaagttagtccttgagtgatggttatgtgaatcaatgaaatccatttttccttaaagtcatttgagttgcagatttaacagagagagtcttggattagtaagatggacatgggctggtttctgggaaactttcatgtaccagtgttctccngggtacccagtttntcctgccgggatattttcagggtcccatggttctgtgggcaggagggtctttgtggcttttaggattacataaggtaaccaattggt

SEQ ID NO: 459428 - DNA, 426 bp, Homo Sapiens
  misc_feature (284)..(284): n is a, c, g, or t
  misc_feature (382)..(382): n is a, c, g, or t
gctcaagcaatcctcccacctcagcctcccgagtggagggggagccactgcagatctggagcaaatcagcaccagccactccagagcctgacctacataggactcagaaagcattgtctattgtgattgattattcctgtgttcagtcccaatggcctattgattgggggtttctctccaaaaggctgcgtggcttttcttctctaagtgaatctcctttataacccatattttatgtctatataccaaacatgctatccatatttaggtcaatgtccagttgncttgcatgtaagggcaatagagtaatcagaaaactcttcccagaaagcccccgaagacaaaactagtactggtagaaaactgggcatgcagctctaanaaactctatgggaagtgaggctgggtggggcacagctgccccag

SEQ ID NO: 459429 - DNA, 377 bp, Homo Sapiens
tttgctttgcccacttactaatttgacctttggcatgttgcctcatcctatgatgggtagtactaaatgtgggtttgatgtttgtgatgcattttgaaccaacatcctttaatgtattcatctcaaaggacaactagctgaacaagtatttaagacatttgtggtaatgtcctattccaacttttttaaaaagtaaaaagtggtgtgtttaaatcctgaaagtacagacacaaatccaactagaaatatgatgatatttactcatactgtatacttcagatattatcccaatatgaagagctcttaatgcaacagcttagactttgcccattatatactgcaataattagacaacagtgactccattactctttgtc

SEQ ID NO: 459430 - DNA, 358 bp, Homo Sapiens
ttacatacagttctttattaaacaactgtaaacacttcactgtaaaaatccataaaactttataaacaaacattttgtaaatagaatctatgctacagtaaaataattaacacaattatttacatgcaatactgacaaatttggcactttttgaaaagaaatgtacaaaacacttgctttaaaagaaatttaaaattataaaaactccgaggcattactatcatggcactttgcaaatacctcacaagcacttatgggcacagctatcagagaggcatcaggctctctgggtaatatttatgtaacttttaatgtggcttccataagtttgttgtaaaaccaccgggggcattggtca

SEQ ID NO: 459431 - DNA, 510 bp, Homo Sapiens
  misc_feature (155)..(155): n is a, c, g, or t
ttccaacaacacctgtgttgttcaaacaattccccattgaaggggttaaatattcaacccaaacctgcctgggtcccttgtaaaacaagaaatacctgaatggtttgaatgcctgccagggaagtcggggtcccgtggcaattccactgttcaanagcacgctgcccacagagaggtcctcctgccctggtcaccatcatggggtctgggtagaagactgggccctcgttgacatccaggacagtgatgtggacggtggctgtggagctggggccgtaggagacgtcgggtacgagtgggtcttcattttccactttgatcagcagggtgtggaaggcagaaatttcatagtccaatggtttgacaacagaaagcatcccttcgttggtttgagggttggtgtggatttcaaagctctgcccggggtttccgttgatgatggtgtaggcagccctccatgcacctgtggtggggtcatccttatcttcaactgtcaaattgacaataact

SEQ ID NO: 459432 - DNA, 476 bp, Homo Sapiens
  misc_feature (19)..(19): n is a, c, g, or t
  misc_feature (63)..(63): n is a, c, g, or t
  misc_feature (81)..(81): n is a, c, g, or t
  misc_feature (87)..(87): n is a, c, g, or t
  misc_feature (95)..(95): n is a, c, g, or t
  misc_feature (145)..(145): n is a, c, g, or t
cccacagccattccttaangaccacctgaagaagccttgggccaggggttcaattggcccccnggaaaagcattccatcancccccnggtttggncattttaagccagaagggtatcacctgcacaatcccctttctgcatattnggaactaataggatgtagaaaagtttataatggagtaaagtttcagaatttgagttgatcttccccctaacttcctaccagaaattgccaatgcatagcaacataatatatcatctcctcagttctttaaaataatctttgaaattggaaataaaaaattacagtattattttactattcagtcaagttacattttgcttatgtcaaaatgctatatggatgtatctattgaccattccaataatttcattgtaaatcagtgaggttgccaaaaaaagaataggataattctatttctacatagggactctatagtcaaagcaactgtgac

SEQ ID NO: 459433 - DNA, 454 bp, Homo Sapiens
accttccccattcagtttgctaagccacatccttcaatccttacatattacaggtcccactagattcaaaggtaagccaaaaataccatgcaaaagactgcctcctaaattatttaaatctcttttgtagcaaaattttcccagaaactgaggaacatccacacagaaattcttacctttttatcaaaagtttgttatccttttctcattttctgggcctttcaatgcattggcattgacaagagtgaaaaaattatttgctgttatttgcatatcaaacacatggtttcaacgtggtatgaaactatgttggttccaacgtggctgactcctttgtgtccattaaaaccattttcctcatatctaaagtgaatcttggtatctgtgatttatgtttaatatagagatgggaaatggttagtaatctaatactagtcaagtcacatgtattctt

SEQ ID NO: 459434 - DNA, 485 bp, Homo Sapiens
  misc_feature (362)..(362): n is a, c, g, or t
  misc_feature (380)..(380): n is a, c, g, or t
  misc_feature (386)..(386): n is a, c, g, or t
  misc_feature (434)..(434): n is a, c, g, or t
  misc_feature (442)..(442): n is a, c, g, or t
  misc_feature (461)..(461): n is a, c, g, or t
  misc_feature (470)..(470): n is a, c, g, or t
tctttctgaaatttttggacaaagatcctatccttaactattcactcaatacatcttttctgccgaccttttccctctggcagaaatggctgaatcagatagagaaaagtactgcaaaactgcagaatcataagacaaaatagatgtggtgtcaacagccaattaaccagtacctgcaacgtaaagtcattctagaacattttaaaaggacaacacaaaatacaaaagcttatcaagagtgctccaaaggcaagggactatctgatcctcgtgtctccagctctccaagagcaggagttagtaggcatcaggaaaccagggctgtggatgttacatctctggaaggcacacagagttggcgncaggggcggggggttttnaggggntatgttatttcatccagggaggttaaacggcaattcccaggttctttnaaccacanttggggttttttaaagttncccacccantttaacctttttggg

SEQ ID NO: 459435 - DNA, 347 bp, Homo Sapiens
  misc_feature (223)..(223): n is a, c, g, or t
  misc_feature (251)..(251): n is a, c, g, or t
aaatatggggttggaaaatactaacattttaatttatactgtttttcccttctgctcactgaaaagaattaatgaaaatcattcaggaatatattccacagaaaaggtttgcaaaaacttgagatatattttagtagaatttgagtttgtccacattctttggctgttcaatttagtgtgtaacatatttgaatattcaattattatagttaatatatttttncttttatatgaggaattttaatgacagnactctactggataatccttctcataggggcagtgggcatactatcaccatctatccaagggaaatgtggaaaggtgccctggaaatgtgcctactg

SEQ ID NO: 459436 - DNA, 315 bp, Homo Sapiens
tgggcaacaatttgattatagtaagatttcacttcagactaaaaatttaaggattagaattactaatcttctttgatatctatagagaacatttaatctacttcagcaatatcatccttattttaaatgtaataatactacacacaaaaatgatgagaaagtccttatgaactaagacaaagagggttcccttatgccctctgagtggtcctcagattttttatttccacaaacaagttcaatttagaaaataatactggggatcaacagtaagttgccaaattgaaatgaggagaagggagacaggagaaacat

SEQ ID NO: 459437 - DNA, 664 bp, Homo Sapiens
  misc_feature (208)..(208): n is a, c, g, or t
ggtttctggcacaggataaacctttcatttcatggtgtacatttcacaatattaaaaaaaccccagcctggttttcatgattaaagccgtggggaaaggacaatgtttccagggagcaacgactcgcaagcacacccctggggctgtgcggttggccgtcgcggggccagtttcaaagtccaacccacaaggcacaggttttcaaatntttacctctgtgtacaagaacgtacatgaactttaaaaacgtgtgtttcctcgtctgtgtttaacaccctaacgatgatcagtttgggggagacgtacccctccctaatcacaggtagggccacttcccaaatcattgaaacgaccgtcctcttttgtgtcttgacttcaggtgtccggccgaacgacggagttttttccttgcttgtcgatgcagtttctcagcctcctgttgcttcttctgctgttcagacctctttaacgtgaatgtcaattgtttgctgccaacggtggtgttggatacactcaatgtcccattttttgcttcaattttcaaacgatcttcaagggttttgttcatcagtttctgctttgtggcagaatctttgaaacttctaaattcttctcctgctttgatctcataaaactggggctttaggactgtctgctggtcctc

SEQ ID NO: 459438 - DNA, 514 bp, Homo Sapiens
  misc_feature (20)..(20): n is a, c, g, or t
tccctctgcatctccctcantccttcaatcttccttgaaaagagttgtccctaacagtcccttactccttctcaacagtctctccaactgactacctttccccatcacttccacaaaataggcaaatccaaggttatttttctgtcctcacttcactgttaggacctgaacttgcattcaggaagccaaaacagagcaaaaaacagaagtataggaaaaagaatgtctgacttagtagcagtggaaactgaaaacaaaaaccaaaactaaccacattaagctgagaatgagtcaactagttgtgtgatgcataaagtgatgttatcttacataacagagtatgttcactctctgtgtactggtcgttattttacccggaacttagtttcaaggacattttgcaaaataagacttaaactatgactactgcctgaagatacaacctgctgccctagggaatggtatgtgtaggaagggttgcctggcaaatagcaaggtcttttttgtctttttt

SEQ ID NO: 459439 - DNA, 226 bp, Homo Sapiens
  misc_feature (144)..(144): n is a, c, g, or t
  misc_feature (204)..(204): n is a, c, g, or t
tttgcattaaatatcagtaagtttgatataaaaagctcagtaaaattcattaatttgagaatgtgtctatatcatagtaaagttttaaacctacataattttcaatatttataccttttactgcaaaaataaaaatgagtttanccttgccctaaagctgtaaaattaaactctgtacaattctagttatttgaaatataaaanaaaattattggtcatttcatgt

SEQ ID NO: 459440 - DNA, 581 bp, Homo Sapiens
  misc_feature (14)..(14): n is a, c, g, or t
  misc_feature (27)..(27): n is a, c, g, or t
  misc_feature (40)..(40): n is a, c, g, or t
  misc_feature (54)..(54): n is a, c, g, or t
cccccatgtgaaantaaggccaacccnggaaaaaaacaancttttggttccaantaatccttccctatttgttgttcctccccaaggctaagcctgaatagtgccttccgtggtcacaattttaaaagattctctctgcctaataggattttaagccagctgtgtatggcctgtgttcttaaatgtcgattgtatttaattccttggtaatttattcatactttacacacacatatcctctcccaaagaatttttatcagattcaacaattctgcagacttcctttataacccctaccagttaccttgaaagaacaaccagggttagtgcttcttcagaaggaataggagcagctgcatataggatggatcttggcaaatggcaggcagccacactcactttgctccttggtcccctttccacctgaaagcatgcaatcctgatagcagtttgttaggggcatgttttggtacctttggtaacctgaagtgacattctcaatgtcaatatattatcttcaactccttgccttcttttcaccaataaattgctggagacaaaggaattgagtccttcaaata

SEQ ID NO: 459441 - DNA, 860 bp, Homo Sapiens
ttttttttcataatactactgaggggaattgttagatgtattatgtaaggcattcttaatttagttattaaagttacatttttaatatttttaaaccttttgtaaatgctggcttaattagaaaatgtttacagaaaagtaaaaaaattctagtaatatgggaaatccttgtaagcagcatggtttcagaaaaatctcaagatgatttatttcaccaaatgagtattttttaaaactaggaactccccaaccaaaaacacagacttgaataatatttgtgttattacctttattgtacattgagcaagcacccttgtatagaggaaatgcctctttcctcatctataatatctatagtatttagggcctggatgtaagagtgtttttattttactaatagttaatgtattaaatattaagttagtttccctgatttcccattatttggttggcagacatactgagataattagaatgccttatttcaaaagaaactatagcacttattttgttagtaggcttattctttgcaagtccaagaattttcgtgatgtgtgcttttaatttttataacagagtccagttggcaactttgtgggaagcaatgtagtatagtggaaagagcacgggctttcaagtaagacctaggttcgaatcccggctccaacactcaccagctgtgtgaccttgagtgagtgagttactcaatttcctcatctataaaatggggatgataatatacctatttcatagggttgttgtgaggataaatgagataatgtatgtaaatcatctaagtacaatgcctggaatatagtaggcatttggtaattgttaattatttgttcagaatcaattaa

SEQ ID NO: 459442 - DNA, 494 bp, Homo Sapiens
cacgaagggaaccagagggccaacaaaagccccctttaaactaggtaccccaccatcggccgaaatgtgcctaacactttgcctgcctagtcagaacctccagactctgccaagtgggagtagctggctgtttaacatgcgttcagagcactgcccaatctaaaatggctgctcagtaatactttaattgcagtttcatggaaacaaattgctatttaactgcaataagcacttctgtgacttggctgcactaacaataggtgagtcttagtaacaaagctataagtaacattaacttgtaaatggcctttttccaatggcctcttgaaggggtcataggtgggacagcacccaggatagaattccctggtgaagggtgaaggggtctttggggtgaagggtgatggggtttttggatctcctcaatttaaatacaattagttaggctacatgggaactcttcactagactccatatgtagctcttgggttcac

SEQ ID NO: 459443 - DNA, 450 bp, Homo Sapiens
  misc_feature (353)..(353): n is a, c, g, or t
  misc_feature (360)..(360): n is a, c, g, or t
  misc_feature (404)..(404): n is a, c, g, or t
  misc_feature (438)..(438): n is a, c, g, or t
caatacttacatgaagtttatttgctgttagtcttacagactccactcattttcaaactttcttaagccagaaccttttctccttatttttttagtgagattgttttgtacatgttatgcagttagattcttttgtcacagtatgcatttcattctgagaactcccaacctttcaaataattttttaaatttgcgtatattaaagtcagtttttgtgctataaattgtatgggtcttgacaaatgcatgctgttgtgtatccatcacttgagtatcatacatgatagtttcatcatcctttaggaaaaaagtcctaatattgatagcataatgcattcacttactaactggcnctgtagngccctactaactcaggggaattctggtacacacataatggaatntttcgacatgcctttgcctatgcattgaaaatgnggaacaattttg

SEQ ID NO: 459444 - DNA, 397 bp, Homo Sapiens
  misc_feature (15)..(15): n is a, c, g, or t
  misc_feature (31)..(31): n is a, c, g, or t
  misc_feature (42)..(42): n is a, c, g, or t
  misc_feature (50)..(50): n is a, c, g, or t
  misc_feature (58)..(58): n is a, c, g, or t
  misc_feature (345)..(345): n is a, c, g, or t
tcccccaatcaaaanctcactgcctcctgtncaaacccccantccccaancatgtaantggcctgattccttccttggcctgccttttaagccctccaaaaagtttcctctgaaagcccaacccaaccctcctaggtgttaaggcatgctggcccctggtatttcctagatgaggttaggttcccgggacaggagtgtgtattgaggtggagggaaggagctgaaagaaggaggggatccttggaaagggctctgagaggggtgtattcgtttcattctgagacgactaccatctatccccctagactctcacagtggctccaccttaaatgtccacagcatttnactttctaaaatgtacttttatttgactctcataactattttgtgaagtagg

SEQ ID NO: 459445 - DNA, 400 bp, Homo Sapiens
  misc_feature (29)..(29): n is a, c, g, or t
  misc_feature (34)..(34): n is a, c, g, or t
  misc_feature (46)..(46): n is a, c, g, or t
  misc_feature (60)..(60): n is a, c, g, or t
  misc_feature (70)..(70): n is a, c, g, or t
  misc_feature (111)..(111): n is a, c, g, or t
aataaaaaacaatcggtgtctgtctgttnactgnatagtatactangggcccaaacagtncctggcccancaaaggacactgccaaagtaacctgaatgaaatgaaatggnaagtccttgaagttcctttgtgaaggagtgccaggtgaaaatgggtcccatcaggagaggctaggttatgctgtggtaacaagcagcctccaaatctcagtggcttacaaccaaggttcatttcttcactggacaggctctggtccatgtctgtctcactctggaccctggctgaagcagcaagtgtccccaccaggactttgctcaccttatgctggaggcaaaagaaagatggccatagcccccagctggttatttaaacttctgctcagcagtttacatgtgcccc

SEQ ID NO: 459446 - DNA, 432 bp, Homo Sapiens
atttaatgtgttgagcaagatgtacccacacagctgccaatctgacatctctgtttggatgtcacacagatacctcaaattactgcctctgcaaccacatttcttacttacccctttaaatctgatcctcttccaggcttccccatctcagtaaccggccacaccatccaccttgttgctggtcactgtccccgacccctcttcagagcccttcccacagtcacgtccgccatgacaccccactctcacccaagctcacaagtgctccagccggacctcccactgccacgcttgcatcttgcacacattctcccaagtgggatctgtttttaagtgaaattggcacatttgcactttcctgctgaaaaacccttccctggcacctgctgccttttgctcaaatgcagacctcagacccctgcacgtgcatgg

SEQ ID NO: 459447 - DNA, 354 bp, Homo Sapiens
  misc_feature (18)..(18): n is a, c, g, or t
ccctaggaaaggctgtcnttggaccaccctgagatattcctccccttctcatttttcctgaaatagaactaccccttctttagcctttacaccagcttactttttctttgtagtactgatctaacattatatatttagtaatgtacctgtcttcccttctagaatataagctctgtgatggtggatctttgttctgtttactgctgtgaatgtgaatgaataaatgattgaatggcacttgtggcacttgatgactgatgttggcttgagattttgctgtctttctctgcagggggtgtatcctatgcatcttagtctccagttccttcctggcacagagtaacttcttaatat

SEQ ID NO: 459448 - DNA, 519 bp, Homo Sapiens
attttacgtgataactttattttaaatacatattatctaaatcaaatattctaagaaaaagaaaattagctatcagtttcccaaaaacatctttcattttcattgaggaggtggcaagaatgaaagcaaggtgagcccatcattccttaaaagttgaggccatgacttaatcatacttgcattttatgatcatctgactgaagaagtctctctcctccctctctatcctatcaccctgtttctttccttaatagcaattgtcactccctgatattttcttgtttatttattggtttatatgcttcaagtttatctccattaaccaaatgtaagcctaatgaaagcagagctcctgaagtcttgttcacatcggattgcatcctcagtgctacccaatgcctctcagatcattgatatttattaaaaattaaacagatgagcaaaagaatgggcagctggtagacctaataaacgatgtacactaatgaaatctttttcacaaatgtggcgtcatcttct

SEQ ID NO: 459449 - DNA, 552 bp, Homo Sapiens
  misc_feature (472)..(472): n is a, c, g, or t
  misc_feature (484)..(484): n is a, c, g, or t
  misc_feature (489)..(489): n is a, c, g, or t
  misc_feature (502)..(502): n is a, c, g, or t
  misc_feature (517)..(517): n is a, c, g, or t
  misc_feature (534)..(534): n is a, c, g, or t
tttttagttactcaataaaattaatattttatttgtattttaacttacagagtaggttggtaataacagctgaactgtgtaacattgttgcttcaaattgaagtttatattatgaacattcagaatcaatgctcatgtagcagcatattattgagctattttgagtttgaaatgtggagaaacgctaaaccatgtactatgtgttaacataatcccaccttcttagagctttgttccttctgaaggtgtatagatacagcttgtcttgaaatgtctttctccacataatgaagcatgctgaatgctgggaatctggagcagcagccctgggagccctgagttttgaagtgttttggtttgcttcaaaggttaggaagaacttgatatgtatgggcaaacaactttaggaatactagttactcacttaacatggagggcgggtaaatgttgctctaggattctattatttccngtaaagccaggntttcntattattggggtngggcaatgatgggcntagattagtgggtggcntgtaagttgtagttatag

SEQ ID NO: 459450 - DNA, 527 bp, Homo Sapiens
  misc_feature (84)..(84): n is a, c, g, or t
  misc_feature (212)..(223): n is a, c, g, or t
tccctcagacgccatcgcaggcctcctcgtgtggacgctgggcttgacggcagcctcgcattctctccccacgcggcccacgcntcacgcctgctccacacacagtctcctcaccccagccggcaagctttcttgcaacccctctcctcctccacccacccagctctgtcattggagaaagtctgggaagctgagagttaaggtgctggggnnnnnnnnnnnnggagggaaaatctactgtattccggtgatagaaaatcctgccaggagatggggctttagtcccaaaagggacccaggattctgagattgcagcagaaattaaaaatccaaatgaagcctcctccctttctagaattttccatctgggcttgactgaaaaatcagccaaaaatcaggagcctggtccttctcacagagaagacaaaggtgagtctgacagagcggcaggctctgtgacaccctgcaggagatagtgagggtctcggggagcgggttctgggtggctgtatttagggcggctgtga

SEQ ID NO: 459451 - DNA, 430 bp, Homo Sapiens
  misc_feature (286)..(286): n is a, c, g, or t
  misc_feature (305)..(305): n is a, c, g, or t
  misc_feature (312)..(312): n is a, c, g, or t
  misc_feature (322)..(322): n is a, c, g, or t
  misc_feature (407)..(407): n is a, c, g, or t
  misc_feature (419)..(419): n is a, c, g, or t
aagttatgttccttttattcccactgcactgagccaatggcgttcttggcacccctgactgcttgcctggcctgcctcattaattgcagtggcacttggccacccttcgaagccccttgataagccgcttgtgcccctgtttggagcccagtagtgacctgtgctgtccaaaggggcgctgcccggagcgccacctctgctgtcgttgcctcttgaccttgagcttggacttggaggcctgcttcttgcccagggtgaaggagcctgaggcccccctgccggtcanctgctgagcccttgtccancagcccnttgagcacangtttgaagtgatagggatttcgggccatgttgtagcccgtggtgggaaacagcctttttcagggtggccaggggacaaatatttngcaggtcccttnttccggcaaag

SEQ ID NO: 459452 - DNA, 396 bp, Homo Sapiens
  misc_feature (20)..(20): n is a, c, g, or t
gctgctttaatagcggcacngcctgagtcaggctttctgtgttcccaggaaagggtgggagcgtttgcatcacaagttttagaaacgcacaggaagaggagatagccctcatcaaacgcggtttgccaaaaactgtaacttactctcaatagaaataatatgcattgaaattattatagtcaaatgtacacagccaacaagattcactttcataatgtattttatgaagtataagaaaagtcttgcatttctaaagtaatttggtatacttacgcttgaagtaaataattatacgtaacttcactgggaaaaacagttttttaaaggataaaaagtaggagctagttatccaaactgtctataggaacagaaacgttactaaaatgaaatgggtcc

SEQ ID NO: 459453 - DNA, 433 bp, Homo Sapiens
tgagccaccacgcccagccaagtgctccaagtttgcatgactatcattcctgtatgagggaagaaatagctaaattcctccgctacagctacaggaacaaaggctcattaaagctgatgatctgtttacatgatcagaggtagatctagggttggaagccaggtctcctgagtatgcgagaataaatacagtcatggaagtgtaaagagtctgccaacattttgaggaatgtgaatagggtttgggctaaaattaaggggatatacagaaaagtcatagggaaatcaggtttaaaggacataaatatgaggtagggttacagagtttttttaagtaataccattaaaacttttaggtttttgcccatgtcagtcattttgaaattatttttaaagcaaaaaaaccctttttaaacaagaaatcttatgagatg

SEQ ID NO: 459454 - DNA, 163 bp, Homo Sapiens
gaaatgtgaatatattttattttttcccagtgagtacacaatacacaattctttgacaatactattaaccgattttatgccaatttcttctctgatctaacaacatcaaatgaaacacattaagattttggatgctgcttggtgacttaaacaaactacagtt

SEQ ID NO: 459455 - DNA, 477 bp, Homo Sapiens
  misc_feature (29)..(29): n is a, c, g, or t
  misc_feature (35)..(35): n is a, c, g, or t
  misc_feature (73)..(73): n is a, c, g, or t
  misc_feature (83)..(83): n is a, c, g, or t
  misc_feature (88)..(88): n is a, c, g, or t
  misc_feature (106)..(106): n is a, c, g, or t
aacgccgttccaaaaaactgctccaaccnggcganggactgcaactccaaaggcgttaactgttgcccactgncttgcgtgcnggcanctctcaacacatcagcanaaagatggagatggagctccgtgaaacaggaggaataggaagtcccatgactggcgagaacttcagtcaaaagaactggaccgcaccgctgcaggcgccaagtcaatgtggaaagcagcacccggccaaccccagccacacacacaccacaaacacctatcagcccctcagttcacatcctgctacccacaccatccatgcttgggtcacaacgtcccctccaattccagggaaccctccttccacctcgttacaatcgctcatagctgcagccttctggggccacttccaccagcaagcgtcaggtcttcttccagctgccgtatttaatagttgtttttagtgggatgaggttctcgagtgctgtgacc

SEQ ID NO: 459456 - DNA, 509 bp, Homo Sapiens
  misc_feature (61)..(61): n is a, c, g, or t
  misc_feature (80)..(80): n is a, c, g, or t
  misc_feature (191)..(191): n is a, c, g, or t
aaaacccaaatgaaggtggaacgtgctgcctcaatccctgctggtctttcactgtcaaaanggaaatggtaggtcccccnacctggagaccagtcaacagtggctattgcctttgtccaatattttcccatctcccactgcactggggcctctgacgtgctcccagtggtagaagacaatgccgtggtcantcgctgctgctgctcccatcccagggtagcactttccactgggaagatcagctctttatcagggccggccacagccactggaggtctattgttttcaggctggacaatcacagtcaccacagcagtagactgttgccttgaagaatctgtcaccttcagctgaaatgtataatctccttcctgcattgcagataaatgaaggtatggcgtctgtactccctgcatgaccacatgtttgccctcactcccaggacccagggaccactcatagaggacaatctggtgatcgtcactgctctggtttccattcaaagtgat

SEQ ID NO: 459457 - DNA, 630 bp, Homo Sapiens
  misc_feature (616)..(616): n is a, c, g, or t
aatataccagcattttaataaaatttcatatttcatttccataaggcatggatattttatccagaaaattatgagtccatagtttaatgtgaagaatattaggaagaaaattaaaatttgaagacaaagtttttggaaatcctgtctaaatatattagcctttattttaaaatttaaaatacaaaaaaagtatgatacagttacacttagcaactttaacacacatttttcagttcattaattcaagaaatatttagagaatatatatgccagaaataccaaatgaacaaaactgacaaagcccctgccttcatgggacttaccttctagggcatgtgatgggcatgtttggggctggggagggggaagtatagacagaaataaagaagcaaactcatagattgtcaggtacaggggatagggaaggcagatgggagaagggtttgtcttactgataagataatatttgaactgagatcactaaggggagctctctggggcagagggaacaaaacactaaagcaggaactttcttgggagccataatagggtaagtaagaggcagaataatgagagataagagatggtgttagaaaaaggtagaattgcatctgtntgtgtgtgcatgtg

SEQ ID NO: 459458 - DNA, 672 bp, Homo Sapiens
  misc_feature (35)..(35): n is a, c, g, or t
gaagatccattctgaaaagaagcatgtaggtcttncttttggcccacaggcattacatcaacataaccaccgtgatttcgaacccactcccagcatgtactggcgctctgcagatactggacagatcagaataaactcgagtcccaattacacgagcataatgtggatttgcttgcatacagttacgaggacagtatactcttgggcaatgtgaagcaggcttatgaaatggacagagctgttccacagttgtttcacaagtcacagcctgaactgttactttagagactgtgaaggaattagcagactgatatttgccaattgtttgaataccatttctattggacttgatgaaataatgctttcttccttgtctagtgatatctacccagccaccatcattgtctattataccataatgaattgcagctctacagatgctggattgcatttcataatgtacactgccaataactttagctttactatccaaacagccagcaggacattcgtacctattgcaggttgttcctttgcactgatctcttaatcttacttcacaagaaacaatttgggacatttgctgtgcgcttatgacttcatttctgctactatcatctgatcttgtccggacatgggtgtcatggacttgtgactgctgtcgttctattt

SEQ ID NO: 459459 - DNA, 293 bp, Homo Sapiens
  misc_feature (18)..(18): n is a, c, g, or t
  misc_feature (30)..(30): n is a, c, g, or t
ccatatacagcactctgnttttgagttatntatgatacagtttcctacttatttgagccttttttaatgttaacataagttttattcttttccataaggtcttactcttttttgtatgtttattctgatgtatttttaaacttctttgatattgtaaatggtgtcctttaaaattttgcattttctaactgtgtgctagaatgcagaaatgcagttgatttcatatattgattttgggactgacttaaactctgactattctaatgatttagcaataaattctagataacatt

SEQ ID NO: 459460 - DNA, 393 bp, Homo Sapiens
  misc_feature (57)..(57): n is a, c, g, or t
gggttgggtcccctctggtggacccagtccccccaccctgaaagctatcctaggggnccccacccataagtcacttccatttagccataacaaagatactcctgtcacacaggaaattcccaagattttttgaagctgtgtcagcaactagggataaagatcagctatattctctattataccacaccatacttgaagtcttctctgttgacatactcgaaaaaacacacagagacaagagacaagacagcttgagtagaaaaccataagctgaatgctggccccagtacttatattatcagaattctggagagtaaagagaagaaaataataggagagggtaggagacgaggatgcagtcctagggactaatctctacctatgattttgccc

SEQ ID NO: 459461 - DNA, 334 bp, Homo Sapiens
  misc_feature (110)..(110): n is a, c, g, or t
  misc_feature (255)..(255): n is a, c, g, or t
ctcagccctgaccactggcagctgcggcttataggcttatcaagaccctgcattactgactgccagaagcgaggcctagaccccacccatctgggatgccccagataggntctatcctcatctgcccccctgccacaggttagcaggacgaggccaagtgccatgatctgaacgtcctgccagaatcacatgttgaagtttaatcaccactgtgacagtattaacaggtggggccttcagggaatgactaagtcnatgaggcagagccctcacgatgggattagtgatgttatggaaaggcgtgaggggccagttcatcccataccacggtgtg

SEQ ID NO: 459462 - DNA, 506 bp, Homo Sapiens
  misc_feature (13)..(13): n is a, c, g, or t
  misc_feature (26)..(26): n is a, c, g, or t
  misc_feature (36)..(36): n is a, c, g, or t
  misc_feature (54)..(54): n is a, c, g, or t
  misc_feature (84)..(84): n is a, c, g, or t
  misc_feature (97)..(97): n is a, c, g, or t
agttacgggtagncagcctgcccccnagcgcccatnaagggtccagttaagtcngtccagggaaggagccacccaaaaaaagtnatatatggtgtgnaagtgccaacgtgaacaaacaaaagacaaaatggagtatttcctagtacttgactatccttctgacaattttcccctcttgaaaagtaaaagaaggggtaaaatacttctgtttatctgtgagtcccataggatataactgagcaaaaggaaaacgggacagataacctaatgggggattaaattgggagataaaacacgaatactttatatacttcaaaaattcaatcaagtaactaaaatccagacagcttttaagtctgtagatacaaagaaggaagatgagaaagtagttgaatctgctgagcttagtatgtaggacagtgaattctgattttgtgccaggttactctagctcccagatttaggcctcccagcaacaatctttgaaacactgagtatacttaaat

SEQ ID NO: 459463 - DNA, 525 bp, Homo Sapiens
  misc_feature (12)..(12): n is a, c, g, or t
  misc_feature (34)..(34): n is a, c, g, or t
  misc_feature (91)..(91): n is a, c, g, or t
aagagggaaaangtccactccacacacagccccnttcctacctgttctcctactttcctcagcataatggccagagggaaaagaaacaccnggagaaaaagatgaagaattgaactccctaccccctttcctgcaagaaagagaattcggaaaaacctccttgccttttaattgaagaaagcaggcccagtcattgagttctctgcctctatcttgcttccctgtcactgcatgggctagaattacttgcagttacaaacattaatgatgaggagtgatatgtggaagagatcagccttgcctggggcattgggaaggataatggatggcagcccagcttttaaacataatttgcttacacagaaatgtgaagcagatctgtcaggaaaatcagttgcagacgatacttagcacttaatgaaaatgtaggatttttgttgctgctcatttcttcctaggaatttggcctagtctcagagatgtgccatttgtgcttaagtatatataccatggtcatactgtgcc

SEQ ID NO: 459464 - DNA, 477 bp, Homo Sapiens
  misc_feature (22)..(22): n is a, c, g, or t
  misc_feature (50)..(50): n is a, c, g, or t
cccttaacttttgcccccccantggtttgtaccaagaatctcccacagcntcctttattcataactgcccaagggacaaacaagccaaatgcccccatcattaggagaatggatgaaataaattgtggtaaaatccataaaagggattacctaccatagcctataatccaccataattgatgaaaaaaaaggcatgattcccaattatatgaaggtcaaaaacaggccagatgactctcaagtgacagaagtcagaatagtggttacctcaagggatgggggcttctgactaggaaggtacccagggaggcttatgtggtgatggaaatgttctattattttgatctgggtggtgagcacccaggtacatgaatgtgtaagaattcatcaagttgcacagttaagatctgtgcatttactgtacacatgttctacctcaattaaagatttaatatcatatcttaaatgtaaaaaaaa

SEQ ID NO: 459465 - DNA, 685 bp, Homo Sapiens
  misc_feature (43)..(43): n is a, c, g, or t
  misc_feature (93)..(94): n is a, c, g, or t
  misc_feature (110)..(110): n is a, c, g, or t
  misc_feature (386)..(386): n is a, c, g, or t
ctaaaacgtcgaaaacggcttttcaacggaaagcttccccaanaacaaagcccctgccccctggctttgccttctcgccttcctcaaaaacannactgctttcttacccnacaaaaaggtggggaaaacaccgcgttccccccattgtccgtaaaggaaatcccaacaggcaatgcaaaaaaatttcaattattcaagtggaggttctccccaggcaaaattcccactaaggaaaaggaacaaggaaagactgcacgtcctcatgtgacatggatgacatggaatggggcgaggccaccattaccatgaatggcgcggctggcccccggaactgacctcgctgtgtggctgcaaagccctgcagacccaaagctcccatccctccnaaaggctggaggctggtgacccttccgacatcccatccccgggtccctgatgtgggaaggggaagagcccacccctggacccaaacctcaggcctccatctcagggtcacgcgggcgatttgcaggctatgcgtgacgtggcgcttgttccttcctggttttccactcaaattcagccaagaggtgggcggggctgcgggcagcctggccacttttctaaaaagcacaactttcaattccaccattgaaaagtgagctgtgccgggcgtgagctcactcacagcgctttctagtgttca

SEQ ID NO: 459466 - DNA, 776 bp, Homo Sapiens
  misc_feature (44)..(44): n is a, c, g, or t
tccaatccccgggtcccctaaatgtgggaaaggggaaaaagccnaaccctggaccccaaaacctcaggcctcccatctcagggtcacgcgggcgatttgcaggctaatgcgtgacgtggcgcttgttccttccctggttttcccactcaaattcagccaagaggtgggcggggctgcgggcagccctggccacttttctaaaaagcacaactttcaattccaccattgaaaagtgagctgtgccgggcgtgagctcactcacagcgctttctagtgttcagagaagcctcgggtcacccacgtgcctgtcagagtcctgagatcacaacaaaaatcctgcgaggactcggctcagctgacacgtctgttttgcttttgcctttcaaactggcaacgatggggagaggttggtcagaaggcaggcgggaggagtctgaaccatgactgcttgaaaataagcctctattgtccacaccaaagccctaaggcaggtaatcaaattctctcccaaattccctgaaaaccagttcccctttccctgtcccagtcaacccagtcactcatgcacctccatcaggactggctggtgaacacgcctgggacagcatctgaacgcacagaaggatatgggatgaatgcagtggctctggggactcacgactaacattttctaggattccgctgaggctggttttatttgaactgcactgggcccacgtgatccagaactctgtctctgagtgtgcacccagagctgtgtgtcagagagcaggtgt

SEQ ID NO: 459467 - DNA, 521 bp, Homo Sapiens
  misc_feature (56)..(56): n is a, c, g, or t
  misc_feature (61)..(61): n is a, c, g, or t
  misc_feature (66)..(66): n is a, c, g, or t
  misc_feature (71)..(71): n is a, c, g, or t
  misc_feature (87)..(87): n is a, c, g, or t
  misc_feature (95)..(95): n is a, c, g, or t
  misc_feature (102)..(102): n is a, c, g, or t
tctgcttggggttccaattcaaacttggtccctgtcccttgaattctctgtaaaanggaanataangttangtggttgtgggaatangatgaaantaggaangcaaaaacacctaaaaatggtccctggcaacatggcaggctctcaatcggatgtccgttcccttcacttggttccctttccccacagtaacaaggcttctcccaggtgagagctgatgacaaacgttgaacagacattgtattcgctgctgacaagcatcccaaaggaaccttactaaaaactccaggttgtgcagtttgcctggcaccatacagtagtaagtggaagagctggattcacggctcagggctttggtctcctggggtcccatttgagcagaaccggccttcctgccttcccttcctctgttgcaaggatggcctcttcaggaggccttggagccaggctctgggggtatcatcccccatcttggtttgccaagtcacgtgatccctggagtggggatgggaccatcaggg

SEQ ID NO: 459468 - DNA, 364 bp, Homo Sapiens
aaccattttgaaatgtataattcagtggcatttagtacattcacaatgttgtgtaaccatcaccactgttagttccaaaacattttcatctccctaaaaggagaccctgtactcattaagcagtcactctccatccttccctcccctagaccatggcaaccactaatctgctttctgtctgtatgaatttacatattctaggacatttcatataaatgggaatcataaaatttgtaatctttcgtgtctgatttctttcacttaggcataatattttcaaagttcatccaccttgtaatatgtatcaaatccttcattgtggggttattttggggctgaataatattccagtgtataaatatac

SEQ ID NO: 459469 - DNA, 177 bp, Homo Sapiens
ctttgaatattccagaaatttactggctacagacagggatagtggtgaaggaaccatcctaaacagagtaaatgcagaagttactgtacagaaaggaacatgcagaacacatccaccaacgctctcccaccctctcccttctcccacaagcaccacacagagtgactcgagaaaagc

SEQ ID NO: 459470 - DNA, 448 bp, Homo Sapiens
aagttttaataactggagggccatgaaacttatggactttgaaaagctggaaagtactcttgagacaaccacagccccacattctcattcagaaatgaggatcgtggcggggcaaagaggtgacttgcgcaggctgcatagttaagggtaacaacacacctcttgatttaaattctagaagtctttccactgaacccccagaagacagtctgtcttttgtgagatagcaaagtaccactatgttggatactccttgcacttaggtgtgaaccacatgttctcaaattaattcaggttgtcttagggtcagttgcagtgtgtggtcattggtggcaattttttaaatgcccattcggtagaaagacatgctttgcaatgtttttgaacgatcttcctctcatttcacatgttcaattaacggtgccacggagggaagctttcatcttat

SEQ ID NO: 459471 - DNA, 388 bp, Homo Sapiens
  misc_feature (318)..(318): n is a, c, g, or t
  misc_feature (335)..(335): n is a, c, g, or t
gtacagcattggaaaaaatgtctttcttcatcgtctgcgaaatccttaagggcaggctttattttttttccttctctctctaagtctctatgtgctgtgtgtagcagttagcaaagtgggcctttcagttttcaaggataatatatagtgcattattgtacctgcctctcagaggtattttaattgatatgtagttaatgaaggacgtggtgatgttcttagaaattgctgtgaaatgtgaattaaagaatgatcaacgggactagtgggcacagcttgtcaggcatgtttttaattaggcatttatgtaactttccnattttctggggcatccntgggaagacacatttaatttaaggaaattaaaaagggaaaatttattttttcc

SEQ ID NO: 459472 - DNA, 314 bp, Homo Sapiens
  misc_feature (13)..(13): n is a, c, g, or t
  misc_feature (32)..(32): n is a, c, g, or t
  misc_feature (54)..(54): n is a, c, g, or t
aatgtaaaacaancccataagagggccagganaagggaaggggttccaccccanatacaaaagagttttaaagtttgttttcccctgcctacctcttttttacccttgggtgcagctgtacattggttctataggggtattggtcctatagtttaaaaacactaagctaaatctctggtaaattaacctaatttagcacataaaatatgttttcatcaaacatatgggataggaagggataggaagatggcccggtgttatgttgatgcatggcataattaaaaacacagctaagaccaggcactgtggctcat

SEQ ID NO: 459473 - DNA, 415 bp, Homo Sapiens
  misc_feature (392)..(392): n is a, c, g, or t
gaatttgaaaatagagtgatttcattttaaaaggagattttagattagtaagaaattgttactctctgattttatttctccatttgtttcttctcaaccctgagatgaagatccttctgatatcttctaagataaaatttgttcagcatttagagcattatttttttctatttagtcctctattgtactagtacctattgctgcctaacacattatcctaaaacttaatagcttaaaataacaaacatttattacctcagtttctgtgctcagaaatcccattgtaacttacctgggatgcctctgacttgggggtctctcccaaaggctggcagtcaagcatcagccggggctgtagtcatgtcaaggttctaattgggggaggaatctgnctccatacctactaataggtccc

SEQ ID NO: 459474 - DNA, 232 bp, Homo Sapiens
ccagtttggccttagttttgttgcagaacagattataactgggatcagagtatttagcaaaggatctatcccaaggctaaagattaacctaagaagaaaagcacgaacatgttaccacaaattctctctgtagtctgaagatacctaataataccaaagaaaggcaggcaaaaatgactgactttcttgctgcaattaagaaattctgcttttctgtgaatgaatgcgtggt

SEQ ID NO: 459475 - DNA, 481 bp, Homo Sapiens
agctgtctctgatttgctttttgtctgtacactaccttttaaaatattttacaacttcaaccgccactggccttttggtgacaccctctgcaagatctctggaactgcattccttaccaacatctatgggagcatgctctttctcacctgtattagtgtggatcgtttcctggccattgtctatccttttcgatctcgtactattaggactaggaggaattctgccattgtgtgtgctggtgtctggatcctagtcctcagtggcggtatttcagcctctttgttttccaccactaatgtcaacaatgcaaccaccacctgctttgaaggcttctccaaacgtgtctgggaagacttatttatccaagatcacaatatttattgaagttgttggggtttatcatttcctctaaatatttggaatgtctctttggctcttctgtgggtgctggggaactcttcggcaaggcctgctaactct

SEQ ID NO: 459476 - DNA, 486 bp, Homo Sapiens
  misc_feature (141)..(173): n is a, c, g, or t
ggggcacaaattcagcagctcctggctatattaggctccaaaattcgataagaaagaataagtattttcaggttatatatctctactcctccctccaaaaaggattaattcaggttttaataaatgtttttgctttatagnnnnnnnnnnnnnnnnnnnnnnnnnnnnnnnnncaatttgctcctgacctgggcacaaatgcagcccctttctggctgtgctgtgctccaaagtataacagggaggataaatattttatagaacctagtttcccaaaatgaaggataacgtgacattttaaggaaaaaatatgttgggtgttgctcaagtttttttattgacactttcctgttttaagtaattttccaggcttttacctgccagacacgtatttaggcgctttctggctttgaagtttgacatgaaaattttaatttggtgtaaaaacaacgaagttttttaaacctcacactgctggtgattata

SEQ ID NO: 459477 - DNA, 440 bp, Homo Sapiens
  misc_feature (13)..(13): n is a, c, g, or t
  misc_feature (31)..(31): n is a, c, g, or t
  misc_feature (49)..(49): n is a, c, g, or t
  misc_feature (56)..(56): n is a, c, g, or t
  misc_feature (61)..(61): n is a, c, g, or t
  misc_feature (69)..(69): n is a, c, g, or t
taactgtggggcnttttaatcccccccaggncctccttaaaaaccttangccctanaacanggacttangaacatgtttttaaacaaagttatatggaaaatctcccttttgtgctcccacattgacagagcctgtctgaatccccagagaaggcaatcacatcctgttatgttgtcagtgtgagaggcaaaagctccaaagtactaagttcctagagctgtaaatccattgtgcttcatgttataaataaagaaattgccctgtgacagctacagtttggaagcattatcatttctcttttcagctctcacttttaatcttttcagttattttccttagtaaaacttagccaccaaagtatgacttcttgtgtcacaaacctatatgccacaattaaaagaaagaaattccagccaaccatgtcagtgctgtagtcagc

SEQ ID NO: 459478 - DNA, 249 bp, Homo Sapiens
ttccagacacagacatgctggcagtgagagtgaaaggcgggagactttctaaacagtttttctttcaggaattctgtagcattcccccttccctctgttaggaaccaaggacatcagaaatagcaactttaagtggcaagccggaggaactctgttagaataatccacacagtgaggcaaatatcaatctaagcattgtggatggaaggaatggtctttggagagagcatatccatctcctcctcactg

SEQ ID NO: 459479 - DNA, 495 bp, Homo Sapiens
  misc_feature (452)..(452): n is a, c, g, or t
  misc_feature (468)..(468): n is a, c, g, or t
ttttttttcctaggggtttataaactctgtcttttccatatcaggttgaaacttagaatataggttgtcagccaacataccagcatttttctaaaaataacccaaattggttaagccatttttaagcgatggaacagtcaggggagggaaaaaaaggtgcgttgggcaggaaagggagggagggattttaaaagtggtttcacatgctcttttttgaacagcttcaaacaaaatacagaaaaggccttgtctgaatgagaggaacgtggaccagtgactgcaggtgctggctggccacggggctgtttgtggcttctctggtgcactttgggcctcagatctgctgcttaagggataggagtttgacacccccgcatgtggggttctccagaacatcttcctgttaggggtttggggagaggggagatggggatttcacagggcagcaggantttttttcttgatggncccttgggtggtacaggagctgggaca

SEQ ID NO: 459480 - DNA, 360 bp, Homo Sapiens
ctaattccttcccatgaaaaccacattttagtagcagcctagttgaattaaaggcatctcatggcttaatttaaagagaaaataaggtttgccacagtaattaaccaaaaaagagacaagatgtcttagaagagagattcaaattatcccaatgctgaagttaataggaatgcttttttgcttttctccctagaggctatgtcgatctggcaaattagtaatgtgcctcagctcattggtattctatgccaagaacttgtgctgcaagataaaagaatgtgactgtagtaaaccctacaataatgactttccctgagcttctctagggcgtttctggtttattcacccttccctttctca

SEQ ID NO: 459481 - DNA, 253 bp, Homo Sapiens
  misc_feature (233)..(233): n is a, c, g, or t
atgagaaatttccaacattctttattatgtaagcaaacacttttaatgcttaactgtgataggtttggaactttcctttccaagttgttacacagaaggaaagcaagaaagaaagcatgaaggccaattagaaggttcattcaatatttctcagaaaagagaatgatggcttagaccagtggtgatgttcaaaatcttacaaaggtagaagactagcaacatttgtgactganttggatacggaagtgtgtga

SEQ ID NO: 459482 - DNA, 778 bp, Homo Sapiens
  misc_feature (654)..(677): n is a, c, g, or t
tcagattcacaagctttaatcattactttttctgttatacattgaattgtggatgtcctttaattagtaaaacagccactaaaattgtttttatggtttgctatcacaaaagtcgaaggattgctagaatgctgtttacctgtttcaacagctcccatcaactaccgctactcactttacatagaaataaaaacagctactattcattgagcctatttctatatgggaatcttagtgtcctcacacacattaattcactcaattctccccaaactctatgaggtaaactattatgcccattttagagatgaaactgaggtttaaagagattaagtttccaaaaatcagataactaataaggagtagagtgaatctgaatttaagtctcattgcagagagctaaagttcttacacagcatgggtatgcggacctttcaaccactggaaggggcattgtgaagtttgcatatagtatgccagtcatcaccaattatggggcctgactaagccttttgattccaggcaggcacaactaaacagaccagtcctcggggacacaaagacaagactggccctgcaggaaaaacaaagatcaaacaaatcctgccaagccacagccacactgaacggcttgcttatctctgcaggaaagannnnnnnnnnnnnnnnnnnnnnnnaaataaaactatggattataactctattaaaaactggaattcagttcccatcagattttgtcttaggcctttttccatatggtcttatgcttaaagaaatc

SEQ ID NO: 459483 - DNA, 457 bp, Homo Sapiens
gagaatacaccaaagattaatgtcaatggcaagtgagaaattgtccctagagaactattcaaggactttttcttactacatttgattggactggagtgaactgacattatagcatctttatcatcacctttaaaattctattttctcttagtagcaacagtgaagactttagaactattacttactttaaattattaaagtatatcacagacaaaatattcaattttacattaaagcaacattaagggtctcaatttcattgaacagaaacaaatgctgaagaaatttacaggtatgatttaattttagagagtgttctttctttagggaacaaaatgaaactagatctctcatttgtctgtatgggcaagatatggtaaaccctcatgatcaaaacacatgccagttagaaacttgatcacagaaaatgatgctcagtgttgaaccccaccattaa

SEQ ID NO: 459484 - DNA, 104 bp, Homo Sapiens
taactacttgaaaaaattcacatttatttactgtcaaaccgtgttaaactttacactggatattagtgatgggctcattattaacaggtttacacaaagggatg

SEQ ID NO: 459485 - DNA, 503 bp, Homo Sapiens
  misc_feature (12)..(12): n is a, c, g, or t
  misc_feature (29)..(29): n is a, c, g, or t
  misc_feature (39)..(39): n is a, c, g, or t
ttcccggggccntgctgattttccagagnagacggcacntccaaattcagcagctgtgatggtcattcacccacctgccctaaatgtaaatctctgataatccttcagtgattccttcaagtctcttcccactgccctctgatctccctaccattgcctcgcattggccagtccctactggaagatgtgtaccccaggtgatagaatacagacatgtcagcctccaggggcacagcacaagaagaaaaagacggagaacaagactggagaagcaaacagagaataaccagtgcaggccacatgccatggattgtcttctcagaaagttactgaagaaagtgatccccaaatgagaattaaagataagcaacgaagagatatacagggaccaggaaaagagactcagcataggaagagacatgaggggagtggccaagatgatgatgaaaagaagtcctaagccatcagtttgcaagaatcttagtagcaagttaatttctgga

SEQ ID NO: 459486 - DNA, 512 bp, Homo Sapiens
  misc_feature (337)..(337): n is a, c, g, or t
  misc_feature (386)..(386): n is a, c, g, or t
  misc_feature (394)..(394): n is a, c, g, or t
  misc_feature (401)..(401): n is a, c, g, or t
  misc_feature (408)..(408): n is a, c, g, or t
  misc_feature (426)..(426): n is a, c, g, or t
  misc_feature (448)..(448): n is a, c, g, or t
  misc_feature (458)..(458): n is a, c, g, or t
  misc_feature (471)..(471): n is a, c, g, or t
  misc_feature (478)..(478): n is a, c, g, or t
  misc_feature (493)..(493): n is a, c, g, or t
tttgatttcctgtaaactgaaaaggatatctaaaggctggattcaattctggttatccattttgggcaagaatactttgtggttgatacctgtgttcctcattttcgttacacaagggggcacataatatctggtttttccactgttagtgatgttaagtattgttccttgaataaggtggtaacagccagaactctccattgtgaagttagtttttgccctcatgactagtaagtaaactgtgaagtcatgctttggcgccactgtgaatgttcagttacccattgcccttttgcctaagattttagcatgcgtttgatgattataaccctaatgnaatattccattcaagtgacaaaatgggggatttccccaattcttatcantttctttnacacttnatcagtnatcaattccttccataanggaggagggtttcccttagggnacctgggggnccattttggggtnccccttnctgggaagggggcanttatggaatccctgggatt

SEQ ID NO: 459487 - DNA, 252 bp, Homo Sapiens
  misc_feature (23)..(23): n is a, c, g, or t
  misc_feature (175)..(175): n is a, c, g, or t
  misc_feature (214)..(214): n is a, c, g, or t
  misc_feature (230)..(230): n is a, c, g, or t
ccataaatatctttactgttttnatgatatggggcggcactaaccggtagaaatacagtgacagccaaacatgattataatttgaggttttctagtagccacattaaaaacaataaaaagaaacaggtgaaattaattttaaaaatattgtaaacccaatatatccaaaatatgntcattacatgtcatcagtataaaaaatcatttgtatttngcatttttttattgtnctgagtcttagaaatattgtat

SEQ ID NO: 459488 - DNA, 365 bp, Homo Sapiens
  misc_feature (345)..(345): n is a, c, g, or t
tttttttcaggtttacagatactcattttattaagaaggaattaatgaataaaacacagagagaaaagagggtcacgcatctaccaaatatgacatgaagggttttgattagctaaaaatggacagtcaagaaggcagagggtcaaaagatgtagatggccatcagttaaaaagacaggcactcaggtccagctctaggaagagaaataaactaacagatacctatgcaggcattggcaaagcaaagagactttcctttcctttgttgagctgaaggcgagggtggtgaattcctgtttgtttttggatccctgccttgccttcacaccagggacccagtgtgtnggtcccacgttccttagata

SEQ ID NO: 459489 - DNA, 583 bp, Homo Sapiens
  misc_feature (468)..(468): n is a, c, g, or t
  misc_feature (484)..(484): n is a, c, g, or t
  misc_feature (495)..(495): n is a, c, g, or t
  misc_feature (500)..(500): n is a, c, g, or t
  misc_feature (526)..(526): n is a, c, g, or t
  misc_feature (539)..(539): n is a, c, g, or t
  misc_feature (546)..(546): n is a, c, g, or t
  misc_feature (570)..(570): n is a, c, g, or t
agaagtgtaaatgctagctcaattatggagatctggaaaggcagtctgtggagtctggattgactctctcgggaagtatagagaccctaaaggtggatgaactgatagcctcccaccccatcaaaatacaaggcataaacatgtatgcagtgttttttatcttataatatcggcaaattgaaaaattgagtctctctgcatggaaaaggaaaaatagcactaggcatcatttaataaaaaactctctttttaattaaaattaaatgtccactgtaagaaaaaaacaagtggtgagcaacaaatacccacagccttgtttaaccacctgtgatgaattataattagggtttggaaaattattgaacttttttccccctgtttcaccttgggctctctgaaggtgaatttccaagagtgcaggagggaatgaatattaaaagtttgttttatacttggatgccagagctnccatctcatttttccnttaagctcaanttttnaaatttttcggtgctttgcaataatnacatcttcagggntggcacntatttccatggcatgcttatggtnattccattctttg

SEQ ID NO: 459490 - DNA, 447 bp, Homo Sapiens
  misc_feature (355)..(355): n is a, c, g, or t
ttttttttctaggaatgaagcttaataatttttttctataattgaaaaaccaagctaaagtgaaatgacctatgagcaagtggcagaacctgtactaaaaacatatttccttatgcccaacagggttctctctctcacaaccctctgttagagaaaaaaagcacaaagcagggctacacactccactctcccttccctaaggaatctcagaaaagctgatgaatgcatttggcatcctctccagaagtgctggaaatagccgttataatgcagggtctgggcttgggaattccacagctctccccacgtgggaccaaatcgacttctgtcactggacaaggcaggcagcgggganttcggagttaagttataaaatactgctgagcctcagttttctaaatgtaaatgggagataattcgtacttactgacagttggggtgtggtgg

SEQ ID NO: 459491 - DNA, 431 bp, Homo Sapiens
  misc_feature (24)..(24): n is a, c, g, or t
ggtatggacacattaaagtttgangaattacttcatttaacaaacaagtaaccatcaacacacgtgaaagcacctactttagcaatcaatgctcacactatcctctctaccccaatttctgacttaacaattgggttctgacttaagagtcagaaatgcctgactctgaaattatttcatggcatttaaggaaagtcagtatctagccttttctttttccaaaagaacttctctgaaacctctcttccccataaacaaagcaatttctcccctaaactcctaaaacacatgcttgtatttcttaagtattgcactaacccagaaacatttattgaatacctatgtactggggaatgggccagacaactcacacttaacttactctagagttaattgtccaggatatattttattgccctaactaaactgta

SEQ ID NO: 459492 - DNA, 155 bp, Homo Sapiens
gtactttttataccaacatcacttgtgtccagggtccatttattttcagtctgtagccatgtgccacttgaattgttacatgagagaaggtgatgtattcagtaatcatggatggaaagaaatggtcactggtattttttgtaatgctcattttt

SEQ ID NO: 459493 - DNA, 868 bp, Homo Sapiens
  misc_feature (557)..(557): n is a, c, g, or t
  misc_feature (567)..(567): n is a, c, g, or t
  misc_feature (570)..(570): n is a, c, g, or t
  misc_feature (581)..(581): n is a, c, g, or t
  misc_feature (586)..(586): n is a, c, g, or t
  misc_feature (600)..(600): n is a, c, g, or t
  misc_feature (602)..(602): n is a, c, g, or t
  misc_feature (604)..(604): n is a, c, g, or t
  misc_feature (606)..(606): n is a, c, g, or t
  misc_feature (609)..(610): n is a, c, g, or t
  misc_feature (623)..(623): n is a, c, g, or t
tgcaatttaaataatggtattttatttttatatataaataaatgttctgagaaatctcagactttagtgcattgctgtaaaaaattagtgcagttttttttattaaagtttttagcgctcaaggaataagataaatctatatctgttcatagtctctttcactgtacattaaacttttatactgctataagtcaaaaggaacatttctacactggtctgttcttaaaaatcaaggtaaatgaatttcatgttctatgacaaaacatggcaattatttttggcaaagaaattagaaaaatatgagatcatagtttagaaatgaagagtttgttgatttaaagcataggcaatgcataggaaaaactttttttaaggatgtattttaacagaactttatccttcatgccaaatgttttctcggcagctaacttaaaaaaatatttcagctttatttggggatggagacagtgacaggagtcagggtgaagggcaaaggagaggtgcttaaccaagctcattctatttttcagtcgctcccacataggatcaaaagtganacctgcaggnatnttctgcgtgtnccccntctcttttcccaantncntnggnnttgagagggaaanagaaatgtctttataataaacactggctcacacttcagccccaagttctagtaccccagtttcaattacagtcacatatttatcatcaatctggaccagaagcactgccttgtcgatgtgggatctggtacctggatctctgctgcaaggcacccatcggtgaatcacatggccttccatgccctctgcggactccagtctttccagctatttctcccagcttttaaccggattccttcatcagg

SEQ ID NO: 459494 - DNA, 683 bp, Homo Sapiens
  misc_feature (601)..(625): n is a, c, g, or t
cagagcggttttacagttctaaaattaacaagcagacttgtaataaaagagctccaatgtttgcaaaatgaccttgtttccattctgaatctgactttttaattgtaaaggttagcattacatttaaaaggactcaaaatggaaaaaatggagtgatgtatattatcatccgtgttttgtgacgcaactgatgaaaatccctgaatggatattgcttcagcctttgatattaaaaaaggccctgaacaagaagtcccttaatccaacaaaacggatcacaggtggctgaaagaatgaagcaaaacccaaaactactgtcaagttcatattgtatcacattgttggtggatgacactggctccagatatacaattaagcccacgacactttattactatgaataattatcatgaaatttctctcacgttgatcaacttgtttctgaaggttttctttgttcatttaaacttgcataataaacatgcaatgaatggtttcttttgaaagtgtattttttgcagtctttttgttttcatacaaatatttcataaagttgcaatgttgcatcagagcattaccaaaataatagcaggagcatatnnnnnnnnnnnnnnnnnnnnnnnnncaaatgtgaatttagctgaatgagaagagcctccttttgtcctgagacacaccacccg

SEQ ID NO: 459495 - DNA, 432 bp, Homo Sapiens
  misc_feature (213)..(213): n is a, c, g, or t
  misc_feature (223)..(223): n is a, c, g, or t
  misc_feature (410)..(410): n is a, c, g, or t
gttagttaaatagtttaatcagagcggttttacagttctaaaattaacaagcagacttgtaataaaagagctccaatgtttgcaaaatgaccttgtttccattctgaatctgactttttaattgtaaaggttagcattacatttaaaaggactcaaaatggaaaaaatggagtgatgtatattatcatccgtgttttgtgacgcaactgatgnaaatccctgnaatgggatattgcttcagcttttggatattaaaaaatgggcctggacaaggaaggtccttaattcaacaaaactggatcacagggtgggctggaaggattggggccaaaaccccaaaacttactggttcaggtttcatattggtattcaccttgttggggtgggggtggacactggggctcccgggnttttaccatttagggccccacg

SEQ ID NO: 459496 - DNA, 446 bp, Homo Sapiens
ttttttttgttagttaaatagtttaatcagagcggttttacagttctaaaattaacaagcagacttgtaataaaagagctccaatgtttgcaaaatgaccttgtttccattctgaatctgactttttaattgtaaaggttagcattacatttaaaaggactcaaaatggaaaaaatggagtgatgtatattatcatccgtgttttgtgacgcaactgatgaaatccctgaatggatattgcttcagctttgatattaaaaaatgggcctgacaagaagtccttaatcaacaaaactgatcacaggtgggctggaaaggaatgaggcaaaacccaaaactactgtccaagtttcatattgtattcacattgttgggtgggatggacactgggctcccggattattaccaattaaggcccacgggcactttatttactatggattatt

SEQ ID NO: 459497 - DNA, 405 bp, Homo Sapiens
  misc_feature (364)..(364): n is a, c, g, or t
ctcatgttatgtttgcggaggaaccgtaacaggagatcaatggccataggaagcccgagaattagttcccacagacccagttcctgatgaattcccagcccaaaagaaccaccctgacaatttttaggttctaaaagtctcaattattagacagtattgcacagctattgaaggaaaacaattcactcattctatagggcggcttagttgtcttgggcaaaagctgtataatggtaccacaaaaacagttacatggtggagttccaattacacagaaagaaatccattcagtaaatttccaaagttgcagactgtttaggcccacccagaattccaccagggactgggacagcccccaccaggnttattactgggatatgtgggacacagggcttatttttaagg

SEQ ID NO: 459498 - DNA, 362 bp, Homo Sapiens
ccatttgttctgtctttaatcagaaatggccatagcgaactaccgtgcgtccaacctgagacacctggggatggtggagccaggggagatgccgcgggcctgaaggaggatgcgaactccagggtgccccctgctgcctccggagcgtgctgcagtcatggccgacgtggacctgacaacctgctccgatcttcagaaatattatccacgagacctgctttctcccataatgcattcggctggccacccatgggaagctgtggtcccagttactcagggcactgaggtgggaagatcacggggcgcaggaggtgcagtcagtcgtgatggtgccactgactccaagcctggacgatagaggg

SEQ ID NO: 459499 - DNA, 288 bp, Homo Sapiens
atggttgcagagacatctccatcttgtttttattagggatgtgacaaatctttgatttgtattcgattcgtacacggatagtgccattttcccccaaattttgcaattcagttgattattgccccccaataaaatttggatgttcataattgttcatctgagacttccttggtgaagtggcatttattgtgaccattaacaagcgctgcagcacatctacatatgtcatgccatttagaaggcacattgctgagggctgtaaatggacaatcagtgttcaagtgcagc

SEQ ID NO: 459500 - DNA, 456 bp, Homo Sapiens
  misc_feature (40)..(40): n is a, c, g, or t
  misc_feature (77)..(77): n is a, c, g, or t
tgaacccccggacagaggcaaagttggagacaaccccttntcctcaagccaaaaaggtggtgtccttggatataatncccaaggcctcactcagaagccccccttcccctcctgatatagatgctgtaataatgaggaggaagatgctactattagtgatgataatggccatgatcaagttgctggagtgtggcaagatcactgggcagtgggaatgccctgggacacgagctccctgatagaactcagaactttactacatgagtgtgtagggggcatagtgatggcaggcagttttgtcatttttttcctttgcgttgttttatggctatgatttcattcaagaaaagatttcattttgttgtgtttgagaggccacaaacatccagccaattggagcaggtgatgaagggagtgaaagtataccaagggggttatttcaacccaatctagaat

SEQ ID NO: 459501 - DNA, 602 bp, Homo Sapiens
  misc_feature (98)..(98): n is a, c, g, or t
ccatttgaactgagaacatgtcaagaaggaagtgaaggctttaacctgctcaaaagaaggaatccactttcctttccctaacctcaccatatcttccnaaaaggcctttccttcagacccttaatttgtgcagagatctgcaaatgttcccttcaaatccctctccttcctggggcccaggagggcaataacttacagggtcaggcaacaacaatgcctaccaaaaaggcctttcaagctgtccccatggacatagatttgcgccacaggttggctccggatgtagatgttctcaatcttctcgggtgcaacatattctccctgagcaagtttaaatatatgctttttccgatcaataattttaagagtttctgccggcagccattttccgatgtctccagtgtgaagccagccatcgctgtccagggcctccttcgtcctgtctggatctttcaagtagcctttgaacacatttggtcctctcacacatatctctccctctcctttgcaggcccagtagttcagttcctcaacatcaacgagcttgatatgattgcagggaagtggcgcccctacgtgccctgaggtccagtcgccaggag

SEQ ID NO: 459502 - DNA, 430 bp, Homo Sapiens
  misc_feature (419)..(419): n is a, c, g, or t
cctcactgatagctgatcacattaaacaggtacaggtgctaagaaagtttaagactgatcttttggcaatgacagtttaggttaactctgtttggaattcctaaaaataaaaagaaatcccttaaaaaaggctgacaaactgaccacttggccttgaatcgactgttagggtcacacctgccaatgccaggggacatcacaaaaaaatagaggaatgccaagataaaaagttcactggcattcaatttgggcctaatttcttgataatagtttcctattaggattttccgattaatactgatgggctcttacctagggctgtggataattagggtttgatctattgtggacattaatggttcacaatcggttggacttttggaaattggtcttaatttaatgggctcttttccttggtncggcttttggc

SEQ ID NO: 459503 - DNA, 408 bp, Homo Sapiens
  misc_feature (53)..(53): n is a, c, g, or t
  misc_feature (313)..(313): n is a, c, g, or t
  misc_feature (349)..(349): n is a, c, g, or t
aatatttgaaaataaaccaactttatttgaatcagtcaataccaatcaagacntggaacacaaattggtaattggttcagattcatgaggaaaacactcagctgtatcttcattaaaaggcattttacatttattaaggcttgaaagcaagtcctgttattcatcaccatagttaaaggtctcgagaaaatcaagtaactatcatttggagtgtctttgtaaaatgacacacttgttcttttacaaaagctaagcatcttttgttaagctagttaactccccagcttataaaatagggacaacgaggtggccnggggaagtaagggcaaattcaaacatcagcctgggntaatttattatttttacaatatatgtataggtcaatattggtggaatctcttaacctct

SEQ ID NO: 459504 - DNA, 552 bp, Homo Sapiens
cccacttaaacaaaatcactccccttttgaaccgcaggttgtttcctccttcccatatttgaacgaaggctggcaaacagctccccgaatccttggccctagccacatcacgaattgggaagctaaaactttagcttagaatgcccaagtgaacaaggacatggctgaagcaggaggggaaattctggaacaagtgcctctgggcaaacctcacaaccgagttttttaaattagtggtcattttctagaactagaggaacacattcaggacaaacagttctgatgggagagcgaatggctatgaacacataagagatcaggctgtgaccgtgaccataactcgtactcatccaggacccgacagggcggagaggacaccgcctccagacatgcaagtttctcaacagtgaattttaagaaaaagctgctttctcttaaaattaatagcacaaaaacactcctgcgtgtttcatagcctcaaacatacacacccaaatattaatgctgggcaatagcaacactcacccacaacacagtactgtatccttcatt

SEQ ID NO: 459505 - DNA, 501 bp, Homo Sapiens
  misc_feature (434)..(434): n is a, c, g, or t
  misc_feature (479)..(479): n is a, c, g, or t
  misc_feature (489)..(489): n is a, c, g, or t
catagaaatgcattttagaggtgcagaggcacagagggaaatttgagccaaatgaatctgctagatatttctgcacagttttcataattcattgttaggtctggcttcaaggagggcaaagttcacatatttcttttttatattgaaataatcacaatattattttttagtaaaaatgtttgattttattccaaaaaatctttaagtaaggagtaagatttctgcatgatctgcgaaatgaaggtggaacagaatagaagccctcttctgtacaatgtcaccaaaacatcccgaagttttatcctgcctgggaaaatttcttacacatgattcttactgcttagcttgaaattgcacctaggaagaagcttttgttctcagtgctgccaaaacttccatttttcagcagtgacctcagtttaggcacctgcttnataaggtgtgtttgcacttcgttgggtacgttatagtgacatacntgttctcatntgggagattgtt

SEQ ID NO: 459506 - DNA, 461 bp, Homo Sapiens
  misc_feature (445)..(445): n is a, c, g, or t
ctaaataaagttttattggcatgcagtcacgcccatcatttgcatgttgtcaaggttacaatggccgagttggttgcaacagagacagcatagtacacacagcaaatctatttactagctcgccctttacagaaaattttgttgacccctgtattgatcatgaccaaaatgagtctgggaattgggttgggttgcagaaactttacattaggcctgggatgaccattctcctctccttctacctgtccagaacaaaggggttacatttcccagcaagcagtcttgagcctcaggtccccaagccccatttggtaacacggatgggggtcccacacacttgagggggcaaggacttgaaggacccttttgtaggcgagggggcaaataggattccacatcagttcacagtgcgtagcttttggcattgggggttacagaaacaggntattgggcgggggttt

SEQ ID NO: 459507 - DNA, 282 bp, Homo Sapiens
ctgttcagtaatcttttattttacatctcaacttgactaaatttccagaggctttgttttaggcaaatgaccatgctagatgttctggtggatttaatgatataaaaagatgcattctgtgcccaccaagtccaagtcctcacgtactgaattccagtagctgtaagagaaatacaggttaaaacttgttgagctagaatcttaaagaaagtacaggatacaggaaacaacattcaaatagagaatgcttctatctaggcataataggatgttcactatgtt

SEQ ID NO: 459508 - DNA, 374 bp, Homo Sapiens
  misc_feature (251)..(251): n is a, c, g, or t
  misc_feature (300)..(300): n is a, c, g, or t
  misc_feature (310)..(310): n is a, c, g, or t
  misc_feature (325)..(325): n is a, c, g, or t
  misc_feature (330)..(330): n is a, c, g, or t
  misc_feature (350)..(350): n is a, c, g, or t
acacttaggacaattcatttgtatttcaggctaagtattattataacagtcagaaaattttaaaaattaaaaggtttgtcaagtaaaaatgttacagtaagctaagggtaatttattattgaagaaagaaaacaattttaaaatagatttagggtaacctaagtgtacagtgtttataaagtctacagtagggtacagtgatgtccaagggcctcacattcactcatcatttactcactgactcacccagnggtaacttccaacctggcaggctttatttatgggtaggcaacctttacngggacccccntgttttatccccttntaccngtttttttcctgtccctttnctatgggttgggctttgttttggg

SEQ ID NO: 459509 - DNA, 381 bp, Homo Sapiens
gccaaattacagccaaaaggttgtttttgaaacttgaatctagagcaagaggaattaattggtggattctaaatttcaaataatttgatagcttcagagcatcaaggtgtacacataggttcttttttcctggacagtaagtgtccactgatgattgtcctcccttcttaggtacatctctttttctatctctgatatgctaatattttcagtcagattataatctggtttggggatccttgtgactgtttcaagtgtctacatttattctctaaatcagtttatcttaattgtaaagtttaaattctaagtggcaagcttatttcctttaagaaaaaataatgatggggtagggaggtggggctggggtaccatattaca

SEQ ID NO: 459510 - DNA, 461 bp, Homo Sapiens
  misc_feature (37)..(37): n is a, c, g, or t
  misc_feature (333)..(333): n is a, c, g, or t
  misc_feature (396)..(396): n is a, c, g, or t
  misc_feature (401)..(401): n is a, c, g, or t
  misc_feature (410)..(410): n is a, c, g, or t
  misc_feature (417)..(417): n is a, c, g, or t
  misc_feature (424)..(424): n is a, c, g, or t
  misc_feature (432)..(432): n is a, c, g, or t
  misc_feature (438)..(438): n is a, c, g, or t
ctgaagacttgctcagtgaaatggttctgattttttncttcaaatgatttgcactaattgattttctggagagcggagttatgttaacaacaaaattcttttatagttcctttgatactatttcaaataaggattacacattgaaagtttttatagaaattatgaaaattggataatcttaactatggtaaccattactattatccatactactttctccccactgaactttcaaatttgaaaattggggtagcttttgtaggtcactttcttataaagatgctgatggtcacagatctcctaagtatccaggaataatatttttatccatgnggaagggttccacacaaaattgggggtcttggcaccccattatttccagagggatctggaacnggaanttgtgggcnttccttngccaccntttttaantctctnttgggtttcttggaattcacccc

SEQ ID NO: 459511 - DNA, 462 bp, Homo Sapiens
  misc_feature (432)..(432): n is a, c, g, or t
ttttttttcacaaataaaccaactttaatagatattattttgtatttatatagtgccttcttcaagaaccttaaatgctttacagacattatctctaattaatccccacaacaaccctgtgaggtaggtattactcccattttacaagacagggagactgaagcacagagaggttaagtgacttgcccaaggtcacacagttaaattcactgaagagccaggacatgagcgctttagctcccagctcccagccaaatacctcatgatagaatctttaataaaaagtgtttttaaagaaagtatcaagagtagttatgttatgaaaatgaggtctttctactgccatcaaggaaagaaaaaacccactttcagatcctccgtgccgaattcttgggctccgaggggccaaatttcccctatagtggagtccgnattaaattcggaatcatggtcatagctggt

SEQ ID NO: 459512 - DNA, 832 bp, Homo Sapiens
  misc_feature (20)..(20): n is a, c, g, or t
  misc_feature (315)..(315): n is a, c, g, or t
gtttgtattgaatggcaaantttgttgtgagatgtagtctagtggatgagagtacactgaggggatgaattttggagaccaagagatcaaaaatggtacactgcaattctaaacatgtccaaagcctacttggagagtgagaatgtactggaaccttcaccagccaacatattgcaggataacttcctgaaggtttatcttagccatcttagtactttgagggattggaaatgtggtcagtcctccatttatgactctactaagccagtaacatggtcaacatttaaaacttgcttctacaatcacacgtatggnttattttagccctgttcgctgtcagctttaccagattatttataggatgaagaaactgtcttgtaccttcaatttttcccacggtaatggaatataactatttatcaatttatcactgcaactgacatagccagggaaatgtttaagaaatgaataaatagaagtttattccctgcaggtagtcgattgagtccaccaaaatcttaagctaaattttatgttgtttcatggtagctgttatgaaaatgggaccatctaagagaaaatccattgtttctcaaattcaaatgcattctgtgtgactaggttgttcccgtgataatgctatgtgacattgctgttctcttctattcaccagtttgccttcctaataacctcttctcatatacattctttagggaaaagacccagtgccctgcagtgctgaggcaacgttgctgggagtattctacatgccttgtcgggggccttgggttgggcaatgctggtggctttgattgaggtctgttacaagtca

SEQ ID NO: 459513 - DNA, 428 bp, Homo Sapiens
cccgttagccaagaatcgattttgtaaacagaaattgccttataagttttttatcagtaaggacccatgatcacccatttgtaccatacataactaggttgttgagcaaagcatttttgcctcatgtttcttaaggaagtagagtagtccttgtgtcagaacacatgttaatccacaaaacgccccatcccagattccaaattaaaacatcgtttttaggattccttggagctagcctggatcatgggtaaaggaaacattttgccttttgtatcttatactggaatgggatgtctgtaagtcctagaacctctttgagcatatttcttacaagcctctgttttttcccctttaaaggaaactttgaaaggattgtgaatactggaaaatgacaaaactaaaggtagatctatcaagcccaaaaaaaa

SEQ ID NO: 459514 - DNA, 435 bp, Homo Sapiens
  misc_feature (39)..(39): n is a, c, g, or t
aagccctgaaactccaaaaatggttccttcccaacttcngcttgggaactggggaccttaatgtccttccttttatttcctgtttccctccctcattggtggcatctgtcatttctttcaggtcagggtccttgatgccatgcatcagctggacgtgcttctccagcatcaaacgtttggtaaaggtacgtctggagtctgggcagtgcgagcaggcgtacactttcctgatgcctttgtgcttgatccggttgtgccggcacaggctgtgggacgagctgaaagacttgtcacactggcggcaggggtgtttcttcatttgttgtccactcgtatctgcagcctgctggaaatgtgtagccagtgatgtctcgtcctggaagacttcattacactccaaacattttagactatgtctacacagtttggaggggt

SEQ ID NO: 459515 - DNA, 405 bp, Homo Sapiens
gttgctgttttcccctccctttggtttgaaaagtcagaaaaaagaagcagtgaggccctcatggtgaaaagaggcaagccatgagagcccatcccagaatgtttgtccccttcagccctcctggttggggattgttgacgacctctcctggattggactcattcccccaccccaaaactacccacagctgaggacagccatctaaacacctgcagagtctacactactccatgcccacactaatccagacctcaggcatgaggcaaccaagcaggcttgtttcctgtgtcagtcacggttcaatacaggaaacagaaaactctctagatctgccaagatcagagggatttagtaggaggtatgaagtggaaaggctggaggagtagagtcagcggcaaccatcag

SEQ ID NO: 459516 - DNA, 603 bp, Homo Sapiens
aacagttttagcaacaagtccatcctggtttcctgtgccccactgcatgcacatgatctttgctccgggatctgggctgatgagtcacttctctgtatcgttgctgacatggtggtagagggactaaaaaccaagggcagttgtttccactcacatttcactgctgagtgccagtcatatggtcacaaccacctgccacagagtgggaatgtgtactcctcctgcagagatcggtaccatgtatttgtgagcaatgttaacagttaccaaacaattccctctggacaaaaattacttaagtggcatatattcagtcttatctctgctcaggaacaattgaagagtcaaggaatcagctcctgagtaatatctgcaagtacagggttctaaggtggggtttagacagcaaggtgggcagaggaaatgactgtaatgttgcagaggagatgtgcaatgcccacccagctctccgcttgcactgaacaaagctgactttccccagtaacttgtcattcaaccctcaggctgaaaagtgaaaactcaccatcttaccttaagtagtttagtgcctactggggagtgaatgtccagatataagagcgt

SEQ ID NO: 459517 - DNA, 485 bp, Homo Sapiens
  misc_feature (451)..(451): n is a, c, g, or t
aaacagtatattctttggttgtgaatcctactttctttgaatgcaaagagttcctataactggaaagcaattaattagccttcataataaatgttcacttgggggggatgttaactcattataaacccgaagattagtccaaggcatggagatccttcttcctagtgtttgcagccctgaaatgcatctttcaaagcatgaaaacactagaaacaaaaagccattttgcctgaggatgctgatgatctggcacttgggattttattgatgtttacgcagcagtctaacaccaaccacgctttgaaatgtgtacagacagtgagctggtaaggaaaacagtaattatgctagtggggcctttcagtcaggcaaaagcatggctcgctctgtgtgttcctaatcatatttaattattctattccggtgggctggcaacacaccgcctggcccnttggccggcacatcttcgccgtcgtaccccggca

SEQ ID NO: 459518 - DNA, 442 bp, Homo Sapiens
aagttggttcttccctggctgttcccttccaaacagttggggccccagaccatcctatctctttggaccttggagacatttccttaactgggctttgcagcagagggaagagaacagtgcagagccaggcgcgtacctcctgtgcccaggacagcacctgtaagcaagggggaagggagccacccaccccagaactcaaatggagagaaagtcaagacaatcacccctgacgtggggctgcaccaatccctgacgtctgaccccactgtggctgtcctcagagccaagagggctccagaagcccacccgcctcgaagctgttcaggggccgtcacggcccgtgtttgccacatgggtgtgtgccagggccaaggggacacagaagatggcaggatgacactaatggggtgagcaaggcacactggtgcctcccatactgccc

SEQ ID NO: 459519 - DNA, 475 bp, Homo Sapiens
  misc_feature (72)..(72): n is a, c, g, or t
  misc_feature (92)..(92): n is a, c, g, or t
  misc_feature (141)..(141): n is a, c, g, or t
accggaataaatgttcaatccctatcctaccaacaaaacaaagtttaatagtccactgttgccacttctggnaggaatgccaaccatcccgnccttctacttggaaatgaaaccccctgagctgcctcaaagtccaaaggnaagttttggcagtgatggccccactggatgattcccactgccagcaagctagaggctgatggcccttcagagataacatccaacagctcataagagacaaggccattcttccccaggtcggggtcctgggcaaacactcggcctagagaggccccagggccattgttttcagcaacgaaaagttcctgctggggttgaggaaagtttggtgtattgtcattcacatcagcaactgacacagtgattgtcttcgggtgctaagtgggggtgagccactatctgaggccgtgatcaggacttggtattcactgatctgctcccggtccaggggccc

SEQ ID NO: 459520 - DNA, 654 bp, Homo Sapiens
  misc_feature (34)..(34): n is a, c, g, or t
  misc_feature (56)..(56): n is a, c, g, or t
  misc_feature (270)..(446): n is a, c, g, or t
ggaccctgtcactatatgaagaccttaagtttangaccccacactcttaattaaanggacgcccacttaatccaattttctgcagtgaattattagactaacttccctagcatctggagattacagtatgttcccaccttgaagctatcacaatcaagaccattacctgacatgcattcaacaaatattcgatgacaaacaaagtataaggttaattgttacagaaagttaggtcttctaacacctaagtgttaagtggactcaatgttnnnnnnnnnnnnnnnnnnnnnnnnnnnnnnnnnnnnnnnnnnnnnnnnnnnnnnnnnnnnnnnnnnnnnnnnnnnnnnnnnnnnnnnnnnnnnnnnnnnnnnnnnnnnnnnnnnnnnnnnnnnnnnnnnnnnnnnnnnnnnnnnnnnnnnnnnnnnnnnnnnnnnnnnnnnnnnnnntaccttataacttttcctaaatcacttttggctctaccacttctattcctatatggaagctgaagtatgttattactgctgttacatgactactcttctacattctggttctatttctgctaaattattcttacagtttttatcaacttaagttttttaaaaaactgcctttttagaactctgaaacagtatttaagaattaaattta

SEQ ID NO: 459521 - DNA, 452 bp, Homo Sapiens
cgttttttgtaatagttgtaaaccagagtaatcctttaaaatacatttttaatgccagccctattatgtacaaaacacccacaaagccttatgtaggtaagtgatacataggcccctaccctcaaggagccttactgtctgaacaggggagaggtgtggtgaaggatggacaaattatatgtatttgtaagagtatataatttatggtaaaacaatttcaagaaaggattaaaccatgtgttataatgtttcaaagaagggagagattataaaccactggggtaaaaggataggcttcttggaggaagtgacatttgagatatatcttggatgaccgatcagattcccatagaagaggtctgagaaaagggcattccatgtagaaggaatgacaagagcaaagacatagagagttaattagaaaatgcttgtcatttatttcataattcggg

SEQ ID NO: 459522 - DNA, 381 bp, Homo Sapiens
caaaaaaagacatgccaaatgacatggcaggtattgggttctcccccactggtgatggccatgctgtttctgtatagcctgaaggtgaacccaaccattaagtacatttgtagaaatgaggggtatggagtgtcctttctgcatcttggcactttgtcagcaaaaaaagctaacaaactttactatatttgtgcttcttgacagataaaatgggaattactaagctgtaatcaggcctaaagtggcctgactttaatacagagactttctcacttctccatcacaattatttggggtaggcttcgggcatgcaggcattgtaaggtgaatacttcatatctcatcaggcctatggtaaaggcttggaaatttctcacagtt

SEQ ID NO: 459523 - DNA, 413 bp, Homo Sapiens
  misc_feature (17)..(17): n is a, c, g, or t
  misc_feature (47)..(47): n is a, c, g, or t
aaattggcaactcaaantcctcatcctttggtggtggccacaggagnagttcccagaggcttcaggaggctctgattcccactcgcactccagcagtgggaggttgctcaagaccaggcattccgtccctggctggggtgtcccttccagagtgacagagatgatctgaggctgctcaaggtgagctggaagggacatgggcactggtaggtggttgtcttagctctcaaccaggggatccgattcccatttaaactatctaggacgaagcgagtgaaaaccagagccctgtgtgggggatgcttgaggcagagcgggtacagcagcctgcatcctgatccctcggctacctggcctccctcacagagataatggcaaggcttgggaaagatgggtccagcagcccactgagg

SEQ ID NO: 459524 - DNA, 283 bp, Homo Sapiens
  misc_feature (99)..(99): n is a, c, g, or t
  misc_feature (151)..(151): n is a, c, g, or t
gcttgcaggctacccgccctgagatttggtaaagaacactgccttgttccccatcagtaaacaaggttacctacctcaggaggctgcttgtgagagagnaaatgcagtatcttcagaatgatttatttttttaattaattgtaaagacttngtgccattggctgctctttctagtcccctaaatttctgttctagttttaaatttctctagaacttgcaatagttgggggttttataatgatgttttacaatgtttatttcttaaataaaaacttaaaaattc

SEQ ID NO: 459525 - DNA, 442 bp, Homo Sapiens
  misc_feature (14)..(14): n is a, c, g, or t
  misc_feature (47)..(47): n is a, c, g, or t
tcaaaacacacacntgtccacatccacaagtcactcctaacctgcanggcagcaaacagcaacaaaatcaaactggtgaagattttcaccctcagtcagtggaaatagccaaatacataaataaaattttaagtatgtttaaagaaataaatgatgaaattaagaggaatagagattacagaaaatgaaaatcaaatgacgaagaaccaaatcaaactccaagaaatggaaatcacagtcaccgacagtcaaaactctataaatggtttaacctcagatcaggttgacctgaacagagaacgaataaagtacaaggtagagctgaagaaattatgcagaatgcaggacaaatgaatgaagagttgggcgacatgcaacatagagtaagaaaatctaacacatatctaactggcattccagaaggaaagggagaagagaaaaa

SEQ ID NO: 459526 - DNA, 447 bp, Homo Sapiens
  misc_feature (18)..(18): n is a, c, g, or t
  misc_feature (68)..(68): n is a, c, g, or t
  misc_feature (73)..(73): n is a, c, g, or t
  misc_feature (91)..(91): n is a, c, g, or t
ccccccaaaaacccgcanagggaaaaccctgttgtcccttaccaacatggcctaatgcccttccacanggtantgggccttcctgaataantcctattttccttgaacaatgccatttagaaagatttaaaaatatttttatccttacccagtatccttcagtgttttcagctggggtgagttcagtgggttttggccccaggtattaatctgcattactgtttccccatcctatgcttcaggaatgcagggactctgttcctttagttaattaactgctgtatccttcatgcctgaaaccgtgtccagtatgtttactgtttgtctaatgagtgattggctatactctgctgtgatgtactcttttgcatttttaaggaaattatagcaatgaaatagtcaaattctagcctgggcaagacaatgagaccctgtctataaaaaaaa

SEQ ID NO: 459527 - DNA, 404 bp, Homo Sapiens
  misc_feature (56)..(56): n is a, c, g, or t
ttccccacccaaaagccttcaacccagttccagagtcctggaaagaaaaaacctanggacggacatccataataaacacatgtaatcaaagagtccacgcatatctacatcaagggaatttggtgttccaaatccttcactaagctgaacaaggatatcgacattttgaaaccttgagtcctccattccaaactctcctgtataaaggtagtgtaacaaagcagaaaacatgggcatatcaataccagctgtattgatgtccattattatctctgccccatactctggtgaggaagaaagcagtgttttaaaaaatggacaccttgctgccaaaatggcacgatgaacaggaaaacaagtttcttgaaatattaagtctacatcagtacaatacttgtactcat

SEQ ID NO: 459528 - DNA, 457 bp, Homo Sapiens
gacattttaaataaatagtttatttattcaaaatagttttcttaccttattcacagtttcaagtttgaaatgaaaaaaaggggtagtacctgttcttgatcaactgtcatataaagtcaaaagtgaatcctttcagaacatgcattaaatacagcaaattgcacaacagctcgtctttgaaaaatcctgcactgaggcttatgaggaacacaccttttttctggacaatttaaaaggaaacactgtaagatgtacagggggtctccttaacccacttgaacctgtaatgtcatctggataaaagttctcttgaccaaagtaacattttatccaaaataatcatatcttagacccgtgtagcttgacatacttcaaaaatacgtgaaagtgtaactgcatcacagcaggtctgttaataccgaggtactacatacttctcaaagacataaatagtggg

SEQ ID NO: 459529 - DNA, 350 bp, Homo Sapiens
  misc_feature (67)..(67): n is a, c, g, or t
ttggtttttagctgtaataaaaataaggtggataaagaaacaaatatctttttatcaacatatttgnaataaaaactgtatggtgactttggggtttatattagctattcaaactctttgataattgatctttcaattactattggtgagacaaaaaaattcaaccaaagccaaagaaatgtcttgtttaatgttcttaaatatttcaagttaaagtaaaacaaatttgctaggtatgttagtgtacagattgaaaaagacatgagggaacaaagaaaagtacactagaattatgttttagttttcctttggtattaagagatatattatctctttcaaatctattctgt

SEQ ID NO: 459530 - DNA, 405 bp, Homo Sapiens
  misc_feature (86)..(86): n is a, c, g, or t
aaagccactgccccgccgaatgaattcccccaggggcaggctcgccatggggccagcgttctgctcctggttgagtgtggtggtangggccatagctgtcggctgtctctgccttggcacacacaggtgtctcatcagctacgtaggcattgctggtctccatggtgaccatgcagatgatgtaggtggacttgggctccagggctgtcagcaggtactctgtcttgtccccctgcaccaaggtctccgtgatggagcccacggctgggctgtggcccaggcgcagccaactgagccggaaagaggaggcggggagcgtggccttccacgtgatgcggatggagtctgccgtcagggccttcacgtggatggccagggtcttggcgccatcacccgtgccatggg

SEQ ID NO: 459531 - DNA, 444 bp, Homo Sapiens
  misc_feature (11)..(11): n is a, c, g, or t
  misc_feature (139)..(139): n is a, c, g, or t
ccctacacccntcccgaatggacctcaccctcccctttaaagtaaactgtaatttggcccatccatccttaaattcactcccacagatatgtgttagcccaaaatgcccaagcgcagggcctagatgcctgagaaatgncatgatactgactctttgttcctcacggggctcacagtaatgggaggagagtgagggtcattgtcaggagtcttttaaaaataaccccagttcttttgtttagctaaagtcgaggtttggaactactggttttgtgcacattgaatacttcataagtgtgctgattgcctgcaattttaataacagagaagctagagattttaataagtcagaaaaaaggttgtatatgtggagagaatgaagaaagaaatgattaacaaagtaagtatgagtactgtactttattttgtccctgttgcccacaa

SEQ ID NO: 459532 - DNA, 239 bp, Homo Sapiens
gtaattatatctgtcattattgccctgatcacaaacaaaagcctgaatgtactatgtttaaaagacaaaccaaaaattaacccaaacttgcattatttgtctgagctacagaatgttctttccttggagagatatctgatattaaacatcatctgcattttacttgcctagaaaatacacggtaacttttctgccttgcagcatcaaactatagtacagctgagccccagtgctgtgca

SEQ ID NO: 459533 - DNA, 406 bp, Homo Sapiens
  misc_feature (323)..(323): n is a, c, g, or t
  misc_feature (348)..(348): n is a, c, g, or t
  misc_feature (355)..(355): n is a, c, g, or t
gctgaattgaatttattgaatacatgcagagtacaaacggccccaaatcacagcaggttgaagtattcacagagcctgaaggaaagtggacagcagagatagtggctctggaaattggatgaggtgggcatctggaatgtagtaaagcagcagcaagcaggagatactgcttggcgactagatgagctcaggtagcccatcactggtacattgtttggggatgctgtagacaaaggaatgacagcattggagtatttattgaatgcctatcacaggctgagccctttcctagggattcatatgcttttcttcaatgggaaganttcaagaaggatagttcattatttnctccttnaattacaagggcccccatcgtctttccccaaggaacccccacactcctact

SEQ ID NO: 459534 - DNA, 532 bp, Homo Sapiens
  misc_feature (105)..(222): n is a, c, g, or t
caaggaaatgagtcacagaaaggttaactagcttcccttagtcatgcaaatagtaagtgtcgaagccaaagaaatcagctatatttatctttatttcaaaggaannnnnnnnnnnnnnnnnnnnnnnnnnnnnnnnnnnnnnnnnnnnnnnnnnnnnnnnnnnnnnnnnnnnnnnnnnnnnnnnnnnnnnnnnnnnnnnnnnnnnnnnnnnnnnnnnnnnnnggggggaagttgtgttgacaagagtgctggagaatcaggcctgtttctcattttgatactgaacaaaattagaagtagcttgactactggaaaagtgtgttggatctgccttgcagataagtgtccaaaatggtcttcccctctttagatttctacttatttctcaccacacttgtcagttaagcagcaggatatctgcaggcttttccccataagagaaaggctgcagcataaagggtatatcattcaaggctataacatggagtgtgcatcattgaaggctacaacatgaagggtgcgtcactcaagg

SEQ ID NO: 459535 - DNA, 568 bp, Homo Sapiens
  misc_feature (523)..(523): n is a, c, g, or t
gcctttcaaagtgtttattcagaattatactagaagtaatttcatgaaaataatattgtgcaaccttttcattctatttcaatgaaaagcaggcatgaacattactcaagcttgaaattttactgaaaagtaaacatttcaattaagcttaaggaaaaaagaaatttcctgagatttccagtgtatacagaagtgtctttccattaataataattaaaagttaaaaaatatgctgataacttgccacaattgacagaatgcagattaataggataaatggcaaacaaatctataaaaatgcatgcagagaatcagagtgatcaccccaccaagcaatggggtatagatggtgatatacccttgtccttaggggagagggagatggggaagtgtgggtgattttgggggaagagtaaataatttggggagaacttaatggggtgaagatcacataaatggcctgggacaaagtctactgggcttgcagagaagacaatggtttgtgagaaaaatctatccaggngggttaagagacttcattctttttcctacaatatgacttcagtta

SEQ ID NO: 459536 - DNA, 351 bp, Homo Sapiens
cttttcaccttgcactctgagctacctggcaccccaaaactcctcctggtagtggggttgagctcttgtaaggagcctgaggaagaaagaccagtattgggagctcatgtcccagcccctcatgcacagttcacctagactagagccaggaagtttagggagtcccagtgcatggctaggggtgccctgagggggctgtctgaacctcaggctgtcacagttcatcaatcagccagccatgcacctgtcaggtgtgcctgccaacagcctgccccatctttctcatcctcccagccaaggcagaccactccagagggacctgcacagccccttcctcaagaccaccacagg

SEQ ID NO: 459537 - DNA, 370 bp, Homo Sapiens
  misc_feature (334)..(334): n is a, c, g, or t
gtttgttaaataatagatctagcaaagccataagctttttattgttccatgatgcacatgagagagaagaaaagtgccaataattattttctgatggacagagaagtttttacaagtattttacatcttgagaagacagggatatcaattataacattattaccagagaaataaattttctagtaaggacaacagatgaggatttacagaagtgggaggttggagattgtttttgcagtttgtggcaattatttctaaaggcccaggagtctcctttgtttaaaaaactctttgaaagttgcgttttcacagaggagtgcacccatttgggttnctgttagggttattcacacgtctgtatgttgcacag

SEQ ID NO: 459538 - DNA, 437 bp, Homo Sapiens
  misc_feature (13)..(13): n is a, c, g, or t
  misc_feature (24)..(24): n is a, c, g, or t
  misc_feature (109)..(109): n is a, c, g, or t
gaaaacgaagagnacatgtagatntcagcctgaactttatttaccttttaaactaattaaaaatcccttaaaaagtgatcctgggaccctttataagttctatgaatgncacagatacctgccagtgacttaaattccaaatcttgacttaatgtgtctacaaaatcaatgtaagcagatatcttaacttttcgtgcttagcagaagacaacaaattctacatgtctttttcaatttccctaaaattttgttaaatctgcaagtatgtacaatctagctaattgaaattaatatttagtgttcatcaagactgtttcacagcagcaaaaactgaatcagggaaataaaattctaaatgatgtaggaaaaagataaatgcaatcagaacagcagtctaaatgtatgatatcaatattcaactcttatctgcactgtgc

SEQ ID NO: 459539 - DNA, 421 bp, Homo Sapiens
  misc_feature (17)..(17): n is a, c, g, or t
  misc_feature (345)..(345): n is a, c, g, or t
ttttttttaacaaaagnaattttagtttttatgtatttggacagctaccactgaaatgttcattttgacatataagatgcagcaggatatggaagacaccaaaacaaagcacaaaaagtcaaaatgttcaaagtcattttcttccttactttcttcattacttatcacatttttcgataactaatggcagtagcttaataagctcctatattaacaattcaggtttatgtcacaaatacttttattaaataaatttcaaagtaacaaagctttgcctacattaaaaaaatcagtaggcaattataaaacaagtcaacaggtagtcgtgcatctaaatctgatgtngtattcaaaaataggggaaatccacctgtggcttttacttgtatctgggggaacgttcaaggggggctccctggac

SEQ ID NO: 459540 - DNA, 465 bp, Homo Sapiens
  misc_feature (52)..(52): n is a, c, g, or t
  misc_feature (70)..(70): n is a, c, g, or t
ccaaagggtggcctgaattagcctcaagtgggttaacagccagggtgcctangtaaacgctgaagtaganattcaaaacctccttggtcctcattccctacccacttggcagaagccagcaggtgccccaggtgaatcagaagaaactatgggacttacctttacgtcatgtccctgacaaggcatcttcctagtttgaagactttcattgccatttctagggctgaagcacatttggaatctattcataaacacctattaggaagcactgccatgaaagtgcaaattgcaaaattcccacttccggcctattgttggtaacaatgtggtgaatatgttgtatagtcaggcaacccatctgtacctctcttagcttttactcccgatttcatgttactttcttcaggcaggaggctgctgagatctgtgagtgattgggtgtggtaagacttctgcctccattgg

SEQ ID NO: 459541 - DNA, 440 bp, Homo Sapiens
  misc_feature (372)..(372): n is a, c, g, or t
  misc_feature (411)..(411): n is a, c, g, or t
aaaatattttccaaacaactttattgagaaacttaagcttgtttctgtagccataacttttttgaaatcagattgtatacttaaatgactacccacgattcaagacaaaaaagagataatctcttgaaattcttgatagatgacatcaatcagaaatactatctgcacaagtaggatataaacatttaagtcatttttacagccattttaaattatacaacagctgaaattatatttaaaggatatagtacagcttactttttgttgatgaatgtactattaaaaatccttgggcaaaatgtgaatgggatttgaatcccatcaaattttttcataccaagtattttaaaataatgatactctgttttgganaagacacatgctgcattggagcagtcactctgaagctgncatgaatgccattaaaaagcacatgcacc

SEQ ID NO: 459542 - DNA, 520 bp, Homo Sapiens
  misc_feature (500)..(500): n is a, c, g, or t
ttttttttgcaaaatgaaacaagtttattttctccaataacttctgtaaattacaaagacaaaatactaaaaactacagcatataacttttcaatatttaaccagagtactcgtaataaatatgcatccggaaacaagataaaaggctacacctcgtcaggcatcctacaaaaatgtctcaagttttatatactctgcagcatttctgtgcgggggcagaaggggctgttgtgtattttctgaagtgctgtgacaaaaggtcctttcacatttctttggaggcatttttgaaattgcttaactataattaaacaacttaaggaaaaggtaacaccaagctttaaagccatttttgctttgctggtcattgggtccttatccaatacagatccaacatatcatccaggcacagccaaggcacccactgagggccaagcagccttgtggggacatgggccctgtcagaggcaggccctactttcaggttaaatacttttggnggagtccaggattctgtctc

SEQ ID NO: 459543 - DNA, 332 bp, Homo Sapiens
aacatagagaaatcagtcatttgcaatgcttttgagaaagtactgtgtataccctacgagcctgcactccttatgtgtgagactgatgaccattggttggcttattatccattccactaagtgacaaaatcccactgactattcaaatccaggctcctggcatgcctgtaccttagaatcacaaccagctgcaattccaggatggagttcaaactaattgtgggggcatgtgcttcttacatgactgctagattgttcccagatggggaaggttgccctgataagcaacttaaatggaaataataaatgtattgtttggcctctttaaacag

SEQ ID NO: 459544 - DNA, 432 bp, Homo Sapiens
taaaaccccccagggaaaaaatggggtttgggaataacaagtggactgaagaagggctgaaaggttaagtggaggcattttaacctacaccctagacacatgaatgtctttaagcttgagctcctatattgtgtcttttaattacacagaatgttcctttatgtttgtatttatgtgcttaaatgaagttctattttattggagaaaataattgtgctttggctctgttgatacatgcctataggaaatcctaaccagaacgatctcacctagaccctagcatccacctcacagaacccaaattgtgtggttctgtcaaatgatataagacacgggactcaaataaacactttagggaacatttattaggacactcacttaaaagacatttactgagcgtctctccatttattttactggataccaaaggcc

SEQ ID NO: 459545 - DNA, 426 bp, Homo Sapiens
  misc_feature (344)..(344): n is a, c, g, or t
caatttacaaaagaaagaggtttaattcgatttacagttccacatagctgaggaggcctcacaatcgcggcggaaggcaaggaggagcaggtcacatcttaagcggatggcggtaggcaaacagagaatgagtttgtgcagggagacacccctttttaaaaccatcagatctcgtgagacttattcaccatcacgagaacagcgcagggaaagacatgcccccacaaatcagtcacctcccaccgggtccctcccacaacatgtgggaatttcaagatgagatctgaggtcaaaccatattcaccattacaatttcaggcatttgtgctcctggggcatatatntccccgggggaattttaaaactggtttttcatggcagggggcactttgttacaaattttttttagtactttcttttgttaat

SEQ ID NO: 459546 - DNA, 450 bp, Homo Sapiens
  misc_feature (22)..(22): n is a, c, g, or t
  misc_feature (28)..(28): n is a, c, g, or t
  misc_feature (39)..(39): n is a, c, g, or t
  misc_feature (46)..(46): n is a, c, g, or t
  misc_feature (70)..(70): n is a, c, g, or t
gcaattcctacgaaatttaaangtttancccctaacatnaggtccnaaccccatttaaattttgtaaaanggtgtgaaagtagggggcccaattccatttttttgaaaagatgcaggacccatttgttgaaaaggctgtatccttttcccctgaaattgtcttggcatcctttttgaaaactaactgaccataaacatgagggtttatttctggactctcaactctagtccacagatctgtatgtctacctgcatgcccaggaccacatagtgttaactttattattctttttaaagattgttttggctatcctgggttcctttcatttccatgtgaattttatgattgtcagtttctgcagggaagccagctgggattttaatagatcactgctctgaatctgtaaatgaatttgaggagtactaccatcttaacaatattaagtctcc

SEQ ID NO: 459547 - DNA, 413 bp, Homo Sapiens
  misc_feature (178)..(178): n is a, c, g, or t
  misc_feature (302)..(302): n is a, c, g, or t
  misc_feature (398)..(398): n is a, c, g, or t
aagcttgtaaaatgtcatttaataacagctttattgtgatataatttacataccatgtaattcacccatttaaattatacaaaccaaggacttacagtgtattcacagagttgtgcaaccataacatctattagcagtcaacatactgaagaactgccagactgttttcccaagtggnccgcctcatttgacattcccaccagcagtatacaaaggttccaatttctccacatcctcatgaggcactgctattagctgctttctagggttgcaggccttcttaggtcgggtgcataggcagntatctttttgtggattttgatttggcatttctccaataggctaatgatggctggggcatcttttcatgtggctttattggccccatttcatatggnctttcttagggaatg

SEQ ID NO: 459548 - DNA, 483 bp, Homo Sapiens
  misc_feature (33)..(33): n is a, c, g, or t
  misc_feature (37)..(37): n is a, c, g, or t
  misc_feature (434)..(434): n is a, c, g, or t
  misc_feature (456)..(456): n is a, c, g, or t
  misc_feature (465)..(465): n is a, c, g, or t
gttgctgtcaacaaggatgtacaaatatctgtncgantccctgctcttaattgttttgggtatacacccaacctacattaatctttaatcacttaagatgttggggtttgtgctgggaggtaaccaagtgactctggagcagcctcaccctagctacagagggaaactgactcttccctctctgcccaatcttttgccgcctgtcaggttcccaagctgtccataccttactgtgtgaagcgctttgggtataaactcccaaatagaggctcagccccttttcctttcccaagtccatcctgcaggttatagctcttcagaggaatctcttgaattctggcctggggatctggggattaaagtaggaacccaggggtgtcccttggggccttaggcattagcccgtttgtgggtgggaacctggccattcaggnccccactggcactcagttggtnccctgggtnacttttagggacagtttt

SEQ ID NO: 459549 - DNA, 956 bp, Homo Sapiens
  misc_feature (189)..(189): n is a, c, g, or t
cagatagtaaagataagacttctggagtccggaatcgaaaacacctttcaacacgtcaaggaacttgtgtctgagaaatggaaaccgctcctgtatattctgtactgttttacttcgggcttctgttaaagctgttctatggccttggattttatggaggcagatctctgtatcatccagagcctgagnacagtttccttccaaatggacaatgacccaggtggccaaagaatgttcatgagttttataaaagtattgatggtcacaggtgataaagtcagtttttaccactatcttaggcttattatagctaacattaaattactctggaaaaagatgtatattgtttcttaatgaagatgaaaaatatgtaattcatataaatcaactgtttatatcccaagactttaaagaaagacattttttaatgcctgaatgatgagaattgtacagtttttgcctcataagcaaacttgaatcacctgtgtatgaacagggaatgaacacattgcaatggctttaaatgctcttttatctcgttgtaaaggtaaggcaagattttgatgtagtaggatgtaggtaatgtatttaaatatttcatatgaccatatcgtgtccaaactcagtctgagaatgtgacagctttccgcctaactagaatgcagaccagaatgagttcaactcattctgtgcaacttcacagggggtttattagaatgctcagtgtagaggacattcctgtcatccatgccaactacctaactcgttatcagagctgataggagcatgggaaaagtctgtccagcgattcagttgttcccctccttccaaaaacagcctccaataccacaacctggaaaggggccgaatgggttatttttacagcatacaaggttctgctccagtatggttatttttaattgcctaagaatcattgggtcagacctaaatgatcc

SEQ ID NO: 459550 - DNA, 726 bp, Homo Sapiens
agtttcatcaatttattttttcatgagagaagtcaatatttagagggtccaaaagaagctaataaaattacttgattgtttttaggagatatttacaaacttagctcattcctttaatgagagagaaaatatcacagggaagtagaaacaaccagtggcctccccctccaaaaaaaccccacagattatagataaaattactaaaattactctaaggaatttgtcttatttttaatgcatggaaaatagcaaaattatcatgccaacatgaggaatatatactataattcataaatgcctaattatcaaaataatgacatagtcatggttagatgcaacctagaaatcttacataagatgcaactacatattgtatgatcattcctcttatatatgacattcaatcctcatcaaattcagctatgtataaatggcattatgaaataaacacttaatatcacaatagggtcatagtctgctactgtacaaccatgggcatgcaagtaactatgcattagctgttaaacagtaaagtgtccataaccttccagaaatccaaaggaatgtggaaaagtacatattatagtactaaacatcaattgtatttaaaggaccttcatatttaacaaagctatatcatatacagcagctttggagatttctgtcactgttatacatatcttgtcaccctgaagtgaggaaactgcaattccaaactatatctgt

SEQ ID NO: 459551 - DNA, 528 bp, Homo Sapiens
  misc_feature (35)..(35): n is a, c, g, or t
  misc_feature (48)..(48): n is a, c, g, or t
  misc_feature (111)..(111): n is a, c, g, or t
aacttcccaaaactccctgaacaatgtgaaccaanggttgaactttantcaacattaaaactctgcttccgggtgaacactgaaacaacacgaaaggaagtgaaaacctanttggacagcctttcttgaagaaggaaatccatactcaattgcttttctaaatccattgccttcagtagctccttctgtccacactttaaatgtcagtgtccccagggctttatcccaagccccatcctcatgtcactgggtggtcccagccccactctggcttccacctccatctgaactcagggacacctctcctggccagctccccttgggagattctgcctccagcgcatgggagggtatgcatgcctgtgggggtgttttgggggagggaggaggaaggaggagatttgggtgacatagatattgtgattacatggagatacttcagcaggacaagatggtatgtccacttaaaaacacagcttctgaccgggcgtggtggcatgcgtgtgtagtcccaggtggttttcatta

SEQ ID NO: 459552 - DNA, 509 bp, Homo Sapiens
  misc_feature (34)..(34): n is a, c, g, or t
  misc_feature (39)..(39): n is a, c, g, or t
  misc_feature (102)..(102): n is a, c, g, or t
  misc_feature (108)..(108): n is a, c, g, or t
  misc_feature (132)..(132): n is a, c, g, or t
  misc_feature (147)..(147): n is a, c, g, or t
  misc_feature (218)..(218): n is a, c, g, or t
  misc_feature (356)..(356): n is a, c, g, or t
aaaaataaattttattataactaccctcgaatanttacncttaactacttaaaaaatttggtttacccaacacgggaaagtttttaaacaacaacactgcantttagnaaacaccgccctcccattgttacnagcaaaagcaagaancccagctcccagcccgtcccaggaggggttcagcaggagcggccgggctgggccatgggccagaacaaggnagcagagcccggggtggacgtggcagcccaaggctctccgaggaagtgcacacgactgagccgaggcccttgcagagggaacctggtgtggcctgaagtggtggggggcacagggctgagggtcccctcctggaaggnagcccccagggctgtgtccacctaagatagcacctggagccctcggcctccagcagggtctgcagctgtgtcgtgtgttaagcaccaaagcccagaggtaagacggtggcagggctctctgtgcacctggattctaacaggctgccatgggcc

SEQ ID NO: 459553 - DNA, 422 bp, Homo Sapiens
gacctataagaaaaaacttttatttgtgaaaacagcattaaagtgattccatatcaactccaaaagtttaccacaatggttcagtttacatgaaacaatgatggaaatatacatagcaagtcttagcagggagaacaaagcttactatgattttcacacacttccatgagcaatatccactggcacaacatgccttcctgcagctattaaccagcagcgtctgacatgatctagtatttgtgaggtgccaactaagagaaatatattgttcagaaacttgaaaagactatttccttcctataggctaatttaaagggcactgctctatgggttattcattatattattaatattatttctctggtagggcctcattccatggacctttttaaggttaaacagggtaatttgttctttttaga

SEQ ID NO: 459554 - DNA, 383 bp, Homo Sapiens
  misc_feature (13)..(13): n is a, c, g, or t
  misc_feature (51)..(51): n is a, c, g, or t
  misc_feature (122)..(122): n is a, c, g, or t
  misc_feature (134)..(134): n is a, c, g, or t
tgtggcttggccnaactcttgtgcttgaccaatgcccgggttttcgtgccnatctgaaagcctgtgggaaggtcaacagttcccagcaggagagagggaactggggactgcccaggtccccnagggcaggcggngagagggaggtagctgtgctgaccttggcatcccttcgccccatgaagcagctgaggaagccagcttagaggggccagctggtcctctccagcccagggagccctctcatctgcaagccccaccacttccccaaaaatggcctggtgacaggctttctccacctggcgagggaaggcagttcatggggagggggttaaatctgaaggctctggagtcacaggtggggttcaagtctcactggctggggc

SEQ ID NO: 459555 - DNA, 441 bp, Homo Sapiens
  misc_feature (17)..(17): n is a, c, g, or t
  misc_feature (65)..(65): n is a, c, g, or t
  misc_feature (74)..(74): n is a, c, g, or t
  misc_feature (111)..(111): n is a, c, g, or t
  misc_feature (220)..(395): n is a, c, g, or t
tggagggactgaattanaaagttctggttagtttttaatgtttttaaatgtaaaaatatatggtnacttaggcntttcacttagtagacaaaaaatcttttaaaacatggnaaggaccccgggggcagagaaaaaacaaaacaaaacaattctccatggctgatcttgttgggagctatgagatccgtcctggactctcgacctcagcactggcgacccnnnnnnnnnnnnnnnnnnnnnnnnnnnnnnnnnnnnnnnnnnnnnnnnnnnnnnnnnnnnnnnnnnnnnnnnnnnnnnnnnnnnnnnnnnnnnnnnnnnnnnnnnnnnnnnnnnnnnnnnnnnnnnnnnnnnnnnnnnnnnnnnnnnnnnnnnnnnnnnnnnnnnnnnnnnnnnnnctctggaccaatcattcaataggttttggtacagtaaatatttcct

SEQ ID NO: 459556 - DNA, 489 bp, Homo Sapiens
  misc_feature (320)..(320): n is a, c, g, or t
  misc_feature (366)..(366): n is a, c, g, or t
gccttggaaacatgatttattagggaatcgttgggttacgctgcaaaggtcgtcttggcttgctttaatggatttcctgggttgcctttctgcccaggcccagcacgtgagcgcggcagaggggagcatgaagtcacaagacgacggacgtctgagctcctgggactcctggagaccagatgtggtggcaccacgctgcatctcgctggctcagcaagggctcagctggctgtcctcggctgcaccgggtttctgtcctctctctgtcatgttcctgatgctcaaagctaatgacattgtcccaaaatacagagggaggncagaaggcggatcaccaaaccagtgttgcaggtcacttcctgtttnggaaattatagggaagccctggggtggttgaaccaacaaagggatcaccgcagtggtttccaatctggggattcttgaggggtggtaacggggccacagggtctccaggggggtccctgaaaa

SEQ ID NO: 459557 - DNA, 161 bp, Homo Sapiens
aagttgacttttaatgagtaaaaataaaaacccctcacaagtcaagtttactcagtagccaatagcctaaaatgaaattttaattttgcttgttcacataattttgggttttttttccccttctctgttctgacttctctcagtcgagccttggcaccagg

SEQ ID NO: 459558 - DNA, 339 bp, Homo Sapiens
  misc_feature (12)..(12): n is a, c, g, or t
  misc_feature (29)..(29): n is a, c, g, or t
gtgactattccnaaaccgtaaaaaaaggnaccataggaaaataaagccctgtttcctcttctctaaaaataccttatatgtacacaacagtaattgttaacaggaggaccccgtgcatgaagaaaactgtggaacagagggcagtggcctgtcttctccccaagtacttcattcaagacagttttcaagttgtggccaagagctgagggaagccacggggctggcaatgcatcttgaagtgagtggtgtttgttgttactgaaggatttaagttggaaagaaatggcgtacagctttcttgaacctcagtactgcattccgttcacttagtttcaccca

SEQ ID NO: 459559 - DNA, 480 bp, Homo Sapiens
  misc_feature (404)..(404): n is a, c, g, or t
  misc_feature (410)..(410): n is a, c, g, or t
  misc_feature (443)..(443): n is a, c, g, or t
  misc_feature (458)..(458): n is a, c, g, or t
  misc_feature (467)..(467): n is a, c, g, or t
cacgtgagcttctctctcattttaatgtgaggaaaatcatctttcagagacaaggcaccgcttagaaatgtatgtccaggtatgaaagaacctttttaaaatggctggttgttccagatccagatttctctgcacactggacttcgtagagtaagtgtggtagacaaagagactacactgcacaaccaccagtgaatatcattgctaagaagactttgggtcgtgtttctcagccactctcacagcttttgtagacttatttgattttgaaacaagcagttagctaaatctattttccttttatgcatatatgttaattggctcaacttaatatgggtgttcttacagaatatgagcccatttggaaataaggttttagggcaattttgctgttgggctctggnttgttntatagccaaattttaaagtttacagggtgtttncccgggtaggagggnttggttccnttggggtccattt

SEQ ID NO: 459560 - DNA, 508 bp, Homo Sapiens
acaaaaacttaccccctgaatcctaaatgttctctttctccccaatttccacagcaccgaaatccatagatgaggagagtgctatgttcccaatatttgtatccccccacaaattccatgttgaaaaccctaaccccccatggtgatagtatttagggggtggggcttttgggaggtgattaggtcatgaagacagacctcttgtaagagaggcccaaggaagctcatttgtcctttgcaccacgtgagggcacagctggaaggtgccaagtacgaactagaaaacagggcctccccagtcatcgaatctgccagagccttgatcgtggacttcccagcttccagaacagtgagaaatacatttctgttgtttataggccacccaacttaggatatttggttatagcagccccaaaagactaagcccaaagcgtgtcattagggagaagggtgaggatccctttcttccccttacagttgtccatgctttttcccatcttagaattgt

SEQ ID NO: 459561 - DNA, 437 bp, Homo Sapiens
  misc_feature (358)..(377): n is a, c, g, or t
ttttttttcagcaattgccagttccttatttatttcttgaaatgaatgaactaagaaaaaagtgccaattgttctttccagagatcatgcattctgatagagaagatgcaggaatcccttttctaaaatgtgtctgcaaagctgcttgctccagagttgagcatgtgctgctcaggccacctggtgagggtagaggcgtcttagttagacatatgtatatttaaaaatactccctcaccccatgacatgcatggcagaggcccttttcttaaattttttttccagggagtgataaccactatttaccactttttatttcaatatctggggtctccttgctctccctcttttgactggnnnnnnnnnnnnnnnnnnnnagaggaggagaggaggaggaatatggaatgaatgaatggaatgtgaattaggtggacttt

SEQ ID NO: 459562 - DNA, 460 bp, Homo Sapiens
  misc_feature (375)..(375): n is a, c, g, or t
  misc_feature (419)..(419): n is a, c, g, or t
  misc_feature (430)..(430): n is a, c, g, or t
  misc_feature (435)..(435): n is a, c, g, or t
cagggaaggcagagatgtgcctggcatcacagtttattgtttataaaccatgacaataacagctgttgctcagcacaggcctagcagagcccactgcagggggacggcagcgggcaccagaggccttgcctggcccaacccaatgggaacacccagactcagctgggtccccaagggagacttggcacattggcatgggtgtgggacaggtaaagcatgcaagagggagaagagggacataaggggcatgcggctgcggggttttgggacccaaataaataaagcaggttgacagggtccccttcccctcaccaggaattcctgggacagcttccagcccccaaagcctgcctgtcccaaggctttagttcagcntcaacagggcagggattttggcagggcaagggcagagttggagntccatgcccanttttnccagggtgcctcccttccaattagc

SEQ ID NO: 459563 - DNA, 584 bp, Homo Sapiens
  misc_feature (502)..(502): n is a, c, g, or t
tacagttttccctgttaacatcttgcgtttgttacaattgatgaaccaacactggtttcactctgcagaaattcccttttaaaaacatcctgtgtattagtttcctgggctaacagagtactacgacctgtgtgggtaaaacaaccgaaatataatctcccagttctggaggccagaacgtccaaggggaaggcgtcggcagagctatgctctctgaaggccccaggggagagcctcttcctgccttctgcgtggcttcgggtactgccatagcccttggccctcccgggttcgggagaccgtcgctgcactgtctgccactgtcttcccgtgggcgtgtgtctgtgtgtcctcttcccttgttataagggatgctgggtcattgggatttagggctcaccctaaatttcgttgtgacttcagtgtaaatttcgattatctctggcaacccaccccattttccaaacaaggccacagttcggcaggtaacggagccaggggnttcagcatgtctttctcttcttggggacaaagtgcagccagggacggcccgttttgctctggtcatttgggatttattctag

SEQ ID NO: 459564 - DNA, 394 bp, Homo Sapiens
  misc_feature (39)..(39): n is a, c, g, or t
ggggcatttgtctgtagcttctgcctcagtttatcaggngttcattcgttatttaagttcagctgctttaatttgttttccactgaccttcagacaggaacactgcaaatctccttgggatagagagggtcatactgatctatcatatgaagcataaaagcaaagtcatttttcacatctggaatatcatcaattccagtctcctgacggacatactcaaaggagtattcccgtagagaacggtagaacagccagtataaggtataaaggcacgtcaatccatagatactaacaaagcacagatagcaaaaggacagttttgagaacaagtgtgccatggtatgattgcaagaaaagtttttatatccagtcatgtcctgaatgtccacattac

SEQ ID NO: 459565 - DNA, 832 bp, Homo Sapiens
  misc_feature (743)..(743): n is a, c, g, or t
  misc_feature (790)..(790): n is a, c, g, or t
  misc_feature (806)..(806): n is a, c, g, or t
ctcaggtaaagaaaaccactacaaggtggtgtcatattgtgcgggattcagatagtctggctgaatcagaatttgaatcagcagccttcagccagggctctagatcgggtgtgagtggtggctctcgaagcctcaacatgtcaagaagagactcagaaagcacccgccatgactcggagactgaggacatgttatgggacgacctgctacatggcccagagtgccggtcatctgtcaccagtgacagtgagggggcccatgtgaatacccttcactcagggaccaaacgtgaccccaaagaggatgtttttcagcagaatcatttattctggcttcagaattcaagtccttcctctgatcgagttagtgcaataatctgggaggggaatgagtgcaaaaagatggatatgtctgtgttggaaataagtggcatcatcatgagcagggtcaatgcctatcagcaaggagtaggttatcagatgctgggaaatgttgtcactattggattagcattttttccattcttacatcgacttttccgtgagaagagccttgaccaactaaagtccatttcagctgaggagatcttgactctcttttgtggggcaccacctgttacacctattattgttttgtcgataattaatttttttgaaagattgtgtcttacttggatgttttttttcatgatgtgtgtgggcagagagaacatataaaacagagatttttatttgcaaaactcnttcagccatatttacttctgccagggaaagctagggaaatatggaantacctcattttcagantttaaggaaggtgggaggatatttaa

SEQ ID NO: 459566 - DNA, 515 bp, Homo Sapiens
  misc_feature (489)..(489): n is a, c, g, or t
ttttttttaaagaagataatcatataagtgattttactcagtaactggatctctatcttatttcctaacatccaagtgtctatatcttgacagccaacctccaaaatggtagctctctgtgtttaacctgactaccagacattaacccactgtttcaagttggaacaccacaaggataactttttatcttcgctgcttcccatctcctatcaccatacattttggacaccaccatgcctcaaaaatatggttagattctctttcatgtcctacagctgagtctgcttctaagcatctcttttgctacagtgagcctgtccagtatagagatccaagtaatcactgctttggtttgctccatttccccctgggtctgtatccttactaaacagcattttaattcagcaaggagaactcatggcaaagacttcaagaataacttttattttggtgaggctgcagtatattatttctgttccacttggaaantcctgaagcctaaaaacagccaaata

SEQ ID NO: 459567 - DNA, 511 bp, Homo Sapiens
  misc_feature (12)..(12): n is a, c, g, or t
  misc_feature (30)..(30): n is a, c, g, or t
  misc_feature (122)..(122): n is a, c, g, or t
gctcaagctggnccccccaacaatgcaacnacctgtgaacgctcgatggagcccagcagaatcatggactcaggggactccactaagggccagcattcggcccttggtcctgtgcagtgccnaaacgcaggtcccggaaggtgcagctgagggcccacatggggaacatcccgcaccatgatgtcctccacacgcacccggtactgctggtggggccccagccgagctcaggcaggtagggcagtttcttgattcggatgatgctgtcatagagggagggctgcagactctgggcgacagcgttggccaggatgacggcgatcatgacaggcaggatgtgggcaatctggcctgtgagctcgaacacgatcacagccgtggacactgtgtgtgtcaccgctcctgccagcgcagctgccccgaccacagcgtagcccccaggcacaatccggtaggtgctgctgtccgtatgaattccatctgggaaccaggcagccatgctttcacccac

SEQ ID NO: 459568 - DNA, 520 bp, Homo Sapiens
  misc_feature (357)..(357): n is a, c, g, or t
  misc_feature (373)..(373): n is a, c, g, or t
tttcagctccctgtgccatttattcttggttttttgagagcggtagacctaaagtcagcccaacaggtttaacgaatgataaacacccaagattattttaatgtttacaatgaactttgcaaaatattcttcagctctgtgagaggagaagaagggaaaaggggaggtaactttacagagggcttgattggcacctgcctcttccgcatagatgttctcacttaaggcccagggttgctgctggacagatgagcatactgaggttcagggaggtctgggaacttccttagggcctcacctgagggtcagctcccaggctgagcgtccctgactggcaattttcctcgtgcctccttncaccaggccaggtccnggggcaagaacaaggcagggccacgcacacgtacatacagggaggagtcccccatcggtcctgcagggcacagagtctctccaggtccccgggggttgggtcctgtccctgggggtagggatatcatcccagggtcccccagagcca

SEQ ID NO: 459569 - DNA, 527 bp, Homo Sapiens
  misc_feature (388)..(388): n is a, c, g, or t
  misc_feature (492)..(492): n is a, c, g, or t
ctctacacagtcttgcataataaagacaagctgcttcaatcaaatgcaccatcacaacaaatgcagttaacagcattgctgcctcactttccaagcctatatgcaaatttattcctttacttttgttaaaagtccaagtgggtatcatatgcctatttattctcagagtgccaaaatttccaatattcctactatgaatcttaccctcgcaattactaaatagaggtatgacagtcaagttcattaaacgaatgagttttggttttataatagacaacctaatcctctactaccaccccaagtagcttaagaatgatatgatggcctgaaacagtaaaaagtgggatgtttgggagtattacctgggacctatatatttctgatatgnccttgattataaacagatggacagattcaatttcaagacagtgtgactaccattcctgttggagtattatagaaatacaagacactaaactgagtaaacattcncctgggctagaagggaaggcagtggtacactcagt

SEQ ID NO: 459570 - DNA, 432 bp, Homo Sapiens
  misc_feature (317)..(317): n is a, c, g, or t
  misc_feature (406)..(406): n is a, c, g, or t
  misc_feature (415)..(415): n is a, c, g, or t
caggatattgtgctagttcagaggtagtaaattagcattttgtaggccatgtttggtcacatacatgattgtttggacaacacagttttgataaatttttaattcattgcaagcatttaaaaatcaagaggttttcacatagaaagcagatttctagcttctcttgaaagccaggcagccatgggcccacattcctgatggcacagtgggctggagctgggagatctcctagaagtggggcctgtagcctccagttccccacaggcccccacctctctgtctccatactggcctcataggaacctaggcgagtagtnggaagtcctcaaaggtgcaccactgggatgacttggtgggagtttgtctctttctagttaaccttcagggtcttagtattagaagcgtnctcacaganggagagaagagattaaa

SEQ ID NO: 459571 - DNA, 333 bp, Homo Sapiens
  misc_feature (97)..(97): n is a, c, g, or t
cagttccttaaagatactggtccactgtcttctggctttcattgttttggcaagaagtctttttaattttattgttcttgatgtaatgtgttttttnctgactccttttaagattttcctcctcttccccccatccttccatgccaccacagtggtgcatgtcacgagcgtccatgtgaagagaccaccaggcaagctttacgtgaacagtaaagcttttttatttcacctgggtgcaggcggactgagtccgaagagtcagcaaagggtgatgggattatcattagttcttataggtttgtgataggcggtggagttgggagcagttttttt

SEQ ID NO: 459572 - DNA, 405 bp, Homo Sapiens
agttttgtggtactacatatgttttattaaaaattcaaactttttttcagatcgaagcataatttatcttccattaacaaaaacgaagatcttaaatttgacacgattacaattaaaatgctgaaaggagttatgaggcatttaaatcattcttcaattagaatgtttgcagcatatttctcagaggctgacctggaacacattacctttgttggcagcatcaaaggcagataaatcctgtggctggaaatcaattgtgaggtcccattaggatggactttctaggcacacatggcatagggtcttggcactggtatccgttctacttctaggaaggttgctgtctggaaggctctttcccactgggcgaggtcactttccagctccactgagaagtacaggtcc

SEQ ID NO: 459573 - DNA, 339 bp, Homo Sapiens
  misc_feature (240)..(240): n is a, c, g, or t
aatcacattcttggaggaaagttactaaggtgcctttttaagtgcaccagaacaggtaattgaaccacacatgtgccctaaatttaggtgcagagtttccctgaatttcattattatatggattaagatgggcagctcccacctggacgataccttaatcaaaaagagaaaaagtgtgacgaaaacaagggcaataataacattaccagcactgtactgatcaaatgcccacaaatagtncagaacaacggtgctaaaaagccgctttaattctgaaacagaaagtcctgagacaccgagcgccatctagcaagcaaagttagaatcaaagtatgcctg

SEQ ID NO: 459574 - DNA, 536 bp, Homo Sapiens
  misc_feature (23)..(23): n is a, c, g, or t
  misc_feature (31)..(31): n is a, c, g, or t
  misc_feature (76)..(76): n is a, c, g, or t
  misc_feature (107)..(107): n is a, c, g, or t
ttcatctccaaacactgggaatnacaatccnactggaaattggtgatgacacagacccaaaccctaattagttggnaattaaacacacacactttgggctaaagggnaattttgattttttcattttaaccccttcataaacgtggacatggcagacaggaagtcaaaatagaaaggagcatggagactcagacttcccaggtatgccttactgaacctgtagaaggtacattctaactagcaagcagggccaaggctctcccccttgactgcgggcaatacctggggaaaggtgaggggtctaattaagcctttgcattccccaaacttggcaaagtgcctggcagagtaggaagaaaaaaaattgtttttaaggaatgacgtattagacgatcaaggcaaccaggaaggctttgggttgaaatattctaacctttggtcataaaccttccacctgtacctcaacttccacttacataggctgactgctcagttaccaagccttctccttagaaagacttcctttcaatgcaagc

SEQ ID NO: 459575 - DNA, 285 bp, Homo Sapiens
  misc_feature (223)..(244): n is a, c, g, or t
  misc_feature (253)..(253): n is a, c, g, or t
  misc_feature (273)..(273): n is a, c, g, or t
ccaatataattagatcttttatttaaaaataaaaacaagtctagaagcgattttgatgactgccaccagagggcactgtaaccttgttgtagacgatcaaaacgcagccattaaacacttccagccacatgtttatttctttgagaaagcaacactgcaggacaaaattgaacaccagtagtatatttcaacttttttttcatgtcatttgcctaggatatannnnnnnnnnnnnnnnnnnnnnatcttacangtcaacctcaaaaacataanggcaggagagga

SEQ ID NO: 459576 - DNA, 764 bp, Homo Sapiens
  misc_feature (719)..(719): n is a, c, g, or t
attgctgcttttatagatcaaaactacttgaatcatcaggaatttcatatttttcatattgtgtgacaacttataattttgtttcaaattgtgattttactaactggaaggaagaagagtaaaattggcatatttaggttttttgtagaagaaagatacaagtgaaaattaggagtggattggagaaattggggggaaatagaagagtacggagaaaggaagagattgaaaatgttaccagagttctttaaagctcacattttatagtatcactgctacaaactatttaatgaaatgtggcatcgggtgaaaagaggcatttgtttgatccttgaacgaattaatctcacgtacttccctgtttgtggtttgagcctttcactggatgtgagctacttgagagcagggtttatgccttcatcagcgtgacccctgtgcctgcagcctcataggtgttaatctgtaattttaaattttgacaaaagcattttcacagccctgccacataagatctagtttttatttctagagtgctgctatgaataattactataggctgctgtccatcttgcccatccattaaggtaccttctcacaaacatttctaatctactgggctggagtgcagtgggtgcagtctgtaggctcactgcagcctcaaactcctaggctcaggcgatcctcttgccctgggcttccatgtagctgcaactataggngtgtgccactacacctgggtaatgtttttagtttttagagatggg

SEQ ID NO: 459577 - DNA, 249 bp, Homo Sapiens
atattttgttaacatttttattggtacgtgctctcagtacaacaaacagcatcagtagtgtacactttgataaaaaggaatttttagcttagtagaaaagaaagcccaaaggtcagaagtataatgaatatgtacatctttatggaaactgtttgtgtgaccatctttatcttcccctgtggatgagatgtatgcacacacaagtaaactagagagaattttattctatgggaatttttaggaaaaaaa

SEQ ID NO: 459578 - DNA, 521 bp, Homo Sapiens
ctcatttcaacatatattgtaatagtcgaactttgcaaaccactgaaatgtccagtaaaaattatgaaccatcctttttagagactataatagtaaagtcatgaaaatcatgttatagaagacaacacaataacatagaaagatttcctagatatattttgaaaagggcaggttatataactgtccagaaatttattttctatgtataatacaatcttaatgtatataaatctacacatatatgcatgggaaaaacttgtgtaaggaacatactgacattttaacagtatttatctttgggataggaggtaattgtaaaatgtttacatgtttttctttactctttcatggtatttttgcagagtttctgtgataggaccattttgtttttgagactggattaaaaacaatgtagcagaggccatgggtgcctcacccatattcctcaagctggccctagttccaagtagctaagagcctggcggtggccctctacctacaaaggatgggagtggagtggc

SEQ ID NO: 459579 - DNA, 544 bp, Homo Sapiens
actgaatctaaccattaccatgaaataaatggaaagattgtcaaagatctatacccctttccacgcacacaaaaaaaggaatgctggaccaaaaagctcttatgagtgaattctatcaaaccttcaataaacagaccacccccacgttatttaaaatattctagtgtatagaagaagacagatttctaatagtttcatcattcctgaggccagcataaccatgatatcaaaacctgacagaaagcacaaaagatcaccattttccaatgtgttattcactgaaatgtctgttaagatgcttcagaaagtgagttattttgtcatataagttaaggagatgctgtataaaattacctcccaatggagagtcccaatataccatagtattcagtagtcctacagaatactattttgctttatttaatccacaattttctgaatttgtttgactgtaggtgccccccaacacacacctagattctttgtaatccccatggaatacatttctggaaatggtattatgaaccaatctgaagcatgaatt

SEQ ID NO: 459580 - DNA, 438 bp, Homo Sapiens
  misc_feature (229)..(251): n is a, c, g, or t
  misc_feature (347)..(347): n is a, c, g, or t
  misc_feature (374)..(374): n is a, c, g, or t
  misc_feature (393)..(393): n is a, c, g, or t
attgataaaaccaagtgctgtttatttgaaaataccgataaaaataagtaataagaagagaaaacacacaagactacaaatgagagagaggtttctatccaccattacagaaatttttaaattatgctaagtacaactgtacaccaatgcatttggaaatctacctgaaatagataattttcagggaaaacacaaattaccaaaatttactcatgaggatgtatgcagnnnnnnnnnnnnnnnnnnnnnnngtagagacagggtctcactatgttgcccggctggtctcgaactcccagcctcaagctatcctcctggccttggccttcccaaagtgctgagattanaggtttgagccaccacgcccagccagntgttacgtgttaatctagnttgggtatgacttgctgttggtagtcttcccagttccggggggtt

SEQ ID NO: 459581 - DNA, 357 bp, Homo Sapiens
  misc_feature (44)..(44): n is a, c, g, or t
ccctggggggtctgggatgtcggccccagcccccatctccctcnaaagcccattgtttgcccctggtttgtgaggtgctcaacagcagggacagatgcaatcagagaaggatgaaatgctctttttctttggacctgaaatgggaccctatacttagtgcagccttactcagtgactaccaaaatttgaaaattgtgtttttctgaggctgggctcattgacttccgtgagctcttattagctgtttactcatgaattaggcaatttaatttgggtagaggagggcaaatcaaatgagaaggagctgccgtgtttaaaattactatgaggatagactgttcttaaaggatcctaccc

SEQ ID NO: 459582 - DNA, 410 bp, Homo Sapiens
  misc_feature (18)..(18): n is a, c, g, or t
  misc_feature (29)..(29): n is a, c, g, or t
  misc_feature (52)..(52): n is a, c, g, or t
  misc_feature (71)..(71): n is a, c, g, or t
  misc_feature (77)..(77): n is a, c, g, or t
gaagtacccaacccgtancaaaacacccncctgccaataccctgggaccccnggtgaactcaaaacccagnagaaanccaagggtccagggagggtaataggctcctcgggttggtgaaaggcgttgccagggagtggtggtagattaggggtatgaatcaaggatgggattcctagcccatgagggccctggtgatatggtcagacctttgctatccataggcagtggtgcttcgggtaggttgtgatgtcttgggaattggtgtcagtatcttgggctattccacttctgacatggcttttctgcttttctgcggttgtttctcaaccatctacagtcccactggccctcctgtgtatcattcaaacaggggcaggaaaagaagatggtcgtttctcccgcagattcc

SEQ ID NO: 459583 - DNA, 367 bp, Homo Sapiens
  misc_feature (344)..(344): n is a, c, g, or t
cagttgttgtcaactttttattattacatatagcacatagtgggaatatttggttgaaagtaaattagaaataaaaaagggggaaagtaggaagaaaaatcccctcctccaggtctgaaaatcagacaaaaatccttaaaacttgtagccttgccatgctacaccacatctgccaatacatgaaactgacccattagtgctctgctggatcagcctgcccaggcactgctgcctgctggggctgctgtcatcctctgggccgttcctccaaagaggggacaatgggttttactcagggttaccactgttgctcctgactgggggccaccatgggtgcccagggntttcagggcacagggccctgact

SEQ ID NO: 459584 - DNA, 412 bp, Homo Sapiens
tgtagatcattccaatgacctccatttattatttaaatctcctgaaaatacaactattaaaagaaaaacaataacaatgtattttaaggtttacattttgtataaaagtaaaatgtgtgaaaacattagcacaaaggctggtagaggagaatggaagtgtgctgtgataaggtactaatactattagtgaaatagtacaatatcacttgaaagtagacggtgctaaaggtacaaccaaaggttggcaaactaacagcctgcaggccagatctgacctgccacctgtttctgtgaataaagttttattgggatacagccacagttattcatttatctattgtctatggctgcttttgtgcaacaatggcagaattgtagttccaacagatagtgtgatctacaaaacctaaaa

SEQ ID NO: 459585 - DNA, 175 bp, Homo Sapiens
tcctgctacaaacaatgctgcaacaaacactcttatgcataaacccttagaagccagtgcttttgttggatagattcccaggagtgtttattgctatgttaaatggtatgtgtacattttattctaatagatcttaccagattgtagacagtagattttaagtaagttgattttt

SEQ ID NO: 459586 - DNA, 598 bp, Homo Sapiens
  misc_feature (416)..(416): n is a, c, g, or t
  misc_feature (489)..(489): n is a, c, g, or t
  misc_feature (500)..(500): n is a, c, g, or t
  misc_feature (517)..(517): n is a, c, g, or t
  misc_feature (544)..(544): n is a, c, g, or t
  misc_feature (561)..(561): n is a, c, g, or t
  misc_feature (573)..(573): n is a, c, g, or t
tttaagaaataagaaaatttattagatggattatcaagcagtaaacaacatttttgggagggaaataagaaaaacaagtgtgacctcatactgggttctggttagaacacagccactagaacaaactccagtctttttcagtctgttgctgtacttcagatttaaaatctgggaatgagcatgcagcaatgctccaccagatgaggaagaaaagctgttaaaaggaactcaggatgttgttaggaagggggagtggatgccaggccttcaccagactatccagaagccattccatggggtatttggtctgcatactgtgagacactgagctggttccaacacagcccctgctgtcaccagggtacacagtcaggccaaggaacagccacggaaatggggaaaaccagggatgagtnggagatgtgacttggggatgtacagggggcttcggggagcaccagagggagagacttttcctcccagcttttnattgggaattnaggttccagggtacttngtttaggggaagacaggtcttcttggnagagattgacacctttnaggatgaggttnaaattccccacattccttcaccaat

SEQ ID NO: 459587 - DNA, 526 bp, Homo Sapiens
  misc_feature (303)..(303): n is a, c, g, or t
  misc_feature (409)..(409): n is a, c, g, or t
  misc_feature (415)..(415): n is a, c, g, or t
  misc_feature (446)..(446): n is a, c, g, or t
  misc_feature (467)..(467): n is a, c, g, or t
cttaaattgcattttggtttgagaaacagcaagaacaaattcagcattagggggaaactttgctgttgatctcaaagggaatgagaatttagggagcacctctgcccaccaggaaggagctttctcttgagtctcccacatgactgtgtactatggatcacattggaagaacttctctttttcctaatgctgtctgagttttgcattttggtgccagaacagggaagtgaagggatacataagagacacacataatagaaatgtaaaagacaagcaataccaccagacgatagatgtaatttnggaacaaagatatttttatttgcctaaggcttcaggaaagtcgtgccagggcaatgctggaaggaattggttggcttcctctcccaaaccactttcctcagtgatncatccncttttcaggtgggacaagatatgggcttttngactgctaggcaaatgttcantgtggacatttcaatggcacattggtgacatttcaggccatttttggtttgggcacctt

SEQ ID NO: 459588 - DNA, 315 bp, Homo Sapiens
  misc_feature (229)..(229): n is a, c, g, or t
  misc_feature (271)..(271): n is a, c, g, or t
  misc_feature (297)..(297): n is a, c, g, or t
cagaaacttaaatgtgagttcccattgtctttaaattcatgtccaagctccctgggagtaccaagcttccaaaattagacccaaagtaatcttgttaggcatgactccaaataagcatgctgtatagaaactcttcatttcagacaagatactttactcctaatcacccacacaccccttaggagcctccttccttcagccttgggatttacgtaaggtcgctctttgnctccttttacctccatcttactggaaactggaacctgttttncaagggcccaaatcaaagtctggaanttttcccatcaccgggtt

SEQ ID NO: 459589 - DNA, 428 bp, Homo Sapiens
  misc_feature (20)..(20): n is a, c, g, or t
  misc_feature (41)..(41): n is a, c, g, or t
  misc_feature (401)..(401): n is a, c, g, or t
ggtgccctaaagaagaaccncgccatgaaaatgtgttgagncccttattggttattaataattgattttgaatacctacatgtaggatattatgagttatatacattttttgcctacaatgaagcactaaacttttgaatcatctgaagttatagaaacacactagtattaggcaggccaatgaagaaaagcctaaaaacttcagaaacacagcataaccacacttcattgaattccataaagagtgtatataattaaaatctttcagacaccacgttggagagaacttggtatgaaaagtgcaatgaaagcagtggcagaaagggtgagtttacgtttcaaatataaaagttttacacacaactgttacaagctttaaaaaccagtaagattttgcattncttggcaaagttttttgttcctaagcc

SEQ ID NO: 459590 - DNA, 393 bp, Homo Sapiens
  misc_feature (134)..(134): n is a, c, g, or t
  misc_feature (320)..(320): n is a, c, g, or t
  misc_feature (375)..(375): n is a, c, g, or t
ctgaagcattttccttctgttttgtgtacagagttgtttttgatgagtggtacgctcagagggaactagttctgactacaaatcccactacttgaaatagcaatattgtacctaaagtagtcaaacagattttnctagacaactaagcaacatctgaatacaaatgtaaagtatgctggctcagtgtatcttttaggtcactaaagaggacacatcagtaaataaattgttttcagtgtaatatttttacataaaaatagatttcccccccaaaatttaagatttatttagattcttgagacatctttttatgaaaaggnattaataacatacatcatcaaaacttttcttaggagcgttgaaacaatataaganggttacagaaggccttct

SEQ ID NO: 459591 - DNA, 262 bp, Homo Sapiens
  misc_feature (219)..(219): n is a, c, g, or t
ctctgtagattctcactacattttcaaatatgtacttggaaaaagctgcaaagtgctacctataagcaaattagtaactttggccttatctatgcatagtgttcgctcagtttggttttgataaattgattgacttgcagttcctttgtagtattttaacttattgtgatgtaatgaattttttgaaatgtttatttgattagctgttaaaatataggnaagaatgtagctttgcatgaaattaattacatttctacaagtt

SEQ ID NO: 459592 - DNA, 384 bp, Homo Sapiens
  misc_feature (154)..(167): n is a, c, g, or t
ccctaagaaatgtaattaatccattaaagtagctgcaaattgaactgttcctattttgatacttccctaagagtgtcccagtgtaatcagatcattttataaatgggttattgacccccaggtgtcctttagaaccaccctggaaagctttacnnnnnnnnnnnnnngggtgattttgatttagttgttatggaataggacccaggtatcaattttttaaagctctgccaggctaatatgtagctaagattgagaatcactaagtcaacacattttgatatatcaagaaaataaatggaaatgggggtgataatttatatttgtaatttacaaatcaaacatctatcatacacttactatgtacctagttttattcacgaatca

SEQ ID NO: 459593 - DNA, 368 bp, Homo Sapiens
  misc_feature (335)..(335): n is a, c, g, or t
ttgcttaatcaggttttggaaaatggaagaagcacaaaggaggctctggtataatttagagatagtaactgcaggaagtggctcctgttctttggagaaccaagggaagaagttggggttattagaacctattgaaggagaaatttcttgtagtggacactgtagtatgccactcaggtcctccaagactgaagggaataagctccttggggtgctgctggatgatggctctcagctttcagccctctacaggaattaccctccactggaagagacaccttttcagctccctcctgaagcaggctatatcaaatgactagtccctgtagggtatnggtggctcagctcctttgttccaaacagggaca

SEQ ID NO: 459594 - DNA, 418 bp, Homo Sapiens
  misc_feature (325)..(325): n is a, c, g, or t
  misc_feature (334)..(334): n is a, c, g, or t
gaactttgaggacctgcaactatatttttaacaactttattgaggtataattgacacacaataaactgcacataacaaaagtgtacaatttggtaagttttgacatatatacccccataaatccattattacattcaagaaaatgaacacgtccctcttccccaaagttaccaagtgttcccttgcaatccttctgtccctcctctccccatttccatctccagcaaaccccctggatcactttctgtcactataggattcacttgtattttctgggaatagtatggtaaatggaaattaattcaaaatggtaggtctttttttntcttctttncattcggccttaattctttggggcggtcccatccctggttggtttcgtggtatgggaatgggtttcatcccttttttgtggggc

SEQ ID NO: 459595 - DNA, 501 bp, Homo Sapiens
  misc_feature (431)..(440): n is a, c, g, or t
  misc_feature (488)..(488): n is a, c, g, or t
gctcaggctttatttgctaggcatacaaaaacaaattcaattttcctaagcatttttgaatcaattgggcaaaagctcccaaaagtgcagaatgcaatcaactttaacttggtgggaaatttatacctgagcatcaaacgtggagctcacacactaaaggatgcagcagctcacggcctgagttctaatcctgcctctgccaaaaatattctataagacccctgaccgtctctgatctcagtttgatttgatgcctggtccacagtattattggaaggttcaaattagttaatgtatatatgacagtaattaaaatatagattagtatgcaagtgagatgtaagataatcttttaaacagaaaagcacaacattaaatatagcgaagcagaagtatgtctaggtatcctctgatatctagtcaagatttgnnnnnnnnnnggggtgattcgtcattcacagcttgatgccagaggtcaaagtgaagtnaaaatgcagtcca

SEQ ID NO: 459596 - DNA, 419 bp, Homo Sapiens
  misc_feature (24)..(24): n is a, c, g, or t
  misc_feature (62)..(62): n is a, c, g, or t
  misc_feature (357)..(357): n is a, c, g, or t
tcctaaatcgttaaggaataaaantgctctttcaaggttttactgggggagcccaactgganccttgggcacgcgcgcccctggggaacctttcctctttgccgcccctgcgtgtcgcccctttaaagccttcttggtctctccaatcccaagagttccgcggcatcttgcgccactggctaaggcaaaaacctcaggtgtctacccgcgcttcagggcgccccagagcgtaggcggaggaacccagatcctgtaagtcagcagccgggagcgcctagcgcgctgcgagagcacagatggctggggaggcgcgcggattccaggcctctcagcttccccagagcgcaaacagcgtgncgtggcgcctcccgcagtaagtaagtggcgatgtcaggtcgtacacactcgccagctacctg

SEQ ID NO: 459597 - DNA, 732 bp, Homo Sapiens
  misc_feature (27)..(27): n is a, c, g, or t
  misc_feature (451)..(489): n is a, c, g, or t
cagggaccccaaagtgggaaaaagaanaagaagatttttaaattgtagagatagctcccatcccacaggagattggatccctgggaaaaaatggaccttactcagggggaagccttgacctctgaatttagtctgagcctgtgagagctcacggcccatttctggccttcttgccctaggctcagattggtggacagcatccaaacaaaggcagcccacaactaggcagtgttgtgtagtagaaggagcactggactggaagtcaggagacctgaattcgagtgcagctctgccgctaactagctgtgtgaccttgggcaagtcacctgatttctcttgggcaactgtaaaacgaagggttggtcgggtgatctctaagttccccttccgaatgtggtccaggtcctactctatccctccttagccctgtgcttgcagggacagagaatgnnnnnnnnnnnnnnnnnnnnnnnnnnnnnnnnnnnnnnncccaagggtgtcatgaatcaggactccactttctccttctttttgctctttttcaggaaggagggggttcggaatttctttttcttctttgagggagacttggaaggtgagccctctggggacatggggccgctggtgaccgactcggttttgtccttagaggtatcaacatccgtgtcagcactggtggtcatctggctcaggcctttgctgaggatttcctctgccgtctgctcctcctcc

SEQ ID NO: 459598 - DNA, 374 bp, Homo Sapiens
ttggggtattggcaggcccccttggtaaacaaatccctgttccatcccaaatcccccgaacttggttcccataaaaacccaacacgaaaataggtgcccaaacatcccgcttacccatccctaggtttaggaaaatggagaaactttaatatgaaatcttcctgtttttcacattatgtttagattgttacagcataaaatttccaaaacattgcaaaaagttttaattcaaaattataatattttaaatgaaggtttaaacaaagtaaacagtctttcctttttcattatttctaacaaataagtatgcaaatagggctactaacaagtgactaaatcacatataatatttttcggagtttgtacgaagtgcc

SEQ ID NO: 459599 - DNA, 581 bp, Homo Sapiens
  misc_feature (39)..(39): n is a, c, g, or t
  misc_feature (86)..(86): n is a, c, g, or t
  misc_feature (99)..(99): n is a, c, g, or t
  misc_feature (116)..(116): n is a, c, g, or t
  misc_feature (134)..(134): n is a, c, g, or t
  misc_feature (570)..(570): n is a, c, g, or t
ggcccacattgtaagggaaaaaaccactgaaccaggtgntgtccaagaattgtaagcaacctcctcctgggatttaaatggtgggnaatgccctccccngaaccggtgaaggtgcntgaactggtgaaccagantccatccagcttctttacccaattgacttcgtttcctgtgtccaggtagtccaatccagagcctaagtgagccttcctcccaattcagccccggagagcacaggcaatgggttgggatactgcaactgctttctgtagtctgtgggcagcaggtcagggtacaggcccatcacatgggtgggatctgtgccaagtttagcaaagacctgcatggactcatcaaaacgcttctggcagaagaggttgaaggcatacaagttcttgatgtgatgaatttgttgctgcttttcactgtcagaatcatctttcatttctgcgagctgcagagccaattcaaactgcttgtcctggagaagttgttggatttgggttgccatggggacagggatgagtctccaaacaaaatgattgctggccacatagataatgtttgatncctcctgaggt

SEQ ID NO: 459600 - DNA, 439 bp, Homo Sapiens
  misc_feature (150)..(199): n is a, c, g, or t
  misc_feature (240)..(240): n is a, c, g, or t
  misc_feature (245)..(394): n is a, c, g, or t
  misc_feature (396)..(396): n is a, c, g, or t
  misc_feature (416)..(416): n is a, c, g, or t
ctttatgttttggacataaactggaaacatttgaagtccaacgcataggaaatgcagaataacatcttaaaaataaagagcctttttatttacccgctttcccattcttttacattgcttttactcatccttacctgtatgtcttagagnnnnnnnnnnnnnnnnnnnnnnnnnnnnnnnnnnnnnnnnnnnnnnnnnnagacggagctttactctgtcaccaggctgcagtgcagtggncatgnnnnnnnnnnnnnnnnnnnnnnnnnnnnnnnnnnnnnnnnnnnnnnnnnnnnnnnnnnnnnnnnnnnnnnnnnnnnnnnnnnnnnnnnnnnnnnnnnnnnnnnnnnnnnnnnnnnnnnnnnnnnnnnnnnnnnnnnnnnnnnnnnnnnnngnccagggatgggtttccgatnctctttgaacctcgtggatctgt

SEQ ID NO: 459601 - DNA, 334 bp, Homo Sapiens
  misc_feature (40)..(40): n is a, c, g, or t
  misc_feature (292)..(292): n is a, c, g, or t
ccacatgtgcaatgggatacttattaaataattaataagnatgtgaataagtgtcatacttttgtgatttgagccatcatttcacttctgattttaagacaactcatgattgttagctttcagaaagctaatgattgttaactttttgaaattagtttacaattaattaagatttcattatgatggcaggagacataattggcagatctttgccatctctctttgagatgtcctaaaaagggttgtaaaaatctgtgaaaaagtttttcctacatttgactagaaaatgtgntccatagtatttagtgccctgatactataagctcagcaagta

SEQ ID NO: 459602 - DNA, 420 bp, Homo Sapiens
  misc_feature (64)..(64): n is a, c, g, or t
tcactggatcaatgcctcccctaaattctgggtgtttaagtgtgcgtgcacgtcatctggaaanctgcggaaaatcccccaggagtggatcatcccagggaaggccgtggaaatccccgggagtggacccattcagaagggcgtgagcttccatgtccctaacctgctcccaggaaaggccgtggaaatccccaggagtggacccattcagaagagggtgagcttccatgtccctaacccgctcccagggaaggccgcggaaatccccaggagtggacccattcagaagggggtgagcttccgtgtccctaacccgctcccagggaaggccgcggaaatccccaggagtggacccattcagaagcgggtgagcttccgtgtccctaactcgctcccagggaaggccacgccagaaacagg

SEQ ID NO: 459603 - DNA, 440 bp, Homo Sapiens
gcttggaaagtctcaagggcttggtgaagggggggcccgcagaggcaacgcatctccctttgccttgcagctggggcgaatggagtgagccgctgtggtgtcgcgcggcgcctacctagtggctttctgcttcgcgtggaggcacccacgaccctcggtgacaacacagcagcgaacaacgttgcgttccgctgttcagacggcgaggaactgcaggggcctgggctgagctggggagactttggagactggagtgaccattgccccaagggcgcgtgcggcctgcagaccaagatccagggacctagaggcctcggcgatgacactgcgctgaacgacgcgcgcttattttgtgccgcagttgaacgcgccgccgccgccgctctctcccgggccaggaggctagtcccacctcttgctattaaagcttctctgagttg

SEQ ID NO: 459604 - DNA, 496 bp, Homo Sapiens
  misc_feature (13)..(13): n is a, c, g, or t
  misc_feature (75)..(75): n is a, c, g, or t
aaggttttccaantctccatgatgtggaaatgttaaaaccctaaaaccctaaggtcccgaactgtgagggggaancgagggtgttctcgagctggatccacccttgagccttcacctggagagtcctctgcacaagttcaagagaagaaggactacgcgcagcaatggttctcaacagggggcaacttcgccctcacatgcctctcccaaccccgctgggacactaggccgcggctgggggaagcgggagggagaatgttatccccctggcatgtgtctagtcagcggaggagacagatgctgctaaacactttgcaatccacggtgggagggcccctcccccaccccgaagttgccattcggcagagatggagaaactcgcgtgtagatcaatgcccacgcacttggccgacggaaatcacgaattggtgaccaattggatcttggatctgaggaaaaagctccagcttcagagggaactctcgaagttttgccc

SEQ ID NO: 459605 - DNA, 723 bp, Homo Sapiens
  misc_feature (24)..(24): n is a, c, g, or t
  misc_feature (27)..(27): n is a, c, g, or t
  misc_feature (124)..(124): n is a, c, g, or t
  misc_feature (127)..(127): n is a, c, g, or t
  misc_feature (499)..(499): n is a, c, g, or t
  misc_feature (522)..(522): n is a, c, g, or t
  misc_feature (535)..(535): n is a, c, g, or t
  misc_feature (551)..(551): n is a, c, g, or t
  misc_feature (575)..(575): n is a, c, g, or t
  misc_feature (592)..(592): n is a, c, g, or t
  misc_feature (608)..(608): n is a, c, g, or t
  misc_feature (619)..(632): n is a, c, g, or t
  misc_feature (642)..(642): n is a, c, g, or t
  misc_feature (649)..(649): n is a, c, g, or t
  misc_feature (704)..(704): n is a, c, g, or t
gtgttctcacttcaaataattttnatnctttctctaaatgcttaagtataaagtgtcaaggtttaacttgctactgtttttattgtggtaatcaaagtttaattttaatagcaatgtaggattnctnctttagtgttttaattaataacattcctgtccttttagtacagagtgatgaaaatacatattttgttcacctttactggcccaaagtattcatctctcaaaagtgaaccaggagagggatatggggtaaagcaaacctgcccctatctgctgctgttctggacatcctctgatcttagaattgaggacctcgggcacggactctccctacttctctttgaatatgatagataaacacaaataaaaacacaagtgaagcttgaacctctcagataaaaggtacagtacaaattcaagatgtcttaaaatctccaacattaacactacacattctccacctaaaatttatttgaaaataaattatgggcagganttcacctgttaagggcaatgggnataacttgttcanaactttcatcttaggnaattcgggtttaattttcctaggnttttgaaggtagggggnttattcccttttattnttttctatggnnnnnnnnnnnnnnaaggcaaggncttactntgttgcccgggtggggtgccgtgtgcaattccggtcctgcagcttggattggggncagggtccccccctaggtt

SEQ ID NO: 459606 - DNA, 488 bp, Homo Sapiens
  misc_feature (39)..(39): n is a, c, g, or t
  misc_feature (53)..(53): n is a, c, g, or t
  misc_feature (86)..(96): n is a, c, g, or t
  misc_feature (112)..(112): n is a, c, g, or t
  misc_feature (135)..(135): n is a, c, g, or t
ccctaagggccccatcaaaaggcctccaaaaggaaaaangaagaattttggtnaatttaaaattaactaggtccccgggaaatatnnnnnnnnnnngtaaagttttggttancccctccaacctgttttggttangacacttagcctcatttttggttcctacgcactgcactaggtgtcctttgtatatatattctgcccactgtaaaagcaagaaagtaccattgatatattttacaaagctgcagtattctcccaggcccagagctgcaatcacatcatttatgcttccaaaggggaggctggtttaaatcttattcttagtctcttaatcttatttcatgtctacttcctagaggaaaattgtgaaagtgctataagatatataggggcctaatattatggtgtgaaaatatagttgaaatatggtattctcttaaaatataaggcctaccatttgaggtaaattacttaggaaggcaattttc

SEQ ID NO: 459607 - DNA, 438 bp, Homo Sapiens
  misc_feature (26)..(26): n is a, c, g, or t
  misc_feature (59)..(59): n is a, c, g, or t
  misc_feature (76)..(76): n is a, c, g, or t
aatactggaagccctcggaaatccanccttgggagaaaggccacagacctggtctcccnaagacgtgtcccttaancctgggcaaagtaaacttcctaagttgatcgaggcttgtctcagatattttcaggtttacagaaagaaattcaatttcagtcacaaacggaatgataaaataagttgttacgcatccatagaaagaagatattaacatggtaagccctgtatttattaacctatgcttacgataaataaaaacaggctgtatggtcaaaggtggaatacagctataaggagagaagaagtgagaaatgtatcgtcttttaaattcgtttcctttattactagtgaagttgaggatatgctcccatttaggggccggttactttgtcttctgtgaattgcctgttaaatccttacccatttcctactcttttc

SEQ ID NO: 459608 - DNA, 495 bp, Homo Sapiens
  misc_feature (343)..(393): n is a, c, g, or t
atattcaaacgttcatagtcactttattcataggggtagccccaaaccagaaagagcccaggtacccaccaataggagaataacaaaccgtagcatattcatttaatggaacactactactgattcaagcgatgtcttgcgatgattcaggcaacatcattgcatctgtgatgtttctcagacactatgctgagcaaaacaaatttacacaaataaagtacatactgaatgattttatctaatccacagtgacacagagcagatcaatgaagagcagatcaatgactgcctagggctgtgggttgatgggtgggaacccagtattaagagacttgaataactnnnnnnnnnnnnnnnnnnnnnnnnnnnnnnnnnnnnnnnnnnnnnnnnnnnggtgcatatgtcttgtccaaattaatcagactgtacatgcataatggtttttgttgcaccgtaaattgtaaccttaataaagttgcctttacggaggttgca

SEQ ID NO: 459609 - DNA, 539 bp, Homo Sapiens
  misc_feature (19)..(19): n is a, c, g, or t
  misc_feature (34)..(34): n is a, c, g, or t
  misc_feature (55)..(55): n is a, c, g, or t
  misc_feature (94)..(94): n is a, c, g, or t
ctacaaatataagggcccnaaaaacggggaatantcaccccatttaatggtaacngaattttccccggttcccctttgctctcctaccctaccngttggggggtggcggaagggtacctgcaaatcccagacaagccagactttaaaattgtgttccacatcatcacattaattcccagttgtttccattactcatgtacatggtaatttcagaaattccttagaataatctggtacactaaatgtcaattatgattgtcggctcttagcaacccactgtgtgttgttctggcttcaagaaggactccaaaaatatggtcactcttgtttacatcctctctggaaattcagataatatggaatcaaaataagcattttaaagtgcaagatattttctgctctcctcagctttctctgttcttgactattaagaagaaactaccctacaggccaccatgccagggtataagaagagaaggaaacagatatcagtaacataaaacaggtaccttataaatactgcctaacttttgccattc

SEQ ID NO: 459610 - DNA, 469 bp, Homo Sapiens
  misc_feature (382)..(382): n is a, c, g, or t
aaattttatggttagaaattttattcaaatgtacacagttacaactaccatcaaataagtataaaacatattcaaagaattaactagaaagggttcttcaaaggtaatcctaaagtatcctaaaatatcaagagtatgatggtagtaacaagaccatgagaggaaactgaaattatacatcaggtttgtagtttcaagatacccataactttaatgtaataaggatagtaagcagccttcgagtatttcctatcttcactaaccttagaaagttatttgccaatttcattttaccggggaggaaatgggaagcttaaagagattaggctcatgtaggctaatatacaattgatctggggtttaaagtttaaacccacatagntccaactacggagcccaagctcttaatcactgtgctatgcctcctccatagcataggacaaaacttgttcaccatcaagaaaaaaga

SEQ ID NO: 459611 - DNA, 479 bp, Homo Sapiens
  misc_feature (414)..(414): n is a, c, g, or t
  misc_feature (435)..(435): n is a, c, g, or t
  misc_feature (443)..(443): n is a, c, g, or t
ctgtctccatagtttaaaatcgaatagtgccatcatcacagtatattagtcaaatagaagcttcatcagaaatgtatcccacatagagttttaagacttggattctcttctgcccttgttaatctccaactaattactacagattgacacgtttttaattagctgtcctttgtaagaagtcaggaaatctgatgctgtgtccaaaattatgcactgtttgttgaagtagaaccagaaatcctgacctcctgttaaatgacatcagtttccccctctgaggcaacagactgcttgtcttgctagggagaggaggatggggggctgaggcactcagggctgtccattggaaaccccttgtccatggaataggggtcatactcctaaggactgatgggggtgttgatcttctagggncatcacttgtttattccagtngccccaancacaggtttctcttctaggcactttaggatttgatc

SEQ ID NO: 459612 - DNA, 577 bp, Homo Sapiens
  misc_feature (43)..(43): n is a, c, g, or t
  misc_feature (75)..(75): n is a, c, g, or t
  misc_feature (94)..(94): n is a, c, g, or t
  misc_feature (119)..(119): n is a, c, g, or t
  misc_feature (170)..(170): n is a, c, g, or t
  misc_feature (338)..(338): n is a, c, g, or t
  misc_feature (536)..(536): n is a, c, g, or t
tgtttgcatatgatgcacgttttcctttcttccagctggatantcagttatgtccagtaccatttctttaaaaanccattttttccctctgagnttaaatatattaaattatcttttantctgggatgcatttgtcaattatcctctgctactgatgcagctatttttantgaatcactgtgctgtttggattataagtagctttataagatggcctaatatctagtgatgccagtttcccattatgattactgaaaaattgttttctggctcttcttgtgattttagtcttctgtatatattttatgacatccaaatgaaagaaaagagaaaagcanaacaactcccccctgctcaccacccccaacaaaaatactttgtttgaatcctaattggaatgacactaggtttataaattaatttggggagaactgacattttttgtgatagcaagtcttcacattccaggacatgctatctattttatgtctttcaataacatcctatagtctgaactgggaaacccattcccaggnctctactgcctagaaacatcactcctcacagtgacacaaaa

SEQ ID NO: 459613 - DNA, 201 bp, Homo Sapiens
aaataataacatacagcttataaattgtaagatatattttctaggcagccaaatagcttcaatattcagcacatctactcaaggccttaaaaaaagcaagtagaaacacattagcatatatttcctgagaaatgtaacatcaatgtgacaataataaagttccaataataacattctatatgcatacagcctcccttccac

SEQ ID NO: 459614 - DNA, 247 bp, Homo Sapiens
gaaaactatcatgaatgatgttgcatgtctgtagtctttctgcatgcctgtaatttcacagaatatattcctagacataaaacagctgggataaagtaaaggcaaatttgcatggttttagaaatatatttgtgcaatttacacccccactgccggcatatgcatgtctgttttcccatatccttattcacatcgattcatagcattcttttaaattcttgccaatttgcagtacacaagtatctta

SEQ ID NO: 459615 - DNA, 537 bp, Homo Sapiens
  misc_feature (470)..(470): n is a, c, g, or t
ctctatccctcgatatttaatgtgtattttctaaaaacaaggacacattcttacgtattcttattagaacaatcaccaaaatgaggaaattgacattgatatgatactatcaggcaatacagtacagaccagttgtcttaataatgtcctttagagcagaagaaaatccctgggcaggcagtgtgctcagctgccacttctctttagtcagaggagtgcctttaggatgtgacacaagtgctgccactccaaggttccctggacccatctcatgaggaatttcagccaggaattttctaacaaaagatgcttagggcccttgagggagctctaaagggctgtgattcaccaagagtacagtaggacctaaggttagtgggaaggaggcgattcatttttggaggaggaggccttttcaccaggttttaaaggaagtggcctttagttgaaaggcaggcagcttgcagggnaaaggcagcgggattaccagcgttgttaggccagttggttgccagcaggcttgaagttggggagagt

SEQ ID NO: 459616 - DNA, 516 bp, Homo Sapiens
ccctcgtatttaatgtgtattttctaaaaacaaggacacattcttacgtattcttattagaacaatcaccaaaatgaggaaattgacattgatatgatactatcaggcaatacagtacagaccagttgtcttaataatgtcctttagagcagaagaaaatccctggggcaggcagtgtgctcagctgccacttctctttagtcagaggagtgcctttagatgtgacacaagtgctgccactccaaggttccctgacccatctcatgaggaatttcagccagaattttctaacaaaagatgcttagggcccttgagggagctctaaagagctgtgattcaccaggagtacagtagacctaaggttaggtggaagagcgatcatttttgagagaagcctctcaccagatttaagaagtgccattagtgaaagcagcagctgcaggaaaagcagcggataccagcgtgatagacaagtgggtgccagcagcatgaagctgggagagtcctagagggaca

SEQ ID NO: 459617 - DNA, 263 bp, Homo Sapiens
atttactatagtaaattatccttttccagtgaagaaaaccttgttttataaaaaggaagggaatgaggggagaaatgcatattgcaaagtacaaaaggctatttttaaacagtttatatagaaaggtcccagagaataactcaaaaatatttgaattgtaggcactgatacgttaaaatggaacttcagattcatttgtatcctttccatttggaggtttaggttaggcaaacccaatgacccatccagtggaatttgtcaat

SEQ ID NO: 459618 - DNA, 615 bp, Homo Sapiens
  misc_feature (49)..(49): n is a, c, g, or t
  misc_feature (61)..(61): n is a, c, g, or t
cctccataaaccagaactggtaaaaggaaaactttgcctaaaacccccnccaaggtgaaantttccaaggtttcctacccaagagtggcccagtgtttgaacatactaccctaggaatacagttacattccgagctaataatttgggatccagcggtaagggtgacagaagcttcttcaagcagctagtagctcggatttgactatcagcagctttacgggttctccaaacaccttttattaaagggatgctgtatttgtcaacagaaggtgttgagaggagtttcttggccaggactgttaaatccttcgataaggtttttgttacagtcgtccaggctgagattttcactggatctcttggggaatgtcgggggaccagtgaaatctaagagatcttgaagtgctcgggcatttaccagttccattttggtccagagacaccccaggaatcatttcactcactggtgaaaattccgggatagagataagctcttcttttgaaacaggactcacatccatagactgaacttcttcagttgaatcatccaggctatttgatttcccatcaagggcatccagatgaatgagtcccccagctcgcttaagcccatta

SEQ ID NO: 459619 - DNA, 658 bp, Homo Sapiens
  misc_feature (631)..(631): n is a, c, g, or t
ggcactggcaacaaaggaatttttaatgagtttgacagggaaaggacacccacacaggattttttggttttcttctacacaggtttttaaaagcctggtttggtttcagcacattgagcttacagaaaaaataaaacgctagcaagtcatcagactcttcaatgaaaatgtatttcacattaaacacaaggtacatatcatgcaaatgaggcatcaccatggtcacaatggtgctgtgaggtacaacaaatcacaagaaaacagacatttagcaaaataaggttccaggaaagatgagaggcattttctgaaagccagaccatgctatggtttctgtgtgcctgtcataaagggacttggccagtatttgccgagatggacagcaccgcattatgtggaggcatgtactttattgagtagagacacatacacagacatataatttctgtaactaatacattcttaaatgtagctggctgtaaaagcacatgaacaagattactactgagacttctttgtatctcctggttgcaaacctctctcagaattatgaatctttccaaacccttaattataccagtccaaacaaaaagtttccaagaagaaaaggtcattttaatttggaaagccncattttcgccacaaggaaaccaaaatt

SEQ ID NO: 459620 - DNA, 501 bp, Homo Sapiens
attcaaaagtatttgtttgcaactcccttatgcaatacgagggtctagctaccaatcaaatatgtgggaaattttttgaacatttcagggaaatgattcctattgtaggctttaacgagctcagaggatgatttttttaaaaaccagtgataaatctttcttgtcttaaggagttctgtttgtaattgaaggaaattgatttaggaaggatgaattgtgcattttagaacaaaaataaggcatgtaagtaaggtgtttatcagtatgaattcctctgagtgctggtaaatgctcttcataacaagttctccagctaaaggctcccattagcagctgttcggtcattaattgtctttcttcaacaagtagtcacaggaaaggtttcataggtgccagagttctttctgtgtgtctcctccatcccaaatttcaaagggcatccattaggaacctctgggagggacagtatggaccggtaggcagaatccctccggggacttg

SEQ ID NO: 459621 - DNA, 530 bp, Homo Sapiens
  misc_feature (41)..(41): n is a, c, g, or t
  misc_feature (46)..(46): n is a, c, g, or t
cctggagtacggctccccagtgtgaggctcccgtggttccncagancccaggaacaagcagctttagaaacagcttccaccaattattataattactaataatttagggtgccaacatataaataaatatctaccccatatatgtgccaattagatctatatacatacaaacgtgtacctatatataaacattcacacatcaccgtcagctatggctcttggggtaaggtgggaggtaagctggattgtagaattctcttgctccactaaaaagctttccataaatgcctagaagggaaggggacgtgggaagcagtaagacttccgaacttccctctgtcaggtgggaaccctagggttgaatgaaattctactgcctggctacccttctagctggtgtgggaaaggcctgcatttcctaaaggcccattcaggatccgaactatggaacctcatggttatcgggcaaggaatgtctggggacaggggtcaggcaactgccacttgtgaccttcattttttaacttcag

SEQ ID NO: 459622 - DNA, 385 bp, Homo Sapiens
  misc_feature (31)..(31): n is a, c, g, or t
  misc_feature (45)..(45): n is a, c, g, or t
ggggatttgaaaggggactcaaaaacccccnggaagatccataangaatgagtatccatgaatttttttcctgaggggaacccaagtagcctaggacaatggtggaagggtgactttagtcctttacccttaccgtatatttagaattttgaactgtgactatattaactatttaataaacaaaacacatttaaaaatgaaaaaaagatgcaatgacaaagcctgaaaacaggacaaacaattgttacatacaaaagaatcaaagttttgtgcattttatttaataaatttaggccataaaacattgtaacttaaatcgcttctatacactatatattcatataaccttgttggcctgaagtagatgcttactaggaagtttttc

SEQ ID NO: 459623 - DNA, 332 bp, Homo Sapiens
  misc_feature (23)..(23): n is a, c, g, or t
  misc_feature (40)..(40): n is a, c, g, or t
  misc_feature (191)..(191): n is a, c, g, or t
  misc_feature (250)..(250): n is a, c, g, or t
  misc_feature (260)..(260): n is a, c, g, or t
  misc_feature (302)..(302): n is a, c, g, or t
cttccaaaattacatttattttnctcaattcagaaaagtnctttacaccacaatttatctgtttaatgttttcatttacatttggctttatcccaaaaagggtttaacagtgtcaccaagttaccaggtctctgtttcatcatatttacacaagatgaaggaaactcaatctgttcgtatttgccccaggnaataggttctatgtagtgacaggcatttcactatttgacttagtgtttgccaaaatgangtaagggganttgggtccagagctgaggacagatccatttgggaatgaaagncataataaccttgaagttattccagtgaca

SEQ ID NO: 459624 - DNA, 498 bp, Homo Sapiens
  misc_feature (58)..(58): n is a, c, g, or t
  misc_feature (240)..(248): n is a, c, g, or t
gggatgagaactccttagcaggggtagacttttctctagaccatagtaatcacactanttacagtaacatagatcctcctatgtttcaagatattaacactataaggtcataaatacataagtcccacccagactgaggaggtagttgtttagtcacaggtacacaagattcagtggggcaccagcttagaattctgggcagataaaaggcagttttccagaaattgagaggtctatttnnnnnnnnncacaatctatgaaattaagagaagaatctgatctggaggaggtattggtcctaaattttatttccaggtcatgagccattaagcttggcttggcccataagtgtgctctgaagtgaaaagaagcagtaagagaattaaagtctcctcttggcatacggagcagagctggagttacagggaggctattccacttagagggagtcctggagcccccttattactcatggtaatgtctttttgccttctggaa

SEQ ID NO: 459625 - DNA, 501 bp, Homo Sapiens
  misc_feature (13)..(13): n is a, c, g, or t
  misc_feature (35)..(35): n is a, c, g, or t
  misc_feature (62)..(62): n is a, c, g, or t
  misc_feature (74)..(74): n is a, c, g, or t
  misc_feature (87)..(87): n is a, c, g, or t
  misc_feature (93)..(93): n is a, c, g, or t
  misc_feature (102)..(102): n is a, c, g, or t
  misc_feature (114)..(114): n is a, c, g, or t
aatccaaaagaantccacaaaacttccccaaaacnttggtttccttcaacctgtgaaaaaantaaggaacaatnatcctccccccancctaanttccataanaattgttgtganggttaagaagagaaagtgccttggttaaaactaatgtaacaaatataagctattgctcccttgtgggtgggcgagcagagtatctgggcagaacccatcacagctctccctgggtgggtctgcgaagcaactgctgccgccctggttctctatctgtgccccagtgtgtgcctgagtctgctgataggttgaaacctgcctggagaagatgtggacacaaggtgggggtgcacgtaggatggctgtcttctagaatcagctaggctaccttaattaggacaaaaatggtaaaataagaatgtgagaggctactggaaggtgagaggctccactgctttcgttcacctgccaccaagggccagacaagggctctgacattacaggtgc

SEQ ID NO: 459626 - DNA, 253 bp, Homo Sapiens
  misc_feature (215)..(215): n is a, c, g, or t
tgtgtgagccaccacacccagcccttaaaaaattactttttggagtgggttgtatttaaattttttaaaaaccaccaatgaagtgggttaagaatatagggctttagcaacaggggctacctggagtttattctcagttctttattttaccagctctgtggatcttgaggtatattacttactgtttttacctcaggttacctcatttatagggntcctatctcatagggggacttttgagggggttaaatgg

SEQ ID NO: 459627 - DNA, 531 bp, Homo Sapiens
gacaaagcatttttctgggtgaaggctcaaaatctcatcagatttatgtcgtggtttccgaagatagtaatgatgacatgctttgaaagctaatgttttacatttactcagaaggctttcatgaggttatgacatgggcagatgatttaataagacagttatggtttcatgtgaaactcctttgcagagagatgcccatacacactgatgggcatgctgagtccctggtctaggtgtgttaaggtaggggtaggggctttgctttcccatcttgattccctcccatgggaacatggcataagcttctagctgttgcctaagcatgaggagtcccattgtctttcttaggagtccttgaagagttttaaacagccatttacatcacagatattggatctgctgttaatgaaattgtacctgcattgggtattacttcataatggttgttctggaaggtatttattatttaatatgtcactgaaatagtttgtattataaggaaaactgctgtctatgggggtttccgtattt

SEQ ID NO: 459628 - DNA, 484 bp, Homo Sapiens
  misc_feature (32)..(32): n is a, c, g, or t
  misc_feature (53)..(53): n is a, c, g, or t
  misc_feature (58)..(58): n is a, c, g, or t
  misc_feature (78)..(78): n is a, c, g, or t
  misc_feature (87)..(87): n is a, c, g, or t
  misc_feature (119)..(119): n is a, c, g, or t
agggaaaaaagggcctgggaaaaagttaaaanccccacaaagctcaacatccngaaanggtggccaattgccttgaantccaaaaanccccaggaatgttgtaaacccttggttttccnagaatctgaaaaaagtgccttttgaccaattttccccagtgtttcccttgttttaatggaggtgcaagatttttggaggtcccttattctgacattttggaagtgttttacaccccctccttttggagtaaggtttgtgggtaagatctctgcagtcatgaccagtggtgcctgactgttttgtgtgaaagtcagcaggcagagccagttgtcttaaggaaactgccggctggctggtttgagaactgagaagtggtgggttaatttctaatcaaggagtgtgatcataaaggtgatcagtactcacagacttctaattagatgaggtcagatgtccatggtgcaactcttacggcctcgtgcca

SEQ ID NO: 459629 - DNA, 407 bp, Homo Sapiens
  misc_feature (46)..(46): n is a, c, g, or t
  misc_feature (289)..(289): n is a, c, g, or t
  misc_feature (381)..(381): n is a, c, g, or t
cggtgctttcataaagcatttatttttatttgaaaacattatacanggcattacattgccacagccagtccataggggagcatgcaaatatcaaaaatggacagtttgttgaacttatcggtgtaacttttttttggttcgtattttccatttgcagtgttgtcagaattaagtgtgctttgttatgtggcttaacaatagaatcctacccatggggtaaaatctgtactggtagctagctggggactactaaatagttataaatcaaaaagaaacccaaaacaaacantactacacgcttgtcaaaaggttaatagcacaagttagccaatatctaaactaaacattgaaccaatttcatgggggcacggtgggtgccanatttttcccattgcttggtcacctgg

SEQ ID NO: 459630 - DNA, 338 bp, Homo Sapiens
tttcttttccttaaagtagcctgtgtctcagaggacctatgtctcagaggagacttctgagacaaaatcttaacttctccatggtttaggttcccaagtgagctcctaagaatgcagctatgtgaaattatcaatcaggaagtgactcattgtcagggagttttggagaatatcctctacaatggcctctcactgaattgcataatagcaaataactgcatctgtagctgccttttctttgtgggaggaagacactgccttaagcaatttttcatacattatctcaccttgtgaaacagaatgtaaatagcaggtttggaattcaagaccaattctgt

SEQ ID NO: 459631 - DNA, 337 bp, Homo Sapiens
  misc_feature (312)..(312): n is a, c, g, or t
gtggatttgagcatctctttattttttagtgaacattttgaatttcttcttttatttcatgcactttgtctcttttctatttgggttatttcttggctctttgttggctgatgttcttgatattacctaaatacaatcccttggtagtcaaagacattgccaatgtcttttcccagtctgtcatatttttgtccatgggtgtccttaattgaagatgaattgggtttatcgttgctgttgtctcacccctctgattgaccctaggaatgcacctctgatgactcacctgtgcaatggggggggaaccaaggngcacctacttcacgtgggcagtttt

SEQ ID NO: 459632 - DNA, 635 bp, Homo Sapiens
  misc_feature (32)..(32): n is a, c, g, or t
  misc_feature (38)..(38): n is a, c, g, or t
  misc_feature (59)..(59): n is a, c, g, or t
  misc_feature (120)..(120): n is a, c, g, or t
  misc_feature (125)..(125): n is a, c, g, or t
  misc_feature (166)..(166): n is a, c, g, or t
  misc_feature (212)..(212): n is a, c, g, or t
  misc_feature (227)..(259): n is a, c, g, or t
  misc_feature (495)..(495): n is a, c, g, or t
  misc_feature (502)..(502): n is a, c, g, or t
tgaacctacctgggctggtggaaggctggggnaagtgnaaagtccaaaactgctgtctnagtccatagagaggaagatagaggctggctagcccagtggagcccaggttttctcgtgacnagtgnacgtccccctgtccccttggctcagagtgcttctgacactnaaaggggatggggcagggggcagcccaggggatatgggagccagcnacattcatacagggnnnnnnnnnnnnnnnnnnnnnnnnnnnnnnnnntctcactcattccagccagaaggtctcttggaataaacttattaaaaccaaccagccttctgataacccttcacctggcactacacagacagtaatgtggctgacattttctccttccatttaaaaaagactatgtagaaaagaggtctataaaattgtgcaaaatacccagcattaataaacccgtttcaagtattgccagcatgagcataacccacccatgccgggaacctggncttgggnagagaagtgggaggggcaggctgggatcccttaaagagctctccatgggcaggggaaggaccaggctcccacttccactgtgctgcccaggaactgcacaggagctgaggctgtgggtgcctggctggctgat

SEQ ID NO: 459633 - DNA, 594 bp, Homo Sapiens
gagtataaggaaggtttattctccagttcagtgctctccagatttcagtgaatgcaaccctacctgcgacaatattgtcacatgcatgcaccaggcatatgcttatttattcattcattcatttatttatttaaaattatgtacatgtaccattgtactattatgccattataaaacatacacaaacataaaaaagctagataaaaataagcacaagtattgttctaatatgttcttcctacactctatggacctggaccccagttaggagccccatgcttagtgaatgtgggggccccttgaggttttctgaatagcaaagagtttatttataagaaacagaaacttactggcgcagtaatgggaggttgattagaaggacccagagctacttccctgaggcttctcaaagaactccaatggactgggaagttgttctaactagatacgtaacttgaacaaggatggccacttccttgtacacttcttttacatatatgcaatacacataatgtgttctgcacacagtcaggatacaatatgcatataaaacaaacattcccccacatattatcttgggcaatatatttaaca

SEQ ID NO: 459634 - DNA, 481 bp, Homo Sapiens
  misc_feature (26)..(26): n is a, c, g, or t
  misc_feature (31)..(31): n is a, c, g, or t
  misc_feature (63)..(63): n is a, c, g, or t
  misc_feature (70)..(70): n is a, c, g, or t
  misc_feature (139)..(139): n is a, c, g, or t
cttgcccctcgaaaaccctgggtggnatggncatgaagatcacccgtgagtagaacagagttnaacgcanaggcctgaagctgctctccttaggaattctggctggcatctgggaaccccagatttcaggagggtcccnaccatcccctaactgatgagagtagttcactgggccgaaattatttgtacaaacaatatggttcttgctcagcacctgctttccttcccagagcctagaattttggtacctgccaggcagaggtgcccacatgactggcccctagcaaaacaccatgggcactgaatttctaatgagcttccctgctagacaacatctcctacatgttgtcacaactcattgctaaagacattaagtgcatcctgtaggaaccccctggaagaggactctggaagctccagcctggcctcccccgactttacccaaggtgctttttccctttgctaattttgctttgaattc

SEQ ID NO: 459635 - DNA, 398 bp, Homo Sapiens
  misc_feature (41)..(41): n is a, c, g, or t
  misc_feature (367)..(367): n is a, c, g, or t
  misc_feature (374)..(374): n is a, c, g, or t
  misc_feature (382)..(382): n is a, c, g, or t
ttttttttgtagtgatggggtctcactatgttgaccagggntggtcttgcacttttggcctcaagcctcagccttccaaagcactgtggttataagcatgagtcactgtgcctggctgctcgtgtcctccctacctacacaatataccctgtatcattcaaggttctagaactcgaactctaacctacctttccagcctcatctcctatcacatcccctaggaatctcatctctaggatcatttcaacatatccttttcaaaggaagggtttgaactttgggaaatccagttttgagaatgcgttcctcatgcttctgttctgtgcctctgcacacactattctttcttcctcaacagtgccttccntgttctnctatggtnacctggacatccagat

SEQ ID NO: 459636 - DNA, 190 bp, Homo Sapiens
gatggggagtaaggggtacacactccctactacaatgtcacaaactttttctttttgttgttcctattggttgtaactgtactattttctaacaagaagccttcaggggaaataatggatcctagttatgtcaaagaaaacaatgagacaaaatggcaacttcacagtcttcaagtaaatagaatccctg

SEQ ID NO: 459637 - DNA, 259 bp, Homo Sapiens
  misc_feature (213)..(213): n is a, c, g, or t
  misc_feature (248)..(248): n is a, c, g, or t
gagactaaaagtcaatggcagtttaatagcagggggtgacaaactactgtagcaagaagggtctgggtttgaccaccaggaggcttgggatcaagtgtggagctgtggcagtaagagggacctggatttgattccagggaggactagagattccgggcagcccttctgctagctgctggtaggggctgcacccatggtcttgtaaggggactngaggtctggggcaaggggtggaacttgggccagtnatttgggttcg

SEQ ID NO: 459638 - DNA, 420 bp, Homo Sapiens
  misc_feature (399)..(399): n is a, c, g, or t
atcccaactccaaatattaaaactctttctttaataatggtacttgtggtaattagcccaagttaggcacacaagtcttataactgaatttctgccagggttagatttgctggcatcgtgtttatgcaaatcaaaacacagttttatctatcaacacctcaacatttaattgtctggtgttagttcctgtaacaacaatcacatatccatttagctctcttaaatgaaaatcactatgagattataacaggttgagtgggactgaaaatgtaatttgaaaatgaggggagaaagcctgggaatttatttgcatctcatttattttaattcagttcgtaaactgtttagtggaatggaaatggaaagccaacttctgggaatgggcaggagagccagttngggaggagggtataaggggaa

SEQ ID NO: 459639 - DNA, 634 bp, Homo Sapiens
  misc_feature (70)..(85): n is a, c, g, or t
  misc_feature (135)..(221): n is a, c, g, or t
  misc_feature (533)..(533): n is a, c, g, or t
  misc_feature (555)..(555): n is a, c, g, or t
  misc_feature (571)..(571): n is a, c, g, or t
  misc_feature (580)..(580): n is a, c, g, or t
  misc_feature (586)..(586): n is a, c, g, or t
  misc_feature (598)..(598): n is a, c, g, or t
ccttgcccacaaaagtgctaggattataggcatgagctactgtgccaggccatggtcggctatttaaacnnnnnnnnnnnnnnnnggttgttgttgttgtttgttgttgtagagacagggttttgctatattgcnnnnnnnnnnnnnnnnnnnnnnnnnnnnnnnnnnnnnnnnnnnnnnnnnnnnnnnnnnnnnnnnnnnnnnnnnnnnnnnnnnnnnnnaaacaagcatgagccactgtgcccaggctggagagagctttctaatgccacacatcccagcacatcactctgctaatgaagtccaggtagggctcaccattgccctcaggataaatgttagcctggcaccatgttcttttccatgtgcagtctctggctgcatcttctttttctaccctactctctaacacatccacttgccacactggaattagtttttctgaaatgccattccctttttgggcctcttgggctttccactgggcgacattctttggcctggtcaactctggttccccaactctggctggntggaatcttactactctacagnatgaattcaggctccnctgtgaagnccttcngaactcttggtnaaagggggacctgataaactgggaagtgggtaacaa

SEQ ID NO: 459640 - DNA, 464 bp, Homo Sapiens
  misc_feature (23)..(23): n is a, c, g, or t
gggacccccatacatataagcanttaataatccccactcatgttcctttcctctggacagttcttggccttgggtttgttaatttatggaacatacgtatattcctcaggccctagaaaggaaagtacttgaagcccaaatacttagcttctctaatttctaggaagggaagatcagaaagccagaaaacctaaagaaagatcatctcatctctggcaaatctgcatcaatctgagaaaagacactatccattgctggcaggaatgagggaaagacaggcaaaaggacaaagcagaagctcaaacaacttcatgattcttccaaactcaggtcttcatactgggcttccatcactttgtacgaagtgattctctgaaatatcagatatgcgcatttgaaaaaaattattttaaaaattgaaatcattacttttgagatctaccatttatggtgtaccattaatg

SEQ ID NO: 459641 - DNA, 330 bp, Homo Sapiens
caaagatactaaaaattttaagtccgactttatttttcctacaagtgtttagaaatgcttctgggatttgctaatattatctgtccttgggaacagtattgaaaaaactgcttagtggtattacagctttagcaaacctacctcacagctgggatgagaggataaaatacaactaattttgtaccctatagtgcctagagcagtccaagtgctaaataaatatttactgattaaaaccaaactatagctactcgggaggctggaggaggatcgcttgagcccaggagtttgaggctattctgggcaatatagcaagaccctgtctcgaaa

SEQ ID NO: 459642 - DNA, 481 bp, Homo Sapiens
ttttttttggttggtgggggcgggtttatattgatttcccttaatagggagttgtgagcacattccctcggccttcatattgaataggttttgagttggatggagtagacaacctgctagaagtgtttgaatgcctcctctgagttttggtctcccctgcagcaccgcccatctcttggatatttcattcctaataagagaccccctcactggaggtagggagctgagagtaaacttgaccagtgtctttggcattttccatgtcaaaaaaggtaaggaaggatataaatcaataaagatttacatttcatattcttgcagttcccaatcccagtactgattgctgagctgcataaagtagtcggaaagactatgaaggtcaaaagggctgggggctctaaggcaactttcttgctcataaattagagtcgttgggaaatctttcaacatatctgactctccatcccaaactagcaagtgg

SEQ ID NO: 459643 - DNA, 432 bp, Homo Sapiens
  misc_feature (345)..(345): n is a, c, g, or t
  misc_feature (387)..(387): n is a, c, g, or t
caggttgattttgttttaatgaataaaaaggaaggatttcttggctctaggctgggtacagttgaccccgggggttgagggaggcagcaatggcctccagacactccctcctaccagcccgactgcagagaggcgccttggcaaccggcggccatcccaggttgccgtgagctcgacagggctcaaatccttggacgccagcccactactctgaggagcatcagttctgctcagagaggggaggaacacagaagctgctcttcaaaagggctggttgcaggacgggctgcaagacaggtgggcttctgcccaggaccagtggtctgccaaaaggccataccactntcctccttgtgcaaggtgacttcggccccagagccagggttnccagttcacagctcaggtttttgcaggcctccatgttggggtccc

SEQ ID NO: 459644 - DNA, 554 bp, Homo Sapiens
  misc_feature (451)..(451): n is a, c, g, or t
  misc_feature (497)..(497): n is a, c, g, or t
  misc_feature (515)..(515): n is a, c, g, or t
  misc_feature (524)..(524): n is a, c, g, or t
atttatgcacttttttatctaaaacattgttctgggttttcccaatgtaccttaccataattcctttgggagttcttgttttttgtcacactactttatataacaatactaagtcaactaagctacttttagatttggaaattgctgtttacagtctaacaacattaaaatgagaggtagattcacaagttagctttctacctgaagcttcaggtgataaccattagcttatacttggactcatcatttgttgccttccaaaatgctgaggataatgtatgtactggtgtcaggacctagttctctggttaatgtacatttagtttttaatggtggaactttgttatattttgttaattacagtgtttttgggttcattgagtgaagattctgccgggtggggatcttgccacctttggaaagactggaataatttacactacccaggtangcctgccaaatccattggatgggccatgcaggtggatggatgtgcntcttacacttgttaaccnggtatttangggttaatttggcaaagggtaggtttatgg

SEQ ID NO: 459645 - DNA, 427 bp, Homo Sapiens
  misc_feature (44)..(44): n is a, c, g, or t
  misc_feature (203)..(203): n is a, c, g, or t
  misc_feature (248)..(248): n is a, c, g, or t
  misc_feature (376)..(376): n is a, c, g, or t
ctcaatcaatcttttttatttaaaaatccacctaaaaattcacnttctgggttttagtttttgtttaaaaagaagcaaatatttaaaagcatcaaatgttactagtctacaattcatcttgttatgaacatttttagtttgaggattgggaaaataaacctattacattgattaggcacagtactatggccaatgggccaganaatcagggcacatctgtgtactcaggcaacagttagaggtctgantggagggggtcatgcctcaactgtgggcactcctttctctatgccccctccaaaaattgttataagtctcaaatcagtacatgagattgtatgtaacttgggttaaaaaacaactatacggtggcttncttaaattatggttgcaaagccaaggacagacggattataattgtaggccc

SEQ ID NO: 459646 - DNA, 452 bp, Homo Sapiens
  misc_feature (403)..(403): n is a, c, g, or t
  misc_feature (410)..(410): n is a, c, g, or t
  misc_feature (433)..(433): n is a, c, g, or t
acttttcattgcacaaccaacatgaaaggatgacttatttccatgccagctgtcctcagttttcctgaccttaatggaacatattagatccagctgctggaatatttactctaatggaataaagcagttggattctttccttgcctattttccaaagaggacagtgttgaccaaaatatgtacttgttggtagcactagaagatcttcatgatagatacagttgacaacttttaaaataattgtctgtcccaatgggggaaaaatgtatataatacacaggaacactagggttaatatccaggaatgcaggacatattttcatatattctttacatctttcttatccccaaatactgggacttcaccttcttgtcagtgttaaacctccattacagggaacanggggggnaagggaggtacccacccggaatnctcttacatggctatattc

SEQ ID NO: 459647 - DNA, 401 bp, Homo Sapiens
  misc_feature (334)..(359): n is a, c, g, or t
  misc_feature (389)..(389): n is a, c, g, or t
ttttttttctgaaaactatttattatgaagaataaattttcaatatgtagcaaattttactacacaagtgtcacagaatgctcatagcctttgtatttcaagtctcagtgttttaagaagttgatttccagatcaacaatcataaacagtcaactcagaaatatcccgtgttaatgtctttcagaacctagggcatgattttctgacttaattttttcaaattttgtagttagtggcagaaaataatctgccactaatctgtcaaactaatgataatctgccaaaccaatctgaaaaattaataattatataatgggttacagaaggacttctnnnnnnnnnnnnnnnnnnnnnnnnnngaggtgggagtcttactctgttgcccgggntgggagagcagt

SEQ ID NO: 459648 - DNA, 529 bp, Homo Sapiens
  misc_feature (415)..(415): n is a, c, g, or t
  misc_feature (505)..(505): n is a, c, g, or t
ccctgtgtgccaaaccaaggacgtgtctttcagggaaaggttaattttccgaagtttattaaaatagaacttggaaaaccaagcattttgaatttattccagtcctctgggcatcattcctatttcttctgccatgtcaaggagaaattccaagcctgcattctgtcatgctaaaataaccagcccatacttctcggtgaccttctgttgaacgtacctgagcctgcaaatgtaaaaatgattgtatctgaatttgcactaatggtgtctgagagcaaaaagagtgtgacctctattggaaacctttgttcaaattcaataattcagagatgctacatacttctgcaagcttcctgattatgttcactgttaatattaatggacctaagtttggaatgtatttccttacagtccntttaatttgacatccctcttttacctggggggttattacaattgccattaggtcattaatggttttcttcacacagctttctttaaaccnaggttctctgccgctcttttcggt

SEQ ID NO: 459649 - DNA, 509 bp, Homo Sapiens
aaaattgcacttctgaatttactccacaatatcaaagtttaatcagtacagtccaaaagatctatacagaggtatgattcttaaaaaattataattgagttgtacagagccagtgctcagggaatgccactgacaggaattcccgacagctccagtcattgtgtgtgcttcttgggcatgggttcaggtctgtgcgtactcggtgttgttataaaggtagtccaagagtggaggattgggaaaaggggaaggaatattcagaattggagacatcttgctttacacattccacataaattacctgaggcacacatccaaaatatcctgaggaattaggatacagccattttccagtttggaagaaggacagaataatagagaaccttctggaacttattcagaaaatcaaaggagttcataaagcaagattagtgacagaggcaagagctgaactgaagtaccttgacttattccagcactaggatttaaagcagcagcttaaaatccca

SEQ ID NO: 459650 - DNA, 320 bp, Homo Sapiens
  misc_feature (134)..(134): n is a, c, g, or t
  misc_feature (149)..(149): n is a, c, g, or t
  misc_feature (152)..(152): n is a, c, g, or t
  misc_feature (184)..(184): n is a, c, g, or t
  misc_feature (211)..(211): n is a, c, g, or t
  misc_feature (248)..(248): n is a, c, g, or t
  misc_feature (255)..(255): n is a, c, g, or t
  misc_feature (260)..(260): n is a, c, g, or t
  misc_feature (267)..(267): n is a, c, g, or t
  misc_feature (301)..(301): n is a, c, g, or t
aaagactgatatggatttaatgacaaatattccatattggttgctgaacaccagaatgctgtccaaggaaccatcgttaaataaaacaacctgaaaataaggcaattctcacgtatacaagcacactcacacgnaacctgttacttttnggntcattaaattattcactattttaacaaacagnctgttaaaataacattacagtgagggnaaaatgtggcacaaacttcaggaaacacagtttgggnttgtctntggancacgggnccttaatttgtattttttcacatatggtacaggnctcttggattgttaagggg

SEQ ID NO: 459651 - DNA, 474 bp, Homo Sapiens
  misc_feature (26)..(26): n is a, c, g, or t
cctgtggccaccccacaatttccccnggtaaacgttgtgggtaatttttgccagtttgggaaactaaaaaataataagaaaactgccaagaaataattacagtcacccaatatgcttgcccactcagaatcaaacactgcccagagttttcccatattggcttttcctaggcttctatatgcatctatatctaatctggatctgtggctggatctatatctgtagctatgtgtgtacctgtatcttgatctattgtgcttttgaaaggaaagtacgtactcaagtccccggtgaccagcaccctcatgctgacatcagatgtcaaatgcaactccagttcaggtcactcttctacaggggatgtgtatcctttctaccttttaaacatgttgttatagacacgttctgaggcatagaaaatttataatttggggggacattgtctacacaagtgaggtttgctgagcccatcat

SEQ ID NO: 459652 - DNA, 308 bp, Homo Sapiens
gcttgaatacttctattgacaaagagctcactccatcagcatttcctgtcccatttcagcacctgtgttagaaagttcttccttacatgcttcatgttacctaatacattaagccatgcaggggactaacggagcatagcaatgtggcctgttaagggttccaggagaagaatggaatttcaggcacatggcacaggatatttcaggcacaggacatgtgggatggaattaaaaagaacagcaatggggaaggctaggagaagggacccagtatttattaaggaagttgctatcatgtgctaaaaaaa

SEQ ID NO: 459653 - DNA, 742 bp, Homo Sapiens
  misc_feature (125)..(125): n is a, c, g, or t
  misc_feature (178)..(178): n is a, c, g, or t
  misc_feature (539)..(540): n is a, c, g, or t
tgcacacaagcaagaggttttataaaagataccacagcgcccaataacacaatatatgtgtgatctgacaaattcaaaacacagttgaaatgaaaaggcaaccaaaatacttcacagtacttcantcttctataaaatgtgtacacagacctgggcctaaaatacttcactgcaccanatccagttctaaaatccaatttccttttcaggtagagcgcatcttttaaaaaaagagcccaacacacctatgtttaagaataaaaattcacttgtactagattgtatgtagctaaacactggatctattttctgattcccaaaattttcctatccctagtatgaataaatgaagaataggacaaacctaagtgcaggaaagtatcaaaccctgtaacgcatacttatactgaaaatgtgtttcacatggttaacatttgcaaaggctaaaatcatttttcataaagaaaattccacaggcttgctcagtattaccaaacttccataatgaacattattttgagtgccaaattgagcacgannaaaaaacacctacttttaactattatgaaatattatgaaaagtagtaagactttatttattaggctggttaaaaagtaatttaaaaccaaagagagttaaatcttccttgagaacatactctcagaacttaagaatggggtaaatcagatggagcacagccatgctgtacacatcaactcactgaaatcacataacttctat

SEQ ID NO: 459654 - DNA, 472 bp, Homo Sapiens
  misc_feature (397)..(405): n is a, c, g, or t
  misc_feature (458)..(458): n is a, c, g, or t
gctttttaggtctccacttaataaccattgtgttccttgtataattcctcttacgacacttaggattgttgacacttttttcttttactagactcttctgtgagagctgggattcatttttggcttactttctataatctctccaatgccttgaacagtatgtggcacaaaacaagttcttagagaaatattttggtgaattcccaagtaattgatagatttgaactcagatctgatgcttggaaacaaccataatgtcctcctaaattctcaacaccttacacacaaatttgggggacccacctacttgattgagtctgtttttgatggattacagggggtaacttaccattgccagtgtaaatggatactttgttcctccctctaggaccaaccnnnnnnnnnagggtggtgggtgtgttggaggggcttttcccatactttcttttttaggttcnggttatttatactt

SEQ ID NO: 459655 - DNA, 474 bp, Homo Sapiens
  misc_feature (32)..(32): n is a, c, g, or t
  misc_feature (57)..(57): n is a, c, g, or t
  misc_feature (91)..(91): n is a, c, g, or t
cccacaggggtgaagaaaaaagcccaggtccnaaatagaaaccaggggacttgggtntaaaagtaaccccataacaataacagtttttttntcctaaaaagttaagtgtaagttttacattcctacactataaaaattaagtatttattttgacattgacttcaagtaaaatcatgctccagggttatgtgccaagtccattctatagtttgacatgtctcctggtgtatttccatgtacccagttcctattgtgtggctctagagcaatctttctctgtttcacaggctcttcagttctgaaaaaatgactcagaaatgtgaaagtgatacttaacaatatttttcttcaagactttttttaagggtaatttgaaattgtgcccctctaattgaagcaacacaaccacttcctagtatctactagtaggccttggttctaaagcctggctgtctgctttctgcttgattctgg

SEQ ID NO: 459656 - DNA, 485 bp, Homo Sapiens
aaactggaaaatataataattttatttcataaaagaaatgaagctaagagataatgacatacaattagaaacatgcagtgttttgttgttgttaaagacataaagataattttaacagaaaatctttcagtcctagttctactgaaatactttttatttaaatactgaatccttagccttaaaaatattaataggagaagtcagtgtttaaataaaacaactagaaatgtagcatagcaatttaaagcacttagtagttatttcttaacatacataaaagatcagagggaaagtagcccagcttgcggtatgctaaaactaaaaaacagtactttaaattctgctaacatatatttgatatattccttaaaacaaatcaaagttactcttattaaaaccaagtaaacaggttaatgctaatcaaaatccatcaaagctatctaatttactatcaggctgacatagttatctaaatggcttttttg

SEQ ID NO: 459657 - DNA, 533 bp, Homo Sapiens
  misc_feature (33)..(33): n is a, c, g, or t
  misc_feature (49)..(49): n is a, c, g, or t
  misc_feature (56)..(56): n is a, c, g, or t
  misc_feature (63)..(63): n is a, c, g, or t
  misc_feature (92)..(92): n is a, c, g, or t
  misc_feature (105)..(105): n is a, c, g, or t
  misc_feature (112)..(112): n is a, c, g, or t
  misc_feature (117)..(117): n is a, c, g, or t
  misc_feature (173)..(173): n is a, c, g, or t
  misc_feature (437)..(456): n is a, c, g, or t
  misc_feature (516)..(516): n is a, c, g, or t
caggcccaatttggagggaaccggtaaaaccanccctccaaaccccagnttggganccaaccncctggaagatgaaaaccccaacaacaccnacccctccagaanagtaaanaaaanctcccaaacagggctcaaaccgaaactcaacattttacaggcagacaactgttttntcctttcataataaagtagatgtacatgtgaacccacatagacccaaactggtcatattaatgagaaaacaaactcatgtcattgcctctgctactgcaaggtgtatctttttaggattttaggaataccgggtgggtactaccatatcaaaggcagaatatcaagtaagtcaattggtcctagtttgaaggtttcacagatcatcatgagttacatttttcattctttaaacggagagctgacacctgggcgtctgtgtttcnnnnnnnnnnnnnnnnnnnncacccttctagatactctagtattttgtaaatttccttgtcatggctgacttttacaggnacattttaaatctaaat

SEQ ID NO: 459658 - DNA, 443 bp, Homo Sapiens
  misc_feature (341)..(341): n is a, c, g, or t
  misc_feature (384)..(384): n is a, c, g, or t
  misc_feature (391)..(391): n is a, c, g, or t
  misc_feature (415)..(415): n is a, c, g, or t
  misc_feature (420)..(420): n is a, c, g, or t
ttttttttccacttccccaatccctcagctctaaatttatctggaaatattttgagtttttcttacagtggagaactatttgacttagggctacacaacaatgcttgccacctccgtattttgaagatcttcctctgtgaatccttcccacattcaaggaggtacgcaggaaaagcctgtggcaggcagtagcccttgatctaggctgctcagggccacgtagatcatctgaagattgtcacctaaatacagctgttactaaacctttgccaagggaaagcagagaagggacaagtcattgccatccctcagcagcagctttcaagggtcattcgtaagtnaggagcccggaagtttatggcaacacttttcttctctagggtnctccagnacaaatggattttttacaatcagnccagntgggtaaatttcacgtttgtggg

SEQ ID NO: 459659 - DNA, 498 bp, Homo Sapiens
  misc_feature (31)..(31): n is a, c, g, or t
  misc_feature (471)..(471): n is a, c, g, or t
gcagcgggttgtgtccctggccttttagacntaagcggagagggattttcaagtcaggtggcgcctgtacagtctatggaataggtagttaatgaggtctggagttgatgttgccttcctctccttctctgatcactttcatgtcactcacccatcccagatgccatggtgttctcaatgccccagttctggggtttcctgccccactccacctttcctttcctgatcctcaagaaaactgacttcttttcctaagccccccgtctccactttgtgaggggcattctgagcatggaggctaatcaatatgttctcagtatccaatggaagcctaacgtgccacctcttccaagggcagtgcattttaactcagacccaacgccccaaccaaatgaaagatctcttaatctgggatttttcaacaatggggctggtggggtcagggtgcaccagattttcaggaggtttatnccagaagacttttcaagtgccccaaga

SEQ ID NO: 459660 - DNA, 439 bp, Homo Sapiens
gctctctgggtgattctaatggtggaaaccactagctctaaacatcttcctaaggagaaatccctttataatttaaggtattactagggcatcattgttacccatgctggacacagtggaaagaccgtatgttccaaatttatcagcccttttcttcaggtttcatgtagctttaaatgagacagcttattggaaggacttttaacaacattgtctgattgtagtcagcaaggttttctcttcgccctgctgaacggattattcttcgagtgtcaaaaagtagaaactataatcctttgaagtgactaaggacaagctttccagaaacctgggatcaacacaacccaaatgaaggcaactgtgtgtgtcgtctctggatagctggtaaagaacaagtgcttcttcaactgagatgaaaattaattcagaggtcaataca

SEQ ID NO: 459661 - DNA, 517 bp, Homo Sapiens
  misc_feature (14)..(14): n is a, c, g, or t
  misc_feature (38)..(38): n is a, c, g, or t
  misc_feature (45)..(45): n is a, c, g, or t
  misc_feature (52)..(52): n is a, c, g, or t
  misc_feature (60)..(60): n is a, c, g, or t
  misc_feature (102)..(102): n is a, c, g, or t
gcaaaaaaacctgncccccgggaaagcgggtgtcccgnggtgttncccaaanaagcaaangctggtggttgggtgaacaatggtaaccccaagaacaaaaantgtaactgggaaagcaggaattggttaaggcccagaatccctcgggcaagtttggacgtgcaaatttccactcgccttgggccctacttttaacaacttccctggagttctgcatctgaaatctgaggggcaggaagtactagtttgcttctctttttagtaaattcagaaacaccactagtttgaagaatagctgatggtaaatcagattcttttttccttttcaaatgctgtttgtctttttttctatctcttccttctttttcagatcttagctccccatcaagatcctgttgtcttaatttcctgaaatctgcgtcaagagcttggtagttttcctcagaagtatcataaaaaccaagggcaggctttttttcaaatgggatttcggcattataatcaactcctctcttcc

SEQ ID NO: 459662 - DNA, 947 bp, Homo Sapiens
tgcatgagtgctgtaagagtttaattgtaagacaaaagcactgctacattatactttaaacataagtcatctttcagaaggaaggattcagtgcaaattaaaaccctatgaaagcccaactgtaaatttcatatgaagactctagaagtaaacttctagaactggaaacacttggttccaacagaatttgcttggggagaatatgtcttgaaaatgttaaatggtacagagaacatcatgtttaagtcaaccagatactaaaaaaaagacatgctgataggtcttaatacataaaactaattgattagtagtagcatgctttatatatcaatgattataaaagcaatttacaataaatttgagcatttctaagttttatttactgccttagccaatctcttaactatactgtaataaaatgccattcttccaatttttattttataataaaaaggttttcacttcatcagtctcagactggtgttttatataaatgttaagctctgtataatccaaagccatccatacaacaaaaaagaaattatgtaattccttttctcaagtgtttattcaaagcatagcttccatgccatgttaaatgtcacgtttaggtactggcattaacagacctcttaagtttcttccaattctttttttcctgagaaatacaaaagtcaggaaagtaaccttcctaattctagagtgcaaacagagtacagcctcttataacaaaattaaatttatacaaattaaccttgaagtactctcttcccaataccaaatgacttaaagtttcccaaaatagattccaataacctctattatcactgtttaataaattaatgcctatctctaatttctttgaagacttttaaagaatttctcccttaacaactaaaataacagatttggattgctattacaagaacaccatgctcccacttcag

SEQ ID NO: 459663 - DNA, 427 bp, Homo Sapiens
  misc_feature (83)..(124): n is a, c, g, or t
  misc_feature (192)..(216): n is a, c, g, or t
acccactgcggggtgccaggcaggtgtcccccaaatgtcccataagtgtacacacatatgtgcacacatgcacatgggaaacnnnnnnnnnnnnnnnnnnnnnnnnnnnnnnnnnnnnnnnnnnggagacagggtctcattctgtcaccccaggctggagtgcaatggcaacaagagcaaaacttcgtctcnnnnnnnnnnnnnnnnnnnnnnnnncaataatagtaaaagtaatagtaacaactctggtaaaacagacatcagatgttttccagttttcttcccttgttgaatgaacctggactgcagcccaaggggatgttatctttcccttgtacctagagattcctaaagcctctctgaaggacaggccactcacagccacatgtaagaccacctgtctctccatccaggacttcttcagcgc

SEQ ID NO: 459664 - DNA, 474 bp, Homo Sapiens
  misc_feature (415)..(415): n is a, c, g, or t
  misc_feature (457)..(457): n is a, c, g, or t
tttttttgactctttcaacattttaaaagagattgaaattgaaaacgagaattataaaaggcaaccgatcacgctttgctccccccttcaaaagaaagaagtgttgaaaatgaaaaagactgttaaccaaatgagtgctgcttttagagttggaagagaaccagtccaggccatgtgtggtgctcctgtgcggtggttgtgatcccgaggcaagtcactgaaccactcagcccatggaaacaagccgagcatgcacctctcagggccatagggaggccagcgtgaggaaaagcacggaggaaagctttcagttgaaccccaagttgctgcccggatccagcgtctggtgggctcttcactgtggacttttggttagggcgggccttggacatgtttgctgttcatggcccgccantgaggaggaaacaaggggattgagttttcaagggttgacccngggtcaggcattgggtt

SEQ ID NO: 459665 - DNA, 415 bp, Homo Sapiens
  misc_feature (383)..(383): n is a, c, g, or t
  misc_feature (396)..(396): n is a, c, g, or t
aggtgtgctgcatcagttgtggttctgaattggctttggggtgaatacaaaagcatccctctgacattatattagtttgttcgcacactgctaaagacattacccaagactgggtaatttacgaaggaaagaggtttgactcacagttccacatggctggggaggcctcaggaaacttacttataattatggcgggaggggaagcaggcaccttcttcacaaggcagcaggagatggaaatgcaagcagggaagtgccagatgcttataaagccatcagatctcatgagaactcactatcacaagaacatcatgggggaaaccgcccccatgattccaatccctttcccttcccttcgatgttaagggtttacaggttccctncctgggacacatngggggtttaccaatttcga

SEQ ID NO: 459666 - DNA, 530 bp, Homo Sapiens
agtcaaggtattgttttaatgtgagaaaaagagaaggaagtcactgatgaagggtttgtacatttagtatgagattttaaaagtttatggtgattacacatagctccatttcttgcatttataatattttagtcatataataagtcatttagatgaacactgaaacagtaactcggctgagccaaagcaaagtctagttcacagatggcagccagctcgtgggacttgatggtaccacctgggaacatcatgctgaaggacagtctaaactccagtttgggctcagtagaagcaagagctttaatttaatatgactgctgtggtgcaaatctacggccaactatccccgggaaggcaccagggtctctaggcagccacattcctatgggaaggtaagtgcacggaaatgtgtttaaaagtacttcataaatcatggatctcttgaaacacatgagtaaagcacacatctccaaaataaaattaaatcctaatgagggtgatttgaggagcttaattctccaaatagttga

SEQ ID NO: 459667 - DNA, 335 bp, Homo Sapiens
  misc_feature (280)..(280): n is a, c, g, or t
aactttttattagcctttatttaagtaataaaatcactaactccttgaaaaaagtatatttatgaataaatttatctcatataaaaccattccttggcttcgatttacaattgttctattatctccttgggttttactaaccacatcctcaaagaatatggaatatcctttctttacatagtctacattttagtgttttttaatcttatccacctaaatatcaataaacagcccttaaaacatttacacaaaggtcttgagggcataaataccacatttngcagttatttcctctggtgggtgaggctgagaggaagagggaggatatgtccact

SEQ ID NO: 459668 - DNA, 484 bp, Homo Sapiens
  misc_feature (17)..(17): n is a, c, g, or t
  misc_feature (26)..(26): n is a, c, g, or t
  misc_feature (40)..(40): n is a, c, g, or t
  misc_feature (48)..(48): n is a, c, g, or t
  misc_feature (57)..(57): n is a, c, g, or t
  misc_feature (64)..(64): n is a, c, g, or t
  misc_feature (104)..(104): n is a, c, g, or t
ccccaaaaaaagccccntaccaaatncagggttgaaatcnaaaaaacnccagctggncaaaagngggaacagaatcctaaaaactgaaagaaaatgctccgtancccccatgtaaaatccacagcccatgaaagaattttccctagctgggtttttccgaaagatgttaaagacccagttccctcaaccctgccagacagcgttttagtagctttagcgaaggggcacagaggtcaaaacctcagcctgtacctcctttaatgaaacccaggttattcagataccccagagttcaaagttgaaagcaagttagccaaatcaatgatacttccggatgagggtcaccttccgaatactggcctaatcacttttctgtgtaagatttatgtgcttactcgcaaagtagacaaatagtcaaatcagcaaaagccagtatacaaaggccagccccttccccgagagcctcccgaagaactgtgggaac

SEQ ID NO: 459669 - DNA, 900 bp, Homo Sapiens
  misc_feature (100)..(100): n is a, c, g, or t
  misc_feature (124)..(124): n is a, c, g, or t
  misc_feature (156)..(156): n is a, c, g, or t
ccttaaaaatccaataagtggtgtgagcattatttccactttaccctaccttggaagcactattaatcccaatattccaaattaaaccagacccattagntagcctggaatgatacagtggccntcactaattaggggcttagttgccaaccatanatacaaattaaatgaaattacaaattaaaaaaaactttgttttttagcttaaattgttggtgcagaatgtatggcgggggctggttgtctggcagccgctttagctttgctcgcttggcttgctcgaacggcagtttctagacgcactttcaactcaggagcagcccccattactgtcttgaaagcatgtggatacagaggtccaatatgcattaaattctggagtgcaaactcatgaagatctttggaagctgaacttgctgaggcaaaagatttttcatccagcaggtaagatatcaaagtgggaactaaaagagcaagtagctggactctgttttgttcttcaccaagagcaaccagtgtttcaagaacttttattccttcttgaaccgctaaaagctctatgttactggctggtctgtttctttcaacagcttttagcttttcaaccactattggagctaatgaatgaatataaggagttgaaagggcacgattggaatgctggaagactgagaggagaagctggtaacatttggcttgaacccatgggtcgcatgaatttaatgcatttttaaatctgttcatgcagccattctgtaatgactggactcctattatttcattactagcagaccacaggaagagtgcaattgctgttagcatgcttacttcatcaggtgtaggtacagagtcttctggttgagaatattccaggatgcaagcaagcgtgctacgaatcag

SEQ ID NO: 459670 - DNA, 447 bp, Homo Sapiens
  misc_feature (25)..(25): n is a, c, g, or t
  misc_feature (37)..(37): n is a, c, g, or t
  misc_feature (49)..(49): n is a, c, g, or t
  misc_feature (123)..(123): n is a, c, g, or t
ccctggggcaaaagaaaaagaaccnatttaaaaaganggaaacgaaccngaagaacggggaccgtgcccttcccccctgggttgaagcctggttttcccttaattggtgaacaatttccccanccgtaaatatccttgatcccactcatcaagccttcctactccctgtctttgccacagagataaaatgtcctgaatggaaataccaaacaaaaacagtttaccctttcttgtgaataatcgaattgtacagctgaacattctgttaggtctaggatccgaattggttctggtgacatctggtctttgaagtatttcagttcattcctgtgcagagtaaaccatcttgttttccaggtcttgaccaggcctccctgtttggtgaggtaaccttctttggtgcccagagaaaggtgctgtgggcacaaggtcatcttctgttcttcc

SEQ ID NO: 459671 - DNA, 362 bp, Homo Sapiens
ttttttttaacttgacatttgctttatcctatataatacaaacataacaaaatacatttaaaatgttgttgaaatatacaaaaatttaatgtaatttttgcgtctgagatgtttaaataagaaacttctttaatcaggtatccctttggactgcaagagcagtttatatcatagctttgcagcataatctttttactctcaggctcttcaagcatttttatcttctttgaaacttctatctaaacaaaaatagtattaaaaaagataacagaaggggttagattctgccaatgaactgtggacatcagtatctcattcttctatttgcctccttattctagtttgaaaaagctttggaacac

SEQ ID NO: 459672 - DNA, 338 bp, Homo Sapiens
cctgtgttgactatttttgagagactgtatcaaacacttttgagtgtgttttcttccactcacagaagcacaaactgggagtcctagagaattgttcctgaggtcaaacagctcaacactgagcacatctgtcatttcctcactgtcaatgttgcctctcttctaaccatctcctcttcatgctctctcaatattctcatcgttcagtgcttatcatgcggtgcttaagagtgttgaaagtagcatttgttgaaagttagaaagttgaacttctgtacttgaagacttagcatagtccaatcttcctttttcttgagctttgatattgtccaaatatg

SEQ ID NO: 459673 - DNA, 424 bp, Homo Sapiens
  misc_feature (149)..(380): n is a, c, g, or t
gagatgggggtctcactttgttgcctaggctggagtgaagtgatagtcacaggcacaatcatagctcactgcagcctcaaactcctgaccgtaagctatcttctcacttcaacctcccaagtagctgggacaacaggcacgtaccatannnnnnnnnnnnnnnnnnnnnnnnnnnnnnnnnnnnnnnnnnnnnnnnnnnnnnnnnnnnnnnnnnnnnnnnnnnnnnnnnnnnnnnnnnnnnnnnnnnnnnnnnnnnnnnnnnnnnnnnnnnnnnnnnnnnnnnnnnnnnnnnnnnnnnnnnnnnnnnnnnnnnnnnnnnnnnnnnnnnnnnnnnnnnnnnnnnnnnnnnnnnnnnnnnnnnnnnnnnnnnnnnnnnnnnntctttttttcacaggttatggtggaattttggggaacaggaaac

SEQ ID NO: 459674 - DNA, 442 bp, Homo Sapiens
  misc_feature (22)..(22): n is a, c, g, or t
  misc_feature (37)..(37): n is a, c, g, or t
  misc_feature (56)..(56): n is a, c, g, or t
  misc_feature (66)..(66): n is a, c, g, or t
  misc_feature (98)..(98): n is a, c, g, or t
ccccccccaccggatggaaccnttatttaagggcccncttaacctttggaggattncctaaggccnactgtattttttaagtttcccgggattgagcnataccacagatactactatgaatatgacctaatgaatatcctagaatagcctataatcacatgtaaagcaaagtgacatgatgccaatggaagacagaaacaaaatcatttgtatttagaagagaactttcagaggacttaagtgctcaacactgtagcctacataaatatgtttctttctttaagggtggtttcacaattaaacaattagaaagtttatctcccacagcaagcgtgtctgttttggcctttgacaaggttcacatcagggagaattgtggatactttccaaactacaaaaacaggtattttagtcagtagtagctatgttcatttaaagtgaa

SEQ ID NO: 459675 - DNA, 346 bp, Homo Sapiens
aaggtttaaagagaaaaagaatactgtattaaagaaaatgtgtatatttacttcttcccaatctcagttctagactaagaagtaattcaaacacattttaaaaatatgatatatcagaatccttaatttggcagtaacataaattatatactttaaaggcaaaagcagatattcttatgtgtctcctcttaagtcaattaggaatgttatactggtgcattgggaacagtgtcaacgaattcagtattccatgaattgaaaccaaaatcacacaaacccttgggtccttcatccttgggggggtgaaggggtcctaactggggtcccggatactggcaatctgtcc

SEQ ID NO: 459676 - DNA, 421 bp, Homo Sapiens
  misc_feature (20)..(20): n is a, c, g, or t
  misc_feature (54)..(54): n is a, c, g, or t
  misc_feature (94)..(94): n is a, c, g, or t
  misc_feature (256)..(268): n is a, c, g, or t
  misc_feature (320)..(320): n is a, c, g, or t
  misc_feature (361)..(361): n is a, c, g, or t
aagcctcgggattttttagnggccagttaacctttgccccgatgcctccccccnactgaaataaagcccccttcccttcctacaaccttggtgncctcagaggttttgtcctgcagccttgtccctgcctacagaagaaatttcctaagcagcaatgcattcaagagatgacttgggtgctgttaaaagcattcagttttaaatgggaaacacagcacaaaagtttggaaaatttgcagactgatggtgcaagagnnnnnnnnnnnnncattttctgaggagaaattcaagctggctgcagacatttgcataagtaacgnggagccaaatgttaatccccaacacaatggggaaaatgtcnccagggcatgtcagacctttgcgacaacccctctcaacacaggcctggaagtctaggaag

SEQ ID NO: 459677 - DNA, 682 bp, Homo Sapiens
ggcaggcaactatggaaaaccatgtttatttttaataaaggatgacatttccaatcagtaaaatatcataaaagtataaaaatgtactaagtacaatcattagcattatgttataggggaatagtggttataacttttccctgtaagatggcacattggatggtcacagttggcttgatttacagaggggcaagagtaggtgaccagttgtaccagttgctccagtttcctaggatttgggactctgtaaaaatgagaaagtcccaggcaaactgggacgggttggtcctacaagaaaaagagcagcatcagagtgttggctatagtttggaacttaggaacaggatcagacattattttttaacttctccacctattttccctttagctgtgaaataaaaatcccttttgttattactgagggtgttacagctttcagaggcttttttaccactgggtttcatgtaattttgacttaatacctatgtcaagcctgggaagaaaggcagttctaatcaacttgcaggtgtggcattctgcttcaagccacctgcatcctagagagcaaggattcaaactcagatctcctgaggccactgttctgttctttctggcttttagtagtagccagaaattgggggaaaaattgaggtacctgagatccaagttttgaatcaatccc

SEQ ID NO: 459678 - DNA, 455 bp, Homo Sapiens
gcttcagggaataaatcactcttcccccttgccttggctaactctttcttggcaaaagtttcctcgaaatttaaacttctctttcccaccagagtggaatccaaggtcgtcaaatgaaagggggaaagtcactcagcttgctttggttaagggtacttggttatgccattcgtcattgtaaaatggatcttctgggtggtccagcccagttctccaaaagagtcaactaccacaggctcaagggcaaaagccttttcataaaagtgtattcctgtgcccaggtggatgaggttggacaaagctactatcaccagaagtggctgatcttaataggaaaatttcggtcaacttcctgtccccagccaaattctcacctcccataacaaagacacaatttaacacgtgccatcaaccactgcagtccactattcagggcagccacagctggggtgtgt

SEQ ID NO: 459679 - DNA, 459 bp, Homo Sapiens
ttttttttctctaagtgataatgatatcccagctagaataattgtgctctccagaagcaattaatctgatttgcaagcactgattttttcttttgcaaaaactaataatattagcctgaccaattatgaaataattcctaaatttacaaattcccaaatttgtgctttcatggcttccttctattttaaatctatattattttaaacaaattttccttaagtaaaaatgacttaacttcataaaaatctaccatttatgtaaataaaacattaacaaaaaccaaaattaaagggattactataaatggaaacatttacattgctggatattaaatccattacttgcattcctaatcataacaataaacatcaaggttaaaactctttaccatttttattactgtcaatttttaatatgtaggttactctgacagtctacttctgcaaagtcacctgttg

SEQ ID NO: 459680 - DNA, 319 bp, Homo Sapiens
  misc_feature (288)..(288): n is a, c, g, or t
aattggtatttcctaatctgagaaagtccatatattcaacatttatttcgctctaaataatgggataacaattacattaacttttgatttatgttttactggtcatgatggaccgactactataacaagcaaccccaacatttcagtgaattaatacagagtttattgctcatttcaggtcacagttcagtctaataatgtattggggtggagggagatggggtctgtcctatggcagtcatttagggatctgggttccttcccttgtggtggatattatgatctttnggcgttgggcccccccggggtcttttagggg

SEQ ID NO: 459681 - DNA, 376 bp, Homo Sapiens
  misc_feature (19)..(19): n is a, c, g, or t
  misc_feature (26)..(26): n is a, c, g, or t
  misc_feature (99)..(99): n is a, c, g, or t
  misc_feature (107)..(107): n is a, c, g, or t
  misc_feature (158)..(158): n is a, c, g, or t
  misc_feature (188)..(188): n is a, c, g, or t
  misc_feature (213)..(213): n is a, c, g, or t
accccccaagatcatgganaaatgcnccatgccgctgaccgggaaaacggtgcgtggaccgcatcatcaccgagaaggccgtgtttgacgtgcacaggnagaaaggntgacgctgagggagctctgggagggcctgacggtggacgacatcaaaaagngcacggggtgtgcctttgctgtgtccccgnacctcaggcccatgcagcaggtggncactgacgggacctggatctgggcggggtggtgcgctcctcagggcgggtgccaccgggttccccaggggaatacatgtccccagctctgggaggggtttgctactggcctcctactttcctccctaggtggacagtgctcctctagagagctgcgactttaa

SEQ ID NO: 459682 - DNA, 1215 bp, Homo Sapiens
  misc_feature (428)..(428): n is a, c, g, or t
  misc_feature (538)..(538): n is a, c, g, or t
aaagttcatagagagtttattagccataagagctgtttatttccatactcatgaatcttaaactgcaattctctctctattcaacccaatcctggtagaatcatgtttttcttcctgaaggacttgtatgtactggaccagtaagaacctttgcctgttgtctgtagagaatagtcgatgatgtttcatgttcctgaagatgaaaatgttcatcatttttaggaattatagttaaatctggcaagtgcttcttgcttttttctttttcttgtacctaaacattttttgaatcataccaaattctcagtttctttgtttcaataagcaaaaatggaaacaaaataacttaaaataccactttgcaggttttgttaagtattctttcataaattgcaagctttctgagggtagggcccttccctattttntgtcccagcacctaacatagtgtgtgtggtctcattgcaggagctccattaatcctttgctgaataaaattaataagcaatgaacacagagaagacctcagaagcctggnctagtggaaagcagaacaaaatatgggactccacaatatgaaaattataaaatttaaccccagagggtcataatgttagggcttacaataggaaggactcccccaccacataaccccagctcctggtatatgttttgtgctgtcagagtagtggtggtggaatgtgggtaacgtgctctgaatgaatgtccccagatgatcttttatgtttggttttcatggctaaggaactggcagagatctggagcactttttccaaagtccttctcagaaatcctatgaaggaaaacttcaaattgaggagtaaggacatctgacgggaggaggaacaggtttgaaggcaagaaggtacaacacgccttcgttgttgggtaaccacggaaagaagaaaacagcacagattcagctcaaacagcacatgtgtcttgaacctcagctctgtccatattccctctcctgtggagaagctatcaggggctaagagcagtttgcttttctttttaaagtctgttttttccaaagcgttctcctgcagatgggttgacttggcagcagtgctggaatcttcaaaagcgcgggtggagaacggggggtattcattgacctagagagggaaaatggcttcccacctactttagtttggcagctgtgaggtagacagaaaaaattagacagct

SEQ ID NO: 459683 - DNA, 538 bp, Homo Sapiens
  misc_feature (22)..(22): n is a, c, g, or t
aaaacaatccccaaaaatcaangtgcaggaacttccccaactcaaaaggtccaacatcaggttggaagggtgtctaatctccccagccctaaaaatataccccaaccattgaacatgaccactaaagaacgggtataattggttcttcggtcaaaaccacacctcggaagctggggcttttcagccacagcagcttggcccaggtcgtccccagctgtattattgacggcatgctcaaacacctccaccttctgcatcagagtcaagtggtcatagtccggagccatccgcaacatgatgcgatgctcgatgttgagaaggatcttcttcttctccctgtagtcccggatgagggcgtgcagtgtgtcacagtggggaacccagccaatgaggcccgagttggtcgataaagggatgacagcgtatctctggatgctgaggtttttccgaagagatgttgggtcattggccagaagggtgttaaccaggccgaagagctgcatcacacgctcatcctggcgcagatcttcatggcctt

SEQ ID NO: 459684 - DNA, 461 bp, Homo Sapiens
  misc_feature (98)..(112): n is a, c, g, or t
  misc_feature (429)..(429): n is a, c, g, or t
ttttttcaagtggatgccatttgctctttattattattgttttcttgtaaagaaggagacaaaatgtaacagccaaattcaacaattataaaaagaannnnnnnnnnnnnnnaatcagaagcaagtttgtctgttgcccccaggctccaatgaaatgctgacatatactgaatgtacagatttcccagctgacaagggtcaacacatgaatacaagcacagtttaaagtggtatcaaaattaatccatttcacagtaattatttctataagctcagttgcacatatcagggtttccactgtcacaaattcacaatgtcagagcaaaataacagatgtgttcagggcctggggaaattgggtatcgatggaggggagatgggattgtggagggcaaaagcaggctgggggggtttttgttccccaatccnggaaggttcccatgtttaattgttccgggctg

SEQ ID NO: 459685 - DNA, 272 bp, Homo Sapiens
  misc_feature (245)..(245): n is a, c, g, or t
agagcgagcactagctgaagacacacatcatctttttcaggtgtttaattgctagaggaagtatccttcaacagtggtagaaaggggagggtgctaagagtggccgctcaaagaagcgatgtaaactacatttgattctctggtttaatcagagattttaagagctgagcagaagatccaactgtaggctggctcagatataccccagataatgctcaccaggcatgaacatctgagctagacgngcatagatccacaagcggaagctgcca

SEQ ID NO: 459686 - DNA, 328 bp, Homo Sapiens
  misc_feature (85)..(85): n is a, c, g, or t
ttttttttgctaaaccaaaaacaccagctgtaaaacccactgcttccttccccgccaagtctgcagtggcaggaggcggcggcanagtacagcagggccccctgtgctctgagtcaggcctccctctcagtggctccctgcctgcaaaacaaacttaaaagctggtgaatgggacgtaggggcccgtcaagcatgcagggaggcctaaaatatttgcagaggcacacactgttcgcagaatgaaaggccactatgtaaatatctgggccccgggtgaggcgaggcattctgaaagtggcttttctgttagtcgcatcaagccagcgag

SEQ ID NO: 459687 - DNA, 254 bp, Homo Sapiens
acatatggtcacattgggcgcctaggaacagttaggtcgctcgtcacatagggcagttaagtgggagaaccaggttttcaaaatcaggtaaggaaaaccatcattcatttaacttgaggcaccagctgttgttaaggccttgccacgggcgttattcctttggcaggccttcacaacagtgggggagggttttttattcctggaattttccttcattttttacaggttgagggacattttaggggagaaggaga

SEQ ID NO: 459688 - DNA, 524 bp, Homo Sapiens
  misc_feature (41)..(41): n is a, c, g, or t
aacctccccttaatcctttcccctttccgtggggcaaacanggggctcccaatttcccctaaagccctcaacacctccctttccagcagcctccagagatggaccctggcttcgattgggtgccttgaaatgcgctccagcccaatggggtgtgagggatcccagaactgggcaagtgttaatactgggaactcataggatttattactttttaaaaatcaagataacgcaccagtttgctcttcacctatgcaaacacaaatatagcaattagaatacaggacaatcaatgcaactatcagagcccatgaagaaaaaaatcattgcctcaataatcccattccccccactcacctctaattacttaatccaagtacacaaaaacccttaaaacatcactccctaaatgggacactaaaacacagaacaaagacacgctacaggataaagctggaaagacacacaaacatactcccagaccttgttttgaccaatttttaaatattgctttagggagattttat

SEQ ID NO: 459689 - DNA, 312 bp, Homo Sapiens
  misc_feature (142)..(142): n is a, c, g, or t
  misc_feature (251)..(251): n is a, c, g, or t
ataaaacgttttgtagctaagaattttccctttctcttaatttcttacatctttccacacaaacttatctttccaagaatttgaggtggtgatcatacccatcaagacggccttgtaggctatctgattgctaacagacacnacctagagcttctacccaaattcccacacaagcattatctcgtttaacatctcagcgacatactggataccagaataatgtttcctcttctctggtgcaccaaaacctncccttagtgataatctctcaattatgacattcatttgagtttagggtgtataatttttcct

SEQ ID NO: 459690 - DNA, 506 bp, Homo Sapiens
  misc_feature (106)..(106): n is a, c, g, or t
  misc_feature (121)..(121): n is a, c, g, or t
ccccacaccaccccacagaacaaggatagaaaggccgcccccggatttgggtggggattaagataaaattagtacttgtaccagccaccctcacacacagtgaccnggtaacaggggagantgcacctaaatgtgttccactgccctcctcccctatgtagttaaattgtcctttttacatgccacaactcttgctttcttaatttattataatattttgagaatttagaggttgtcatatatatacctagctattcatcacattttatgttatatggtggtgcacagtaaatgcttaaaagtgattatttgattgctggattagtgggggcgaagagaaagagagattattgctttggggctctgttgatgccacagtcttccagttgcaacatctgccaactcactgctcaccagagttttttggctgatatgactggccagcaggtatccttttgcttcttcaaaagtcagtatgtgtcattccggaagagaggccacttttc

SEQ ID NO: 459691 - DNA, 452 bp, Homo Sapiens
  misc_feature (409)..(409): n is a, c, g, or t
catttatgcaagaaatatttattaatcacctaaatcattctagaaactggggatacagcagtaaagaatacaaaaaatcctgcccttatagagcatacattctagaggtgggaaagaggcaataaataagataattgagtgctatatagtatgttaggtattgagtgctaaggaaaataataaaatgaggaaagaggataggaaatgccagatggtttacaagtttagctattgtgttcaagaaagttctcacaaaaaggtaagttgagtgaagacctgaaggaggtaaaagagtgacctttgtgggatatctgggaaagactgtccccagggagaatgaacaattaaggggcaaagaccctgagggtaggtatttatccatctccatttttacagatggggaaaattnacttggcccaagagccctttgcttgaagacggggccaggattc

SEQ ID NO: 459692 - DNA, 1533 bp, Homo Sapiens
  misc_feature (990)..(990): n is a, c, g, or t
gtagagagcagagatgataattttattgaattttgcccccaagactcacaatgcaatacagattcatattcagtaaacacttattgggaatctacactatcaggaatgctttttaaccacaagtaatggaatacacaaataatagtggcttaaagacattagttatatcacatgcccccaaggctagagatcattgtttttgtgttaacttgttgcattgctatcatataactgctttcacttcaagcgctgtgcagagcctcccagaggacctccgtgtgtgctcctttggttcttcctaggttccatagccagccttagctgcaagggaagctggagagtgagcatttagcatttctagcctatagagtaaaaggaagccagggaggaaagaattgggaataaaggttggatcagccacccagcagtgaataccacaccttctaatctgccaagcactttcacaaccaacattgctgcataacattcttagccatgaagtaaatatcatctccaaaattatcaacacagaaacataggaatggaaggattaagtggccttctcagtattgcatagctagtagcagagatttgaagttgagagactgacaaacactcctcaactaactgtatacttcagaaaaactgtgcccacatgaagaaaggtgaagagttagtcaaaggactataaaaacccagaaaataaatgtaacatttgagctaggctttgagtgagtttttacatgcaaagagtcaagaaacagcattcatggtacatgaaacagaaggaactatgacccagagtcacacaaacattagagacacgttgttagggaaggacaaggagtccaccagttggagaagccaggacatcttccaagaaatggactgaaaccacagcagtaactctcaccccaggtatctgtctcgaggccaccctccctcagatgcaaacaggggcacactggcccccaaatccactgctctgangaaagtggaactggtgcccacctgactgaggtcttcacataccagcccatttgtagagaatttgtaaatatccaccaaatagtgatttgcagaatataaaatttgccagaatataatagggtgtgttggaaagcccccaataaataaatattggggctgtaaaaagtttagtctgagaaaaagggaagcagttactttactgcagtgtaactttggtaaaagaaaaatctgaagaaacaaaatccaatttggtgaatctgaccacataagcaatatgagagtaaaccagtctaggttaactcccaagcttaccacttcctagctttgttaccctgggcacatgtgaacaaaagttctctaaaaaggaattttgaggaaagagactttattccagagaagtgattgcaaacttggaagatgcaaacttcaatgtaaaggaaaggtgccatccagagaacaaagggagagttttgcttttatagagaaaattcacacccaggttcccaatcaggttcatttatgcaaatgaagcattcaaacttg

SEQ ID NO: 459693 - DNA, 463 bp, Homo Sapiens
ttttttttgtagagagcagagatgataattttattgaattttgcccccaagactcacaatgcaatacagattcatattcagtaaacacttattgggaatctacactatcaggaatgctttttaaccacaagtaatggaatacacaaataatagtggcttaaagacattagttatatcacatgacaaaaaggctagagatcattgtttttgtgttaacttgttgcattgctatcatataactgctttcacttcaagcactgtgcagagcctcccagagggacctccgtgtgtgctcctttggttcttcctaggttccataggccagccttagctgtcaaggggaggctgggagagtgaggcatttaggcattttctaggcctattaggaggtaaaagggaaggccgggggagggaaaaggattgggggtttaaggttgggttcagccaccccaggcagttgaat

SEQ ID NO: 459694 - DNA, 521 bp, Homo Sapiens
ttttttttctgcctataagcattttggctgttattatataccatcccatcagagatttttttagggtcattaggtaatactacaaaagaatgtgtaaagacacaggtatctggtgcctaaaaacattgtgtcagtattaatgttaccattatataatgagtgatggatttgtgtgcatgttaaagtttgggtttcaaaaggataaacattttattctggtaagaaacagctgcagtgaaataaatctgaccacatatttcttcaaggtttttgcattccattgaatgaacagaaaaacaagaatctataatagcttcataaatcacttcaaatgcaaccacaaaatgaaaaaacacatttaaacaatattggtaaataagaaagggtgcttatttacagaaatattaattggagaattctattaaacttcttaatatattgctaacttgtgaaaatatagcattcattctatatctgtgatgcaattatttatcaaaactcaactagttcattactagttt

SEQ ID NO: 459695 - DNA, 546 bp, Homo Sapiens
  misc_feature (457)..(487): n is a, c, g, or t
  misc_feature (508)..(509): n is a, c, g, or t
ctttgcttttgccattaaaattctgttattaatgactcatcatcagtgccccagaggaagtgtgagaggacgagagggaggtggctcccatcagcagggccagcctgcgtcaggatgctgggttaaagcccggcgccctcaccaatgagacctttgtgggaagctctactgcctcagtttccctatccggagatgctgttttcagggggtcctgacactattatgggaacaaggctatttggtttactatatcattagtgctaatatagtgtggggcactcagatgttcagtaaatatacattcaacaaataagtgagtgattatactcaactccccccacccaatgcccagcaccaagcctacccagcacatagtaggtactttaagtaatttgaatgaataattttaaataacttgaatgaataattctgtattgccccccactcgccgcctatnnnnnnnnnnnnnnnnnnnnnnnnnnnnnnngtttcctgtgctacttctggnncttagtaattattcaataaacacaaaatgtttgttgc

SEQ ID NO: 459696 - DNA, 488 bp, Homo Sapiens
  misc_feature (295)..(295): n is a, c, g, or t
  misc_feature (465)..(465): n is a, c, g, or t
tacatattcaagtagagggctgtatgacctggccacatgagtttattgataacagtagtaaaatatactttaaaatgagtttttagcaataataatagcattctaaaagttttattacttcaaagaaaagctcaattcatctttgatcaattttggttaagtcagtgtgggtccttgtattagagacttaggtctgctttgggtttttgtatgctcttgctatacagcacagctcactgtttatcttaagaggaatatttgactttcttttgaaactcttcttcctgcaaccacngatagcatatgataccttcagacatagcttggaagtctgtaccccggaagtcagccataggaaaagtacttctcaaatccaaagtttaatcttaaaatataactatttcctgttaggggccaccaatacttccaacggctgggtggactgcctttacctttcctgggccngccgccggggccccaatggccat

SEQ ID NO: 459697 - DNA, 549 bp, Homo Sapiens
  misc_feature (26)..(26): n is a, c, g, or t
  misc_feature (65)..(65): n is a, c, g, or t
  misc_feature (78)..(78): n is a, c, g, or t
  misc_feature (84)..(84): n is a, c, g, or t
  misc_feature (97)..(136): n is a, c, g, or t
aaactggggcaagccttccccgcaanctgtccggaaaaaccaaaacagggcccctgcaaatcaanctcccgaaggcanaaactnggcctgcgctcannnnnnnnnnnnnnnnnnnnnnnnnnnnnnnnnnnnnnnngagctgggctaagcagacagtggccataagaggtggaagggacttcaaggacacctttttcagggcggagggcaaagggggagagttaaggaagggaagacggaggcccttgctccccgtcaagaagaacccgtatccttccccatactcacgcctggagtcagggccagtgcactggggtgaacaggggccaaacaggaaatcgtggccgcctccaaatctacctgatcagggtttttgacaggagagggaggaggcaatgggccacattccatctccaccagggataagggagaggcaccggacttcagtccaggagtgaggctccgagattaaacccaaataatggccggagccggggaaggctttcaaccctcagccctgggggctgggtttgaccagagaccccttcc

SEQ ID NO: 459698 - DNA, 561 bp, Homo Sapiens
  misc_feature (11)..(11): n is a, c, g, or t
  misc_feature (21)..(21): n is a, c, g, or t
  misc_feature (487)..(496): n is a, c, g, or t
cccaagtaatnctgagttccntcccaagccttccctccgagctgaaaagagccattgcccaatgaactaagagggaatgcctacctgtgtccctatggaagcccaggagttaaggctgagaggccttgtagatagccctgttattacaaaataaacgtacacctagtcctagagaaagcccgcctacctgcgtagcacctattactcagaaagcaacaacatgataagatgtttggtgatggtctattgtagaatatagaaattaaagtctctgctctatgtttgtggtacttccccagttaaagacacctcgggggaaaaaaaccccactgtgttaagcagtgcatttttaggacataatactttccaaaatcaaagttgtaagacggataacatgaatcttgctgaaaagggaccaggagctaaacctagcaatggatttggtgtcatgaagaagtgatgagtaaaactgcatgttcttttcctnnnnnnnnnnggggggggcattagagaagtaggggctctttgggacagtctttactaaagcccatctatagaggg

SEQ ID NO: 459699 - DNA, 352 bp, Homo Sapiens
  misc_feature (152)..(170): n is a, c, g, or t
aaaggctgtaaaccatgcattatctccccttaatgttatggatgcggcacatgtgcatccattatgcaaactaccaggaggacattcatggatgttacatgaagcttctgcttccagccatatctggaaaaaacacagatttgggagacagnnnnnnnnnnnnnnnnnnnctgcatgctcaccttctggaaactctaaatctaaattaggatataaagcattcagttcatggctcttggaagactgactgtcctttagggttgatgagtcattctaccccttagagacaggaaagctgcaaagccatggagcagggaggagacattcagagagtctgaaggggagatgcaag

SEQ ID NO: 459700 - DNA, 326 bp, Homo Sapiens
  misc_feature (54)..(54): n is a, c, g, or t
  misc_feature (155)..(155): n is a, c, g, or t
gagagtgaacacatactttatttctgtataaagattctttccaggagaccaggntggaaaacacggaaacctcaggaatggcccctctccacttatactcctctcctcacaaatcaggccaatgaggtcagttcctgagtcccctttctccaggnttccactcagtccttgtctcttagtgtcctgttgggggataaggaggagaaggactcttgttctctagcttctccgataaaggcccccccaccgcccctcaattactgtggtctaggaactgtgagttcatgatatacatcagggctcctccctgagaaagcatgaggagg

SEQ ID NO: 459701 - DNA, 441 bp, Homo Sapiens
  misc_feature (45)..(45): n is a, c, g, or t
  misc_feature (65)..(65): n is a, c, g, or t
ttcctgttggggtgccaggtgggtcccctggggctgacctatcantggtttcccctggggaatanttcctccaaagactaaaactgcctcacctctgttggagagagaaattctttcaagtggcaaagattcccattagatccccttaatgaaattctttaagaaaaaagaaggttcatttgccttaatcaagtcaattctttgtccccagtgaagagcttattgaatacagacagaaaccaagtcctttgatattgaacctctcttccagatagaccagaaggattttgtacagatgtctaagagtggtcctcagcttccctgaccatatgggcctgcttgcttcccaatcaactaaaccaagccctttctcagcttgaaagctttcagggtaaatgttgtcagcatgtagtttccatttgtgatgtggagacatctgac

SEQ ID NO: 459702 - DNA, 350 bp, Homo Sapiens
  misc_feature (264)..(264): n is a, c, g, or t
ttttttttaaataagtcacagtcctgttgtcaaaactctaatagacagcaaagagggtctgtaccgtagacttcacagttttcagtttttaatgattgccagtggaggggcttcttcagcacagagaccccccactgtgtccagggaccccctctgccaggtggaggtgtgtccaggggcttgggaagccgagacgggcactccctctgccggccggcagcgtggccctgagcatggcgagggggtctgtctctgccgatgctncttccgcggcactgactctgcgccgtgtcacatggtttttgaatcacactgcagctgctttccatttttatatatatataaatata

SEQ ID NO: 459703 - DNA, 487 bp, Homo Sapiens
  misc_feature (334)..(360): n is a, c, g, or t
  misc_feature (375)..(435): n is a, c, g, or t
ttttttttcagaataacatattcattgattcaaagtgcaaatattttctgaacatcttctatgtgtaggcattttggcaggtggtagaaataggcccttacatggaaatggttcctgcccttccacagctcatagtctagttagggggacaggcattaaaggaatattcgttctcccaaaaaactctgataaattataggaaagaaaatagtgtgtgttatggaagcctgtaaatgtggtaccagattcaaggtggagtagggattatgctattttgcagtaatctatttatagatatttacagatataaatccatttaccaatataaacagannnnnnnnnnnnnnnnnnnnnnnnnnnctagagagggtctcnnnnnnnnnnnnnnnnnnnnnnnnnnnnnnnnnnnnnnnnnnnnnnnnnnnnnnnnnnnnntgggctcaatcaatcctcccacatcagccttcagggtagctaggaccacagg

SEQ ID NO: 459704 - DNA, 337 bp, Homo Sapiens
  misc_feature (27)..(27): n is a, c, g, or t
gccttgggaagagggtacctacctagnttttccccaattttccttaaattccttcccctccttttccatccctccctaggcccacccataagcatttatattttcccagtgttatacatggaaccagtttgtttttcctttgatcccaggttacttttagtatttgagacatcataccattaatccattgtagtaggattaaaatgtacacacaactcaaatgtgcaacaaaagcatgtgttacctgctattgtcagttcatattgcactcaaaccttgcattatcccttattatgaagaaaaattaatagccaattaaagtaactcagtgtcttcc

SEQ ID NO: 459705 - DNA, 800 bp, Homo Sapiens
  misc_feature (751)..(751): n is a, c, g, or t
  misc_feature (778)..(778): n is a, c, g, or t
  misc_feature (785)..(785): n is a, c, g, or t
tgctatgaaaacaatgtacttttattaattaaaagtcaaaaacaacaaaagggaaatttcacaacctttgtttgcaactatataatctttatatagaaaaactataaagtgacagtctgatctggaaagcagctcaacaataaatctaatccttacattaaaagtaagtaaattatagaatcagttcacccaaaagaaattgtcttgctgtagaatattttagcccaactgatttcaactatattattctcatttctgacaaactgtctttcctgatatttcaaatcaccagagatgtaacagacaagaaccccgttgaaagtaaaagaataaaacacaaatactccaagcacaatcacatgtgacatgatgagtgcatttaatctacaatctacaaaactatacaaattaccaattatacatataatccatttacattgaagctccatgaggtggtactgaataaacactgaggcatcaaattttcaacaatggaacaaggctcacggaacagcagcacattcccaccttttagtctagcatcacaacacttcccctgggatttgtacttatttatatattatctaagtcctaggaagttggtaacaaaaattttaagtcaaaaggataatgaattaaacactccctaaaatctattctaaaacatgcgtgtgaaatatggaagagttcaggcactttgtaaatgtgagattttacagtcacgtgttccttttaaacttgtactagtatncttcactaggtatctggcacattttcngttattngggttttgccctaaa

SEQ ID NO: 459706 - DNA, 362 bp, Homo Sapiens
  misc_feature (326)..(326): n is a, c, g, or t
atgtttagtttaagaattttattttaaaggaatttctgtggcataacataaggtttatggtacttttactaaaagtcacttataatgaccaaattataacaatttttgcaataagctctcattaaattttcctaaaagtagaaaaagtacacattatataccattttgcacttaattacttctttaaaatctcaaaataattcagtgtaaaatgttagtttcaaagacaatttatgggaaattacaaaggcaactacaaagttcttcataataaatcccgggtaaaggtaactttttacgggttggaaggtttttccaaaatgccncagggggggtttttaaataccgtttgggccctctgg

SEQ ID NO: 459707 - DNA, 395 bp, Homo Sapiens
  misc_feature (14)..(14): n is a, c, g, or t
  misc_feature (48)..(48): n is a, c, g, or t
gttaccaaatattngaaacctggcaaatgtaatttaaataataagggnccttattttttggccctgtaatcctttccccaacttttcctaaaaaccctatatttttttcctacaatagccttttcccatcctgtttattcctaaatgcagttgccatattttgtgtcctgaaatttcctttagatgcctgaaaaaggatgatcgacaagtgaattatctaataatatttgaaaatatttctttgagtaacaggacttcttagacttaacatgtatattttgtatcagggtatattatctttctgcatgtggatacatacacagatacatacataaatatacataaatatatgtacttgaacacataaaatatatgtacttgccttttaaaaaaaa

SEQ ID NO: 459708 - DNA, 339 bp, Homo Sapiens
gtgtttgcagctccacaatgaggcctttgagacggacggcggttaaccccagcctccactgctaccccccagcccgggacttgaaagggcatgagaactgggcagcctttttcgtgccaagatgcagctggagggcatcggaagtggggtgaccctgccacaggactcccactgtggttcctcactggatgtgcctgtcggggcttcgtgggaagatgaggcacagccgagctgcaaaaagtcaactttttgatgtgttatggtcatgggggagataaattagcctcgggatgatctgtgattagatgacatcctacagctaatcatatctcgattttg

SEQ ID NO: 459709 - DNA, 320 bp, Homo Sapiens
  misc_feature (196)..(197): n is a, c, g, or t
  misc_feature (270)..(270): n is a, c, g, or t
ctgaaatttgtatcaattgttggttccctgaagattgtgctggacagagtatgccataaattggtatgtttggggtgatcttttttagttttgaaaagcatttgactggacctaaagttataattattttcaagagtattgactgtcattcagttgtctattaatggaattcccagataaattttgcataatattnnaatacggcaaaataaagttagtcaggtcctgaatgtgagaaaatacaacatactttccagaagatcgggcttnttttcctcaagatggtgacctgcttctgttacacattcttgtctttcact

SEQ ID NO: 459710 - DNA, 232 bp, Homo Sapiens
  misc_feature (175)..(175): n is a, c, g, or t
ggaaatgttcaagtttccttttattatttcaaaaccaatggtcaatgaaaatcctcaagtttctgttttaatgtacaatctgttatcctagctttagtttcacataaataatcaatgccatataatatttataaaatatacactccaaggtacatgaaaaaaatgtttatcagancacataactaatagggatgtgttggttctgtaacccttggggctagtctatgcaaaa

SEQ ID NO: 459711 - DNA, 493 bp, Homo Sapiens
  misc_feature (55)..(55): n is a, c, g, or t
  misc_feature (57)..(57): n is a, c, g, or t
  misc_feature (144)..(144): n is a, c, g, or t
  misc_feature (353)..(353): n is a, c, g, or t
tgttgaaaggattaaatggagaatgggtgtaaaacccttagtgcagtgccgtgcnancacagtagatgccgaacgtgtgatgttggcactacacaatgtgtaatcccaatcaggcagagctaggcaggcaaatctaatccaggntctttgtaaggggactgagaaccagagactggagaaagccagtgtaaacaccatgagcaaaggagcaagagaaggggcattgtgtaagtaggagatggagcttgaacttactaagtggatcagggtagaagaatccagtcaggaccaagggaggagagtccagggaaaatgccatgagcagctctgttagcatgaccttgttggggctnggtttaaagtagggtctgccaccagtcatgtgacagaaaggtacctcatgcacttcctccttcccccagaaatcagcctccaggagtgaggaatgagcccagaatgagagtttagagtgctccagagcctttgttagagg

SEQ ID NO: 459712 - DNA, 454 bp, Homo Sapiens
  misc_feature (420)..(420): n is a, c, g, or t
aggaagcctcagctggagaaggacacaaagccgaaagagcccaggtatactcccgtgagcatctacgaggaaaagctgctgctcaagaggctggaagcttgtcccggtgctgttgccatgactccggaagctcggagactgaaacgcaaactgattgtcagacaagcgaaaagggataggggattaccactttttgacttggatcaagttgttaatgctgctcttttgttagttgacgggatttatggagccaaagaaggaggaatttccagacttccagctggacaagccacgtacagaaccacctgtcaggacttcagaatccttgaccgataccagacttcctttgccgtccaggaagggatttcgacaccagaccaccaagtttttgtatcgcttggtaggatcagaagatatggntgtggaccagagtattgtcagcccttatacctct

SEQ ID NO: 459713 - DNA, 632 bp, Homo Sapiens
  misc_feature (37)..(37): n is a, c, g, or t
  misc_feature (45)..(45): n is a, c, g, or t
  misc_feature (75)..(75): n is a, c, g, or t
  misc_feature (91)..(91): n is a, c, g, or t
  misc_feature (99)..(99): n is a, c, g, or t
  misc_feature (122)..(122): n is a, c, g, or t
  misc_feature (127)..(127): n is a, c, g, or t
  misc_feature (145)..(145): n is a, c, g, or t
  misc_feature (207)..(207): n is a, c, g, or t
gaaatttcccctttgcattgaaaacagaaagggcccnggaccctnccctagatatcccaaggcaatgttaaactnaaaccctgtaatcggnatcccatnggtagcattctcaaaaccccctnaaggnaagtcaaaaatggttccnagaactgccctttttaagccataaatattgccaaaattaccaaaatgttttcaagctgtttncccccaggcccacacttgcacagcccggagaatagttccaggtgctcccgggttcgggatgctcggacacccaaaaattatgaatgaagtagacccaaaaccctggaataacttggcccaagtaacaaaacccaggccttacagcttccagacccagattgcaggcctcctgtattagatatttggcaaacagttctgctcttccaggggcacatggaggtatgcagatcccagtatgaccaatgacaagggtcatgaaacacattagatctggagaattgcaggttccactctgactttgaccatgaacagcactggtctttttctctctttttattttatgtggcaacaaggcatgtaaagggttttcacttaaaaggtcaggacagtttggactcagatatctgggaccttccatcaccatg

SEQ ID NO: 459714 - DNA, 430 bp, Homo Sapiens
aattatgtctttcccctcccaaacttgatatatgaagtaagagacaggggcttttgccctaagactttccagggagaaatttaattgaggaagtatctaataataaacattattgctaattttatattttcagtccgtatctcaatcttatttcctgaagatgaagaatttttagttaggaaagacagtgatgttatttaaaataaaaaggataaaacaggcacatctgggaaacccagactccctaatgatgtggaacaccttctccaaaatgacctataaatccattgtagcattactcaaaccctgcttagtgtccccttggattgctgcagtccatacaatttcaggtcatagatcagtgtatattccagatattgagggtgcaatcagattttcaagttcataccctgtgttcactgcctagcac

SEQ ID NO: 459715 - DNA, 397 bp, Homo Sapiens
  misc_feature (32)..(32): n is a, c, g, or t
  misc_feature (54)..(54): n is a, c, g, or t
  misc_feature (68)..(69): n is a, c, g, or t
tacagtcatccactggtcagaagctgacatgncctccttcaacttcctggttcnaagtcctctgttanntctgtttcatcttcagaagatgccaagctttgttctgcaagctgaccttcagatagtaaagacacatcatcttttccttgctgcattttctcagtattctcttttacctcatctacactgccttcttgtgaaacatcactctgatgtggcatgatatccacgaaagataccttcttatctacaggtgttaaacgttgtcttggtttaggtcttggtgctaaaactagtgtgctaacagaggatgctggaggaagtctttgaacaacttctggctcttcgctgcgaatgaaatttcctaagtcttcagttgttattgatccacttggtg

SEQ ID NO: 459716 - DNA, 370 bp, Homo Sapiens
  misc_feature (24)..(24): n is a, c, g, or t
  misc_feature (34)..(34): n is a, c, g, or t
tttcaaaacaaactgcaagatgangctgttttgnaggcaacaaaaaaagctcaaggtaaaagggttgaagcccgaatgttcagctctgggagagctggtcacagggctgagcttggggtagcatggctgggcccaggtgaggggagggcaatgcaggcacccactatggctgtaccttccaccctgtgagggcagctggtggggtagcaccaggaggcctggtttgctgtccttgctttgccctgtgctcccaggcaagtcacccctctcttccatttagccttgatatccccctctgcagcaggggtgctggcactagttcctggggaagtcacctgcatggtgtgtgcatgcatgcgtgtgtgtgtgt

SEQ ID NO: 459717 - DNA, 396 bp, Homo Sapiens
aagtttataaaagtttgattactggaaaagttcgatctaattcagaaatttcaggccaaatgaaacagccccttcaagcaaacatgccttcaatctctcgaggcaggacaatgattcatattccaggagttcgaaatagctcctcaagtacaagtcctgtttctaaaaaaggcccaccccttaagactccagcctccaaaagccctagtgaaggtcaaacagccaccacttctcctagaggagccaagccatctgtgaaatcagaattaagccctgttgccaggcagacatcccaaataggtgggtcaagtaaagcaccttctagatcaggatctagagattcgaccccttcaagacctgcccagcaaccattaagtagacctatacagtctcctg

SEQ ID NO: 459718 - DNA, 432 bp, Homo Sapiens
tttccattaaagccctacttcaagaaaagtcacttcctggaattttacaactcaaaagtgacttacctgtaaagagtttaaaaattattttaaatacatagccttgttaaaccaaaattgtagataaaaacggaacagtgaatgaatcaacacattccatatggcgtgaggcaatgtgaagttcatagacactgggttaagtgttggttaggcaatgtgtatactgcttttggcaatgtactgttttttgcaagttactttcctcagtaagatacattttaacaatatttcttaaactcttgattagaagaaaaatattccaaaagtagctatcaatgcaaatgagcgtttatttcaaatagttttccaatcttttaaatcatttcatcaaactttccctgtggtgactaccagaagattggtggtctagcc

SEQ ID NO: 459719 - DNA, 167 bp, Homo Sapiens
acattgaaactgttgattgaaacaggattcctttaaagtcagcctcactttttctcaggcctgaatcttagaacatattgtcagatattcagctgtgctctcgcctccaacccacttttattcctaaatgtgttcgtttatacatggagtgtttgctgttgtgattt

SEQ ID NO: 459720 - DNA, 394 bp, Homo Sapiens
catcacagagttaaaatatttaatgacaaaattagggtttgttgtaatagtgaatcaatagagcaggtgttacttatctctgaattaaacaaaaattatatttgacatctcagagaacttctgaagaataactgtatgacagacatcagtagtgtcacaatttctaaaattaagagctaaacctatctttaatgccccttatttagagcatcctgtaaataattttaaatagatgcacaacctttgctagccacaaaagtagtattaaaacagttttcactgtaacttaagtctaacacgtaatctgaacttcttcagaggcttggaaaaaagggtaactactgatccatgttacattttacaaatacattcttttaatatggaaacattaacc

SEQ ID NO: 459721 - DNA, 320 bp, Homo Sapiens
cagaacacaagatgttctggtcctgactttcccctgaataaaatctgcactaactaacaccgaggcatagccaaacctcacctccagatcaaattggctgaaataggcagggttccaatttgtgatggtcatttatttttaatggcctttctattccctgaaatgtagacaaatttgccctttgctgcctcattgcagtggaagagcctcatacctgtgtgcagagctgatgatgaaaggcatctatgtgtgtatgtgtgttgtagataaatagtgtattaactatgtgtaattccttatttcaaagtagcattttatgg

SEQ ID NO: 459722 - DNA, 445 bp, Homo Sapiens
  misc_feature (16)..(16): n is a, c, g, or t
  misc_feature (36)..(36): n is a, c, g, or t
  misc_feature (48)..(48): n is a, c, g, or t
  misc_feature (66)..(66): n is a, c, g, or t
  misc_feature (107)..(107): n is a, c, g, or t
  misc_feature (120)..(120): n is a, c, g, or t
  misc_feature (126)..(126): n is a, c, g, or t
  misc_feature (135)..(135): n is a, c, g, or t
  misc_feature (159)..(159): n is a, c, g, or t
  misc_feature (187)..(187): n is a, c, g, or t
  misc_feature (434)..(434): n is a, c, g, or t
attaccccatggaaanccgtaagggggtttggggtngctacccattanttcccattttaccaaatngggaaacggaggctgggagacattcctttaacttgccccanggtcctaaacccngttacnggcagaacnggtatttgaacctaccttaaaccngattcctagagcctgtgctatataaacncttacccactatgctatgctattcattagtatccatttaacaattactactattgcaatagctgcaattatcactcctatagtacaggggaacctatcaaagaaacactcagctttcacttatctatttctgaaaacattttttattaaagtataaggtacatttcactgatttatttttataactgtcaatttagttaagtatttttattatatggtgtaagaaaaatgtttgaaatgtcttctgnaattaaccgga

SEQ ID NO: 459723 - DNA, 471 bp, Homo Sapiens
  misc_feature (445)..(445): n is a, c, g, or t
gaaacgtcatttttatttctctcccttccctctctccattggttttctcttggaagtcccaggcacctatgtctctgacaccaactgttctcttatggccattagtgggtttcaaacagctcatttgatcccttcttataaacctggagtgagcgtaaggacctcagcatgctgcagaatgagagtttgaggcagggtgtgctgtggcttgtactgatgagggacgtgccaatattcttactcttcatttccgataccctgaaagtcttttccgcttctcattttattttgcagtgtaggacgttgacctgtgtatctacagccttcacttaaaaggacctgctggcatttgggacacgggcactgagggcagggaaaaggcatatgggtagggtgggagatgtttcggcatttccctcctttttcatggggggacagggagctngggagacaaggattttgtgttgcagt

SEQ ID NO: 459724 - DNA, 511 bp, Homo Sapiens
  misc_feature (24)..(24): n is a, c, g, or t
ttccaacatttaaacaagttttcntaaacttgtttaaaggaatgttaagcaagtcaaacattcccttccccatctccatattacccaactccactccccagcactcaagttttaatggatatgttttggtaagtgccttaaatagatgattcatctctaaagatgagtagagttcatcagctgtatcatatcatgaaaagcacaaaaagtcagctgaactagcttttccgcatcagtctcgggacaggatttccaggctgaacaggccacaacaaacctgtcatctctgatatggtagaaaaatccataaccattgtgtaccatgggaactaccactccctggactcgtaaatagccaaccagacttgttgagagaacaaaatttccacctcctccgcttttggaaaaaagtgggtccgtaaagagttctggaacaggaagaccttcctcttttgctatgagtaagagacctaaaaggtgacgatcaaatccttttccagctgaacaatct

SEQ ID NO: 459725 - DNA, 475 bp, Homo Sapiens
gaactatgaaatagtttttattatttattctgagattcagggaatccaagaagatagtgggaaactgacaaggtgagttaacaatcttgttcaaaacttgatagtacatcactctcatttgctgtggcaattctttatattttgagaacataattataataaaaatatgtaaatgaagtcaacagaaagttgaggtggaacagtacatcctggggttagccttatcttgagggatagttctcagccatgttagggaagaaattgggctgtcagtaaggaacagtttcatgaagaggaagaatctcacctgtgtataaaagactagtttgagtttgtgcactgaaaaggggctcgtgggtagcagtacctcataaattctcctactgactttgatcagtagctgtgttagggtacaaatcacaccattgcatgtccccatgttctctctgggtttatccctggcctggggttttgg

SEQ ID NO: 459726 - DNA, 530 bp, Homo Sapiens
  misc_feature (14)..(14): n is a, c, g, or t
  misc_feature (23)..(23): n is a, c, g, or t
aaaatagttacccngtgggtaangaaaaactttggtaatgtacaaaaatgggaaagggttttttacctgtttaaagtcactttgtgtttataacaaaattacttttagctgaggaaacaaaggtggacaaagatttctgttggtggctgagagtcaaagcaggccaatccacaccattacctgaaatatttttcaggctaatttataactttatggatttcctcgatacaagtttattagtttattctccatatacaagtttattctcccagaatagcagcaaataaaacttgaattggatgtacagctcctaataaccttgatgtcagagttgtcacttggttggaattattatgatcccccaatttaaattttcttgataaactcagcgttgtttgttttcagtgacaagaaaacatacatggaaaggggacccaagacagttcaccaagatagttcacagccctttgcaggatatgcctttggtgggtgggagcacctagattttagaggactataaaacgccatgt

SEQ ID NO: 459727 - DNA, 362 bp, Homo Sapiens
  misc_feature (44)..(44): n is a, c, g, or t
  misc_feature (55)..(55): n is a, c, g, or t
  misc_feature (103)..(103): n is a, c, g, or t
cccccaaattaaatccccagcccttagttgaacattttgatccnagttgaatatnaagaccccaagaagaacatcaagtcccccaggtggatatcagcttccnaagttgacatcaggccacaagtggacactggacttgcaggtgtacatcaggcctcagatggacacccaggccccaggtgtacatcaggctcaggtggaaatcaaggcacgggtaacaccaaggcacaggtggttacctaggcttcaggtagacatcagaccccaggtggacacctgggtctccggtggtcatcaggccctaggtggaaactcaggtcccaggtgcacatcacgttccaagtggacacccaggccccatg

SEQ ID NO: 459728 - DNA, 348 bp, Homo Sapiens
  misc_feature (266)..(266): n is a, c, g, or t
cttttccaccagggtggtggggaaaagagtgcttctttgccccaaatgctggtttcataaaacctaaagatgtcacatggaaacacaccattcccccaatccccctcaaaaaactacttgcacttaaatgaaagagtaaagctgtaggactttactgagcagtgtcctgtggggtccttgcactgccatgctcttgaggggctcgaggtgtatgaattccccagcattacttctccttagaggtttcagatgagcagtatgagctnccaaactcatgctagacccaagtatttcatgaaagaacaatccttgaatgactttatacagcaaagctatatttcactgtgt

SEQ ID NO: 459729 - DNA, 251 bp, Homo Sapiens
agcatgagctaccatgcccagccacaaatctcaattaagagctggattttattttggaaaagccgtcaatactcaatcaagtaaagcctttgtcaaaatgacgtggggcttaacaaaagagatataattatttgtatagcacatagactgtttcacattatatcattaggaaaccaactttgggtaaagttttactacacgagtccatctactctgggtcattttgagggctctctcccctttctaccaca

SEQ ID NO: 459730 - DNA, 621 bp, Homo Sapiens
  misc_feature (550)..(550): n is a, c, g, or t
  misc_feature (605)..(605): n is a, c, g, or t
tttcaggaatattttgtattttcaaagtatttaggaattctttaattagaaaaataaaggcaatgggattatctatcaggttctaaaagtacccatgaattaaatcacttacatctcccatttaaaacaaaaccttaaatcacattgctgttaagctttcatacagtaagaaataagaccaagctatgctggagtacaaaaacctgaaattctgagcatgaaaataatttattgattagacatcttgcttattcaagcattaggcctactggagatagaattaacacagctcatggaaaaggaaaaaaattccattcagcacctgcttcctttcaaatttcctggggacatggtttatgcattttgtactatagactcaccctaaagcatccccacgtgcttgatgttgattaacttgaacaggatatgagaaactttgtgtacactcaacttggcaaatatcattagcgatgcgacttttggaaacattcttaggcacaggaaatagcactcctgcagtgaaagtccttgataatcaaaggaaaagganttccattaaatataattttacaaaatttggaaaggaaatatttgcctttttgccnacagactggttctaca

SEQ ID NO: 459731 - DNA, 1265 bp, Homo Sapiens
  misc_feature (388)..(388): n is a, c, g, or t
cccatagggaagaaattgtttgcgggccagactggtgtgccaggaatgtaatggaatatggcataaggagaacggggtaggtgctctcataagtgggttttctttagtgtttcccttctgtccttccaaagggcttacttcctcctgtcctcggtgttacttggcgctcgccctgcctggacaatcataaacccttttgctcagcgattgcttcccagcagcagcagcagcgccccctgagaaatgttcactcttcaatgttccaccgaccctatggtggggggatcgctgctttccacttatttcaaaatcatggtgtgaatggaaaggctttgtttgccattatcttctgtttgtacaatgagccacaagtgagcaccgccttggncgcgcacccaccttgcccgggccttctgttcccctccagccgcgctccaccggcgccctcgccccgctcgcggctgctgggtggcttgctgcttcgttctggtagacttgcgattttgccttgtcctccctctgggttcgccggatcctgtgttttccctgtcccagaatgacccattcgggcttcggtgtttggcttcagaacgaccactgcccagccccggggactccaggtcccagcacctcccgtcccacccctcccgccagtctccgcagtaaaggaagacaatgactaggggcctccgtgtgttggctttaatgtacacagcttataacaaggccacactactcaaacattcttagttttttttaaaaaaaaggaaatacagagatagatgtaaatgaagcattggactgagttgtggttgcttttggggtgagtttgaatgaggggatggctggaggctgttgaggccacgtcttcattttagccttaaggaagaatttctttggtttgtgacaaaggatcaaggaaacctttcagctgggtgagtggtcggcactctaaccctttctaaagcttggtgtgacccaatcaggcggcccaaactaggattaaccaaaccaaacaaggcctgtgaattaagacaatctgctttggggaagccacttgccccaaatacttaatccctgaaagagccgcttgtgtgcccgaagcattgtcctcacacaacattcctttctttacacttcttacttctgatttgattgaattgtttgttcctataaggcaaagtggaaatgtagtcaccggttttactagaaaatagttctatatagtttgcttttgttttggaaaatattctaagaaaagactt

SEQ ID NO: 459732 - DNA, 562 bp, Homo Sapiens
  misc_feature (25)..(25): n is a, c, g, or t
  misc_feature (32)..(32): n is a, c, g, or t
  misc_feature (60)..(60): n is a, c, g, or t
  misc_feature (69)..(69): n is a, c, g, or t
  misc_feature (85)..(85): n is a, c, g, or t
  misc_feature (98)..(98): n is a, c, g, or t
cctgccttccaacctccccaagtcnggctctnaaaaaattcccccctaatggggtcaagncatcctggnccctcagtagtgcccnattctgtggcaanggccctgccccctacctcctacggggggtataaggaaacatgaaaaacatacccaaccctgccagagatcctaaaagacctacgggcaaattttgcataatgcaactgaagttatgaccttcgtgcaaataaaacttttcgaagacgtgaatcctacttaacaggtattcagggaactcactatttaaaatgacactgattaatcactaaatgagtcttacactgaataattggttaagtcggctgaactcagtgtctgatggcttaaatacagagcgaggggcgaaagcttccacaaatttacgctgtgcacctaacattcgccacgacagaagacttcttgctctagtgtatttattactgtagcattaaaggacttgaaggcaaagctagctattctagttatcagttagagcgggacctggtccaatattgtattttctaggacttgatgtacacaaatc

SEQ ID NO: 459733 - DNA, 550 bp, Homo Sapiens
  misc_feature (540)..(540): n is a, c, g, or t
ggccccaacttcaaaacagcctagtgcacagaagaggaaaaataatcctaaccttcctgttaagtcattccccaacagtttttaagccttaaatatccttgcaatttgcgacatcgtttcagtgaccccaacagtgagagattaaccaaaatttcataactgccctgccctcctcccctcatgcatcttgaggggagggggagagaacaagaaggtcaaagaacaaatggaaacaaaatctgtgttttgcactctttctctgcacttgagaaagaaaaggaggcacataaatctgtataatactaaaccaaatctctttaattccagtcagcttttatcattcagccactgagtctgtgtgtggaaaaattcatgctaattccccctagcaacagactcagcctatcaggagactttatgtaccatgcagctgccagccagagagaataactctaagtaggtcaggcctgtatttctaaaaatgctacggtctagtaaccccactgtcccgtctgtctgccctgccccgataataacctnaattgcttgg

SEQ ID NO: 459734 - DNA, 446 bp, Homo Sapiens
ttttttttctagctataagcatgcaataataaatctcaaacactgatttggagtacagtagcattttgtcttttatgtaaatatctctatatctgtttggaatttcaaaagtctgatctctagggctgacatgagaactccatgtcacctcctcagatctttaatctggaagtgacaaaaggtaacacagtgcacggacctttgagctatcatacttttgccttctgctcatgaggggtgtatcaatttccactcccacaccctcactgttatgtggaccaaaatgtctggtatactatttggcgattaaaatatttaagcccagttttcaggtactacatctgtaactagtgaatactctgttgattagaaagttaatttaccactcaaaatggctaacttgaatggaggaagtagtaaactcttctattaggatttgggccagt

SEQ ID NO: 459735 - DNA, 398 bp, Homo Sapiens
  misc_feature (16)..(16): n is a, c, g, or t
  misc_feature (72)..(72): n is a, c, g, or t
  misc_feature (219)..(219): n is a, c, g, or t
cccttcactctccttnggatgtgtacggttagggtgacgatgtttgaaaatcaacacataactgaaatcccnggatgaaacagtaagcagaactacttagaagtgaatacagaaatgatctatttcaagaggaaggttttccaaaattaagagtacttgagtagtctcaataggagtgtatttgtagacagcagtttccctatattatttggagtcaantcttacgtaatttgttgtttatttcttcagtgaacattgtctttttctggcagctgaaactgcacacaactgatacacatatttaatttgtattcctttgtagtaatacattttaaccatgatttatgtttgtgaatttactggatgttttctttctgaattaaagattgtcaagttcc

SEQ ID NO: 459736 - DNA, 201 bp, Homo Sapiens
agacagcctttattcaagtaactgaataaacaaaagaattagagagtgtgatgagtttgaataaaaaatatagttcataaaaaccagaaatgtgatagagcatagtggctggaagaaagttacccaagtggcttgggtagtcaatgaagttgactccaacatgcagtagtacttggactgaggccagaaaaattagaaaga

SEQ ID NO: 459737 - DNA, 400 bp, Homo Sapiens
  misc_feature (361)..(361): n is a, c, g, or t
atgagccaccaagtactagttgtctaccctagtgattgcgcggcttactgggaactgcaactcactgttgctgcccagcttcgtgacagatactgtactgcatatcgccagcctgggaaaagatcaaaacccaatattcaaagtatagttttgactgaatgtgtgtccctttcataccatcgtaaagtgcataaattgtaagttgaagaccatctatatattattgtatgtctttttttctttcttaggtcagttcccgctatgttttccagggctgggagtggggcagtgggctattcacaggatcagtgatcattggcacactacagcctccaactccgggggttcagggaattttgcntcaggccttgggttagttaggggttcaggggcacctttt

SEQ ID NO: 459738 - DNA, 394 bp, Homo Sapiens
  misc_feature (28)..(28): n is a, c, g, or t
  misc_feature (60)..(60): n is a, c, g, or t
  misc_feature (71)..(71): n is a, c, g, or t
  misc_feature (77)..(77): n is a, c, g, or t
  misc_feature (123)..(123): n is a, c, g, or t
  misc_feature (149)..(149): n is a, c, g, or t
gggcctcccccctacataaggaaaaaangccacaaatatatttggcccctcagaaaaccngttaaaaagcngggganccccacacagtaaaaagagtataaagattcctataaatgggagagntccaagaaaacctctcctcaaagtgntccacaaggatacatatgccccattagaagaaaagtaagaatatacatattattaatcatatcagagaataaaaaagttaagattgatataatatatttatattgaatgactactttaaaatagagcaacttatttgccttatttctcaaattccttgggcaaaagtcacttaaattctgaagtaaaaaacaaatgtaaatttcttgtactgtactaatatcagatgattatgatttcaagtccc

SEQ ID NO: 459739 - DNA, 591 bp, Homo Sapiens
  misc_feature (23)..(23): n is a, c, g, or t
  misc_feature (74)..(74): n is a, c, g, or t
  misc_feature (92)..(92): n is a, c, g, or t
  misc_feature (107)..(107): n is a, c, g, or t
  misc_feature (130)..(130): n is a, c, g, or t
  misc_feature (182)..(182): n is a, c, g, or t
  misc_feature (207)..(207): n is a, c, g, or t
  misc_feature (238)..(238): n is a, c, g, or t
cgtaagatgaaaaatcagggtanctgctggtgaatttaaacactgccctaattacatatggttaaggactaacnaaaaggtttaacggtcangccatgaattaggantaaaatgccacaaaaggctggtncaggtggtaatacaaagtcctaatttaaactaattaaaaggaaagccaaggnaagagggttaatcttctgctgtgcnaggcagttgccactggtctctcattctcctnctgcttctcgcagtccccaagagcagccaaaataataaaccattccaaatctgcttccaagctgctactgagcagaaaacatgggctcagaaggacaaagcattctcaggacagctctgtctcttggcagagggtgttgccacatcagcccctgaccactcacaggtgacgcagtggcctgtctcctgcagcactgggtggtctgtcctgtccactgttacaaagagaggacacaacagctgatgcctggaggaccctgaacaggatcttgaaaagaatcttcagggagactaaatgacacatatgctattcacttcatatatgtgactctacagctatttacttatatattt

SEQ ID NO: 459740 - DNA, 372 bp, Homo Sapiens
ggcaagaatatggattttctaaaagttcaccaagagactctgatgaaaagccaggcttggaaaccacggggttataacctttctgtttccttgagtttaagaacgtacagcttgacatatgttgagctgaattttgaacagtaaagtagagtcaactaggaccagggtatctttgaaggaaacaggaaaggagaaagagtgtgaataaatgagttaccccatccctgcgacaacccaggcaccactagggtacaaagactccttgtccaggcaacgatgtgaacccatggggaccctgctgccctctgacaagggaaccctaggatatatgtcaactttctgcaaaccaccagcataaattttctttaaaac

SEQ ID NO: 459741 - DNA, 483 bp, Homo Sapiens
ttttgaccttgaagcaactagaccctgagttttttgtttgctttaaataaacttgttcagatggcactcattttatatccttgcaaatgtgtttcttggtcttagaaggactttatatctatctccattatttttcttgttggttgtgatccattatatcaacttatatagatctttcagttctttcaatttgatcaccgattaaattatctcgctcaatgtcattctcagatcttaatacatgtgatgcctctctttgtccaaataattgataagagctttgttaaaggtaggaccaaggacagaatctttgagcacttgtaggggaattaatcaattaatactcctgggctacagtttttcaaccaaatatgaacacacctgattgtattatcattcagtcttgtctataagggcatgaaaaatttggtcaaatgcctttctggccacagcattttcctgattaatccagtaagtttattc

SEQ ID NO: 459742 - DNA, 330 bp, Homo Sapiens
ctctcacaaatgctttccaaattttttatatcagtaagtcttgtttctacaaataaattacaaacgtttcatgaagagaaatgcatcttctatttctccaagctccatgcacacatgtcagatggataatatatactttcaattctaaattaagaaataaaattacagtgaggtaaaagaaaggagagaaactgctaataactttaagactttcaagtagacagctgctgtgcaagtaacacacaggagcaggccagagcttgaggtgaaacaaaatgagggaacctgatggtcaggaagagagcttcagcttcaatccaccacttctgg

SEQ ID NO: 459743 - DNA, 470 bp, Homo Sapiens
  misc_feature (80)..(80): n is a, c, g, or t
  misc_feature (97)..(97): n is a, c, g, or t
ccggcttctcgggccctctgtttcttgccccttttgtggttacttcccccgcttgacccctcgccccaacccttaatagncagtgcccgggaaacancaaactcccctccctgcctacctgaagccccgctgtgctgggagcagggaatgcgggacccagagtccctgtcaagattatggccatgcgaagccagaagcaggacctcgggggcccgggttcagcagaggctcagcagggccccagccttgcctctctgggaaggacctgagtcagggctccagggagcgtcgaacggcagcagctgacccaggagcccaacgtgcctgaagagtcagccacggccgaccagcaggacttgatcctccgtgtgacacgtgactggggctggaggggcccaggagaccaagaaaactcaaaattaagggatttgggagggaagagggagcctggacatagggtccggtcaccc

SEQ ID NO: 459744 - DNA, 426 bp, Homo Sapiens
ttttaacaagatgggaaaattacttggccccaagagccccattgccttgaagacggagcccaggattcaaactccaggtctgcttgatgttagagctaagtgtaccacacacctgcccagcgacgtagtgtgagtgacattaggcaatctagaaacactctatactatggatgatgacacaaagcctagaagcatgaagcaacttgctgggatgaacacgtgtggataatggctgagctgagactggtgtgctgtcatttccactccaccatccctgcttccagaatccaggcatttttcctctagctagaaatatttcccagagaagttaatggacttggtataactttatcaatgtgttttgccaataggcattttaaagtcttgtcattccccagccatactaaatgatgtctttgagctctg

SEQ ID NO: 459745 - DNA, 133 bp, Homo Sapiens
ttctgaagttacgttttgtgaagagcaaagcacttggaatctctgttttaaagcttcaagtgttaaaaatgctacaatagttttttatctataaaattatctaaagaatcattgtctttcagagactcatagg

SEQ ID NO: 459746 - DNA, 472 bp, Homo Sapiens
  misc_feature (38)..(38): n is a, c, g, or t
  misc_feature (58)..(58): n is a, c, g, or t
gccttcacaggcctcggtcataaataatactactttcntcctaaagttactaggactnggtactgtctgaaatcattgttcataccttaaactgatttaagaaacaaagcaattctgtttgcattcaaccaagtaaaagcatttccttgtcaatatagtaagtcagataattttgttaacatgtccaattatttaaattcctttaaaatcttcattttgaaatgatttgccagattttaaaaacaaaggtaatttttattctaggtttttatcatgaaaaatgtatctatgtccataaagaaagcacaaaagaagtaagtattctattataaataagagagtatcttggattgtttctgttgaatatggagtcacattaaataaatgtattaataaagttgcataaaacacatttcttttgcaatatcagatctatggttcacattctgacagataatagcatatgaggagc

SEQ ID NO: 459747 - DNA, 424 bp, Homo Sapiens
  misc_feature (29)..(29): n is a, c, g, or t
  misc_feature (42)..(92): n is a, c, g, or t
tggaaccccctgggcccacattacccccnggctggttgaaannnnnnnnnnnnnnnnnnnnnnnnnnnnnnnnnnnnnnnnnnnnnnnnnnngggattacaggtatggagcaactgcgccctagtcaaatgtattatttaaacatacacacatacacacactctaacatggagtctttcgttatgtttataactcttaacttagttgggaatctacaccaagaaagtaatacgaaacacaaaaatattttaagcccaaagatatctttataactgcagaaaatgcacaagtgtattttgacacaccaatgaatattgtttaaatttttagtaatttgaatcaatggaaacagaatcattgctagggaaatcagagatcatttttgtcttttatttgtaattttcaaacttctataatatggatg

SEQ ID NO: 459748 - DNA, 511 bp, Homo Sapiens
  misc_feature (391)..(391): n is a, c, g, or t
  misc_feature (458)..(458): n is a, c, g, or t
ttcatttgttctccatttattaattggaattcttctgtaaggaggagttgtcccttctccccaacttatccatttattcaattttttttgtaaactatggactcatgggcatctattttattctatgagctataattcaatactgtcatcatttagtttcttgctcaagttattctaacttcagccattgggagctccttcagactggctactatgctgtcttgtcatgcccccaccctttctctagcactttcttacattcttacaccaaaagacattacagcctcatcttgtattttccctgcttctgtccagaattagccattattccaaagatcccgagttcctttattgggagaatgatattaggacacaaagatgtggggtactnaagtataacttcgttggctgttgggggtgttaaattggcttctaggggctttcccaagacaggaggntagggaaatggaaaggcatacattattaaccctggcattacacacaggttcca

SEQ ID NO: 459749 - DNA, 411 bp, Homo Sapiens
  misc_feature (20)..(20): n is a, c, g, or t
  misc_feature (159)..(159): n is a, c, g, or t
tgggttgtacacacagaganagcgcacagggtcacagacacacaggagaggggttgggacgtggggatgaggctgtatgccagcagccactggatgctggaggcagctgatggaccctcccaggcccttcaggagccagccccacgaacaccttgagtngtcggcttctggcctcctgagtgtgtctctgtggctgaagcccctgctctgtgtcacctgttctggctgccactggacactcagagcctgtccttgcccttgttctgcacccagtgcccagcttcctctgcggcctgggcatcccaaatgtcccctgctggcctcatactgggccatgggaggaaacgggcagctggcaatgctttcggaccaggctgtctagcagtttcctgaattctgtgcccaggatga

SEQ ID NO: 459750 - DNA, 457 bp, Homo Sapiens
  misc_feature (388)..(388): n is a, c, g, or t
  misc_feature (434)..(434): n is a, c, g, or t
  misc_feature (446)..(446): n is a, c, g, or t
aattttttactgaagaacaaagtgtaaagcaatttaagtggcaaagatctctgagtgctgtgtccagtagtggtggactaagggagtcaatgaccctggcaccaaaaacagatctggacaaaatgtatgaaataatgaaggatcacagtgatgagtcagagggcagagacccaggagaagggtagggatgtggcacttagggtcagtgttttccagaggtgtcagccggtcctgatcaggagcctcggagagctgttgggcagaggtccctggtatgcctcagagactcgagttaggacccagcaggctgcacccagaaagggttcagcagacagctgtcttcgttagggcacagagctgggctcagtgccctgggttggttcagggntgtcagggctgttggaatcctcagccgttagattggggcaaattgntcttcttttggnaagaagttagc

SEQ ID NO: 459751 - DNA, 467 bp, Homo Sapiens
aaattattttcacaaggatgtgatcaagatcaaacctttcttattttaaaagacttccaaaattcccatagtctgtctccaattattgcattatcttttttcccttcacagctacttttaagaatttcttacctcctttttattcctgaccctacttttatctgtttgcagcctgagattatcagtgactttcattttgctaaatcccgttgaattttttcagtacttgcctaacttggctcttgagtagcactaaatatttaattatttcatttttcttatattttcttcctttggtttccatgtcattgtactctggtggttttctgtcttctgtatgggtgccctttcggtcttctttgcagacttgtctgtctctgtctgaacgtaggaatcttggggatttcttaaggatggccattcttaggaacaacacaggatgagtaattaaaatgatatacttttgt

SEQ ID NO: 459752 - DNA, 326 bp, Homo Sapiens
acaagccacagtccccagcccacctaaatccattaattaattaaggttgccaaacggtaatatcctgtcatttctttttaattttgcatctggagtacatttatgaagagtgctttccctcatctactatttgctttgccagtgaaccatcatatgagaggcaggaataaatgcttgattcttttccattacctgccagtttgcaaaataataaattgggtgcactacaatcctccaaaaacgatcaattacatcttattttttaggcatcatttataaactcacagatgaaacatatttggatgagtctcagttttattagggtt

SEQ ID NO: 459753 - DNA, 533 bp, Homo Sapiens
  misc_feature (457)..(457): n is a, c, g, or t
  misc_feature (470)..(470): n is a, c, g, or t
  misc_feature (485)..(485): n is a, c, g, or t
  misc_feature (493)..(493): n is a, c, g, or t
  misc_feature (500)..(500): n is a, c, g, or t
  misc_feature (515)..(515): n is a, c, g, or t
aaaacaactcaaagtttattatttatataaagagattaattggcatcatccttaattagaagggcatattagcaggtatttctgtttctttttgcaacatttcaagcaggctcttttattttaagggtatgtacaagtgtaataattatgactttcctaagatatatattatttcatcaatttacaaataccttagtatgttttcataaattgttcctgtgccagaattatgaagtttacaattttatcatgtcaatattacattatcaaaaagttatcttagggacccatttaaacagccctttttttaaaaaagggcaaacacagtatgtctatgtttatatactcttttcaaatcggccattttcatacataaaaacattgtattttccatatggactaataacacacaggtaaaggtatggcataccctttttcccccgggggggggctttcnctttttcacaaantacctggtttatttnccttattngggcctngggcgggccggggtnccctttttggccccttgg

SEQ ID NO: 459754 - DNA, 575 bp, Homo Sapiens
  misc_feature (427)..(427): n is a, c, g, or t
  misc_feature (436)..(436): n is a, c, g, or t
  misc_feature (467)..(467): n is a, c, g, or t
  misc_feature (489)..(489): n is a, c, g, or t
  misc_feature (507)..(507): n is a, c, g, or t
  misc_feature (540)..(540): n is a, c, g, or t
ttttttttgcctatatttactttgttaatacattacatttattgtttatagaacagaaaatgacatcatccattcttttggctcttcatattctgatgataccataaaatgtaggaacttggatatttttgaaatgaccaggacatggaaccgctttgcctgaaaaaatgtttcaggcacttctcgcttcagagaatgacagtctgcctttaccttccaatgtccttccccatcctgtacatttaaccaggtccttttgttggggagggttatggagtgagaggttcaatgtggaaacttccagcctggctgattgtatgggtgctgtctatgaccgtggggtttttctgtgggccaggcacagtgggtgcccacctgtggaggctgggaagttcattcacctgtttccactgtgggcagttgggcnggggtcgtncattcacatttcatccaccaagtttcccttngggagtgggtcggtcccagctntagggggttttccatttnacaggcccaggagctccatttttgaggccccanttccgccatgagtgggttctttcgggggtaggatc

SEQ ID NO: 459755 - DNA, 364 bp, Homo Sapiens
  misc_feature (258)..(274): n is a, c, g, or t
  misc_feature (334)..(334): n is a, c, g, or t
aataaatgtaacttctattcatatttcattttattcaataggcacattttagaaaatgttgggtaactactaaatccatgcaaagaatatgagaaaactgatttatatttctacacttctattttgtctagtaggccaaattttctttttttagagatggagtgttgctatgttgcccatggtgactcaaactcctgggcttaatcaatcctcctcagtagctgcaagtaaaaatttttattttaaatatgattaaannnnnnnnnnnnnnnnnactctataaacatcttaataaggtgcacagatttcttgggttctattatatcctggaaancatatgcatgctccgtttaactttttcaca

SEQ ID NO: 459756 - DNA, 335 bp, Homo Sapiens
ttccctcctgctgcccctttctcatcaaagccccagaaaggcaggcacatctggcgcagtccctgcccctgaccgcagctgccctctggagagctccccccttcttttcccagctcctctgcatcccttgctgggcaacttcagccccctaaaatgggggaaagaaacgatgacattgcaggcagaatatgagattgttcagcctctgcagccacctccttcctgtctagatattttatgggaagggaacgagaagggggaaacagcgaaggtgctctgaaaatcagtcagacacaatgcaatagggagatggagaggagggaaaggagaatgag

SEQ ID NO: 459757 - DNA, 415 bp, Homo Sapiens
  misc_feature (381)..(381): n is a, c, g, or t
ctgcttgaattttttatttgtttgaaatgttaaatttagccaaataagtattttttttccaaaatggcccaacataatttattttttatgttaaaatgtacagagttcttttgaaagtacttgctagaaaggggaaaaaaagatattacatacgagaagagaaagggaagctggctggcccagggagtgcgtgacatgtgttctaaatcacttcattttttaaagatgagttgaagctacataaaatgggaactgggacattttttcaacatagggttttcaggctcatgttcaggataggtcaggcttgggtaactgccaatggatcaacattaaaaaggggccaggcacaacagcttaccctgttttaatcttcatccngggccccttaaaaatggataaaaggcacctaacc

SEQ ID NO: 459758 - DNA, 501 bp, Homo Sapiens
ccaaaatggctcaacataatttattttttatgttaaaatgtacagagttcttttgaaagtacttgctagaaaggggaaaaaaaggtattacatacaaggtgtggtagggaggccggctgccaaggagcgcgtgacatggagagatacaaaggcatctaggcaccccttccccttagcttacaagtcaccatgaacaaagtacaaagaggttacaaaacaggaaaagcaaatataaacagacaggatagacgtggcttcctttgtacatgcggcttttagaggcatctggagctctattcacacacgctagagatctctttaaagagaatttatctttcttaaaatagtttttaatattctacaacaaagataaaaaattttaaagatggaatgaaatgaaaaagctcttattttaaaaggcatcaaagtcactaacagtgagtttttaaatttcttttttagaagattacccaagtttaccttgcctaaaaatacattttt

SEQ ID NO: 459759 - DNA, 541 bp, Homo Sapiens
  misc_feature (31)..(31): n is a, c, g, or t
agttcctcctgcacagacagaagacagatgnaacagttagatcaaaacactcaattgccacaggggttatgcatggcccatgaccccatcaaaagcttcccaggtcgggatacagtagagggcctcagaatagtgggaccaagccctaggccccatacttcccagaaggagccccaggcctgcaggggcatctgaaaggatggagtcccgtggcccagctgggcctcaggggacagggagtccccctcaagagaggctgcggctgacaaggggctggagcccacaaggaggctgtggagcccgctcccagagcactccgagttcagacacacttccaccagctctcctaggctccccagcttctgtgtcaggtacaggtgggacagacatgtcttcactaacgcccactccgctctatgagggtcttggtgtggctgcctacccctcgggggcccacaggggtggcggtgctgttggcatatgtgtcataactgttgtctgaacatacggagagccacatcggagacctctacaccatcgc

SEQ ID NO: 459760 - DNA, 482 bp, Homo Sapiens
  misc_feature (17)..(17): n is a, c, g, or t
  misc_feature (27)..(27): n is a, c, g, or t
  misc_feature (35)..(35): n is a, c, g, or t
  misc_feature (61)..(61): n is a, c, g, or t
  misc_feature (131)..(131): n is a, c, g, or t
ttggtggagccaaaacncccctacaanccccggcnggccgggagatgccaaacacatgttngggatccaaggtaaggccttaaagtttaaattaccctagaataattgcctgaacccatctatttgctttntcctatttagatctgtcccatacagataatgtgcaattagtgagatttaatactgcccaaattattgggaatgtgagttataaaaatgtgatgccttatggtccagattaaactatgcatgcagtcaacaagtaattatctttttgtaacagactgtgatagagacaacagcagagctctccttctaggtgcttccagtagagtaggacctcagaccttagggctgagagggattatgcacgacagaggtgacttcagatgacttctagaaaatgttgtctaaagctactttcaaaaattttatgtaacagtaaaacttattcttttgttgtatagttctatggattttca

SEQ ID NO: 459761 - DNA, 618 bp, Homo Sapiens
gcacagccacctcatcagctcctgcaaaggcaggtgcccggcctcctacactcgatttaccacaatgttaaaacacgaaagagccagacacgaaaacaccgaggagcccagaaggcaagaaatggaccctggcctttctaaacttgcttttctagtcagtcctgtgcctttccggagagatgaaaattcggctcctaagaaacagactgaaaaggcaaaatgtaaagcatctgtgtttgaggctctggactctgcccttaaagacatctgtgaccaaattaaagctgaaaagaaaagggggagcttgccggacaacagcatcctgcaccgcctcatcagtgagctgctgccagatgttcccgagaggaactcatccctgagagcgctgaggaggagccccctgcaccagcctctccacccactgcctcccgatggtgctattcattgtccaccctaccagaatgactgcgggagaatgccccgcagttgcctctttccaaggacgtgggacacaggccaacaggcagtttgccaccaccaaggaccgtgggcggtggcattccaaggaccgcggagttccccttaggaagtttatttcattccatttttggatttgac

SEQ ID NO: 459762 - DNA, 473 bp, Homo Sapiens
ttttttttgttcgcaagtagggacatttattgtttctcagaattgaaggaaggggaagggtgagtctgggtcccagaaggggtggaccgtgggattggaatcccatccagactccactccctcttcacagaagcttagcgcctcagatgggctgtgtcctctggccccgcacacatgggcttcctgttgggagctgagcagctccaccagcttccacttgcaaatgtagcgactggtgcacaagtgttcctatgcatatggggggtgacaggaggcagggccctgggactggcagcccctgcctaaaaccccatgagagaaggagttcccccaaaggtggtgctgttcccagaaaggaagggaacagcccgtgctctccaccctgtcctgcttggccattttcttcacagatgtcacctgtccttccaggcacagctgctatttctgcctgatgcttggccagtttgcatggt

SEQ ID NO: 459763 - DNA, 167 bp, Homo Sapiens
ttaatttctttatacttttcaatgaaaacattgacactggaggctggaagataatagagcaaagccttcaaaatgagaggaaatttatccctagctaaacttacaaatgtgaggatagaagaaaaatgtgtcccacaccacgcaccctttcttagatattggtggat

SEQ ID NO: 459764 - DNA, 473 bp, Homo Sapiens
  misc_feature (12)..(12): n is a, c, g, or t
  misc_feature (30)..(30): n is a, c, g, or t
  misc_feature (45)..(45): n is a, c, g, or t
gccattaaggtnacctttagaaaatcctgnaaatgtcctcaaaangctatcctaatgtcaagggatgtccgctaaaaaaaccaaataagtataatgaaataaaagcaccctttctttcatttcatacatggtgttcaataatagtaaacaataattcttaaataaaaaaatccacaacataattttatgctaaattgtcaaatctcctgatcaagctatggttagctttaatactttgggactaaattccactttgcaatacagaaaatgttaaattactgaagttataaaatgagggtatttcccatctagtagatcaaactgtgccttcatcagggagcatagctttcttcttctcagtctgaaaccaaattgaagtatgttcctacccccaccagcaagccctaagatgatccatctaccgttgttttaactttccctccactacactcctgtcctaaccatcctttcgc

SEQ ID NO: 459765 - DNA, 291 bp, Homo Sapiens
aaagaagatttattttggattaagtgatttcatgatgcaacatggttttaaacaaaaatagagatcagtatgaaaataaaacaaattgtacacattaaaatatctttccctcaaagcatttcggaatcataaaaaatacaacaaaagagtcaggggttcagttgagaataagaatacagacttcccagaaaataaacaactagtcccagttcagagtcctaggccccatataataccacccagaaaccatttctaggatgtcaacaatctggcattatttactttgaaaaa

SEQ ID NO: 459766 - DNA, 384 bp, Homo Sapiens
tccttctccccagccgcctacccctgttctacggccttcttgagacatgggtttatttcctgactggatctggacatttatcagccctgtagcccctccttcaaggtgcagccctcaggacgaagatgcacgtggaatatcagttctccgatattcttttatttgacagactcctgtgccccacctgaagttaaaggagggtgacatgcatcagtcagagacagaccagtccttctggtcttgtgtagagtgaggctgggagaagcaggggacagtggagggcaaagggctgctgtagaaacaccatgggttttggagccagcacgattggttttgaaccctagctgctctactacaagctgtggggccccaagtcctcgtgcc

SEQ ID NO: 459767 - DNA, 305 bp, Homo Sapiens
  misc_feature (248)..(248): n is a, c, g, or t
gaatcttgaatattcatgtttattgtccattttttacttcagaatgactggtgtttttaggagtgggtggagcttggaaattgagaaagggaagagaacaaggcagggaccaaacagggacatggccaagacaagacagttgtacagctgactctcaggccttcgtggaaaccatatggcaggaaggctttgggggcatttaccctttgccagctagactccagtcctgcactggattcaacactggntcccatctgatggaaacttggagaagcccatgcatgactcagcgttctccagtgggg

SEQ ID NO: 459768 - DNA, 170 bp, Homo Sapiens
tgagatggagtctcgaaaaataaaataaaacacattgaggagatttagtaacattaataggtcttctgacccatgaacatggtatgtcgatttcaatattctttaatttcccacagtaatcttttgtaggttttagtgaacatcttggccattctgctccctagagggcc

SEQ ID NO: 459769 - DNA, 469 bp, Homo Sapiens
  misc_feature (434)..(434): n is a, c, g, or t
  misc_feature (447)..(447): n is a, c, g, or t
gaacttttaaaaaatatatgttcatttttagaaaaagtcattactgtgcttgctgcctgtctggaaagtgagaatcaaaatgctcagaggattggagcagctgccctttggtcctgatttacaattatcagaaggtcagttttaaaaatcattgttacacctggggagcaaacaacaaggtataacccaggtataaactcttaggatacatccaaaggtgtcaagagttacagcaaaagaaaaaagacaaaattaaagatccatgttccctttgctgattcatacaattagtaaaccatcagttgaaatctttttatttaatcatttcaacagaatgtcttcagtttaggaaggggatctctggaactgacttttttcctctttaattttaaattggatttacctggatttatttgccctttttagggatgggnttggtttccttcntaaaagacggtttccagggggg

SEQ ID NO: 459770 - DNA, 800 bp, Homo Sapiens
  misc_feature (22)..(22): n is a, c, g, or t
  misc_feature (35)..(35): n is a, c, g, or t
  misc_feature (43)..(43): n is a, c, g, or t
  misc_feature (57)..(57): n is a, c, g, or t
  misc_feature (68)..(68): n is a, c, g, or t
  misc_feature (91)..(91): n is a, c, g, or t
  misc_feature (142)..(176): n is a, c, g, or t
  misc_feature (506)..(624): n is a, c, g, or t
  misc_feature (753)..(753): n is a, c, g, or t
ggaaaagctgtgggcatggggncaatttggctccnttgggccnaaaaacccaatcanccctggacttnccggatggtttaattaagggggnagctttggtcaacagggttccctacatggaaaatacgcttggtaacctacnnnnnnnnnnnnnnnnnnnnnnnnnnnnnnnnnnntctcttctccttattctccttcaagcggtgctctttcttctattttgattgcatcaagcttttcaaaatgggaacatattcactgtctcagaggtttccttttctcacaaaggatgctccacttccagtcaggctatgcagtgaatgcccattctgtgccttgtggaattacactgctagctcccattctgaggagtgtttatcttccaaagtgcctctctacctgttttctttgacattcacaatctgggagaccaggcaccatggtccctgcttgacaggtaaagcaagttgggcccagataactgaagtgacttactaaaagttcannnnnnnnnnnnnnnnnnnnnnnnnnnnnnnnnnnnnnnnnnnnnnnnnnnnnnnnnnnnnnnnnnnnnnnnnnnnnnnnnnnnnnnnnnnnnnnnnnnnnnnnnnnnnnnnnnnnnnnctctacaaatattttaaaaattagccgagcatggtgcgcatgcctatagtcccagctactgagatgctaaggcgaaaggattcttgagcccagaatgagccaagaccatccactgcactccagcctagnacactgtgagagactctgcctcaaacaaaaaatcaaaacaagttcac

SEQ ID NO: 459771 - DNA, 455 bp, Homo Sapiens
  misc_feature (421)..(421): n is a, c, g, or t
  misc_feature (445)..(445): n is a, c, g, or t
ttttttttctccatggtcatattttattcattattctactttctgcacactgtatatgcttgagataaaacaataaccaagatgataaatacataaagactgttagttgtagtctgggagcctaaatcagaggagtattcttgcttaatgtcccatggttctagcttttctccacagagcaggatttagacgttttcattactacacgaagaagtcatcatttgtcctaagatagacaaatggggaatttaaaagttatacaaaagacatctttttcttggggttagagatgtctaatacatcatttctacagggattaatttttttaatcatatgagccacctgaccccattgcattatatgggattaggaaaactctctaggaggcaaggaatatccaaatcactctgtggggtggggnttttgtggaaattgtcctgtccgnaaattgaggt

SEQ ID NO: 459772 - DNA, 416 bp, Homo Sapiens
  misc_feature (15)..(15): n is a, c, g, or t
  misc_feature (34)..(34): n is a, c, g, or t
  misc_feature (344)..(344): n is a, c, g, or t
gggggtccgcatttncttaactcgttcccaccgntcactggagaggccctctctttccaggggtctcttcagttttctctcaagactgttaattccatctcgcttccctcggcaacagtcattctgggtggaagataggaaagttcaattttcgcctatgggtcacctattactaaaactaatgaagctaaagagaacatgtaaattagaaatcagatgatcccccaatctacacgggaaaaaaatactgcatcttaaccactcccctcccagtcttgtataagacaaccagtttggggtttaacatacttccttcccctatcactgttaatgctaccaaaggntcactgggaaaaagggaatgttaaagacgtgattacccttcccaattaacccaaccaataccagaaggtggg

SEQ ID NO: 459773 - DNA, 502 bp, Homo Sapiens
agtctagaactggaccatgcagtttccttccaatgaaggtgccctaaccttgacgctgagagtggtaagagattggactcttagagcttgtcctttcgagaggttcttgagtcctttaatacaaaattttgaccctccttctttaaagctatggacattgaagaaattggaaggaagggaggtacagttatattctttccctagggcattataggaaaaaagtcacaattccatagcaaaaaaagccaattgagtgatttccttgagtaatttttactgtaagtgatttgctgcctctgcttaaaagtcaagaagtagcatcttctttaagttctgcctcaccaggcttccagctacacttaaaattaattagctaagaatgtaggaaatcatctttctgtgttctcaatgcccaaagtcagccttgaaagtaaagtgtacttctcctttgcaatgacgaaaaggaggtatgttttagaaatagactttgactaactagtcc

SEQ ID NO: 459774 - DNA, 381 bp, Homo Sapiens
  misc_feature (207)..(240): n is a, c, g, or t
atgggggtacttgtattccagtaaagaaaataccttaacataggcccaacaattgtcaattggatccctaatttaagttaagaattgttaacatcgccctgcatattttatcccaattccagagcttccttcccattgcccaagattttattttcctattttacaaccaattctcaataagcctccaataaggaatgaatcattagnnnnnnnnnnnnnnnnnnnnnnnnnnnnnnnnnncaactcaagatgttgtagtctcttcaaatttatctcagaagcacgtgaattgttggcgtccacacagggatgcaatcgtgatattacggaactgttttgatgttgaaacagaagtggccagaagatgtttattttaatggc
